United States Patent Application Publication US 2025/0311734 A1 - sequence listing, part 8

SEQ ID NO: 31790 - protein, 485 aa, Bacillus sp.
HHDDTNGTIMQYFEWNVPNDGQHWNRLHNNAQNLKNAGITAIWIPPAWKGTSQNDVGYGAYDLYDLGEFNQKGTVRTKYGTKAELERAIRSLKANGIQVYGDVVMNHKGGADFTERVQAVEVNPQNRNQEVSGTYQIEAWTGFNFPGRGNQHSSFKWRWYHFDGTDWDQSRQLANRIYKFRGDGKAWDWEVDTENGNYDYLMYADVDMDHPEVINELNRWGVWYANTLNLDGFRLDAVKHIKFSFMRDWLGHVRGQTGKNLFAVAEYWKNDLGALENYLSKTNWTMSAFDVPLHYNLYQASNSSGNYDMRNLLNGTLVQRHPSHAVTFVDNHDTQPGEALESFVQGWFKPLAYATILTREQGYPQVFYGDYYGIPSDGVPSYRQQIDPLLKARQQYAYGRQHDYFDHWDVIGWTREGNASHPNSGLATIMSDGPGGSKWMYVGRQKAGEVWHDMTGNRSGTVTINQDGWGHFFVNGGSVSVWVKR

SEQ ID NO: 31791 - protein, 485 aa, Bacillus sp.
HHDGTNGTIMQYFEWNVPNDGQHWNRLHNNAQNLKNAGITAIWIPPAWKGTSQNDVGYGAYDLYDLGEFNQKGTVRTKYGTKAELERAIRSLKANGIQLYGDVVMNHKGGADFTERVQAVEVNPQNRNQEVSGTYQIEAWTGFNFPGRGNQHSSFKWRWYHFDGTDWDQSRQLANRIYKFRGDGKAWDWEVDTENGNYDYLMYADVDMDHPEVINELNRWGVWYANTLNLDGFRLDAVKHIKFSFMRDWLGHVRGQTGKNLFAVAEYWKNDLGALENYLSKTNWTMSAFDVPLHYNLYQASNSSGNYDMRNLLNGTLVQRHPSHAVTFVDNHDTQPGEALESFVQGWFKPLAYATILTREQGYPQVFYGDYYGIPSDGVPSYRQQIDPLLKARQQYAYGRQHDYFDHWDVIGWTREGNASHPNSGLATIMSDGPGGSKWMYVGRQKAGEVWHDMTGNRSGTVTINQDGWGHFFVNGGSVSVWVKR

SEQ ID NO: 31792 - protein, 485 aa, Bacillus sp.
HHDGTNGTIMQYFEWNVPNDGQHWNRLHNNAQNLKNAGITAIWIPPAYKGTSQNDVGYGAYDLYDLGEFNQKGTVRTKYGTKAELERAIRSLKANGIQVYGDVVMNHKGGADFTERVQAVEVNPQNRNQEVSGTYQIEAWTGFNFPGRGNQHSSFKWRWYHFDGTDWDQSRQLANRIYKFRGDGKAWDWEVDTENGNYDYLMYADVDMDHPEVINELNRWGVWYANTLNLDGFRLDAVKHIKFSFMRDWLGHVRGQTGKNLFAVAEYWKNDLGALENYLSKTNWTMSAFDVPLHYNLYQASNSSGNYDMRNLLNGTLVQRHPSHAVTFVDNHDTQPGEALESFVQGWFKPLAYATILTREQGYPQVFYGDYYGIPSDGVPSYRQQIDPLLKARQQYAYGRQHDYFDHWDVIGWTREGNASHPNSGLATIMSDGPGGSKWMYVGRQKAGEVWHDMTGNRSGTVTINQDGWGHFFVNGGSVSVWVKR

SEQ ID NO: 31793 - protein, 485 aa, Bacillus sp.
HHDGTNGTIMQYFEWNVPNDGQWWNRLHNNAQNLKNAGITAIWIPPAWKGTSQNDVGYGAYDLYDLGEFNQKGTVRTKYGTKAELERAIRSLKANGIQVYGDVVMNHKGGADFTERVQAVEVNPQNRNQEVSGTYQIEAWTGFNFPGRGNQHSSFKWRWYHFDGTDWDQSRQLANRIYKFRGDGKAWDWEVDTENGNYDYLMYADVDMDHPEVINELNRWGVWYANTLNLDGFRLDAVKHIKFSFMRDWLGHVRGQTGKNLFAVAEYWKNDLGALENYLSKTNWTMSAFDVPLHYNLYQASNSSGNYDMRNLLNGTLVQRHPSHAVTFVDNHDTQPGEALESFVQGWFKPLAYATILTREQGYPQVFYGDYYGIPSDGVPSYRQQIDPLLKARQQYAYGRQHDYFDHWDVIGWTREGNASHPNSGLATIMSDGPGGSKWMYVGRQKAGEVWHDMTGNRSGTVTINQDGWGHFFVNGGSVSVWVKR

SEQ ID NO: 31794 - protein, 485 aa, Bacillus sp.
HHDGTNGTIMQYFEWNVPNDGQHWNRLHNNAQNLKNAGITAIWIPPAWKGTSQNDVGYGAYDLYDLGEFNQKGTVRTKYGTKAELERAIRSLKANGIQVYGDVVMNHKGGADFTERVQAVEVNPQNRNQEVSGTYQIEAWTGFNFPGRGNQHSSFKWRWYHFDGTDWDQSRQLANRIYKFRGDGKDWDWEVDTENGNYDYLMYADVDMDHPEVINELNRWGVWYANTLNLDGFRLDAVKHIKFSFMRDWLGHVRGQTGKNLFAVAEYWKNDLGALENYLSKTNWTMSAFDVPLHYNLYQASNSSGNYDMRNLLNGTLVQRHPSHAVTFVDNHDTQPGEALESFVQGWFKPLAYATILTREQGYPQVFYGDYYGIPSDGVPSYRQQIDPLLKARQQYAYGRQHDYFDHWDVIGWTREGNASHPNSGLATIMSDGPGGSKWMYVGRQKAGEVWHDMTGNRSGTVTINQDGWGHFFVNGGSVSVWVKR

SEQ ID NO: 31795 - protein, 485 aa, Bacillus sp.
HHDGTNGTIMQYFEWNVPNDGQHWNRLHNNAQNLKNAGITAIWIPPAWKGTSQNDVGYGAYDLYDLGEFNQKGTVRTKYGTKAELERAIRSLKANGIQVYGDVVMNHKGGADFTERVQAVEVNPQNRNQEVSGTYQIEAWTGFNFPGRGNQHSSFKWRWYHFDGTDWDQSRQLANRIYKFRGDGKAWDWEVDTENGNYDYLMYADVDMDHPEVINELNRWGVWYANTLNLDGFRLDAVKHIKFSFMRDWLGHVRGQTGKNLFAVAEYWKNDLGALENYLSKTNWTMSAFDVPLHYNLYQASNSSGNYDMRNLLNGTLVQRHPSHAVTCVDNHDTQPGEALESFVQGWFKPLAYATILTREQGYPQVFYGDYYGIPSDGVPSYRQQIDPLLKARQQYAYGRQHDYFDHWDVIGWTREGNASHPNSGLATIMSDGPGGSKWMYVGRQKAGEVWHDMTGNRSGTVTINQDGWGHFFVNGGSVSVWVKR

SEQ ID NO: 31796 - protein, 485 aa, Bacillus sp.
HHDGTNGTIMQYFEWNVPNDGQHWNRLHNNAQNLKNAGITAIWIPPAWKGTSQNDVGYGAYDLYDLGEFNQKGTVRTKYGTKAELERAIRSLKANGIQVYGDVVMNHKGGADFTERVQAVEVNPQNRNQEVSGTYQIEAWTGFNFPGRGNQHSSFKWRWYHFDGTDWDQSRQLANRIYKFRGDGKAWDWEVDTENGNYDYLMYADVDMDHPEVINELNRWGVWYANTLNLDGFRLDAVKHIKFSFMRDWLGHVRGQTGKNLFAVAEYWKNDLGALENYLSKTNWTMSAFDVPLHYNLYQASNSSGSYDMRNLLNGTLVQRHPSHAVTFVDNHDTQPGEALESFVQGWFKPLAYATILTREQGYPQVFYGDYYGIPSDGVPSYRQQIDPLLKARQQYAYGRQHDYFDHWDVIGWTREGNASHPNSGLATIMSDGPGGSKWMYVGRQKAGEVWHDMTGNRSGTVTINQDGWGHFFVNGGSVSVWVKR

SEQ ID NO: 31797 - protein, 485 aa, Bacillus sp.
HHDGTNGTIMQYFEWNVPNDGQHWNRLHNNAQNLKNAGITAIWIPPAWKGTSQNDVGYGAYDLYDLGEFNQKGTVRTKYGTKAELERAIRSLKANGIQVYGDVVMNHKGGADFTERVQAVEVNPQNRNQEVSGTYQIEAWTGFNFPGRGNQHSSFKWRWYHFDGTDWDQSRQLANRIYKFRGDGKAWDWEVDTENGNYDYLMYADVDMDHPEVINELNRWGVWYANTLNLDGFRLDAVKHIKFSFMRDWLGHVRGQTGKNLFAVAEYWKNDLGALENYLSKTNWTMSAFDVPLHYNLYQASNSSGNYDMRNLLNGTLVQRHPSHAVTFVDNHDTQPGEALESFVQGWFKPLAYATILTREQGYPQVFYGDYYGIPSDGVPSYRQQIDPLLKARQQYAYGRQHDYFDHWDVIGWTREGNASHPNSGLAAIMSDGPGGSKWMYVGRQKAGEVWHDMTGNRSGTVTINQDGWGHFFVNGGSVSVWVKR

SEQ ID NO: 31798 - protein, 485 aa, Bacillus sp.
HHDGTNGTIMQYFEWNVPNDGQHWNRLHNNAQNLKNAGITAIWIPPAWKGTSQNDVGYGAYDLYDLGEFNQKGTVRTKYGTKAELERAIRSLKANRIQVYGDVVMNHKGGADFTERVQAVEVNPQNRNQEVSGTYQIEAWTGFNFPGRGNQHSSFKWRWYHFDGTDWDQSRQLANRIYKFRGDGKAWDWEVDTENGNYDYLMYADVDMDHPEVINELNRWGVWYANTLNLDGFRLDAVKHIKFSFMRDWLGHVRGQTGKNLFAVAEYWKNDLGALENYLSKTNWTMSAFDVPLHYNLYQASNSSGNYDMRNLLNGTLVQRHPSHAVTFVDNHDTQPGEALESFVQGWFKPLAYATILTREQGYPQVFYGDYYGIPSDGVPSYRQQIDPLLKARQQYAYGRQHDYFDHWDVIGWTREGNASHPNSGLATIMSDGPGGSKWMYVGRQKAGEVWHDMTGNRSGTVTINQDGWGHFFVNGGSVSVWVKR

SEQ ID NO: 31799 - protein, 485 aa, Bacillus sp.
HHDGTNGTIMQYFEWNVPNDGQHWNRLHNNAQNLKNAGITAIWIPPAWKGTSQNDVGYGAYDLYDLGEFNQKGTVRTKYGTKAELERAIRSLKANGIQVYGDVVMNHKGGADFTERVQAVEVNPQNRNQEVSGTYQIEAWTGFNFPGRGNQHSSFKWRWYHFDGTDWDQSRQLANRIYKFRGDGKAWDWEVDTENGNYDYLMYADVDMDHPEVINELNSWGVWYANTLNLDGFRLDAVKHIKFSFMRDWLGHVRGQTGKNLFAVAEYWKNDLGALENYLSKTNWTMSAFDVPLHYNLYQASNSSGNYDMRNLLNGTLVQRHPSHAVTFVDNHDTQPGEALESFVQGWFKPLAYATILTREQGYPQVFYGDYYGIPSDGVPSYRQQIDPLLKARQQYAYGRQHDYFDHWDVIGWTREGNASHPNSGLATIMSDGPGGSKWMYVGRQKAGEVWHDMTGNRSGTVTINQDGWGHFFVNGGSVSVWVKR

SEQ ID NO: 31800 - protein, 485 aa, Bacillus sp.
HHDGTNGTIMQYFEWNVPNDGQHWNRLHNNAQNLKNAGITAIWIPPAWKGTSQNDVGYGAYDLYDLGEFNQKGTVRTKYGTKAELERAIRSLKANGIQVYGDVVMNHKGGADFTERVQAVEVNPQNRNQEVSGTYQIEAWTGFNFPGRGNQHSSFKWRWYHFDGTDWDQSRQLANRIYKFRGDGKAWDWEVDTENGNYDYLMYADVDMDHPEVINELNRWGVWYANTLNLDGFRLDAVKHIKFSFMRDWLGHVRGQTGKNLFAVAEYWKNDLGALENYLSKTNWTMSAFDVPLHYNLYQASNSSGNYDMRNLLNGTLVQRHPSHAVTFVDNHDTQPGEALESFVQGWFKPLAYATILTREVGYPQVFYGDYYGIPSDGVPSYRQQIDPLLKARQQYAYGRQHDYFDHWDVIGWTREGNASHPNSGLATIMSDGPGGSKWMYVGRQKAGEVWHDMTGNRSGTVTINQDGWGHFFVNGGSVSVWVKR

SEQ ID NO: 31801 - protein, 485 aa, Bacillus sp.
HHDGTNGTIMQYFEWNVPNDGQHWNRLHNNAQNLKNAGITAIWIPPAWKGTSQNDVGYGAYDLYDLGEFNQKGTVRTKYGTKAELERAIRSLKANGIQVYGDVVMNHKGGADFTERVQAVEVNPQNRNQEVSGTYQIEAWTGFNFPGRGNQHSSFKWRWYHFDGTDWDQSRQLANRIYKFRGDGKAWDWEVDTENVNYDYLMYADVDMDHPEVINELNRWGVWYANTLNLDGFRLDAVKHIKFSFMRDWLGHVRGQTGKNLFAVAEYWKNDLGALENYLSKTNWTMSAFDVPLHYNLYQASNSSGNYDMRNLLNGTLVQRHPSHAVTFVDNHDTQPGEALESFVQGWFKPLAYATILTREQGYPQVFYGDYYGIPSDGVPSYRQQIDPLLKARQQYAYGRQHDYFDHWDVIGWTREGNASHPNSGLATIMSDGPGGSKWMYVGRQKAGEVWHDMTGNRSGTVTINQDGWGHFFVNGGSVSVWVKR

SEQ ID NO: 31802 - protein, 485 aa, Bacillus sp.
HHDGTNGTIMQYFEWNVPNDGQHWNRLHNNAQNLKTAGITAIWIPPAWKGTSQNDVGYGAYDLYDLGEFNQKGTVRTKYGTKAELERAIRSLKANGIQVYGDVVMNHKGGADFTERVQAVEVNPQNRNQEVSGTYQIEAWTGFNFPGRGNQHSSFKWRWYHFDGTDWDQSRQLANRIYKFRGDGKAWDWEVDTENGNYDYLMYADVDMDHPEVINELNRWGVWYANTLNLDGFRLDAVKHIKFSFMRDWLGHVRGQTGKNLFAVAEYWKNDLGALENYLSKTNWTMSAFDVPLHYNLYQASNSSGNYDMRNLLNGTLVQRHPSHAVTFVDNHDTQPGEALESFVQGWFKPLAYATILTREQGYPQVFYGDYYGIPSDGVPSYRQQIDPLLKARQQYAYGRQHDYFDHWDVIGWTREGNASHPNSGLATIMSDGPGGSKWMYVGRQKAGEVWHDMTGNRSGTVTINQDGWGHFFVNGGSVSVWVKR

SEQ ID NO: 31803 - protein, 485 aa, Bacillus sp.
HHDGTNGTIMQYFEWNVPNDGQHWNRLHNNAQNLKNAGITAIWIPPAWKGTSQNDVGYGAYDLYDLGEFNQKGTVRTKYGTKAELERAIRSLKANGIQVYGDVVMNHKGGADFTERVQAVEVNPQNRNQEVSGTYQIEAWTGFNFPGRGNQHSSFKWRWYHFDGTDWDQSRQLANRIYKFRGDGKAWDWEVDTENGNYDYLMYADVDMDHPEVINELNRWGVWYANTLNLDGFRLDAVKHIKFSFMRDWLGHVRGQTGKNLFAVAEYWKNDLGALENYLSKTNWTMSAFDVPLHYNLYQASNSSGNYDMRNLLNTTLVQRHPSHAVTFVDNHDTQPGEALESFVQGWFKPLAYATILTREQGYPQVFYGDYYGIPSDGVPSYRQQIDPLLKARQQYAYGRQHDYFDHWDVIGWTREGNASHPNSGLATIMSDGPGGSKWMYVGRQKAGEVWHDMTGNRSGTVTINQDGWGHFFVNGGSVSVWVKR

SEQ ID NO: 31804 - protein, 485 aa, Bacillus sp.
HHDGTNGTIMQYFEWNVPNDGQHWNRLHNNAQNLKNAGITAIWIPPAWKGTSQNDVGYGAYDLYDLGEFNQKGTVRTKYGTKAELERAIRSLKANGIQVYGDVVMNHKGGADFTERVQAVEVNPQNRNQEVSGTYQIEAWTGFNFPGRGNQHSSFKWRWYHFDGTDWDQSRQLANRIYKFRGDGKAWDWEVDTENGNYDVLMYADVDMDHPEVINELNRWGVWYANTLNLDGFRLDAVKHIKFSFMRDWLGHVRGQTGKNLFAVAEYWKNDLGALENYLSKTNWTMSAFDVPLHYNLYQASNSSGNYDMRNLLNGTLVQRHPSHAVTFVDNHDTQPGEALESFVQGWFKPLAYATILTREQGYPQVFYGDYYGIPSDGVPSYRQQIDPLLKARQQYAYGRQHDYFDHWDVIGWTREGNASHPNSGLATIMSDGPGGSKWMYVGRQKAGEVWHDMTGNRSGTVTINQDGWGHFFVNGGSVSVWVKR

SEQ ID NO: 31805 - protein, 485 aa, Bacillus sp.
HHDGTNGTIMQYFEWNVPNDGQHWNRLHNNAQNLKNAGITAIWIPPAWKGTSQNDVGYGAYDLYDLGEFNQKGTVRTKYGTKAELERAIRSLWANGIQVYGDVVMNHKGGADFTERVQAVEVNPQNRNQEVSGTYQIEAWTGFNFPGRGNQHSSFKWRWYHFDGTDWDQSRQLANRIYKFRGDGKAWDWEVDTENGNYDYLMYADVDMDHPEVINELNRWGVWYANTLNLDGFRLDAVKHIKFSFMRDWLGHVRGQTGKNLFAVAEYWKNDLGALENYLSKTNWTMSAFDVPLHYNLYQASNSSGNYDMRNLLNGTLVQRHPSHAVTFVDNHDTQPGEALESFVQGWFKPLAYATILTREQGYPQVFYGDYYGIPSDGVPSYRQQIDPLLKARQQYAYGRQHDYFDHWDVIGWTREGNASHPNSGLATIMSDGPGGSKWMYVGRQKAGEVWHDMTGNRSGTVTINQDGWGHFFVNGGSVSVWVKR

SEQ ID NO: 31806 - protein, 485 aa, Bacillus sp.
HHDGTNGTIMQFFEWNVPNDGQHWNRLHNNAQNLKNAGITAIWIPPAWKGTSQNDVGYGAYDLYDLGEFNQKGTVRTKYGTKAELERAIRSLKANGIQVYGDVVMNHKGGADFTERVQAVEVNPQNRNQEVSGTYQIEAWTGFNFPGRGNQHSSFKWRWYHFDGTDWDQSRQLANRIYKFRGDGKAWDWEVDTENGNYDYLMYADVDMDHPEVINELNRWGVWYANTLNLDGFRLDAVKHIKFSFMRDWLGHVRGQTGKNLFAVAEYWKNDLGALENYLSKTNWTMSAFDVPLHYNLYQASNSSGNYDMRNLLNGTLVQRHPSHAVTFVDNHDTQPGEALESFVQGWFKPLAYATILTREQGYPQVFYGDYYGIPSDGVPSYRQQIDPLLKARQQYAYGRQHDYFDHWDVIGWTREGNASHPNSGLATIMSDGPGGSKWMYVGRQKAGEVWHDMTGNRSGTVTINQDGWGHFFVNGGSVSVWVKR

SEQ ID NO: 31807 - protein, 485 aa, Bacillus sp.
HHDGTNGTIMQYFEWNVPNDGQHWNRLHNNAQNLKNAGITAIWIPPAWKGTSQNDVGYGAYDLYDLGEFNQKGTVRTKYGTKAELERAIRSLKANGIQVYGDVVMNHKGGADFTERVQAVEVNPQNRNQEVSGTYQIEAWTGFNFPGRGNQHSSFKWRWYHFDGTDWDQSRQLANRIYKFRGDGKAWDWEVDTENGNYDYLMYADVDMDHPEVINELNRWGVWYANTLNLDGFRLDAVKHIKFSFMRDWLGHVRGQTGKNLFAVAEYWKNDLGALENYLSKTNWTMSAFDVPLHYSLYQASNSSGNYDMRNLLNGTLVQRHPSHAVTFVDNHDTQPGEALESFVQGWFKPLAYATILTREQGYPQVFYGDYYGIPSDGVPSYRQQIDPLLKARQQYAYGRQHDYFDHWDVIGWTREGNASHPNSGLATIMSDGPGGSKWMYVGRQKAGEVWHDMTGNRSGTVTINQDGWGHFFVNGGSVSVWVKR

SEQ ID NO: 31808 - protein, 485 aa, Bacillus sp.
HHDGTNGTIMQYFEWNVPNDGQHWGRLHNNAQNLKNAGITAIWIPPAWKGTSQNDVGYGAYDLYDLGEFNQKGTVRTKYGTKAELERAIRSLKANGIQVYGDVVMNHKGGADFTERVQAVEVNPQNRNQEVSGTYQIEAWTGFNFPGRGNQHSSFKWRWYHFDGTDWDQSRQLANRIYKFRGDGKAWDWEVDTENGNYDYLMYADVDMDHPEVINELNRWGVWYANTLNLDGFRLDAVKHIKFSFMRDWLGHVRGQTGKNLFAVAEYWKNDLGALENYLSKTNWTMSAFDVPLHYNLYQASNSSGNYDMRNLLNGTLVQRHPSHAVTFVDNHDTQPGEALESFVQGWFKPLAYATILTREQGYPQVFYGDYYGIPSDGVPSYRQQIDPLLKARQQYAYGRQHDYFDHWDVIGWTREGNASHPNSGLATIMSDGPGGSKWMYVGRQKAGEVWHDMTGNRSGTVTINQDGWGHFFVNGGSVSVWVKR

SEQ ID NO: 31809 - protein, 485 aa, Bacillus sp.
HHDGTNGTIMQYFEWNVPNDGQHWNRLHNNAQNLKNAGITAIWIPPAWKGTSQNDVGYGAYDLYDLGEFNQKGTVRTKYGTKAELERAIRSLKANGIQVYGDVVMNHKGGADFTERVQAVEVNPQNRNQEVSGTYQIEAWTGFNFPGRGNQHSSFKWRWYHFDGTDWDQSRQLANRIYKFRGDGKAWDWEVDTENGNYDYLMYADVDMDHPEVINELNRWGVWYANTLNLDGFRLDAVKHIKFSFMRDWLGHVRGQTGKNLFAVAEYWKNDLGALENYLSKTNWTMSAFDVPLHYNLYQASNSSGNYDMRNLLNGTLVQRRPSHAVTFVDNHDTQPGEALESFVQGWFKPLAYATILTREQGYPQVFYGDYYGIPSDGVPSYRQQIDPLLKARQQYAYGRQHDYFDHWDVIGWTREGNASHPNSGLATIMSDGPGGSKWMYVGRQKAGEVWHDMTGNRSGTVTINQDGWGHFFVNGGSVSVWVKR

SEQ ID NO: 31810 - protein, 485 aa, Bacillus sp.
HHDGTNGTIMQYFEWNVPNDGQHWNRLHNNAQNLKNAGITAIWIPPAWKGTSQNDVGYGAYDLYDLGEFNQKGTVRTKYGTKAELERAIRSLKANGIQVYGDVVMNHKGGADFTERVQAVEVNPQNRNQEVSGTYQIEAWTGFNFPGRGNQHSSFKWRWYHFDGTDWDQSRQLANRIYKFRGDGKAWDWEVDTENGNYDYLMYADVDMDHPEVINELNRWGVWYANTLNLDGFRLDAVKHIKFSFMRDWLGHVRGQTGKNLFAVAEYWKNDLGALENYLSKTNWTMSAFDVPLHYNLYQASNSSGNYDMRNLLNGTLVQRHPSHAVTFVDNHDTQPGEALESFVQGWFKPLAYATILTREQGYPQVFYGDYYGIPSDGVPSYRQQIVPLLKARQQYAYGRQHDYFDHWDVIGWTREGNASHPNSGLATIMSDGPGGSKWMYVGRQKAGEVWHDMTGNRSGTVTINQDGWGHFFVNGGSVSVWVKR

SEQ ID NO: 31811 - protein, 485 aa, Bacillus sp.
HHDGTNGTIMQYFEWNVPNDGQHWNRLHNNAQNLKNAGITAIWIPPAWKGTSQNDVGYGAYDLYDLGEFNQKGTVRTKYGTKAELERAIRSLKANGIQVYGDVVMNHKGGADFTERVQAVEVNPQNRNQEVSGTYQIEAWTGFNFPGRGNQHSSFKWRWYHFDGTDWDQSRQLANRIYKFRGDGKAWDWEVDTEFGNYDYLMYADVDMDHPEVINELNRWGVWYANTLNLDGFRLDAVKHIKFSFMRDWLGHVRGQTGKNLFAVAEYWKNDLGALENYLSKTNWTMSAFDVPLHYNLYQASNSSGNYDMRNLLNGTLVQRHPSHAVTFVDNHDTQPGEALESFVQGWFKPLAYATILTREQGYPQVFYGDYYGIPSDGVPSYRQQIDPLLKARQQYAYGRQHDYFDHWDVIGWTREGNASHPNSGLATIMSDGPGGSKWMYVGRQKAGEVWHDMTGNRSGTVTINQDGWGHFFVNGGSVSVWVKR

SEQ ID NO: 31812 - protein, 485 aa, Bacillus sp.
HHDGTNGTIMQYFEWNVPNDGQHWNRLHNNAQNLKNAGITAIWIPPAWKGTSQNDVGYGAYDLYDLGEFNQKGTVRTKYGTKAELERAIRSLKANGIQVYGDVVMNHKGGADFTERVQAVEVNPQNRNQEVSGTYQIEAWTGFNFPGRGNQHSSFKWRWYHFDGTDWDQSRQLANRIYKFRGDGKAWDWEVDTENGNYDYLMYADVDMDHPEVINELNRWGVWYANTLNLDGFRLDAVKHIKFSFMRDWLGHVRGQTGKNLFAVAEYWKNDLGALENYLSKTNWTMSAFDVPLHYNLYQASNSSGNYDMRNLLNGTLVQRHPSHAVTFVDNHDTQLGEALESFVQGWFKPLAYATILTREQGYPQVFYGDYYGIPSDGVPSYRQQIDPLLKARQQYAYGRQHDYFDHWDVIGWTREGNASHPNSGLATIMSDGPGGSKWMYVGRQKAGEVWHDMTGNRSGTVTINQDGWGHFFVNGGSVSVWVKR

SEQ ID NO: 31813 - protein, 485 aa, Bacillus sp.
HHDGTNGTIMQYFEWNVPNDGQHWNRLHNNAQNLKNAGITAIWIPPAWKGTSQNDVGYGAYDLYDLGEFNQKGTVRTKYGTKAELERAIRSLKANGIQVYGDVVMNHKGGADFTERVQAVEVNPQNRNQEVSGTYQIEAWTGFNFPGRGNQHSSFKWRWYHFDGTDWDQSRQLANRLYKFRGDGKAWDWEVDTENGNYDYLMYADVDMDHPEVINELNRWGVWYANTLNLDGFRLDAVKHIKFSFMRDWLGHVRGQTGKNLFAVAEYWKNDLGALENYLSKTNWTMSAFDVPLHYNLYQASNSSGNYDMRNLLNGTLVQRHPSHAVTFVDNHDTQPGEALESFVQGWFKPLAYATILTREQGYPQVFYGDYYGIPSDGVPSYRQQIDPLLKARQQYAYGRQHDYFDHWDVIGWTREGNASHPNSGLATIMSDGPGGSKWMYVGRQKAGEVWHDMTGNRSGTVTINQDGWGHFFVNGGSVSVWVKR

SEQ ID NO: 31814 - protein, 485 aa, Bacillus sp.
HHDGTNGTIMQYFEWNVPNDGQHWNRLHNNAQNLKNAGITAIWIPPAWKGTSQNDVGYGAYDLYDLGEFNQKGTVRTKYGTKAELERAIRSLKANGIQVYGDVVMNHKGGADFTERVQAVEFNPQNRNQEVSGTYQIEAWTGFNFPGRGNQHSSFKWRWYHFDGTDWDQSRQLANRIYKFRGDGKAWDWEVDTENGNYDYLMYADVDMDHPEVINELNRWGVWYANTLNLDGFRLDAVKHIKFSFMRDWLGHVRGQTGKNLFAVAEYWKNDLGALENYLSKTNWTMSAFDVPLHYNLYQASNSSGNYDMRNLLNGTLVQRHPSHAVTFVDNHDTQPGEALESFVQGWFKPLAYATILTREQGYPQVFYGDYYGIPSDGVPSYRQQIDPLLKARQQYAYGRQHDYFDHWDVIGWTREGNASHPNSGLATIMSDGPGGSKWMYVGRQKAGEVWHDMTGNRSGTVTINQDGWGHFFVNGGSVSVWVKR

SEQ ID NO: 31815 - protein, 485 aa, Bacillus sp.
HHDGTNGTIMQYFEWNVPNDGQHWNRLHNNAQNLKNAGITAIWIPPAWKGTSQTDVGYGAYDLYDLGEFNQKGTVRTKYGTKAELERAIRSLKANGIQVYGDVVMNHKGGADFTERVQAVEVNPQNRNQEVSGTYQIEAWTGFNFPGRGNQHSSFKWRWYHFDGTDWDQSRQLANRIYKFRGDGKAWDWEVDTENGNYDYLMYADVDMDHPEVINELNRWGVWYANTLNLDGFRLDAVKHIKFSFMRDWLGHVRGQTGKNLFAVAEYWKNDLGALENYLSKTNWTMSAFDVPLHYNLYQASNSSGNYDMRNLLNGTLVQRHPSHAVTFVDNHDTQPGEALESFVQGWFKPLAYATILTREQGYPQVFYGDYYGIPSDGVPSYRQQIDPLLKARQQYAYGRQHDYFDHWDVIGWTREGNASHPNSGLATIMSDGPGGSKWMYVGRQKAGEVWHDMTGNRSGTVTINQDGWGHFFVNGGSVSVWVKR

SEQ ID NO: 31816 - protein, 485 aa, Bacillus sp.
HHDGTNGTIMQYFEWNVPNDGQHWNRLHNNAQNLKNAGITAIWIPPAWKGTSQNDVGYGAYDLYDLGEFNQKGTVRTKYGTKAELERAIRSLKANGIQVYGDVVMNHKGGADFTERVQAVEVNPQNRNQEVSGTYQIEAWTGFNFPGRGNQHSSFKWRWYHFDGTDWDQSRQLANRIYKFRGDGKAWDWEVDTENGNYDYLMYADVDMDHPEVINELNRWGVWYANTLNLDGFRLDAVKHIKFSFMRDWLGHVRGQTGKNLFAVAEYWKNDLGALENYLSKTNWTMSAFDVPLHYNLYQASNSSGNYDMRNLLNGTLVQRHPSHAVTFVDNHDTQPGEALESFVQGWFKPLAYATILTREQGYPQVFYGDYAGIPSDGVPSYRQQIDPLLKARQQYAYGRQHDYFDHWDVIGWTREGNASHPNSGLATIMSDGPGGSKWMYVGRQKAGEVWHDMTGNRSGTVTINQDGWGHFFVNGGSVSVWVKR

SEQ ID NO: 31817 - protein, 485 aa, Bacillus sp.
HHDGTNGTIMQYFEWNVPNDGQHWNRLHNNAQNLKNAGITAIWIPPAWKGTSQNDVGYGAYDLYDLGEFNQKGTVRTKYGTKAELERAIRSLKANGIQVYGDVVMNHKGGADFTERVQAVEVNPQNRNQEVSGTYQIEAWTGFNFPLRGNQHSSFKWRWYHFDGTDWDQSRQLANRIYKFRGDGKAWDWEVDTENGNYDYLMYADVDMDHPEVINELNRWGVWYANTLNLDGFRLDAVKHIKFSFMRDWLGHVRGQTGKNLFAVAEYWKNDLGALENYLSKTNWTMSAFDVPLHYNLYQASNSSGNYDMRNLLNGTLVQRHPSHAVTFVDNHDTQPGEALESFVQGWFKPLAYATILTREQGYPQVFYGDYYGIPSDGVPSYRQQIDPLLKARQQYAYGRQHDYFDHWDVIGWTREGNASHPNSGLATIMSDGPGGSKWMYVGRQKAGEVWHDMTGNRSGTVTINQDGWGHFFVNGGSVSVWVKR

SEQ ID NO: 31818 - protein, 485 aa, Bacillus sp.
HHDGTNGTIMQYFEWNVPNDGQHWNRLHNNAQNLKNAGITAIWIPPAWKGTSQNDVGYGAYDLYDLGEFNQKGTVRTKYGTKAELERAIRSLKANGIQVYGDVVMNHKGGADFTERVQAVEVNPQNRNQEVSGTYQIEAWTGFNFPGRGNQHSSFKWRWYHFDGTDWDQSRQLANRIYKFRGDGKAWDWEVDTENGNYDYLMYADVDMDHPEVINELNRWGVWYANTLNLDGFRLDAVKHIKFSFMRDWLGHVRGQTGKNLFAVAEYWKNDLGALENYLSKTNWTMSAFDVPLHYNLYQASNSSGNYDMRNLLNGTLVQRHCSHAVTFVDNHDTQPGEALESFVQGWFKPLAYATILTREQGYPQVFYGDYYGIPSDGVPSYRQQIDPLLKARQQYAYGRQHDYFDHWDVIGWTREGNASHPNSGLATIMSDGPGGSKWMYVGRQKAGEVWHDMTGNRSGTVTINQDGWGHFFVNGGSVSVWVKR

SEQ ID NO: 31819 - protein, 485 aa, Bacillus sp.
HHDGTNGTIMQYFEWNVPNDGQHWNRLHNNAQNLKNAGITAIWIPPAWKGTSQNDVGYGAYDLYDLGEFNQKGTVRTKYGTKAELERAIRSLKANGIQVYGDVVMNHKGGADFTERVQAVEVNPQNRNQEVSGTYQIEAWTGFNFPGRGNQHSSFKWRWYHFDGTDWDQSRQLANRIYKFRGDGKAWDWEVDTENGNYDYLMYADVDMDHPEVINELNRWGVWYANTLNLDGFRLDAVKHIKFSFMRDWLGHVRGQTGKNLFAVAEYWKNDLGALENYLSKTNWTMSAFDVPLHYNLYQASNSSGNYDMRNLLNGTLVQRHPSHAVTFVDNHDTQPGEALESFVQGWFKPLAYATILTREQYYPQVFYGDYYGIPSDGVPSYRQQIDPLLKARQQYAYGRQHDYFDHWDVIGWTREGNASHPNSGLATIMSDGPGGSKWMYVGRQKAGEVWHDMTGNRSGTVTINQDGWGHFFVNGGSVSVWVKR

SEQ ID NO: 31820 - protein, 485 aa, Bacillus sp.
HHDGTNGTIMQYFEWNVPNDGQHWNRLHNNAQNLKNAGITAIWIPPAWKGTSQNDVGYGAYDLYDLGEFNQKGTVRTKYGWKAELERAIRSLKANGIQVYGDVVMNHKGGADFTERVQAVEVNPQNRNQEVSGTYQIEAWTGFNFPGRGNQHSSFKWRWYHFDGTDWDQSRQLANRIYKFRGDGKAWDWEVDTENGNYDYLMYADVDMDHPEVINELNRWGVWYANTLNLDGFRLDAVKHIKFSFMRDWLGHVRGQTGKNLFAVAEYWKNDLGALENYLSKTNWTMSAFDVPLHYNLYQASNSSGNYDMRNLLNGTLVQRHPSHAVTFVDNHDTQPGEALESFVQGWFKPLAYATILTREQGYPQVFYGDYYGIPSDGVPSYRQQIDPLLKARQQYAYGRQHDYFDHWDVIGWTREGNASHPNSGLATIMSDGPGGSKWMYVGRQKAGEVWHDMTGNRSGTVTINQDGWGHFFVNGGSVSVWVKR

SEQ ID NO: 31821 - protein, 485 aa, Bacillus sp.
HHDGTNGTIMQYFEWNVPNDGQHWNRLHNNAQNLKNAGITAIWIPPAWKGTSQNDVGYGAYDLYDLGEFNQKGTVRTKYGTKAELERAIRSLKANGIQVYGDVVMNHKGGADFTERVQAVEVNPQNRNQEVSGTYQIEAWTGFNFPGRGNQHSSFKWRWYHFDGTDYDQSRQLANRIYKFRGDGKAWDWEVDTENGNYDYLMYADVDMDHPEVINELNRWGVWYANTLNLDGFRLDAVKHIKFSFMRDWLGHVRGQTGKNLFAVAEYWKNDLGALENYLSKTNWTMSAFDVPLHYNLYQASNSSGNYDMRNLLNGTLVQRHPSHAVTFVDNHDTQPGEALESFVQGWFKPLAYATILTREQGYPQVFYGDYYGIPSDGVPSYRQQIDPLLKARQQYAYGRQHDYFDHWDVIGWTREGNASHPNSGLATIMSDGPGGSKWMYVGRQKAGEVWHDMTGNRSGTVTINQDGWGHFFVNGGSVSVWVKR

SEQ ID NO: 31822 - protein, 485 aa, Bacillus sp.
HHDGTNDTIMQYFEWNVPNDGQHWNRLHNNAQNLKNAGITAIWIPPAWKGTSQNDVGYGAYDLYDLGEFNQKGTVRTKYGTKAELERAIRSLKANGIQVYGDVVMNHKGGADFTERVQAVEVNPQNRNQEVSGTYQIEAWTGFNFPGRGNQHSSFKWRWYHFDGTDWDQSRQLANRIYKFRGDGKAWDWEVDTENGNYDYLMYADVDMDHPEVINELNRWGVWYANTLNLDGFRLDAVKHIKFSFMRDWLGHVRGQTGKNLFAVAEYWKNDLGALENYLSKTNWTMSAFDVPLHYNLYQASNSSGNYDMRNLLNGTLVQRHPSHAVTFVDNHDTQPGEALESFVQGWFKPLAYATILTREQGYPQVFYGDYYGIPSDGVPSYRQQIDPLLKARQQYAYGRQHDYFDHWDVIGWTREGNASHPNSGLATIMSDGPGGSKWMYVGRQKAGEVWHDMTGNRSGTVTINQDGWGHFFVNGGSVSVWVKR

SEQ ID NO: 31823 - protein, 485 aa, Bacillus sp.
HHDGTNGTIMQYFEWNVPNDGQHWNRLHNNAQNLKNAGITAIWIPPAWKGTSQNDVGYGAYDLYDLGEFNQKGTVRTKYGTKAELERAIRSLKANGIQVYGDVVMNHKGGADFTERVQAVEVNPQNRNQEVSGTYQIEAWTGFNFPGRGNQHSSFKWRWYHFDGTDWDQSRQLANRIYKFRGDGKAWDWEVDTENGNYDYLMYWDVDMDHPEVINELNRWGVWYANTLNLDGFRLDAVKHIKFSFMRDWLGHVRGQTGKNLFAVAEYWKNDLGALENYLSKTNWTMSAFDVPLHYNLYQASNSSGNYDMRNLLNGTLVQRHPSHAVTFVDNHDTQPGEALESFVQGWFKPLAYATILTREQGYPQVFYGDYYGIPSDGVPSYRQQIDPLLKARQQYAYGRQHDYFDHWDVIGWTREGNASHPNSGLATIMSDGPGGSKWMYVGRQKAGEVWHDMTGNRSGTVTINQDGWGHFFVNGGSVSVWVKR

SEQ ID NO: 31824 - protein, 485 aa, Bacillus sp.
HHDGTNGTIMQYFEWNVPNDGQHWNRLHNNAQNLKNAGITAIWIPPAWKGTSQNDVGYGAYDLYDLGEFNQKGTVRTKYGTKAELERAIRSLKANGIQVYGDVVMNHKGGADFTERVQAVEVNPQNRNQEVSGTYQIEAWTGFNFPGRGNQHSSFKWRWYHFDGTDWDQSRQLANMIYKFRGDGKAWDWEVDTENGNYDYLMYADVDMDHPEVINELNRWGVWYANTLNLDGFRLDAVKHIKFSFMRDWLGHVRGQTGKNLFAVAEYWKNDLGALENYLSKTNWTMSAFDVPLHYNLYQASNSSGNYDMRNLLNGTLVQRHPSHAVTFVDNHDTQPGEALESFVQGWFKPLAYATILTREQGYPQVFYGDYYGIPSDGVPSYRQQIDPLLKARQQYAYGRQHDYFDHWDVIGWTREGNASHPNSGLATIMSDGPGGSKWMYVGRQKAGEVWHDMTGNRSGTVTINQDGWGHFFVNGGSVSVWVKR

SEQ ID NO: 31825 - protein, 485 aa, Bacillus sp.
HHDGTNGTIMQYFEWNVPNDGQHWNRLHNNAQNLKNAGITAIWIPPAWKGTSQNDVGYGAYDLYDLGEFNQKGTVRTKYGTKAELERAIRSLKANGIQVYGDVVMNHKGGADFTERVQAVEVNPQNRNQEVSGTYQIEAWTGFNFPGRGNQHSSFKWRWYHFDGTDWDQSRQLANRIYKFRGDGKAWDWEVDTENGNYDYLMYADVDMDHPEVINELNRWGVWYANTLNLDGFRLDAVKHIKFSFMRDWLGHVRGQTGKNLFAVAEYWKNDLGALENYLSKTNWTMSAFDVPLHYNLYQASNSSGNYDMRNLLNGTLVQRHPSHAVTFVDNHDTQPGEALESFVQGWFKPLAYATILTREQGYPQVFYGDYYGIPSDGVPSYRQQIDPLHKARQQYAYGRQHDYFDHWDVIGWTREGNASHPNSGLATIMSDGPGGSKWMYVGRQKAGEVWHDMTGNRSGTVTINQDGWGHFFVNGGSVSVWVKR

SEQ ID NO: 31826 - protein, 483 aa, Bacillus sp. (in: firmicutes)
HHDGTNGTMMQYFEWNVPNDGQHWNRLHNNAQNLKNAGITAIWIPPAWKGTSQNDVGYGAYDLYDLGEFNQKGTVRTKYGTKAELERAIRSLKANGIQVYGDVVMNHKGGADFTERVQAVEVNPQNRNQEVSGTYQIEAWTGFNFPGRGNQHSSFKWRWYHFDGTDWDQSRQLANRIYKFRGKAWDWEVDTEFGNYDYLMYADLDMNHPEVINELNRWGVWYANTLNLDGFRLDAVKHIKFSFMRDWLGHVRGQTGKNLFAVAEYWKNDLGALENYLSKTNWTMSAFDVPLHYNLYQASNSSGNYDMRNLLNGTLVQRHPSHAVTFVDNHDTQPGEALESFVQGWFKPLAYATILTREQGYPSVFYGDYYGIPSDGVPSYRQQIDPLLKARQQYAYGRQHDYFDHWDVIGWTREGNASHPNSGLATIMSDGPGGSKWMYVGRQKAGEVWHDMTGNRSGTVTINQDGWGHFFVNGGSVSVWVKR

SEQ ID NO: 31827 - protein, 485 aa, Bacillus sp.
HHDGTNGTIMQYFEWNVPNDGQHWNRLHNNAQNLKNAGITAIWIPPAWKGTSQNDVGYGAYDLYDLGEFNQKGTVRTKYGTKAELERAIRSLKANGIQVYGDVVMNHKGGAFFTERVQAVEVNPQNRNQEVSGTYQIEAWTGFNFPGRGNQHSSFKWRWYHFDGTDWDQSRQLANRIYKFRGDGKAWDWEVDTENGNYDYLMYADVDMDHPEVINELNRWGVWYANTLNLDGFRLDAVKHIKFSFMRDWLGHVRGQTGKNLFAVAEYWKNDLGALENYLSKTNWTMSAFDVPLHYNLYQASNSSGNYDMRNLLNGTLVQRHPSHAVTFVDNHDTQPGEALESFVQGWFKPLAYATILTREQGYPQVFYGDYYGIPSDGVPSYRQQIDPLLKARQQYAYGRQHDYFDHWDVIGWTREGNASHPNSGLATIMSDGPGGSKWMYVGRQKAGEVWHDMTGNRSGTVTINQDGWGHFFVNGGSVSVWVKR

SEQ ID NO: 31828 - protein, 485 aa, Bacillus sp.
HHDGTNGTIMQYFEWNVPNDGQHWNRLHNNAQNLKNAGITAIWIPPAWKGTSQNDVGYGAYDLYDLGEFNQKGTVRTKYGTKAELERAIRSLKANGIQVYGDVVMNHKGGADFTERVQAVEVNPQNRNQEVSGTYQIEAWTGFNFPGRGNQHSSFKWRWYHFDGTDWDQSRQLANRIYKFRGDGKAWDWEVDTENGNYDYLMYADVDMDHPEVINELNRWGVWYANTLNSDGFRLDAVKHIKFSFMRDWLGHVRGQTGKNLFAVAEYWKNDLGALENYLSKTNWTMSAFDVPLHYNLYQASNSSGNYDMRNLLNGTLVQRHPSHAVTFVDNHDTQPGEALESFVQGWFKPLAYATILTREQGYPQVFYGDYYGIPSDGVPSYRQQIDPLLKARQQYAYGRQHDYFDHWDVIGWTREGNASHPNSGLATIMSDGPGGSKWMYVGRQKAGEVWHDMTGNRSGTVTINQDGWGHFFVNGGSVSVWVKR

SEQ ID NO: 31829 - protein, 485 aa, Bacillus sp.
HHDGTNGTIMQYFEWNVPNDGQHWNRLHNNAQNLKNAGITAIWIPPAWKGTSQNDVGYGAYDLYDLGEFNQKGTVRTKYGTKAELERAIRSLKANGIQIYGDVVMNHKGGADFTERVQAVEVNPQNRNQEVSGTYQIEAWTGFNFPGRGNQHSSFKWRWYHFDGTDWDQSRQLANRIYKFRGDGKAWDWEVDTENGNYDYLMYADVDMDHPEVINELNRWGVWYANTLNLDGFRLDAVKHIKFSFMRDWLGHVRGQTGKNLFAVAEYWKNDLGALENYLSKTNWTMSAFDVPLHYNLYQASNSSGNYDMRNLLNGTLVQRHPSHAVTFVDNHDTQPGEALESFVQGWFKPLAYATILTREQGYPQVFYGDYYGIPSDGVPSYRQQIDPLLKARQQYAYGRQHDYFDHWDVIGWTREGNASHPNSGLATIMSDGPGGSKWMYVGRQKAGEVWHDMTGNRSGTVTINQDGWGHFFVNGGSVSVWVKR

SEQ ID NO: 31830 - protein, 485 aa, Bacillus sp.
HHDGTNGTIMQYFEWNVPNDGQHWNRLHNNAQNLKNAGITAIWIPPAWKGTSQNDVGYGAYDLYDLGEFNQKGTVRTKYGTKAELERAIRSLKANGIQVYGDVVMNHKGGSDFTERVQAVEVNPQNRNQEVSGTYQIEAWTGFNFPGRGNQHSSFKWRWYHFDGTDWDQSRQLANRIYKFRGDGKAWDWEVDTENGNYDYLMYADVDMDHPEVINELNRWGVWYANTLNLDGFRLDAVKHIKFSFMRDWLGHVRGQTGKNLFAVAEYWKNDLGALENYLSKTNWTMSAFDVPLHYNLYQASNSSGNYDMRNLLNGTLVQRHPSHAVTFVDNHDTQPGEALESFVQGWFKPLAYATILTREQGYPQVFYGDYYGIPSDGVPSYRQQIDPLLKARQQYAYGRQHDYFDHWDVIGWTREGNASHPNSGLATIMSDGPGGSKWMYVGRQKAGEVWHDMTGNRSGTVTINQDGWGHFFVNGGSVSVWVKR

SEQ ID NO: 31831 - protein, 483 aa, Bacillus sp.
HHDGTNGTIMQYFEWNVPNDGQHWNRLHNNAQNLKNAGITAIWIPPAWKGTSQNDVGYGAYDLYDLGEFNQKGTVRTKYGTKAELERAIRSLKANGIQVYGDVVMNHKGGADFTERVQAVEVNPQNRNQEVSGTYEIEAWTGFNFPGRGNQHSSFKWRWYHFDGTDWDQSRQLSNRIYKFRGKAWDWEVDTENGNYDYLMYADVDMNHPEVINELNRWGVWYANTLNLDGFRLDAVKHIQFSFMRNWLGHVRGQTGKNLFAVAEYWKNDLGALENYLSKTNWTMSAFDVPLHYNLYQASNSGGNYDMRNLLNGTLVQRHPSHAVTFVDNHDTQPGEALESFVQGWFKPLAYATILTREQGYPQVFYGDYYGIPSDGVPSYRQQIDPLLKARQQYAYGRQHDYFDHWDVIGWTREGNASHPNSGLATIMSDGPGGSKWMYVGRQKAGEVWHDITGNRSGTVTINQDGWGQFFVNGGSVSVWVKR

SEQ ID NO: 31832 - protein, 485 aa, Bacillus sp.
HHDGTNGTIMQYFEWNVPNDGQHWNRLHNNAQNLKNAGITAIWIPPAWKGTSQNDVGYGAYDLYDLGEFNQKGTVRTKYGTKAELERAIRSLKANGIQVYGDVVMNHKGGADFTERVQAVEVNPQNRNQEVSGTYQIEAWTGFNFPGRGNQHSSFKWRWYHFDGTDWDQSRQLANRIYKFRGDGKAWDWEVDTENGNYDYLMYADVDMDHPEVINELNRWGVWYANTLNLDGFRLDAVKHIKFSFMRDWLGHVRGQTGKNLFAVAEYWKNDLGALENYLSKTNWTMSAFDVPLHYNLYQASNSSGNYDMRNLLNGTLVQRHPSHAVTFVDNHDTQPGEALESFVKGWFKPLAYATILTREQGYPQVFYGDYYGIPSDGVPSYRQQIDPLLKARQQYAYGRQHDYFDHWDVIGWTREGNASHPNSGLATIMSDGPGGSKWMYVGRQKAGEVWHDMTGNRSGTVTINQDGWGHFFVNGGSVSVWVKR

SEQ ID NO: 31833 - protein, 485 aa, Bacillus sp.
HHDGTNGTIMQYFEWNVPNDGQHWNRLHNNAQNLKNAGITAIWIPPAWKGTSQNDVGYGAYDLYDLGEFNQKGTVRTKYGTKAELERAIRSLKANGIQVYGDVVMNHKGGADFTERVQAVEVNPQNRNQEVSGTYQIEAWTGFNFPGRGNQHSSFKWRWYHFDGTDWDQSRQLANRIYKFRGDGKAWDWEVDTENGNYDYLMYADVDMDHPEVINELNRWGVWYANTLNLDGFRLDAVKHIKFSFMRDWLGHVRGQTGKNLFAVAEYWKNDLGALENYLSKTNWTMSAFDVPLHYNLYQASNSSGNYDMRNLLNGTLVQRHPSHAVTFVDNHDTQPGEALESFVQGWFKPLAYATILTREQGYPQVFYGDYYGIPSDGVPSYRQQIDPLLKARQQYAYGRQHDYFDHWDVIGWTREGNASHPNSGLATIMSDGPGGSTWMYVGRQKAGEVWHDMTGNRSGTVTINQDGWGHFFVNGGSVSVWVKR

SEQ ID NO: 31834 - protein, 485 aa, Bacillus sp.
HHDGTNGTIMQYFEWNVPNDGQHWNRLHNNAQNLKNAGITAIWIPPAWKGTSQNDVGYGAYDLYDLGEFNQKGTVRTKYGTKAELERAIRSLKANGIQVYGDVVMNHKGGADFTERVQAVEVNPQNRNQEVSGTYQIEAWTGFNFPGRCNQHSSFKWRWYHFDGTDWDQSRQLANRIYKFRGDGKAWDWEVDTENGNYDYLMYADVDMDHPEVINELNRWGVWYANTLNLDGFRLDAVKHIKFSFMRDWLGHVRGQTGKNLFAVAEYWKNDLGALENYLSKTNWTMSAFDVPLHYNLYQASNSSGNYDMRNLLNGTLVQRHPSHAVTFVDNHDTQPGEALESFVQGWFKPLAYATILTREQGYPQVFYGDYYGIPSDGVPSYRQQIDPLLKARQQYAYGRQHDYFDHWDVIGWTREGNASHPNSGLATIMSDGPGGSKWMYVGRQKAGEVWHDMTGNRSGTVTINQDGWGHFFVNGGSVSVWVKR

SEQ ID NO: 31835 - protein, 485 aa, Bacillus sp.
HHDGTNGTIMQYFEWNVPNDGQHWNRLHNNAQNLKNAGITAIWIPPAWKGTSQNDVGYGAYDLYDLGEFNQKGTVRTKYGTKAELERAIRSLKANGIQVYGDVVMNHKGGADFTERVQAVEVNPQNRNQEVSGTYQIEAWTGFNFPGRGNQHSSFKWRWYHFDGTDWDQSRQLANRIYKFRGDGKAWDWEVDTENGNYDYLMYADVDMDHPEVINELNRWGVWYANTLNLDGFRLDAVKHIKFSFMRDWLGHVRGQTGKNLFAVAEYWKNDLGALENYLSKTNWTMSAFDVPLHYNLYQASNSSGNYDMRNLLNGTLVQRHPSHAVTFVDNHDTQPGEALESFVQGWFKPLAYATILTREQGYPQAFYGDYYGIPSDGVPSYRQQIDPLLKARQQYAYGRQHDYFDHWDVIGWTREGNASHPNSGLATIMSDGPGGSKWMYVGRQKAGEVWHDMTGNRSGTVTINQDGWGHFFVNGGSVSVWVKR

SEQ ID NO: 31836 - protein, 485 aa, Bacillus sp.
HHDGTNGTIMQYFEWNVPNDGQHWNRLHNNAQNLKNAGITAIWIPPAWKGTSQNDVGYGAYDLYDLGEFNQKGTVRTKYGTKAELERAIRSLKANGIQVYGDVVMNHKGGADFTERVQAVEVKPQNRNQEVSGTYQIEAWTGFNFPGRGNQHSSFKWRWYHFDGTDWDQSRQLANRIYKFRGDGKAWDWEVDTENGNYDYLMYADVDMDHPEVINELNRWGVWYANTLNLDGFRLDAVKHIKFSFMRDWLGHVRGQTGKNLFAVAEYWKNDLGALENYLSKTNWTMSAFDVPLHYNLYQASNSSGNYDMRNLLNGTLVQRHPSHAVTFVDNHDTQPGEALESFVQGWFKPLAYATILTREQGYPQVFYGDYYGIPSDGVPSYRQQIDPLLKARQQYAYGRQHDYFDHWDVIGWTREGNASHPNSGLATIMSDGPGGSKWMYVGRQKAGEVWHDMTGNRSGTVTINQDGWGHFFVNGGSVSVWVKR

SEQ ID NO: 31837 - protein, 485 aa, Bacillus sp.
HHDGTNGTIMQYFSWNVPNDGQHWNRLHNNAQNLKNAGITAIWIPPAWKGTSQNDVGYGAYDLYDLGEFNQKGTVRTKYGTKAELERAIRSLKANGIQVYGDVVMNHKGGADFTERVQAVEVNPQNRNQEVSGTYQIEAWTGFNFPGRGNQHSSFKWRWYHFDGTDWDQSRQLANRIYKFRGDGKAWDWEVDTENGNYDYLMYADVDMDHPEVINELNRWGVWYANTLNLDGFRLDAVKHIKFSFMRDWLGHVRGQTGKNLFAVAEYWKNDLGALENYLSKTNWTMSAFDVPLHYNLYQASNSSGNYDMRNLLNGTLVQRHPSHAVTFVDNHDTQPGEALESFVQGWFKPLAYATILTREQGYPQVFYGDYYGIPSDGVPSYRQQIDPLLKARQQYAYGRQHDYFDHWDVIGWTREGNASHPNSGLATIMSDGPGGSKWMYVGRQKAGEVWHDMTGNRSGTVTINQDGWGHFFVNGGSVSVWVKR

SEQ ID NO: 31838 - protein, 485 aa, Bacillus sp.
HHDGTNGTIMQYFEWNVPNDGQHWNRLHNNAQNLKNAGITAIWIPPAWKGTSQNDVGYGAYDLYDLGEFNQKGTVRTKYGTKAELERAIRSLKANGIQVYGDVVMNHKGGADFTERVQAVEVNPQNRNQEVSGTYQIEAWTGFNFPGRGNQHSSFKWRWYHFDGTDWDQSRQLANRIYKFRGDGKAWDWEVDTENGNYDYLMYADVDMDHPEVINELNRWGVWYANTLNLDGFRLDAVKHIKFSFMRDWLGHVRGQTGKNLFAVAEYWKNDLGALENYLSKTNWTMSAFDVPLHYNLYQASNSSGNYDMRNLLNGTLVQRHPSHAVTFVDNHDTQPGEALESFVQGWFKPLAYATILTREQVYPQVFYGDYYGIPSDGVPSYRQQIDPLLKARQQYAYGRQHDYFDHWDVIGWTREGNASHPNSGLATIMSDGPGGSKWMYVGRQKAGEVWHDMTGNRSGTVTINQDGWGHFFVNGGSVSVWVKR

SEQ ID NO: 31839 - protein, 485 aa, Bacillus sp.
HHDGTNGTIMQYFEWNVPNDGQHWNRLHNNAQNLKNAGITAIWIPPAWKGTSQNDVGYGSYDLYDLGEFNQKGTVRTKYGTKAELERAIRSLKANGIQVYGDVVMNHKGGADFTERVQAVEVNPQNRNQEVSGTYQIEAWTGFNFPGRGNQHSSFKWRWYHFDGTDWDQSRQLANRIYKFRGDGKAWDWEVDTENGNYDYLMYADVDMDHPEVINELNRWGVWYANTLNLDGFRLDAVKHIKFSFMRDWLGHVRGQTGKNLFAVAEYWKNDLGALENYLSKTNWTMSAFDVPLHYNLYQASNSSGNYDMRNLLNGTLVQRHPSHAVTFVDNHDTQPGEALESFVQGWFKPLAYATILTREQGYPQVFYGDYYGIPSDGVPSYRQQIDPLLKARQQYAYGRQHDYFDHWDVIGWTREGNASHPNSGLATIMSDGPGGSKWMYVGRQKAGEVWHDMTGNRSGTVTINQDGWGHFFVNGGSVSVWVKR

SEQ ID NO: 31840 - protein, 485 aa, Bacillus sp.
HHDGTNGTIMQYFEWNVPNDGQHWNRLHNNAQNLKNAGITAIWIPPAWKGTSQNDVGYGAYDLYDLGEFNQKGTVRTKYGTKAELERAIRSLKANGIQVYGDVVMNHKGGADFTERVQAVEVNPQNRNQEVSGTYQIEAWTGFNFPGRGNQHSSFKWRWYHFDGTDWDQSKQLANRIYKFRGDGKAWDWEVDTENGNYDYLMYADVDMDHPEVINELNRWGVWYANTLNLDGFRLDAVKHIKFSFMRDWLGHVRGQTGKNLFAVAEYWKNDLGALENYLSKTNWTMSAFDVPLHYNLYQASNSSGNYDMRNLLNGTLVQRHPSHAVTFVDNHDTQPGEALESFVQGWFKPLAYATILTREQGYPQVFYGDYYGIPSDGVPSYRQQIDPLLKARQQYAYGRQHDYFDHWDVIGWTREGNASHPNSGLATIMSDGPGGSKWMYVGRQKAGEVWHDMTGNRSGTVTINQDGWGHFFVNGGSVSVWVKR

SEQ ID NO: 31841 - protein, 485 aa, Bacillus sp.
HHDGTNGTIMQYFEWNVPNDGQHWNRLHNNAQNLKNAGITAIWIPPAWKGTSQNDVGYGAYDLYDLGEFNQKGTVRTKYGTKAELERAIRSLKANGIQVYGDVVMNHKGGADFTERVQAVEVNPQNRNQEVSGTYQIEAWTGFNFPGRGNQHSSFKWRDYHFDGTDWDQSRQLANRIYKFRGDGKAWDWEVDTENGNYDYLMYADVDMDHPEVINELNRWGVWYANTLNLDGFRLDAVKHIKFSFMRDWLGHVRGQTGKNLFAVAEYWKNDLGALENYLSKTNWTMSAFDVPLHYNLYQASNSSGNYDMRNLLNGTLVQRHPSHAVTFVDNHDTQPGEALESFVQGWFKPLAYATILTREQGYPQVFYGDYYGIPSDGVPSYRQQIDPLLKARQQYAYGRQHDYFDHWDVIGWTREGNASHPNSGLATIMSDGPGGSKWMYVGRQKAGEVWHDMTGNRSGTVTINQDGWGHFFVNGGSVSVWVKR

SEQ ID NO: 31842 - protein, 485 aa, Bacillus sp.
HHDGTNGTIMQYFEWNVPNDGQHWNRLHNNAQNLKNAGITAIWIPPAWKGTSQNDVGYGAYDLYDLGEFNQKGTVRTKYGTKAELERAIRSLKANGIQVYGDVVMNHKGGADFTERVQAVEVNPQNRNQEVSGTYQIEAWTGFNFPGRGNQHSSFKWRWYHFDGTDWDQSRQLANRIYKFRGDGKAWDWEVDTENGNYDYLMYADVDMDHPEVINELNRWGVWYANTLNLDGFRLDAVKHIKFSFMRDWLGHVRGQTGKNLFAVAEYWKNDLGALENYLSKTNWTMSAFDVPLHYNLYQASNSSGNYDMRNLLNGTLVQRHPSHAVTFVDNHDTQPGEALESFVQGWFKPLAYATILTREQGYPQVFYGDYYGIPSDGVPSYRQQIDPLLKARQQYAYGRQHDYFDHWDVIGWTREGNASHPNSGLATIMSDGPGGSKWMYVGRQKAGEVWHDMTGNRSGTVTINQDGNGHFFVNGGSVSVWVKR

SEQ ID NO: 31843 - protein, 485 aa, Bacillus sp.
HHDGTNGTIMQYFEWNVPNDGQHWNRLHNNAQNLKNAGITAIWIPPAWKGTSQNDVGYGAYDLYDLGEFNQKGTVRTKYGTKAELERAIRSLKANGIQVYGDVVMNHKGGADFTERVQAVEVNPQNRNQEVSGTYQIEAWTGFNFPGRGNQHSSFKWRCYHFDGTDWDQSRQLANRIYKFRGDGKAWDWEVDTENGNYDYLMYADVDMDHPEVINELNRWGVWYANTLNLDGFRLDAVKHIKFSFMRDWLGHVRGQTGKNLFAVAEYWKNDLGALENYLSKTNWTMSAFDVPLHYNLYQASNSSGNYDMRNLLNGTLVQRHPSHAVTFVDNHDTQPGEALESFVQGWFKPLAYATILTREQGYPQVFYGDYYGIPSDGVPSYRQQIDPLLKARQQYAYGRQHDYFDHWDVIGWTREGNASHPNSGLATIMSDGPGGSKWMYVGRQKAGEVWHDMTGNRSGTVTINQDGWGHFFVNGGSVSVWVKR

SEQ ID NO: 31844 - protein, 485 aa, Bacillus sp.
HHDGTNGTIMQYFEWNVPNDGQHWNRLHNNAQNLKNAGITAIWIPPAWKGTSQNDVGYGAYDLYDLGEFNQKGTVRTKYGTKAELERAIRSLKANGIQVYGDVVMNHKGGADFTERVQAVELNPQNRNQEVSGTYQIEAWTGFNFPGRGNQHSSFKWRWYHFDGTDWDQSRQLANRIYKFRGDGKAWDWEVDTENGNYDYLMYADVDMDHPEVINELNRWGVWYANTLNLDGFRLDAVKHIKFSFMRDWLGHVRGQTGKNLFAVAEYWKNDLGALENYLSKTNWTMSAFDVPLHYNLYQASNSSGNYDMRNLLNGTLVQRHPSHAVTFVDNHDTQPGEALESFVQGWFKPLAYATILTREQGYPQVFYGDYYGIPSDGVPSYRQQIDPLLKARQQYAYGRQHDYFDHWDVIGWTREGNASHPNSGLATIMSDGPGGSKWMYVGRQKAGEVWHDMTGNRSGTVTINQDGWGHFFVNGGSVSVWVKR

SEQ ID NO: 31845 - protein, 483 aa, Bacillus sp. (in: firmicutes)
HHDGTNGTIMQYFEWNVPNDGQHWNRLHNNAQNLKNAGITAIWIPPAWKGTSQNDVGYGAYDLYDLGEFNQKGTVRTKYGTKAELERAIRSLKANGIQVYGDVVMNHKGGADFTERVQAVEVNPQNRNQEVSGTYQIEAWTGFNFPGRGNQHSSFKWRWYHFDGTDWDQSRQLANRIYKFRGKAWDWEVDTENGNYDYLMYADVDMDHPEVINELNRWGVWYANTLNLDGFRLDAVKHIKFSFMRDWLGHVRGQTGKNLFAVAEFWKNDLGALENYLSKTNWTMSAFDAPLHYNLYQASNSSGNYDMRNLLNGTLVQRHPSHAVTLVDNHDTQPGEALESFVQGWFKPLAYATILTREQGYPCVFYGDYYGIPSDGVPSYRQQIDPLLKARQQYAYGRQHDYFDHWDVIGWTREGNASHPNSGLATIMSDGPGGSKWMYVGRQKAGEVWHDMTGNRSGTVTINQDGWGHFFVNGGSVSVWVKR

SEQ ID NO: 31846 - protein, 485 aa, Bacillus sp.
HHDGTNGTIMQYFEWNVPNDGQHWNRLHNNAQNLKNAGITAIWIPPAWKGTSQNDVGYGAYDLYDLGEFNQKGTVRTKYGTKAELERAIRSLKANGIQVYGDVVMNHKGGADFTERVQAVEVNPQNRNQEVSGTYQIEAWTGFNFPGRGNQHSSFKWRWYHFDGTDWDQSRQLANRIYKFRGDGKAWDWEVDTENGNYDYLMYADVDMDHPEVINELNRWGVWYANTLNLDGFRLDAVKHIKFSFMRDFLGHVRGQTGKNLFAVAEYWKNDLGALENYLSKTNWTMSAFDVPLHYNLYQASNSSGNYDMRNLLNGTLVQRHPSHAVTFVDNHDTQPGEALESFVQGWFKPLAYATILTREQGYPQVFYGDYYGIPSDGVPSYRQQIDPLLKARQQYAYGRQHDYFDHWDVIGWTREGNASHPNSGLATIMSDGPGGSKWMYVGRQKAGEVWHDMTGNRSGTVTINQDGWGHFFVNGGSVSVWVKR

SEQ ID NO: 31847 - protein, 485 aa, Bacillus sp.
HHDGTNGTIMQYFEWNVPNDGQHWNRLHNNAQNLKNAGITAIWIPPAWKGTSQNDVGYGAYDLYDLGEFNQKGTVRTKYGTKAELERAIRSLKANGIQVYGDVVMNHKGGADFTERVQAVEVNPQNRNQEVSGTYQIEAWTGFNFPGRGNQHSSFKWRWYHFDGTDWDQSRQLANRIYKFRGDGKAWDWEVETENGNYDYLMYADVDMDHPEVINELNRWGVWYANTLNLDGFRLDAVKHIKFSFMRDWLGHVRGQTGKNLFAVAEYWKNDLGALENYLSKTNWTMSAFDVPLHYNLYQASNSSGNYDMRNLLNGTLVQRHPSHAVTFVDNHDTQPGEALESFVQGWFKPLAYATILTREQGYPQVFYGDYYGIPSDGVPSYRQQIDPLLKARQQYAYGRQHDYFDHWDVIGWTREGNASHPNSGLATIMSDGPGGSKWMYVGRQKAGEVWHDMTGNRSGTVTINQDGWGHFFVNGGSVSVWVKR

SEQ ID NO: 31848 - protein, 485 aa, Bacillus sp.
HHDGTNGTIMQYFEWNVPNDGQHWNRLHNNAQNLKNAGITAIWIPPAWKGTSQNDVGYGAYDLYDLGEFNQKGTVRTKYGTKAELERAIRSLKANGIQVYGDVVMNHKGGADFTERVQAVEVNPQNRNQEVSGTYQIEAWTGFNFPGRGNQHSSFKWRWYHFDGTDWDQSRQLANRIYKFRGDGKAWDWEVDTENGNYDYLMYADVDMDFPEVINELNRWGVWYANTLNLDGFRLDAVKHIKFSFMRDWLGHVRGQTGKNLFAVAEYWKNDLGALENYLSKTNWTMSAFDVPLHYNLYQASNSSGNYDMRNLLNGTLVQRHPSHAVTFVDNHDTQPGEALESFVQGWFKPLAYATILTREQGYPQVFYGDYYGIPSDGVPSYRQQIDPLLKARQQYAYGRQHDYFDHWDVIGWTREGNASHPNSGLATIMSDGPGGSKWMYVGRQKAGEVWHDMTGNRSGTVTINQDGWGHFFVNGGSVSVWVKR

SEQ ID NO: 31849 - protein, 483 aa, Bacillus sp. (in: firmicutes)
HHDGTNGTIMQYFEWNVPNDGQHWNRLHNNAQNLKNAGITAIWIPPAWKGTSQNDVGYGAYDLYDLGEFNQKGTVRTKYGTKAELERAIRSLKANGIQVYGDVVMNHKGGADFTERVQAVEVNPQNRNQEVSGTYQIEAWTGFNFPGRGNQHSSFKWRWYHFDGTDWDQSRQLANRIYKFRGKAWDWEVDTENGNYDYLMYADVDMDHPEVINELNRWGVWYANTLNLDGFRLDAVKHIKFSFMRDWLGHVRGQTGKNLFAIAEYWKNDLGALENYLSKTNWTMSAFDIPLHYNLYQASNSSGNYDMRNLLNGTLVQRHPSHAVTFVDNHDTQPGEALESFVQGWFKPLAYATILTREQGYPSVFYGDYYGIPSDGVPSYRQQIDPLLKARQQYAYGRQHDYFDHWDVIGWTREGNASHPNSGLATIMSDGPGGSKWMYVGRQKAGEVWHDMTGNRSGTVTINQDGWGHFFVNGGSVSVWVKR

SEQ ID NO: 31850 - protein, 485 aa, Bacillus sp.
HHDGTNGTIMQYFEWNVPNDGQHWNRLHNNAQNLKNAGITAIWIPPAWKGTSQNDVGYGAYDLYDLGEFNQKGTVRTKYGTKAELERAIRSLKANGIQVYGDVVMNHKGGADFTERVQAVEVNPQNRNQEVSGTYQIEAWTGFNFPGRGNQHSSFKWRWYHFDGTDWDQSRQLANRIYKFRGDGKAWDWEVDTENGNYDLLMYADVDMDHPEVINELNRWGVWYANTLNLDGFRLDAVKHIKFSFMRDWLGHVRGQTGKNLFAVAEYWKNDLGALENYLSKTNWTMSAFDVPLHYNLYQASNSSGNYDMRNLLNGTLVQRHPSHAVTFVDNHDTQPGEALESFVQGWFKPLAYATILTREQGYPQVFYGDYYGIPSDGVPSYRQQIDPLLKARQQYAYGRQHDYFDHWDVIGWTREGNASHPNSGLATIMSDGPGGSKWMYVGRQKAGEVWHDMTGNRSGTVTINQDGWGHFFVNGGSVSVWVKR

SEQ ID NO: 31851 - protein, 485 aa, Bacillus sp.
HHDGTNGTIMQYFEWNVPNDGQHWNRLHNNAQNLKNAGITAIWIPPAWKGTSQNDVGYGAYDLYDLGEFNQKGTVRTKYGTKAELERAIRSLKANGIQVYGDVVMNHKGGADFTERVQAVEVNPQNRNQEVSGTYQIEAWTGFNFPGRGNQHSSFKWRWYHFDGTDWDQSRQLANRIYKFRGDGKAWDWEVDTENGNYDYLMYADVDMDHPEVINELNRWGVWYANTLNLDGFRLDAVKHIKFSFMRDWLGHVRGQTGKNLFAVAEYWKNDLGALENYLSKTNWTMSAFDVPLHYNLYQASNSSGNYDMRNLLNGTLVQRHPSHAVTFVDNHDTQPGEALESFVQGWFKPLAYATILTREQGYPQVFVGDYYGIPSDGVPSYRQQIDPLLKARQQYAYGRQHDYFDHWDVIGWTREGNASHPNSGLATIMSDGPGGSKWMYVGRQKAGEVWHDMTGNRSGTVTINQDGWGHFFVNGGSVSVWVKR

SEQ ID NO: 31852 - protein, 485 aa, Bacillus sp.
HHDGTNGTIMQYFEWNVPNDGQHWNRLHNNAQNLKNAGITAIWIPPAWKGTSQNDVGYGAYDLYDLGEFNQKGTVRTKYGTKAELERAIRSLKANGIQVYGDVVMNHKGGADFTERVQAVEVNPQNRNQEVSGTYQIEAWTGFNFPGRGNQHSSFKWRWYHFDGTDWDQSRQLANRIYKFRGDGKAWDWEVDTENGNYDYLMYADVDMDHPEWINELNRWGVWYANTLNLDGFRLDAVKHIKFSFMRDWLGHVRGQTGKNLFAVAEYWKNDLGALENYLSKTNWTMSAFDVPLHYNLYQASNSSGNYDMRNLLNGTLVQRHPSHAVTFVDNHDTQPGEALESFVQGWFKPLAYATILTREQGYPQVFYGDYYGIPSDGVPSYRQQIDPLLKARQQYAYGRQHDYFDHWDVIGWTREGNASHPNSGLATIMSDGPGGSKWMYVGRQKAGEVWHDMTGNRSGTVTINQDGWGHFFVNGGSVSVWVKR

SEQ ID NO: 31853 - protein, 485 aa, Bacillus sp.
HHDGTNGTIMQYFEWNVPNDGQHWNRLHNNAQNLKNAGVTAIWIPPAWKGTSQNDVGYGAYDLYDLGEFNQKGTVRTKYGTKAELERAIRSLKANGIQVYGDVVMNHKGGADFTERVQAVEVNPQNRNQEVSGTYQIEAWTGFNFPGRGNQHSSFKWRWYHFDGTDWDQSRQLANRIYKFRGDGKAWDWEVDTENGNYDYLMYADVDMDHPEVINELNRWGVWYANTLNLDGFRLDAVKHIKFSFMRDWLGHVRGQTGKNLFAVAEYWKNDLGALENYLSKTNWTMSAFDVPLHYNLYQASNSSGNYDMRNLLNGTLVQRHPSHAVTFVDNHDTQPGEALESFVQGWFKPLAYATILTREQGYPQVFYGDYYGIPSDGVPSYRQQIDPLLKARQQYAYGRQHDYFDHWDVIGWTREGNASHPNSGLATIMSDGPGGSKWMYVGRQKAGEVWHDMTGNRSGTVTINQDGWGHFFVNGGSVSVWVKR

SEQ ID NO: 31854 - protein, 485 aa, Bacillus sp. (in: firmicutes)
HHDGTNGTIMQYFEWNVPNDGQHWNRLHNNAQNLKNAGITAIWIPPAWKGTSQNDVGYGAYDLYDLGEFNQKGTVRTKYGTKAELERAIRSLKANGIQVYGDVVMNHKGGADFTERVQAVEVNPQNRNQEVSGTYQIEAWTGFNFPGRGNQHSSFKWRWYHFDGTDWDQSRQLANRIYKFRGDGKAWDWPVDTENGNYDYLMYADVDMDHPEVINELNRWGVWYANTLNLDGFRLDAVKHIKFSFMRDWLGHVRGQTGKNLFAVAEYWKNDLGALENYLSKTNWTMSAFDVPLHYNLYQASNSSGNYDMRNLLNGTLVQRHPSHAVTFVDNHDTQPGEALESFVQGWFKPLAYATILTREQGYPQVFYGDYYGIPSDGVPSYRQQIDPLLKARQQYAYGRQHDYFDHWDVIGWTREGNASHPNSGLATIMSDGPGGSKWMYVGRQKAGEVWHDMTGNRSGTVTINQDGWGHFFVNGGSVSVWVKR

SEQ ID NO: 31855 - protein, 485 aa, Bacillus sp.
HHDGTNGTIMQYFEWNVPNDGQHWNRLHNNAQNLKNAGITAIWIPPAWKGTSQNDVGYGAYDLYDLGEFNQKGTVRTKYGTKAELERAIRSLKANGIQVYGDVVMNHKGGADFTERVQAVEVNPQNRNQEVSGTYQIEAWTGFNFPGRGNQHSSFKWRWTHFDGTDWDQSRQLANRIYKFRGDGKAWDWEVDTENGNYDYLMYADVDMDHPEVINELNRWGVWYANTLNLDGFRLDAVKHIKFSFMRDWLGHVRGQTGKNLFAVAEYWKNDLGALENYLSKTNWTMSAFDVPLHYNLYQASNSSGNYDMRNLLNGTLVQRHPSHAVTFVDNHDTQPGEALESFVQGWFKPLAYATILTREQGYPQVFYGDYYGIPSDGVPSYRQQIDPLLKARQQYAYGRQHDYFDHWDVIGWTREGNASHPNSGLATIMSDGPGGSKWMYVGRQKAGEVWHDMTGNRSGTVTINQDGWGHFFVNGGSVSVWVKR

SEQ ID NO: 31856 - protein, 485 aa, Bacillus sp.
HHDGTNGTIMQYFEWNVPNDGQHWNRLHNNAQNLKNAGITAIWIPPAWKGTSQNDVGYGAYDLYDLGEFNQKGTVRTKYGTKAELERAIRSLKANGIQVYGDVVMNHKGGADFTERVQAVEVNPQNRNQEVSGTVQIEAWTGFNFPGRGNQHSSFKWRWYHFDGTDWDQSRQLANRIYKFRGDGKAWDWEVDTENGNYDYLMYADVDMDHPEVINELNRWGVWYANTLNLDGFRLDAVKHIKFSFMRDWLGHVRGQTGKNLFAVAEYWKNDLGALENYLSKTNWTMSAFDVPLHYNLYQASNSSGNYDMRNLLNGTLVQRHPSHAVTFVDNHDTQPGEALESFVQGWFKPLAYATILTREQGYPQVFYGDYYGIPSDGVPSYRQQIDPLLKARQQYAYGRQHDYFDHWDVIGWTREGNASHPNSGLATIMSDGPGGSKWMYVGRQKAGEVWHDMTGNRSGTVTINQDGWGHFFVNGGSVSVWVKR

SEQ ID NO: 31857 - protein, 485 aa, Bacillus sp.
HHDGTNGTIMQYFEWNVPNDGQHWNRLHNNAQNLKNAGITAIWIPPAWKGTSQNDVGYGAYDLYDLGEFNIKGTVRTKYGTKAELERAIRSLKANGIQVYGDVVMNHKGGADFTERVQAVEVNPQNRNQEVSGTYQIEAWTGFNFPGRGNQHSSFKWRWYHFDGTDWDQSRQLANRIYKFRGDGKAWDWEVDTENGNYDYLMYADVDMDHPEVINELNRWGVWYANTLNLDGFRLDAVKHIKFSFMRDWLGHVRGQTGKNLFAVAEYWKNDLGALENYLSKTNWTMSAFDVPLHYNLYQASNSSGNYDMRNLLNGTLVQRHPSHAVTFVDNHDTQPGEALESFVQGWFKPLAYATILTREQGYPQVFYGDYYGIPSDGVPSYRQQIDPLLKARQQYAYGRQHDYFDHWDVIGWTREGNASHPNSGLATIMSDGPGGSKWMYVGRQKAGEVWHDMTGNRSGTVTINQDGWGHFFVNGGSVSVWVKR

SEQ ID NO: 31858 - protein, 485 aa, Bacillus sp.
HHDGTNGTIMQYFEWNVPNDGQHWNRLHNNAQNLKNAGITAIWIPPAWKGTSQNDVGYGAYDLYDLGEFNQKGTVRTKYGTKAELERAIRSLKANGIQVYGDVVMNHKGGADFTERVQAVEVNPQNRNQEVSGTYQIEAWTGFNFPGRGNQHSSFKWRWYHFDGTDWDQSRQLANRIYKFRGDGKAWDWEVDTENGNYDYLMYADVDMDHPEVINELNRRGVWYANTLNLDGFRLDAVKHIKFSFMRDWLGHVRGQTGKNLFAVAEYWKNDLGALENYLSKTNWTMSAFDVPLHYNLYQASNSSGNYDMRNLLNGTLVQRHPSHAVTFVDNHDTQPGEALESFVQGWFKPLAYATILTREQGYPQVFYGDYYGIPSDGVPSYRQQIDPLLKARQQYAYGRQHDYFDHWDVIGWTREGNASHPNSGLATIMSDGPGGSKWMYVGRQKAGEVWHDMTGNRSGTVTINQDGWGHFFVNGGSVSVWVKR

SEQ ID NO: 31859 - protein, 485 aa, Bacillus sp.
HHDGTNGTIMQYFEWNVPNDGQHWNRLHNNAQNLKNAGITAIWIPPAWKGTSQNDVGYGAYDLGDLGEFNQKGTVRTKYGTKAELERAIRSLKANGIQVYGDVVMNHKGGADFTERVQAVEVNPQNRNQEVSGTYQIEAWTGFNFPGRGNQHSSFKWRWYHFDGTDWDQSRQLANRIYKFRGDGKAWDWEVDTENGNYDYLMYADVDMDHPEVINELNRWGVWYANTLNLDGFRLDAVKHIKFSFMRDWLGHVRGQTGKNLFAVAEYWKNDLGALENYLSKTNWTMSAFDVPLHYNLYQASNSSGNYDMRNLLNGTLVQRHPSHAVTFVDNHDTQPGEALESFVQGWFKPLAYATILTREQGYPQVFYGDYYGIPSDGVPSYRQQIDPLLKARQQYAYGRQHDYFDHWDVIGWTREGNASHPNSGLATIMSDGPGGSKWMYVGRQKAGEVWHDMTGNRSGTVTINQDGWGHFFVNGGSVSVWVKR

SEQ ID NO: 31860 - protein, 485 aa, Bacillus sp.
HHDGTNGTIMQYFEWNVPNDGQHWNRLHNNAQNLKNAGITAIWIPPAWKGTSQNDVGYGAYDLYDLGEFNQKGTVRTKYGTKAELERAIRSLKANGIQVYGDVVMNHKGGADFTERVQAVEVNPQNRNQEVSGTYQIEAWTGFNFPGRGNQHSSFKWRWYHFDGTDWDQSRQLANRIYKFRGDGKAWDWEVDTENGNYDYLMYADVDMDHPEVINELNRWGVWYANTLNLDGFRLDAVKHIKFSFMRDWLGHVRGQTGKNLFAVAEYWKNDLGALENYLSKTNWTMSAFDVPLHYNLYQASNSSGNYDMRNLLNGTLVQRHPSHAVTFVDNHDTQPGEALESFVQGWFKPLAYATILTREQGYPQVFYGDYYGIPSDGVPSYRQQIDPLLKARQQYAYGRQHDYFDHWDVIGWTREGNASHPNSGAATIMSDGPGGSKWMYVGRQKAGEVWHDMTGNRSGTVTINQDGWGHFFVNGGSVSVWVKR

SEQ ID NO: 31861 - protein, 485 aa, Bacillus sp.
HHDGTNGTIMQYFEWNVPNDGQHWNRLHNNAQNLKNAGITAIWIPPAWKGTSQNDVGYGAYDLYDLGEFNQKGTVRTKYGTKAELERAIRSLKANGIQVYGDVVMNHKGGADFTERVQAVEVNPQNRNQEVSGTYQIEAWTGFNFPGRGNQHSSFKWRWYHFDGTDWDQSRQLANRIYKFRGDGKAWDWEVDTENGNYDYLMYADVDMDHPEVINELNRWGVWYANTLNLDGFRLDAVKHIKFSFMRDWLGHVRGQTGKNLFAVAEYWKNDLGALENYLSKTNWTMSAFDVPLHYNLYQASNSSGNYDMRNLLNGTLVQRHPSHAVTFVDNHDTQPGEALESFVQGWFKPLAYATILTREQGYPQVFYGDYYGIPSDGVPSYRQQIDPLLKARQQYAYGRQHDYFDHWDVAGWTREGNASHPNSGLATIMSDGPGGSKWMYVGRQKAGEVWHDMTGNRSGTVTINQDGWGHFFVNGGSVSVWVKR

SEQ ID NO: 31862 - protein, 485 aa, Bacillus sp.
HHDGTNGTIMQYFEWNVPNDGQHWNRLHNNAQNLKRAGITAIWIPPAWKGTSQNDVGYGAYDLYDLGEFNQKGTVRTKYGTKAELERAIRSLKANGIQVYGDVVMNHKGGADFTERVQAVEVNPQNRNQEVSGTYQIEAWTGFNFPGRGNQHSSFKWRWYHFDGTDWDQSRQLANRIYKFRGDGKAWDWEVDTENGNYDYLMYADVDMDHPEVINELNRWGVWYANTLNLDGFRLDAVKHIKFSFMRDWLGHVRGQTGKNLFAVAEYWKNDLGALENYLSKTNWTMSAFDVPLHYNLYQASNSSGNYDMRNLLNGTLVQRHPSHAVTFVDNHDTQPGEALESFVQGWFKPLAYATILTREQGYPQVFYGDYYGIPSDGVPSYRQQIDPLLKARQQYAYGRQHDYFDHWDVIGWTREGNASHPNSGLATIMSDGPGGSKWMYVGRQKAGEVWHDMTGNRSGTVTINQDGWGHFFVNGGSVSVWVKR

SEQ ID NO: 31863 - protein, 485 aa, Bacillus sp.
HHDGTNGTIMQYFEWNVPNDGQHWNRLHNNAQNLKNAGITAIWIPPAWKGTSQNDVGYGAYDLYDLGEFNQKGTVRTKYGTKAELERAIRSLKANGIQVYGDVVMNHKGGADFTERVQAVEVNPQNRNQEVSGTYQIEAWTGFNFPGRGNQHSSFKWRWYHFDGTDWDQSRQLANRIYKFRGDGKAWDWEVDTENGNYDYLMYADVDMDHPEVINELNRWGVWYANTLNLDGFRLDAVKHIKFSFMRDWLGHVRGQTGKNLFAVAEYWKNDLGALENYLSKTNWTMSAFDVPLHYNLYQASNSSGNYDMRNLLNGTLVQRHPSHAVTFVDNHDTQPGEALESFVQGWFKPLAYATILTREQGYPQVFYGDYYGIPSDGVPSYRQQIDPLLKARQQYAYGRQHDYFDHWDVIGWTAEGNASHPNSGLATIMSDGPGGSKWMYVGRQKAGEVWHDMTGNRSGTVTINQDGWGHFFVNGGSVSVWVKR

SEQ ID NO: 31864 - protein, 485 aa, Bacillus sp.
HHDGTNGTIMQYFEWNVPNDGQHWNRLHNNAQNLKNAGITAIWIPPAWKGTSQNDVGYGAYDLYDLGEFNQKGTVRTKYGTKAELERAIRSLKANGIQVYGDVVMNHKGGADFTERVQAVEVNPQNRNQEVSGTYQIEAWTGFNFPGRGNQHSSFKWRWYHFDGTDWDQSRQLANRIYKFRGDGKAWDWEVDTENGNYDYLMYADVDMDHPEVINELNRWGVWYANTLNLDGFRLDAVKHIKFSFMRDWLGHVRGQTGKNLFAVAEYWKNDLGALENYLSKTNWTMSAFDVPLHYNLYQASNSSGNYDMRNLLNGTLVQRHPSHAVTFVDNHDTQPGEALESFVQGWFKPLAYATILSREQGYPQVFYGDYYGIPSDGVPSYRQQIDPLLKARQQYAYGRQHDYFDHWDVIGWTREGNASHPNSGLATIMSDGPGGSKWMYVGRQKAGEVWHDMTGNRSGTVTINQDGWGHFFVNGGSVSVWVKR

SEQ ID NO: 31865 - protein, 485 aa, Bacillus sp.
HHDGTNGTIMQYFEWNVPNDGQHWNRLHNNAQNLKNAGITAIWIPPAWKGTSQNDVGYGAYDLYDLGEFNQKGTVRTKYGTKAELERAIRSLKANGIQVYGDVVMNHKGGADFTERVQAVEVNPQNRNQEVSGTYQIEAWTGFNFPGRGNQHSSFKWRWYHFDGTDWDQSRQLANRIYKFPGDGKAWDWEVDTENGNYDYLMYADVDMDHPEVINELNRWGVWYANTLNLDGFRLDAVKHIKFSFMRDWLGHVRGQTGKNLFAVAEYWKNDLGALENYLSKTNWTMSAFDVPLHYNLYQASNSSGNYDMRNLLNGTLVQRHPSHAVTFVDNHDTQPGEALESFVQGWFKPLAYATILTREQGYPQVFYGDYYGIPSDGVPSYRQQIDPLLKARQQYAYGRQHDYFDHWDVIGWTREGNASHPNSGLATIMSDGPGGSKWMYVGRQKAGEVWHDMTGNRSGTVTINQDGWGHFFVNGGSVSVWVKR

SEQ ID NO: 31866 - protein, 485 aa, Bacillus sp.
HHDGTNGTIMQYFEWNVPNDGQHWNRLHNNAQNLKNAGITAIWIPPAWKGTSQNDVGYGAYDLYDLGEFNQKGTVRTKYGTKAELERAIRSLKANGIQVYGDVVMNHKGGADFTERVQAVEVNPQNRNQEVSGTYQIEAWTGFNFPGRGNQHSSFKWRWYHFDGTDWDQSRQLANRIYKFRGDGKAWDWEVDTENGNYDYLMYADVDMDHPEVINELNRWGVWYANTLNLDGFRLDAVKHIKFSFMRDWLGHVRGQTGKNLFAVAEYWKNDLGALENYLSKTNWTMSAFDVPLHYNLYQASNSSGNYDMRNLLNGTLVQRHPSHAVTFVDNHDTQPGEALESFVQGWFKPLAYATILTREQGYPQVFYGDYYGIPSDGVPSYRQQIDPLLKARQQYAYGRQHDYFDHWDVIGWTREGNASHPNSGLATIMFDGPGGSKWMYVGRQKAGEVWHDMTGNRSGTVTINQDGWGHFFVNGGSVSVWVKR

SEQ ID NO: 31867 - protein, 485 aa, Bacillus sp.
HHDGTNGTIMQYFEWNVPNDGQHWNRLHNNAQNLKNAGITAIWIPPAWKGTSQNDVGYGAYDLYDLGEFNQKGTVRTKYGTKAELERAIRSLKANGIQVYGDVVMNHKGGADFTERVQAVEVNPQNRNQEVSGTYQIEAWTGFNFPGRGNQHSSFKWRWYHFDGTDWDQSRQLANRIYKFRGDGKAWDWEVDTENGNYDYLMYADVDMDHPEVINELNRWGVWYANTLNLDGFRLDAVKHIKFSFMRDWLGHVRGQTGKNLFAVAEYWKNDLGALENYLSKTNWTMSAFDVPLHYNLYQASNSSGNYDMRNLLNGTLVQRHPSHAVTFVDNHDTQPGEALESFVQGWFKPLAYATILTREQGYPQVFYGDYYGIPSDGVPSYRQQIDPLLKARQQYAYGRQHDYFDHWDVIGWTFEGNASHPNSGLATIMSDGPGGSKWMYVGRQKAGEVWHDMTGNRSGTVTINQDGWGHFFVNGGSVSVWVKR

SEQ ID NO: 31868 - protein, 483 aa, Bacillus sp. (in: firmicutes)
HHDGTNGTIMQYFEWNVPNDGQHWNRLHNNAQNLKNVGITAIWIPPAWKGTSQNDVGYGAYDLYDLGEFNQKGTVRTKYGTKAELERAIRSLKANGIQVYGDVVMNHKGGADFTERVQAVEVNPQNRNQEVSGTYQIEAWTGFNFPGRGNQHSSFKWRWYHFDGTDWDQSRQLANRIYKFRGKAWDWEVDTENGNYDYLMYADVDMDHPEVINELNRWGVWYANTLNLDGFRLDAVKHIKFSFMRDWLGHVRGQTGKNLFAIAEFWKNDLGALENYLSKTNWTMSAFDVPLHYNLYQASNSSGNYDMRNLLNGTLVQRHPSHAVTLVDNHDTQPGEALESFVQGWFKPLAYATILTREQGYPCVFYGDYYGIPSDGVPSYRQQIDPLLKARQQYAYGRQHDYFDHWDVIGWTREGNASHPNSGLATIMSDGPGGSKWMYVGRQKAGEVWHDMTGNRSGTVTINQDGWGHFFVNGGSVSVWVKR

SEQ ID NO: 31869 - protein, 485 aa, Bacillus sp.
HHDGTNGTIMQYFEWNVPNDGQHWNRLHNNAQNLKNAGITAIWIPPAWKGTSQNDVGYGAYDLYDLGEFNQKGTVRTKYGTKAELERAIRSLKANGIQVYGDVVMNHKGGADFTERVQAVEVNPQNRNQEVSGTYQIEAWTGFNFPGRGNQHSSFKWRWYHFDGTDWDQSRQLANRIYKFRGDGKAWDWEVDTENGNYDYLMYADVDMDHPEVINELNRWGVWYANTLNLDGFRLDAVKHIKFSFMRDWLGHVRGQTGKNLFAVAEYWKNDLGALENYLSKTNGTMSAFDVPLHYNLYQASNSKGNYDMRNLLNGTLVQRHPSHAVTFVDNHDTQPGEALESFVQGWFKPLAYATILTREQGYPQVFYGDYYGIPSDGVPSYRQQIDPLLKARQQYAYGRQHDYFDHWDVIGWTREGNASHPNSGLATIMSDGPGGSKWMYVGRQKAGEVWHDMTGNRSGTVTINQDGWGHFFVNGGSVSVWVKR

SEQ ID NO: 31870 - protein, 485 aa, Bacillus sp.
HHDGTNGTIMQYFEWNVPNDGQHWNRLHNNAQNLKNAGITAIWIPPAWKGTSQNDVGYGAYDLYDLGEFNQKGTVRTKYGTKAELERAIRSLKANGIQVYGDVVMNHKGGADFTERVQAVEVNPQNRNQEVSGTYQIEAWTGFNFPGRGNQHSSFKWRWYHFDGTDWDQSRQLANRIYKFRGDGKAWDWEVDTENGNYDYLMYADVDMDHPEVINELNRWGVWYANTLNLDGFRLDAVKHIKFSFMRDWCGHVRGQTGKNLFAVAEYWKNDLGALENYLSKTNWTMSAFDVPLHYNLYQASNSSGNYDMRNLLNGTLVQRHPSHAVTFVDNHDTQPGEALESFVQGWFKPLAYATILTREQGYPQVFYGDYYGIPSDGVPSYRQQIDPLLKARQQYAYGRQHDYFDHWDVIGWTREGNASHPNSGLATIMSDGPGGSKWMYVGRQKAGEVWHDMTGNRSGTVTINQDGWGHFFVNGGSVSVWVKR

SEQ ID NO: 31871 - protein, 485 aa, Bacillus sp.
HHDGTNGTIMQYFEWNVPNDGQHWNRLHNNAQNLKNAGITAIWIPPAWKGTSQNDVGYGAYDLYDLGEFNQKGTVRTKYGTKAELERAIRSLKANGIQVYGDVVMNHKGGADFTERVQAVEVNPQNRNQEVSGTYQIEAWTGFNFPGRGNQHSSFKWRWYHFDGTDWDQSRQLANRIYKFRGDGKAWDWEVDTENGNYDYLMYADVDMDHPEVINELNRWGVWYANTLNLDGFRLDAVKHIKFSFMRDWLGHVRGQTGKNLFAVAEYWKNDLGALENYLSKTNWTMSAFDVPLHYNLYQASNSSGNYDMRNLLNGTLVQRHPSHAVTFVDNHDTQPGEALESFVQGWFKPLAYATILTREQGYPQVFYGDYYGIPSDGVPSYRQQIDPLLKARQQYAYGRQHDYFDHWDVIGWTREGNASHPNSGLATIMSDGPGGSKWMYIGRQKAGEVWHDMTGNRSGTVTINQDGWGHFFVNGGSVSVWVKR

SEQ ID NO: 31872 - protein, 485 aa, Bacillus sp.
HHDGTNGTIMQYFEWNVPNDGQHWNRLHNNAQNLKNAGITAIWIPPAWKGTSQNDVGYGAYDLYDLGEFNQKGTVRTKYGTKAELERAIRSLKANGIQVYGDVVMNHKGGADFTERVQAVEVNPQNRNQEVSGTYQIEAWTGFNFPGRGNQHSSFKWRWYHFDGTDWDQSRQLANRIYKFRGDGKAWDWEVDTENGNYDYLMYADVDMDHPEVINELNRWSVWYANTLNLDGFRLDAVKHIKFSFMRDWLGHVRGQTGKNLFAVAEYWKNDLGALENYLSKTNWTMSAFDVPLHYNLYQASNSSGNYDMRNLLNGTLVQRHPSHAVTFVDNHDTQPGEALESFVQGWFKPLAYATILTREQGYPQVFYGDYYGIPSDGVPSYRQQIDPLLKARQQYAYGRQHDYFDHWDVIGWTREGNASHPNSGLATIMSDGPGGSKWMYVGRQKAGEVWHDMTGNRSGTVTINQDGWGHFFVNGGSVSVWVKR

SEQ ID NO: 31873 - protein, 485 aa, Bacillus sp.
HHDGTNGTIMQYFEWNVPNDGQHWNRLHNNAQNLKNAGITAIWIPPAWKGTSQNDVGYGAYDLYDLGEFNQKGTVRTKYGTKAELERAIRSLKANGIQVYGDVVMNHKGGADFTERVQAVEVNPQNRNQEVSGTYQIEAWTGFNFPGRGNQHSSFKWRWYHFDGTDWDQSRQLANRIYKFRGDGKAWDWEVDTENGNYDYLMYADVDMDHPEVINELNRWGVWYANTLNLDGFRLDAVKHIKFSFMRDWLGHVRGQTGKNLFAVAEYWKNDLGALENYLSKTNWTMSAFDVPLHYNLYQASNSSGNYDMRNLLNGTLVQRHPSHAVTFVDNHDTQPGEALESFVQGWFKPLAYATILTREQGYPQVFYGDYYGIPSDGVPSYRQQIDPLSKARQQYAYGRQHDYFDHWDVIGWTREGNASHPNSGLATIMSDGPGGSKWMYVGRQKAGEVWHDMTGNRSGTVTINQDGWGHFFVNGGSVSVWVKR

SEQ ID NO: 31874 - protein, 485 aa, Bacillus sp.
HHDGTNGTIMQYFEWNVPNDGQHWNRLHNNAQNLKNAGITAIWIPPAWKGTSQNDVGYGAYDLYDLGEFNQKGTVRTKYGTKAELERAIRSLKANGIQVYGDVVMNHKGGADFTERVQAVEVNPQNRNQEVSGTYQIEAWTGFNFPGRGNQHSSFKWRWYHFDGTDWDQSRQLASRIYKFRGDGKAWDWEVDTENGNYDYLMYADVDMDHPEVINELNRWGVWYANTLNLDGFRLDAVKHIKFSFMRDWLGHVRGQTGKNLFAVAEYWKNDLGALENYLSKTNWTMSAFDVPLHYNLYQASNSSGNYDMRNLLNGTLVQRHPSHAVTFVDNHDTQPGEALESFVQGWFKPLAYATILTREQGYPQVFYGDYYGIPSDGVPSYRQQIDPLLKARQQYAYGRQHDYFDHWDVIGWTREGNASHPNSGLATIMSDGPGGSKWMYVGRQKAGEVWHDMTGNRSGTVTINQDGWGHFFVNGGSVSVWVKR

SEQ ID NO: 31875 - protein, 485 aa, Bacillus sp.
HHDGTNGTIMQYFEWNVPNDGQHWNRLHNNAQNLKNAGITAIWIPPAWKGTSQNDVGYGAYDLYDLGEFNQKGTVRTKYGTKAELERAIRSLKANGIQVYGDVVMNHKGGADFTERVQAVEVNPQNRNQEVSGTYQIEAWTGFNFPGRGNQHSSFKWRWYHFDGTDWDQSRQLANRIYKFRGDGKAWDWEVDTENGNYDYLMYADVDMDHPEVINELNRWGVWYANTLNLDGFRLDAVKHIKFSFMRDWLGHVRGQTGKNLFAVAEYWKNDLGAKENYLSKTNWTMSAFDVPLHYNLYQASNSSGNYDMRNLLNGTLVQRHPSHAVTFVDNHDTQPGEALESFVQGWFKPLAYATILTREQGYPQVFYGDYYGIPSDGVPSYRQQIDPLLKARQQYAYGRQHDYFDHWDVIGWTREGNASHPNSGLATIMSDGPGGSKWMYVGRQKAGEVWHDMTGNRSGTVTINQDGWGHFFVNGGSVSVWVKR

SEQ ID NO: 31876 - protein, 485 aa, Bacillus sp.
HHDGTNGTIMQYFEWNVPNDGQHWNRLHNNAQNLKNAGITAIWIPPAWKGTSQNDVGYGAYDLYDLGEFNQKGTVRTKYGTKAELERAIRSLKANGIQVYGDVVMNHKGGADFTERVQAVEVNPQNRNQEVSGTYQIEAWTGFNFPGRGNQHSSFKWRWYHFDGTDWDQSRQLANRIYKFRGDGKAWDWEVDTENGNYDYLMYADVDMDHPEVINELNRWGVWYANTLNLDGFRLDAVKHIKFSFMRDWLGHVRGQTGKNLFAVAEYWKNDLGALENYLSKTNWTMWAFDVPLHYNLYQASNSSGNYDMRNLLNGTLVQRHPSHAVTFVDNHDTQPGEALESFVQGWFKPLAYATILTREQGYPQVFYGDYYGIPSDGVPSYRQQIDPLLKARQQYAYGRQHDYFDHWDVIGWTREGNASHPNSGLATIMSDGPGGSKWMYVGRQKAGEVWHDMTGNRSGTVTINQDGWGHFFVNGGSVSVWVKR

SEQ ID NO: 31877 - protein, 485 aa, Bacillus sp.
HHDGTNGTIMQYFEWNVPNDGQHWNRLHNNAQNLKNAGITAIWIPPAWKGTSQNDVGYGAYDLYDLGEFNQKGTVRTKYGTKAELERAIRSLKANGIQVYGDVVMNHKGGADFTERVQAVEVNPQNRNQEVSGTYQIEAWTGFNFPGRGNQHSSFKWRWYHFDCTDWDQSRQLANRIYKFRGDGKAWDWEVDTENGNYDYLMYADVDMDHPEVINELNRWGVWYANTLNLDGFRLDAVKHIKFSFMRDWLGHVRGQTGKNLFAVAEYWKNDLGALENYLSKTNWTMSAFDVPLHYNLYQASNSSGNYDMRNLLNGTLVQRHPSHAVTFVDNHDTQPGEALESFVQGWFKPLAYATILTREQGYPQVFYGDYYGIPSDGVPSYRQQIDPLLKARQQYAYGRQHDYFDHWDVIGWTREGNASHPNSGLATIMSDGPGGSKWMYVGRQKAGEVWHDMTGNRSGTVTINQDGWGHFFVNGGSVSVWVKR

SEQ ID NO: 31878 - protein, 485 aa, Bacillus sp.
HHDGTNGTIMQYFEWNVPNDGQHWNRLHNNAQNLKNAGITAIWIPPAWKGTSQNDVGYGAYDLYDLGEFNQKGTVRTKYGTKAELERAIRSLKANGIQVYGDVVMNHKGGADFTERVQAVEVNPQNRNQEVSGTYQIEAWTGFNFPGRGNQHSSFKWRWYHFDGTDWDQSRQLANRIYKFRGDGKAWDWEVDTENGNYDYLMYADVDMDHPEVINELNRWGVWYANTLNLDGFRLDAVKHIKFSFMRDWLGHVRGQTGKNLFAVAEYWKNDLGALENYLSKTNWTMSAFDVPLHYNLYQASNSSGNYDMRNLLNGTLVQRHPSHAVTFVDNHDTQPGEALCSFVQGWFKPLAYATILTREQGYPQVFYGDYYGIPSDGVPSYRQQIDPLLKARQQYAYGRQHDYFDHWDVIGWTREGNASHPNSGLATIMSDGPGGSKWMYVGRQKAGEVWHDMTGNRSGTVTINQDGWGHFFVNGGSVSVWVKR

SEQ ID NO: 31879 - protein, 485 aa, Bacillus sp.
HHDGTNGTIMQYFEWNVPNDGQHWNRLHNNAQNLKNAGITAIWIPPAWKGTSQNDVGYGAYDLYDLGEFNQKGTVRTKYGTKAELERAIRSLKANGIQVYGDVVMNHKGGADFTERVQAVEVNPQNRNQEVSGTYQIEAWTGFNFPGRGNQHSSFKWRWYHFDGTDWDQSRQLANRIYKFRGDGKAWDWEVDTENGNYDYLMYADVDMDHPEVINELNRWGVWYANTLNLDGFRLDAVKHIKFSFMRDWLGHVRGQTGKNLFAVAEYWKNDLGALENYLSKTNWTMSAFDVPLHYNLYQASNSSGNYDMRNLLNGTLVQRHPSHAVTFVDNHDTQPGEALESFVQGWFKPLAYATICTREQGYPQVFYGDYYGIPSDGVPSYRQQIDPLLKARQQYAYGRQHDYFDHWDVIGWTREGNASHPNSGLATIMSDGPGGSKWMYVGRQKAGEVWHDMTGNRSGTVTINQDGWGHFFVNGGSVSVWVKR

SEQ ID NO: 31880 - protein, 485 aa, Bacillus sp.
HHDGTNGTIMQYFEWNVPNDGQHWNRLHNNAQNLKNAGITAIWIPPAWKGTSQNDVGYGAYDLYDLGEFNQKGTVRTKYGTKAELERAIRSLKANGIQVYGDVVMNHKGGADFTERVQAVEVNPQNRNQEVSGTYQIEAWTGFNFPGRGNQHSSFKWRWYHFDGTDWDQSRQLANRIYKFRGDGKAWDWEVDTENGNYDYLMYADVDMDHPEVINELNRWGVWYANTLNLDGFRLDAVKHIKFSFMRDWLGHVRGQTGKNLFAVAEYWKNDLGALENYLSKTNWTMSAFDVPLHYNLYQASNSSGNYDMRNLLNGTLVQRHPSHAVTFVDNHDTQMGEALESFVQGWFKPLAYATILTREQGYPQVFYGDYYGIPSDGVPSYRQQIDPLLKARQQYAYGRQHDYFDHWDVIGWTREGNASHPNSGLATIMSDGPGGSKWMYVGRQKAGEVWHDMTGNRSGTVTINQDGWGHFFVNGGSVSVWVKR

SEQ ID NO: 31881 - protein, 485 aa, Bacillus sp.
HHDGTNGTIMQYFEWNVPNDGQHWNRLHNNAQNLKNAGITAIWIPPAWKGTSQNDVGYGAYDLYDLGEFNQKGTVRTKYGTKAELERAIRSLKANGIQVYGDVVMNHKGGADFTERVQAVEVNPQNRNQEVSGTYQIEAWTGFNFPGRGNQHSSFKWRWYHFDGTDWDQSRCLANRIYKFRGDGKAWDWEVDTENGNYDYLMYADVDMDHPEVINELNRWGVWYANTLNLDGFRLDAVKHIKFSFMRDWLGHVRGQTGKNLFAVAEYWKNDLGALENYLSKTNWTMSAFDVPLHYNLYQASNSSGNYDMRNLLNGTLVQRHPSHAVTFVDNHDTQPGEALESFVQGWFKPLAYATILTREQGYPQVFYGDYYGIPSDGVPSYRQQIDPLLKARQQYAYGRQHDYFDHWDVIGWTREGNASHPNSGLATIMSDGPGGSKWMYVGRQKAGEVWHDMTGNRSGTVTINQDGWGHFFVNGGSVSVWVKR

SEQ ID NO: 31882 - protein, 485 aa, Bacillus sp.
HHDGTNGTIMQYFEWNVPNDGQHWNRLHNNAQNLKNAGITMIWIPPAWKGTSQNDVGYGAYDLYDLGEFNQKGTVRTKYGTKAELERAIRSLKANGIQVYGDVVMNHKGGADFTERVQAVEVNPQNRNQEVSGTYQIEAWTGFNFPGRGNQHSSFKWRWYHFDGTDWDQSRQLANRIYKFRGDGKAWDWEVDTENGNYDYLMYADVDMDHPEVINELNRWGVWYANTLNLDGFRLDAVKHIKFSFMRDWLGHVRGQTGKNLFAVAEYWKNDLGALENYLSKTNWTMSAFDVPLHYNLYQASNSSGNYDMRNLLNGTLVQRHPSHAVTFVDNHDTQPGEALESFVQGWFKPLAYATILTREQGYPQVFYGDYYGIPSDGVPSYRQQIDPLLKARQQYAYGRQHDYFDHWDVIGWTREGNASHPNSGLATIMSDGPGGSKWMYVGRQKAGEVWHDMTGNRSGTVTINQDGWGHFFVNGGSVSVWVKR

SEQ ID NO: 31883 - protein, 485 aa, Bacillus sp.
HHDGTNGTIMQYFEWNVPNDGQHWNRLHNNAQNLKNAGITAIWIPPAWKGTSQNDVGYGAYDLYDLGEFNQKGTVRTKYGTKAELERAIRSLKANGIQVYGDVVMNHKGGADFTERVQAVEVNPQNRNQEVSGTYQIEAWTGFNFPGRGNQHSSFKWRWYHFDGTDWDQSRQLANRIYKFRGDGKAWDWEVDTENGNYDYLMYADVDMDHPEVINELNRWGVWYANTLNLDGFRLDAVKHIKFSFMRDWLGHVRGQTGKNLFAVAEYWKNDLGALENYMSKTNWTMSAFDVPLHYNLYQASNSSGNYDMRNLLNGTLVQRHPSHAVTFVDNHDTQPGEALESFVQGWFKPLAYATILTREQGYPQVFYGDYYGIPSDGVPSYRQQIDPLLKARQQYAYGRQHDYFDHWDVIGWTREGNASHPNSGLATIMSDGPGGSKWMYVGRQKAGEVWHDMTGNRSGTVTINQDGWGHFFVNGGSVSVWVKR

SEQ ID NO: 31884 - protein, 485 aa, Bacillus sp.
HHDGTNGTIMQYFEWNVPNDGQHWNRLHNNAQNLKEAGITAIWIPPAWKGTSQNDVGYGAYDLYDLGEFNQKGTVRTKYGTKAELERAIRSLKANGIQVYGDVVMNHKGGADFTERVQAVEVNPQNRNQEVSGTYQIEAWTGFNFPGRGNQHSSFKWRWYHFDGTDWDQSRQLANRIYKFRGDGKAWDWEVDTENGNYDYLMYADVDMDHPEVINELNRWGVWYANTLNLDGFRLDAVKHIKFSFMRDWLGHVRGQTGKNLFAVAEYWKNDLGALENYLSKTNWTMSAFDVPLHYNLYQASNSSGNYDMRNLLNGTLVQRHPSHAVTFVDNHDTQPGEALESFVQGWFKPLAYATILTREQGYPQVFYGDYYGIPSDGVPSYRQQIDPLLKARQQYAYGRQHDYFDHWDVIGWTREGNASHPNSGLATIMSDGPGGSKWMYVGRQKAGEVWHDMTGNRSGTVTINQDGWGHFFVNGGSVSVWVKR

SEQ ID NO: 31885 - protein, 485 aa, Bacillus sp.
HHDGTNGTIMQYFEWNVPNDGQHWNRLHNNAQNLKNAGITAIWIPPAWKGTSQNDVGYGAYDLYDLGEFNQKGTVRTKYGTKAELERAIRSLKANGIQVYGDVVMNHKGGADFTERVQAVEVNPQNRNQEVSGTYQIEAWTGFNFPGRGNQHSSFKWRWYHFDGTDWDQSRQLANRIYKFRGDGKAWDWEVDTENGNYDYLMYADVDMDHPEVINELNRWGVWYANTLNLDGFRLDAVKHIKFSFMRDWLGHVRGQTGKNLFAVAEYWKNDLGALENYLSKTNWTMSAFDVPLHYNLYQASNSSGNYDMRNLLNGTLVQRHPSHAVTFVDNHDTQPGEALESFVQGWFKPLAYATILTREQGYPQVFYGDYYGIPSDGVPSYRQQIDPLLKARQQYAYGRQHDYFDHWDVIGWTREGNASHPNSGLANIMSDGPGGSKWMYVGRQKAGEVWHDMTGNRSGTVTINQDGWGHFFVNGGSVSVWVKR

SEQ ID NO: 31886 - protein, 485 aa, Bacillus sp.
HHDGTNGTIMQYFEWNVPNDGQHWNRLHNNAQNLKNAGITAIWIPPAWKGTSQNDVGYGAYDLYDLGEFNQKGTVRTKYGTKAELERAIRSCKANGIQVYGDVVMNHKGGADFTERVQAVEVNPQNRNQEVSGTYQIEAWTGFNFPGRGNQHSSFKWRWYHFDGTDWDQSRQLANRIYKFRGDGKAWDWEVDTENGNYDYLMYADVDMDHPEVINELNRWGVWYANTLNLDGFRLDAVKHIKFSFMRDWLGHVRGQTGKNLFAVAEYWKNDLGALENYLSKTNWTMSAFDVPLHYNLYQASNSSGNYDMRNLLNGTLVQRHPSHAVTFVDNHDTQPGEALESFVQGWFKPLAYATILTREQGYPQVFYGDYYGIPSDGVPSYRQQIDPLLKARQQYAYGRQHDYFDHWDVIGWTREGNASHPNSGLATIMSDGPGGSKWMYVGRQKAGEVWHDMTGNRSGTVTINQDGWGHFFVNGGSVSVWVKR

SEQ ID NO: 31887 - protein, 485 aa, Bacillus sp.
HHDGTNGTIMQYFEWNVPNDGQHWNRLHNNAQNLKNAGITAIWIPPAWKGTSQNDVGYGAYDLYDLGEFNQKGTVRTKYGTKAELERAIRSLKANGIQVYGDVVMNHKGGADFTERVQAVEVNPQNRNQEVSGTYQIEAWTGFNFPGRGNQHSSFKWRWYHFDGTDWDQSRQLANRIYKFRGDGKAWDWEVDTENGNYDYLMYADVDMDHPEVINELNRWGVWYANTLNLDGFRLDAVKHIKFSFMRDWLGHVRGQTGKNLFAVAEYWKNDLGALENYLSKTNWTMSAFDVPLHYNLYQASNSSGNYDMRNLLNGTLVQRHPSHAVTFVDNHDTQPGEALESFVQGWFKPLAYATILTREQGYPQVFYGDYYGIPSDGVPSYRQQIDPLLKARQQYAYGRQHDYFDHWDVIGWTREGNASHPNSGLATIMSDGPGTSKWMYVGRQKAGEVWHDMTGNRSGTVTINQDGWGHFFVNGGSVSVWVKR

SEQ ID NO: 31888 - protein, 485 aa, Bacillus sp.
HHDGTNGTIMQYFEWNVPNDGQHWNRLHNNAQNLKNAGITAIWIPPAWKGTSQNDVGYGAYDLYDLGEFNQKGTVRTKYGTKAELERAIRSLKANGIQVYGDVVMNHKGGADFTERVQAVEVNPQNRNQEVSGTYQIEAWTGFNFPGRGNQHSSFKWRWYHFDGTDWDQSRQLANRIYKFRGDGKAWDWEVDTENGNYDYLMYADVDMDHPEVINELNRWGVWYANTLNLDGFRLDAVKHIKFSFMRDWLGHVRGQTGKNLFAVAEYWKNDLGALENYLSKTNWTMSAFDVPLHYNLYQASNSSGNYDMRNLLNGTLVQRHPSHAVTFVDNHDTQPGEALESFVQGWFKPLAYATILTREQNYPQVFYGDYYGIPSDGVPSYRQQIDPLLKARQQYAYGRQHDYFDHWDVIGWTREGNASHPNSGLATIMSDGPGGSKWMYVGRQKAGEVWHDMTGNRSGTVTINQDGWGHFFVNGGSVSVWVKR

SEQ ID NO: 31889 - protein, 485 aa, Bacillus sp.
HHDGTNGTIMQYFEWNVPNDGQHWNRLHNNAQNLKNAGITAIWIPPAWKGTSQNDVGYGAYDLYDLGEFNQKGTVRTKYGTKAELERAIRSLKANGIQVYGDVVMNHKGGADFTERVQAVEVNPQNCNQEVSGTYQIEAWTGFNFPGRGNQHSSFKWRWYHFDGTDWDQSRQLANRIYKFRGDGKAWDWEVDTENGNYDYLMYADVDMDHPEVINELNRWGVWYANTLNLDGFRLDAVKHIKFSFMRDWLGHVRGQTGKNLFAVAEYWKNDLGALENYLSKTNWTMSAFDVPLHYNLYQASNSSGNYDMRNLLNGTLVQRHPSHAVTFVDNHDTQPGEALESFVQGWFKPLAYATILTREQGYPQVFYGDYYGIPSDGVPSYRQQIDPLLKARQQYAYGRQHDYFDHWDVIGWTREGNASHPNSGLATIMSDGPGGSKWMYVGRQKAGEVWHDMTGNRSGTVTINQDGWGHFFVNGGSVSVWVKR

SEQ ID NO: 31890 - protein, 485 aa, Bacillus sp.
HHDGTNGTIMQYFEWNVPNDGQHWNRLHNNAQNLKNAGITAIWIPPAWKGTSQNDVGYGAYDLYDLGEFNQKGTVRTKYGTKAELERAIRSLKANGIQVYGDVVMNHKGGADFTERVQAVEVNPQNRNQEVSGTYQIEAWTGFNFPGRGNQHSSFKWRWYHFDGTDWDQSRQLANRIYKFRGDGKAWDWEVDTENGNYDYLMYADVDMDHPEVINELNRWGVWYANTLNLDGFRLDAVKHIKFSFMRDWLGHVRGQTGKNLFAVAEYWKNDLGALENYLSKTNWTMSAFDVPLHYNLYQASNSSGNYDMRNLLNGTLVQRHPSHAVTFVDNHDTQPGEALESFVQGWFKPLAYATILTREQGYPQVFYGDYYCIPSDGVPSYRQQIDPLLKARQQYAYGRQHDYFDHWDVIGWTREGNASHPNSGLATIMSDGPGGSKWMYVGRQKAGEVWHDMTGNRSGTVTINQDGWGHFFVNGGSVSVWVKR

SEQ ID NO: 31891 - protein, 485 aa, Bacillus sp.
HHDGTNGTIMQYFEWNVPNDGQHWNRLHNNAQNLKNAGITAIWIPPAWKGTSQNDVGYGAYDLYDLGEFNQKGTVRTKYGTKAELERAIRSLKANGIQVYGDVVMNHKGGADFTERVQAVEVNPQNRNQEVSGTYQIEAWTGFNFPGRGNQHSSFKLRWYHFDGTDWDQSRQLANRIYKFRGDGKAWDWEVDTENGNYDYLMYADVDMDHPEVINELNRWGVWYANTLNLDGFRLDAVKHIKFSFMRDWLGHVRGQTGKNLFAVAEYWKNDLGALENYLSKTNWTMSAFDVPLHYNLYQASNSSGNYDMRNLLNGTLVQRHPSHAVTFVDNHDTQPGEALESFVQGWFKPLAYATILTREQGYPQVFYGDYYGIPSDGVPSYRQQIDPLLKARQQYAYGRQHDYFDHWDVIGWTREGNASHPNSGLATIMSDGPGGSKWMYVGRQKAGEVWHDMTGNRSGTVTINQDGWGHFFVNGGSVSVWVKR

SEQ ID NO: 31892 - protein, 485 aa, Bacillus sp.
HHDGTNGTIMQYFEINVPNDGQHWNRLHNNAQNLKNAGITAIWIPPAWKGTSQNDVGYGAYDLYDLGEFNQKGTVRTKYGTKAELERAIRSLKANGIQVYGDVVMNHKGGADFTERVQAVEVNPQNRNQEVSGTYQIEAWTGFNFPGRGNQHSSFKWRWYHFDGTDWDQSRQLANRIYKFRGDGKAWDWEVDTENGNYDYLMYADVDMDHPEVINELNRWGVWYANTLNLDGFRLDAVKHIKFSFMRDWLGHVRGQTGKNLFAVAEYWKNDLGALENYLSKTNWTMSAFDVPLHYNLYQASNSSGNYDMRNLLNGTLVQRHPSHAVTFVDNHDTQPGEALESFVQGWFKPLAYATILTREQGYPQVFYGDYYGIPSDGVPSYRQQIDPLLKARQQYAYGRQHDYFDHWDVIGWTREGNASHPNSGLATIMSDGPGGSKWMYVGRQKAGEVWHDMTGNRSGTVTINQDGWGHFFVNGGSVSVWVKR

SEQ ID NO: 31893 - protein, 485 aa, Bacillus sp.
HHDGTNGTIMQYFEWNVPNDGQHWNRLHNNAQNLKNAGITAIWIPPAAKGTSQNDVGYGAYDLYDLGEFNQKGTVRTKYGTKAELERAIRSLKANGIQVYGDVVMNHKGGADFTERVQAVEVNPQNRNQEVSGTYQIEAWTGFNFPGRGNQHSSFKWRWYHFDGTDWDQSRQLANRIYKFRGDGKAWDWEVDTENGNYDYLMYADVDMDHPEVINELNRWGVWYANTLNLDGFRLDAVKHIKFSFMRDWLGHVRGQTGKNLFAVAEYWKNDLGALENYLSKTNWTMSAFDVPLHYNLYQASNSSGNYDMRNLLNGTLVQRHPSHAVTFVDNHDTQPGEALESFVQGWFKPLAYATILTREQGYPQVFYGDYYGIPSDGVPSYRQQIDPLLKARQQYAYGRQHDYFDHWDVIGWTREGNASHPNSGLATIMSDGPGGSKWMYVGRQKAGEVWHDMTGNRSGTVTINQDGWGHFFVNGGSVSVWVKR

SEQ ID NO: 31894 - protein, 485 aa, Bacillus sp.
HHDGTNGTIMQYFEWNVPNDGQHWNRLHNNAQNLKNAGITAIWIPPAWKGTSQNDVGYGAYDLYDLGEFNQKGTVRTKYGTKAELERAIRSLKANGIQVYGDVVMNHKGGADFTERVQAVEVNPQNRNQEVSGTYQIEAWTGFNFPGRGNQHSSFKWRWYHFDGTDWDQSRQLANRIYKFRGDGKAWDWEVDTENGNYDYLMYADVDMDHPEVINELNRIGVWYANTLNLDGFRLDAVKHIKFSFMRDWLGHVRGQTGKNLFAVAEYWKNDLGALENYLSKTNWTMSAFDVPLHYNLYQASNSSGNYDMRNLLNGTLVQRHPSHAVTFVDNHDTQPGEALESFVQGWFKPLAYATILTREQGYPQVFYGDYYGIPSDGVPSYRQQIDPLLKARQQYAYGRQHDYFDHWDVIGWTREGNASHPNSGLATIMSDGPGGSKWMYVGRQKAGEVWHDMTGNRSGTVTINQDGWGHFFVNGGSVSVWVKR

SEQ ID NO: 31895 - protein, 485 aa, Bacillus sp.
HHDGTNGTIMQYFEWNVPNDGQHWNRLHNNAQNLKNAGITAIWIPPAWKGTSQNDVGYGAYDLYDLGEFNQKGTVRTKYGTKAELERAIRSLKANGIQVYGDVVMNHKGGADFTERVQAVEVNPQNRNQEVSGTYQIEAWTGFNFPGRGNQHSSFKWRWYHFDGTDWDQSRQLANRIYKFRGDGKAWDWEVDTENGNYDYLMYADVDMDHPEVINELNRWGVWYANTLNLDGFRLDAVKHIKFSFMRDWLGHVRGQTGKNLRAVAEYWKNDLGALENYLSKTNWTMSAFDVPLHYNLYQASNSSGNYDMRNLLNGTLVQRHPSHAVTFVDNHDTQPGEALESFVQGWFKPLAYATILTREQGYPQVFYGDYYGIPSDGVPSYRQQIDPLLKARQQYAYGRQHDYFDHWDVIGWTREGNASHPNSGLATIMSDGPGGSKWMYVGRQKAGEVWHDMTGNRSGTVTINQDGWGHFFVNGGSVSVWVKR

SEQ ID NO: 31896 - protein, 485 aa, Bacillus sp.
HHDGTNGTIMQYFEWNVPNDGQHWNRLHNNAQNLKNAGITAIWIPPAWKGTSQNDVGYGAYDLYDLGEFNQKGTVRTKYGTKAELERAIRSLKANGIQVYGDVVMNHKGGADFTERVQAVEVNPQNRNQEVSGTYQIEAWTGFNFPGRGNQHSSFKWRWYHFDGTDWDQSRQLANRIYKFRGDGKAWDWEVDTENGNYDYLMYADVDMDHPEVINELNRWGVWYANTLNLDGFRLDAVKHIKFSFMRDWLGHVRGQTGKNLFAVAEYWKNDLGALENYLSKTNWTMSAFDVPLHYNLYQASNSSGNYDMRNLLNGTLVQRHPSHAVTFVDNHDTQPGEALESFVQGWFKPLAYATILTREQGYPQVFYGDYYGIPSDGVPSYRQQILPLLKARQQYAYGRQHDYFDHWDVIGWTREGNASHPNSGLATIMSDGPGGSKWMYVGRQKAGEVWHDMTGNRSGTVTINQDGWGHFFVNGGSVSVWVKR

SEQ ID NO: 31897 - protein, 485 aa, Bacillus sp.
HHDGTNGTIMQYFEWNVPGDGQHWNRLHNNAQNLKNAGITAIWIPPAWKGTSQNDVGYGAYDLYDLGEFNQKGTVRTKYGTKAELERAIRSLKANGIQVYGDVVMNHKGGADFTERVQAVEVNPQNRNQEVSGTYQIEAWTGFNFPGRGNQHSSFKWRWYHFDGTDWDQSRQLANRIYKFRGDGKAWDWEVDTENGNYDYLMYADVDMDHPEVINELNRWGVWYANTLNLDGFRLDAVKHIKFSFMRDWLGHVRGQTGKNLFAVAEYWKNDLGALENYLSKTNWTMSAFDVPLHYNLYQASNSSGNYDMRNLLNGTLVQRHPSHAVTFVDNHDTQPGEALESFVQGWFKPLAYATILTREQGYPQVFYGDYYGIPSDGVPSYRQQIDPLLKARQQYAYGRQHDYFDHWDVIGWTREGNASHPNSGLATIMSDGPGGSKWMYVGRQKAGEVWHDMTGNRSGTVTINQDGWGHFFVNGGSVSVWVKR

SEQ ID NO: 31898 - protein, 485 aa, Bacillus sp.
HHDGTNGTIMQYFEWNVPNDGQHWNRLHNNAQNLKNAGITAIWIPPAWKGTSQNDVGYGAYDLYDLGEFNQKGTVRTKYGTKAELERAIRSLKANGIQVYGDVVMNHKGGADFTERVQAVEVNPQNRNQEVSGTYQIEAWTGFNFPGRGNQHSSFKWRWYHFDGTDWDQSRQLANRIYKFRGDGKAWDWEVDTENGNYDYLMYADVDMDHPEVINELNRWGVWYANTLNLDGFRLDAVKHIKFSFMRDWLGHVRGQTGKNLFATAEYWKNDLGALENYLSKTNWTMSAFDVPLHYNLYQASNSSGNYDMRNLLNGTLVQRHPSHAVTFVDNHDTQPGEALESFVQGWFKPLAYATILTREQGYPQVFYGDYYGIPSDGVPSYRQQIDPLLKARQQYAYGRQHDYFDHWDVIGWTREGNASHPNSGLATIMSDGPGGSKWMYVGRQKAGEVWHDMTGNRSGTVTINQDGWGHFFVNGGSVSVWVKR

SEQ ID NO: 31899 - protein, 485 aa, Bacillus sp.
HHDGTNGTIMQYFEWNVPNDGQHWNRLHNNAQNLKNAGITAIWIPPAWKGTSQNDVGYGAYDLYDLGEFNQKGTVRTKYGTKAELERAIRSLKANGIQVYGDVVMNHKGGADFTERVQAVEVNPQNRNQEVSGTYQIEAWTGFNFPGRGNQHSSFKWRWYHFDGTDWDQSRQLANRIYKFRGDGKAWDWEVDTENGNYDYLMYADVDMDHPEVINELNRWGVWYANTLNVDGFRLDAVKHIKFSFMRDWLGHVRGQTGKNLFAVAEYWKNDLGALENYLSKTNWTMSAFDVPLHYNLYQASNSSGNYDMRNLLNGTLVQRHPSHAVTFVDNHDTQPGEALESFVQGWFKPLAYATILTREQGYPQVFYGDYYGIPSDGVPSYRQQIDPLLKARQQYAYGRQHDYFDHWDVIGWTREGNASHPNSGLATIMSDGPGGSKWMYVGRQKAGEVWHDMTGNRSGTVTINQDGWGHFFVNGGSVSVWVKR

SEQ ID NO: 31900 - protein, 485 aa, Bacillus sp.
HHDGTNGTIMQYFEWNVPNDGQHWNRLHNNAQNLKNAGITAIWIPPAWKGTSQNDVGYGAYDLYDLGEFNQKGTVRTKYGTKAELERAIRSLKANGIQVYGDVVMNHKGGADFTERVQAVEVNPQNRNQEVSGTYQIEAWTGFNFPGRGNQHSSFKWRWYHFDGTDWDQSRQLANRIYKFRGDGKAWDWEVDTENGNYDYLMYADVDMDHPEVINELNRWGVWYANTLNLDGFRLDAVKHIKFSFMRDWLGHVRGQTGKNLFAVAEYWKNDLGALENYLSKTNWTMSAFDVPLHYNLYQASNSSGNYDMRNLLNGTLVQRHPSHAVTFVDNHDTQPGEALESFVQGWFKPLAYATILTREQGYPQVFYGDYYGIPSDGVPSYRQQIDPLLKARQQYAYGRQHDYFDHWDVIGWTREGNASHPNSGLALIMSDGPGGSKWMYVGRQKAGEVWHDMTGNRSGTVTINQDGWGHFFVNGGSVSVWVKR

SEQ ID NO: 31901 - protein, 485 aa, Bacillus sp.
HHDGTNGTIMQYFEWNVPNDGQHWNRLHNNAQNLKNAGITAIWIPPAWKGTSQNDVGYGAYDLYDLGEFNQKGTVRTKYGTKAELERAIRSLKANGIQVYGDVVMNHKGGADFTERVQAVEVNPQNRNQEVSGTYQIEAWTGFNFPGRGNQHSSFKWRWYHFDGTDWDQSRQLANRIYKFRGDGKAWDWEVDTENGNYDYLMYADVDMDHPEVINELNRWGVWYANTLNLDGFRLDAVKHIKFSFMRDWLGHVRGQTGKNLFAVAEYWKNDLGALENYLSKTNWTMSAFDVPLHYNLYQASNSSGNYDMRNLLNGTLVQRHPSHAVTFVDNHDTQPGEALESFVQGWFSPLAYATILTREQGYPQVFYGDYYGIPSDGVPSYRQQIDPLLKARQQYAYGRQHDYFDHWDVIGWTREGNASHPNSGLATIMSDGPGGSKWMYVGRQKAGEVWHDMTGNRSGTVTINQDGWGHFFVNGGSVSVWVKR

SEQ ID NO: 31902 - protein, 485 aa, Bacillus sp.
HHDGTNGTIMQYFEWNVPNDGQHWNRLHNNAQNLKNAGITAIWIPPAWKGTSQNDVGYGAYDLYDLGEFNQKGTVRTKYGTKAELERAIRSLKANGIQVYGDVVMNHKGGADFTERVQAVEVNPQNRNQEVSGTYQIEAWTGFNFPGRGNQHSSFKWRWYHFDGTDWDQSRQLANRIYKFRGDGKAWDWEVDTENGNYDYLMYADVDMDHPEVINELNRWGVWYANTLNLDGFRLDAVKHIKFSFMRDWLGHARGQTGKNLFAVAEYWKNDLGALENYLSKTNWTMSAFDVPLHYNLYQASNSSGNYDMRNLLNGTLVQRHPSHAVTFVDNHDTQPGEALESFVQGWFKPLAYATILTREQGYPQVFYGDYYGIPSDGVPSYRQQIDPLLKARQQYAYGRQHDYFDHWDVIGWTREGNASHPNSGLATIMSDGPGGSKWMYVGRQKAGEVWHDMTGNRSGTVTINQDGWGHFFVNGGSVSVWVKR

SEQ ID NO: 31903 - protein, 485 aa, Bacillus sp.
HHDGTNGTIMQYFEGNVPNDGQHWNRLHNNAQNLKNAGITAIWIPPAWKGTSQNDVGYGAYDLYDLGEFNQKGTVRTKYGTKAELERAIRSLKANGIQVYGDVVMNHKGGADFTERVQAVEVNPQNRNQEVSGTYQIEAWTGFNFPGRGNQHSSFKWRWYHFDGTDWDQSRQLANRIYKFRGDGKAWDWEVDTENGNYDYLMYADVDMDHPEVINELNRWGVWYANTLNLDGFRLDAVKHIKFSFMRDWLGHVRGQTGKNLFAVAEYWKNDLGALENYLSKTNWTMSAFDVPLHYNLYQASNSSGNYDMRNLLNGTLVQRHPSHAVTFVDNHDTQPGEALESFVQGWFKPLAYATILTREQGYPQVFYGDYYGIPSDGVPSYRQQIDPLLKARQQYAYGRQHDYFDHWDVIGWTREGNASHPNSGLATIMSDGPGGSKWMYVGRQKAGEVWHDMTGNRSGTVTINQDGWGHFFVNGGSVSVWVKR

SEQ ID NO: 31904 - protein, 485 aa, Bacillus sp.
HHDGTNGTIMQYFEWNVPNDGQHWNRLHNNAQNLKNAGITAIWIPPAWKGTSQNDVGYGAYDLYDLGEFNQKGTVRTKYGTKAELERAIRSLKANGIQVYGDVVMNHKGGADFTERVQAVEVNPQNRNQEVSGTYQIEAWTGFNFPGRGNQHSSFKWRWYHFDGTDWDQSRQLALRIYKFRGDGKAWDWEVDTENGNYDYLMYADVDMDHPEVINELNRWGVWYANTLNLDGFRLDAVKHIKFSFMRDWLGHVRGQTGKNLFAVAEYWKNDLGALENYLSKTNWTMSAFDVPLHYNLYQASNSSGNYDMRNLLNGTLVQRHPSHAVTFVDNHDTQPGEALESFVQGWFKPLAYATILTREQGYPQVFYGDYYGIPSDGVPSYRQQIDPLLKARQQYAYGRQHDYFDHWDVIGWTREGNASHPNSGLATIMSDGPGGSKWMYVGRQKAGEVWHDMTGNRSGTVTINQDGWGHFFVNGGSVSVWVKR

SEQ ID NO: 31905 - protein, 485 aa, Bacillus sp.
HHDGTNGTIMQYFEWNVPNDGQHWNRLHNNAQNLKNAGITAIWIPPAWKGTSQNDVGYGAYDLYDLGEFNQKGTVRTKYGTKAELERAIRSLKANGIQVYGDVVMNHKGGADFTERVQAVEVNPQNRNQEVSGTYQIEAWTGFNFPGRGNQHSSFKWRWYHFDGTDWDQSRQLANRIYKFRGDGKAWDWEVDTENGNYDYLMYADVDMDHPEVINELNRWGVLYANTLNLDGFRLDAVKHIKFSFMRDWLGHVRGQTGKNLFAVAEYWKNDLGALENYLSKTNWTMSAFDVPLHYNLYQASNSSGNYDMRNLLNGTLVQRHPSHAVTFVDNHDTQPGEALESFVQGWFKPLAYATILTREQGYPQVFYGDYYGIPSDGVPSYRQQIDPLLKARQQYAYGRQHDYFDHWDVIGWTREGNASHPNSGLATIMSDGPGGSKWMYVGRQKAGEVWHDMTGNRSGTVTINQDGWGHFFVNGGSVSVWVKR

SEQ ID NO: 31906 - protein, 485 aa, Bacillus sp.
HHDGTNGTIMQYFEWNVPNDGQHWNRLHNNAQNLKNAGITAIWIPPAWKGTSQNDVGYGAYDLYDLGEFNQKGTVRTKYGTKAELERAIRSLKANGIQVYGDVVMNHKGGADFTERVQAVEVNPQNRNQEVSGTYQIEAWTGFNFPGRGNQHSSFKWRWYHFDGTDWDQSRQLANRIYKFRGDGKAWDWEVDTENGNYDYLMYADVDMDHPEVINELNRWGVWYANTLNLDGFRLDAVKHIKFSFMRDWLGHVRGQTGKNLFAVAEYWKNDLGALENYLSKTNWTMSAFDVPLHYNLYQASNSSGNYDMRNLLNGTLVQRHPSHAVTFVDNHDTQPTEALESFVQGWFKPLAYATILTREQGYPQVFYGDYYGIPSDGVPSYRQQIDPLLKARQQYAYGRQHDYFDHWDVIGWTREGNASHPNSGLATIMSDGPGGSKWMYVGRQKAGEVWHDMTGNRSGTVTINQDGWGHFFVNGGSVSVWVKR

SEQ ID NO: 31907 - protein, 485 aa, Bacillus sp.
HHDGTNGTIMQYFEWNVPNDGQHWNRLHNNAQNLKNAGITAIWIPPAWKGTSQNDVGYGAYDLYDLGEFNQKGTVRTKYGTKAELERAIRSLKANGIQVYGDVVMNHKGGADFTERVQAVEVNPQNRNQEVSGTYQIEAWTGFNFPGRGNQHSSFKWRWYHFDGTDWDQSRQLANRIYKFRGDGKAWDWEVDTENGNYDYLMYADVDMDHPEVINELNRWGVWYANTLNLDGFRLDAVKHIKFSFMRDWLGHVRGQTGKNLQAVAEYWKNDLGALENYLSKTNWTMSAFDVPLHYNLYQASNSSGNYDMRNLLNGTLVQRHPSHAVTFVDNHDTQPGEALESFVQGWFKPLAYATILTREQGYPQVFYGDYYGIPSDGVPSYRQQIDPLLKARQQYAYGRQHDYFDHWDVIGWTREGNASHPNSGLATIMSDGPGGSKWMYVGRQKAGEVWHDMTGNRSGTVTINQDGWGHFFVNGGSVSVWVKR

SEQ ID NO: 31908 - protein, 485 aa, Bacillus sp.
HHDGTNGTIMQYFEWNVPNDGQHWNRLHNNAQNLKNAGITAIWIPPAWKGTAQNDVGYGAYDLYDLGEFNQKGTVRTKYGTKAELERAIRSLKANGIQVYGDVVMNHKGGADFTERVQAVEVNPQNRNQEVSGTYQIEAWTGFNFPGRGNQHSSFKWRWYHFDGTDWDQSRQLANRIYKFRGDGKAWDWEVDTENGNYDYLMYADVDMDHPEVINELNRWGVWYANTLNLDGFRLDAVKHIKFSFMRDWLGHVRGQTGKNLFAVAEYWKNDLGALENYLSKTNWTMSAFDVPLHYNLYQASNSSGNYDMRNLLNGTLVQRHPSHAVTFVDNHDTQPGEALESFVQGWFKPLAYATILTREQGYPQVFYGDYYGIPSDGVPSYRQQIDPLLKARQQYAYGRQHDYFDHWDVIGWTREGNASHPNSGLATIMSDGPGGSKWMYVGRQKAGEVWHDMTGNRSGTVTINQDGWGHFFVNGGSVSVWVKR

SEQ ID NO: 31909 - protein, 485 aa, Bacillus sp.
HHDGTNGTIMQYFEWNVPNDGQHWNRLHNNAQNLKNAGITAIWIPPAWKGTSQNDVGYGAYDLYDLGEFNQKGTVRTKYGTKAELERAIRSLKANGIQVYGDVVMNHKGGADFTERVQAVEVNPQNRNQEVQGTYQIEAWTGFNFPGRGNQHSSFKWRWYHFDGTDWDQSRQLANRIYKFRGDGKAWDWEVDTENGNYDYLMYADVDMDHPEVINELNRWGVWYANTLNLDGFRLDAVKHIKFSFMRDWLGHVRGQTGKNLFAVAEYWKNDLGALENYLSKTNWTMSAFDVPLHYNLYQASNSSGNYDMRNLLNGTLVQRHPSHAVTFVDNHDTQPGEALESFVQGWFKPLAYATILTREQGYPQVFYGDYYGIPSDGVPSYRQQIDPLLKARQQYAYGRQHDYFDHWDVIGWTREGNASHPNSGLATIMSDGPGGSKWMYVGRQKAGEVWHDMTGNRSGTVTINQDGWGHFFVNGGSVSVWVKR

SEQ ID NO: 31910 - protein, 485 aa, Bacillus sp.
HHDGTNGTIMQYFEWNVPNDGQHWNRLHNNAQNLKNAGITAIWIPPAWKGTSQNDVGYGAYDLYDLGEFNQKGTVRTKYGTKAELERAIRSLKANGIQVYGDVVMNHKGGADFTERVQAVEVNPQNRGQEVSGTYQIEAWTGFNFPGRGNQHSSFKWRWYHFDGTDWDQSRQLANRIYKFRGDGKAWDWEVDTENGNYDYLMYADVDMDHPEVINELNRWGVWYANTLNLDGFRLDAVKHIKFSFMRDWLGHVRGQTGKNLFAVAEYWKNDLGALENYLSKTNWTMSAFDVPLHYNLYQASNSSGNYDMRNLLNGTLVQRHPSHAVTFVDNHDTQPGEALESFVQGWFKPLAYATILTREQGYPQVFYGDYYGIPSDGVPSYRQQIDPLLKARQQYAYGRQHDYFDHWDVIGWTREGNASHPNSGLATIMSDGPGGSKWMYVGRQKAGEVWHDMTGNRSGTVTINQDGWGHFFVNGGSVSVWVKR

SEQ ID NO: 31911 - protein, 485 aa, Bacillus sp.
HHDGTNGTIMQYFEWNVPNDGQHWNRLHNNAQNLKNAGITAIWIPPAWKGTSQNDVGYGAYDLYDLGEFNQKGTVRTKYGTKAELWRAIRSLKANGIQVYGDVVMNHKGGADFTERVQAVEVNPQNRNQEVSGTYQIEAWTGFNFPGRGNQHSSFKWRWYHFDGTDWDQSRQLANRIYKFRGDGKAWDWEVDTENGNYDYLMYADVDMDHPEVINELNRWGVWYANTLNLDGFRLDAVKHIKFSFMRDWLGHVRGQTGKNLFAVAEYWKNDLGALENYLSKTNWTMSAFDVPLHYNLYQASNSSGNYDMRNLLNGTLVQRHPSHAVTFVDNHDTQPGEALESFVQGWFKPLAYATILTREQGYPQVFYGDYYGIPSDGVPSYRQQIDPLLKARQQYAYGRQHDYFDHWDVIGWTREGNASHPNSGLATIMSDGPGGSKWMYVGRQKAGEVWHDMTGNRSGTVTINQDGWGHFFVNGGSVSVWVKR

SEQ ID NO: 31912 - protein, 485 aa, Bacillus sp.
HHDGTNGTIMQYFEWNVPNDGQHWNRLHNNAQNLKNAGITAIWIPPAWKGTSQNDVGYGAYDLYDLGEFNQKGTVRTKYGTKAELERAIRSLKANGIQVYGDVVMNHKGGADFTERVQAVEVNPQNRNQEVSGTYQIEAWTGFNFPGRGNQHSSFKWRWYHFDGTDWDQSRQLANRIYKFRGDGKAWDWEVDTENGNYDYLMYADVDMDHPEVINELNCWGVWYANTLNLDGFRLDAVKHIKFSFMRDWLGHVRGQTGKNLFAVAEYWKNDLGALENYLSKTNWTMSAFDVPLHYNLYQASNSSGNYDMRNLLNGTLVQRHPSHAVTFVDNHDTQPGEALESFVQGWFKPLAYATILTREQGYPQVFYGDYYGIPSDGVPSYRQQIDPLLKARQQYAYGRQHDYFDHWDVIGWTREGNASHPNSGLATIMSDGPGGSKWMYVGRQKAGEVWHDMTGNRSGTVTINQDGWGHFFVNGGSVSVWVKR

SEQ ID NO: 31913 - protein, 485 aa, Bacillus sp.
HHDGTNGTIMQYFEWNVPNDGQHWNRLHNNAQNLKNAGITAIWIPPAWKGTSQNDVGYGAYDLYDLGEFNVKGTVRTKYGTKAELERAIRSLKANGIQVYGDVVMNHKGGADFTERVQAVEVNPQNRNQEVSGTYQIEAWTGFNFPGRGNQHSSFKWRWYHFDGTDWDQSRQLANRIYKFRGDGKAWDWEVDTENGNYDYLMYADVDMDHPEVINELNRWGVWYANTLNLDGFRLDAVKHIKFSFMRDWLGHVRGQTGKNLFAVAEYWKNDLGALENYLSKTNWTMSAFDVPLHYNLYQASNSSGNYDMRNLLNGTLVQRHPSHAVTFVDNHDTQPGEALESFVQGWFKPLAYATILTREQGYPQVFYGDYYGIPSDGVPSYRQQIDPLLKARQQYAYGRQHDYFDHWDVIGWTREGNASHPNSGLATIMSDGPGGSKWMYVGRQKAGEVWHDMTGNRSGTVTINQDGWGHFFVNGGSVSVWVKR

SEQ ID NO: 31914 - protein, 485 aa, Bacillus sp.
HHDGTNGTIMQYFEWNVPNDGQHWNRLHNNAQNLKNAGITAIWIPPAWKGTSQNDVGYGAYDLYDLGEFNQKGTVRTKYGTKAELERAIRSLKANGIQVYGDVVMNHKGGADFTERVQAVEVNPQNRNQEVSGTYQIEAWTGFNFPGRGNQHSSFKWRWYHFDGTDWDQSRQLANRIYKFRGDGKAWDWEVDTENGNYDYLMYADVDMDHPRVINELNRWGVWYANTLNLDGFRLDAVKHIKFSFMRDWLGHVRGQTGKNLFAVAEYWKNDLGALENYLSKTNWTMSAFDVPLHYNLYQASNSSGNYDMRNLLNGTLVQRHPSHAVTFVDNHDTQPGEALESFVQGWFKPLAYATILTREQGYPQVFYGDYYGIPSDGVPSYRQQIDPLLKARQQYAYGRQHDYFDHWDVIGWTREGNASHPNSGLATIMSDGPGGSKWMYVGRQKAGEVWHDMTGNRSGTVTINQDGWGHFFVNGGSVSVWVKR

SEQ ID NO: 31915 - protein, 485 aa, Bacillus sp.
HHDGTNGTIMQYFEWNVPNDGQHWNRLHNNAQNLKNAGITAIWIPPAWKGTSQNDVGYGAYDLYDLGEFNQKGTVRTKYGTKAELERAIRSLKANGIQVYGDVVMNHKAGADFTERVQAVEVNPQNRNQEVSGTYQIEAWTGFNFPGRGNQHSSFKWRWYHFDGTDWDQSRQLANRIYKFRGDGKAWDWEVDTENGNYDYLMYADVDMDHPEVINELNRWGVWYANTLNLDGFRLDAVKHIKFSFMRDWLGHVRGQTGKNLFAVAEYWKNDLGALENYLSKTNWTMSAFDVPLHYNLYQASNSSGNYDMRNLLNGTLVQRHPSHAVTFVDNHDTQPGEALESFVQGWFKPLAYATILTREQGYPQVFYGDYYGIPSDGVPSYRQQIDPLLKARQQYAYGRQHDYFDHWDVIGWTREGNASHPNSGLATIMSDGPGGSKWMYVGRQKAGEVWHDMTGNRSGTVTINQDGWGHFFVNGGSVSVWVKR

SEQ ID NO: 31916 - protein, 485 aa, Bacillus sp.
HHDGTNGTIMQYFEWNVPNDGQHWNRLHNNAQNLKNAGITAIWIPPAWKGTSQNDVGYGAYDLYDLGEFNQKGTVRVKYGTKAELERAIRSLKANGIQVYGDVVMNHKGGADFTERVQAVEVNPQNRNQEVSGTYQIEAWTGFNFPGRGNQHSSFKWRWYHFDGTDWDQSRQLANRIYKFRGDGKAWDWEVDTENGNYDYLMYADVDMDHPEVINELNRWGVWYANTLNLDGFRLDAVKHIKFSFMRDWLGHVRGQTGKNLFAVAEYWKNDLGALENYLSKTNWTMSAFDVPLHYNLYQASNSSGNYDMRNLLNGTLVQRHPSHAVTFVDNHDTQPGEALESFVQGWFKPLAYATILTREQGYPQVFYGDYYGIPSDGVPSYRQQIDPLLKARQQYAYGRQHDYFDHWDVIGWTREGNASHPNSGLATIMSDGPGGSKWMYVGRQKAGEVWHDMTGNRSGTVTINQDGWGHFFVNGGSVSVWVKR

SEQ ID NO: 31917 - protein, 485 aa, Bacillus sp.
HHDGTNGTIMQYFEWNVPNDGQHWNRLHNNAQNLKNAGITAIWIPPAWKGTSQNDVGYGAYDLYDLGEFNQKGTVRTKYGTKAELERAIRSLKANGIQVYGDVVMNHKGGADFTERVQAVEVNPQNRNQEVSGTYQIEAWTGFNFPGRGNQHSSFKWRWYHFDGTDWDQSRQLANRIYKFRGDGKAWDWEVDTENGNYDYLMQADVDMDHPEVINELNRWGVWYANTLNLDGFRLDAVKHIKFSFMRDWLGHVRGQTGKNLFAVAEYWKNDLGALENYLSKTNWTMSAFDVPLHYNLYQASNSSGNYDMRNLLNGTLVQRHPSHAVTFVDNHDTQPGEALESFVQGWFKPLAYATILTREQGYPQVFYGDYYGIPSDGVPSYRQQIDPLLKARQQYAYGRQHDYFDHWDVIGWTREGNASHPNSGLATIMSDGPGGSKWMYVGRQKAGEVWHDMTGNRSGTVTINQDGWGHFFVNGGSVSVWVKR

SEQ ID NO: 31918 - protein, 485 aa, Bacillus sp.
HHDGTNGTIMQYFEWNVPNDGQHWNRLHNNAQNLKNAGITAIWIPPAWKGTSQNDVGYGAYDLYDLGEFNQKGTVRTKYGTKAELERAIRSLKANGIQVYGDVVMNHKGGADFTERVQAVEVNPQNRNQEVSGTYQIEAWTGFNFPGRGNQHSSFKWRWYHFDGTDWDQSRQLANRIYKFRGDGKAWDWEVDTENGNYDYLMYADVDMDHPEVINELNRWGVWYANTLNLDGFRLDAVKHIKFSFMRDWLGHVRGQTGKNLFAVAEYWKNDLGALENYLSKTNWTMSAFDVPLHYNLYQASNSSGNYDMRNLLNGTLVQRHPSHAVTFVDNHDTQPGEALESFVQGWFKPLAYATILTRAQGYPQVFYGDYYGIPSDGVPSYRQQIDPLLKARQQYAYGRQHDYFDHWDVIGWTREGNASHPNSGLATIMSDGPGGSKWMYVGRQKAGEVWHDMTGNRSGTVTINQDGWGHFFVNGGSVSVWVKR

SEQ ID NO: 31919 - protein, 485 aa, Bacillus sp.
HHDGTNGTIMQYFEWNVPNDGQHWNRLHNNAQNLKNAGITAIWIPPAWKGTSQNDVGYGAYDLYDLGEFNQKGTVRTKYGTKAELERAIRSLKANGIQVYGDVVMNHKGGADFTERVQAVEVNPQNRNQEVSGTYQIEAWTGFNFPGRGNQHSSFKWRWYHFDGTDWDQSRQLANRIYKFRGDGKAWDWEVDTENGNYDYLMYADVDMDHPEVINELNRWGVWYANTLNLDGFRLDAVKHIKFSFMRDWLGHVRGQTGKNLFAVAEYWKNDLGALENYLSKTNWTMSAFDVPLHYNLYQASNSSGNYDMRNLLNGTLVQRHPSHAVTFVDNHDTQPGEALESFVQGWFKPLAYATILTREQGYPQVFYGDYYGIPSDGVPSYRQQIDPLLKARQQYAYGRQHDYWDHWDVIGWTREGNASHPNSGLATIMSDGPGGSKWMYVGRQKAGEVWHDMTGNRSGTVTINQDGWGHFFVNGGSVSVWVKR

SEQ ID NO: 31920 - protein, 485 aa, Bacillus sp.
HHDGTNGTIMQYFEWNVPNDGQHWNRLHNNAQNLKNAGITAIWIPPAWKGTSQNDVGYGAYDLYDLGEFNQKGTVRTKYGTKAELERAIRSLKANGIQVYGDVVMNHKGGADFTERVQAVEVNPQNRNQEVSGTYQIEAWTGFNFPGRGEQHSSFKWRWYHFDGTDWDQSRQLANRIYKFRGDGKAWDWEVDTENGNYDYLMYADVDMDHPEVINELNRWGVWYANTLNLDGFRLDAVKHIKFSFMRDWLGHVRGQTGKNLFAVAEYWKNDLGALENYLSKTNWTMSAFDVPLHYNLYQASNSSGNYDMRNLLNGTLVQRHPSHAVTFVDNHDTQPGEALESFVQGWFKPLAYATILTREQGYPQVFYGDYYGIPSDGVPSYRQQIDPLLKARQQYAYGRQHDYFDHWDVIGWTREGNASHPNSGLATIMSDGPGGSKWMYVGRQKAGEVWHDMTGNRSGTVTINQDGWGHFFVNGGSVSVWVKR

SEQ ID NO: 31921 - protein, 485 aa, Bacillus sp.
HHDGTNGTIMQYFEWNVPNDGQHWNRLHNNAQNLKNAGITAIWIPPAWKGTSQNDVGYGAYDLYDLGEFNQKGTVRTKYGTKAELERAIRSLKANGIQVYGDVVMNHKGGADFTERVQAVEVNPQNRNQEVSGTYQIEAWTGFNFPGRGNQHSSFKWRWYHFDGTDWDQSRQLANRIYKFRGDGKAWDWEVDTENGNYDYLMYADYDMDHPEVINELNRWGVWYANTLNLDGFRLDAVKHIKFSFMRDWLGHVRGQTGKNLFAVAEYWKNDLGALENYLSKTNWTMSAFDVPLHYNLYQASNSSGNYDMRNLLNGTLVQRHPSHAVTFVDNHDTQPGEALESFVQGWFKPLAYATILTREQGYPQVFYGDYYGIPSDGVPSYRQQIDPLLKARQQYAYGRQHDYFDHWDVIGWTREGNASHPNSGLATIMSDGPGGSKWMYVGRQKAGEVWHDMTGNRSGTVTINQDGWGHFFVNGGSVSVWVKR

SEQ ID NO: 31922 - protein, 485 aa, Bacillus sp.
HHDGTNGTIMQYFEWNVPNDGQHWNRLHNNAQNLKNAGITAIWIPPAWKGTSQNDVGYGAYDLYDLGEFNQKGTVRTKYGTKAELERAIRSLKANGIQVYGDVVMNHKGGADFTERVQAVEVNPQNRNQEVSGTYQIEAWTGFNFPGRGNQHSSFKWRWYHFDGTDWDQSRQLANRIYKFRGDGKAWDWEVDTENGNYDYLMYADVDMDHPEVINELNRWGVWYANTLNLDGFRLDAVKHIKFSFMRDWLGHVRGQTGKNLFAVAEYWKNDLGALENYLSKTNWTMSAFDVPLHYNLYQASNSSGNYDMRNLLNGTLVQRHPSHAVTFVDNHDTQPGEALESFVQGWFKPLAYATILTREQGYPQVFYGDYYGIPSDGVPSYRQQIDPLLKARQQYAYGRQHDYFDHWDVIGWTREGNASHPNSGLAGIMSDGPGGSKWMYVGRQKAGEVWHDMTGNRSGTVTINQDGWGHFFVNGGSVSVWVKR

SEQ ID NO: 31923 - protein, 485 aa, Bacillus sp.
HHDGTNGTIMQYFEWNVPNDGQHWNRLHNNAQNLKNAGITAIWIPPAWKGTSQNDVGYGAYDLYDLGEFNQKGTVRTKYGTKAELERAIRSLKANGIQVYGDVVMNHKGGADFTERVQAVMVNPQNRNQEVSGTYQIEAWTGFNFPGRGNQHSSFKWRWYHFDGTDWDQSRQLANRIYKFRGDGKAWDWEVDTENGNYDYLMYADVDMDHPEVINELNRWGVWYANTLNLDGFRLDAVKHIKFSFMRDWLGHVRGQTGKNLFAVAEYWKNDLGALENYLSKTNWTMSAFDVPLHYNLYQASNSSGNYDMRNLLNGTLVQRHPSHAVTFVDNHDTQPGEALESFVQGWFKPLAYATILTREQGYPQVFYGDYYGIPSDGVPSYRQQIDPLLKARQQYAYGRQHDYFDHWDVIGWTREGNASHPNSGLATIMSDGPGGSKWMYVGRQKAGEVWHDMTGNRSGTVTINQDGWGHFFVNGGSVSVWVKR

SEQ ID NO: 31924 - protein, 485 aa, Bacillus sp.
HHDGTNGTIMQYFEWNVPNDGQHWNRLHNNAQNLKNAGITAIWIPPAWKGTSQNDVGYGAYDLYDLGEFNQKGTVRTKYGTKAELERAIRSLKANGIQVYGDVVMNHKGGADFTERVQAVEVNPQNRNQEVSGTYQIEAWTGFNFPGRGNQHSSFGWRWYHFDGTDWDQSRQLANRIYKFRGDGKAWDWEVDTENGNYDYLMYADVDMDHPEVINELNRWGVWYANTLNLDGFRLDAVKHIKFSFMRDWLGHVRGQTGKNLFAVAEYWKNDLGALENYLSKTNWTMSAFDVPLHYNLYQASNSSGNYDMRNLLNGTLVQRHPSHAVTFVDNHDTQPGEALESFVQGWFKPLAYATILTREQGYPQVFYGDYYGIPSDGVPSYRQQIDPLLKARQQYAYGRQHDYFDHWDVIGWTREGNASHPNSGLATIMSDGPGGSKWMYVGRQKAGEVWHDMTGNRSGTVTINQDGWGHFFVNGGSVSVWVKR

SEQ ID NO: 31925 - protein, 485 aa, Bacillus sp.
HHDGTNGTIMQYFEWNVPNDGQHWNRLHNNAQNLKNAGITAIWIPPAWKGTSQNDVGYGAYDLYDLGEFNQKGTVRTKYGTKAELERAIRSLKANGIQVYGDVVMNHKGGADFTERVQAVEVNGQNRNQEVSGTYQIEAWTGFNFPGRGNQHSSFKWRWYHFDGTDWDQSRQLANRIYKFRGDGKAWDWEVDTENGNYDYLMYADVDMDHPEVINELNRWGVWYANTLNLDGFRLDAVKHIKFSFMRDWLGHVRGQTGKNLFAVAEYWKNDLGALENYLSKTNWTMSAFDVPLHYNLYQASNSSGNYDMRNLLNGTLVQRHPSHAVTFVDNHDTQPGEALESFVQGWFKPLAYATILTREQGYPQVFYGDYYGIPSDGVPSYRQQIDPLLKARQQYAYGRQHDYFDHWDVIGWTREGNASHPNSGLATIMSDGPGGSKWMYVGRQKAGEVWHDMTGNRSGTVTINQDGWGHFFVNGGSVSVWVKR

SEQ ID NO: 31926 - protein, 485 aa, Bacillus sp.
HHDGTNGTIMQYFEWNVPNDGQHWNRLHNNAQNLKNAGITAIWIPPAWKGTSQNDVGYGAYDLYDLGEFNQKGTVRTKYGTKAELERAIRSLKANGIQVYGDVVMNHKGGADFTERVQAVEVNPQNRNQEVSGTYQIEAWTGFNFMGRGNQHSSFKWRWYHFDGTDWDQSRQLANRIYKFRGDGKAWDWEVDTENGNYDYLMYADVDMDHPEVINELNRWGVWYANTLNLDGFRLDAVKHIKFSFMRDWLGHVRGQTGKNLFAVAEYWKNDLGALENYLSKTNWTMSAFDVPLHYNLYQASNSSGNYDMRNLLNGTLVQRHPSHAVTFVDNHDTQPGEALESFVQGWFKPLAYATILTREQGYPQVFYGDYYGIPSDGVPSYRQQIDPLLKARQQYAYGRQHDYFDHWDVIGWTREGNASHPNSGLATIMSDGPGGSKWMYVGRQKAGEVWHDMTGNRSGTVTINQDGWGHFFVNGGSVSVWVKR

SEQ ID NO: 31927 - protein, 489 aa, Bacillus sp.
HHDGTNGTIMQYFEWNVPNDGQHWNRLHNNAQNLKNAGITAIWIPPAWKGTSQNDVGYGAYDLYDLGEFNQKGTVRTKYGTKAELERAIRSLKANGIQVYGDVVMNHKGGADFTERVQAVEVNPQNRNQEVSGTYQIEAWTGFNFPGRGNQHSSFKWRWYHFDGTDWDQSRQLANRIYKFRGDGKAWDWEVDTENGNFLYHQDYLMYADVDMDHPEVINELNRWGVWYANTLNLDGFRLDAVKHIKFSFMRDWLGHVRGQTGKNLFAVAEYWKNDLGALENYLSKTNWTMSAFDVPLHYNLYQASNSSGNYDMRNLLNGTLVQRHPSHAVTFVDNHDTQPGEALESFVQGWFKPLAYATILTREQGYPQVFYGDYYGIPSDGVPSYRQQIDPLLKARQQYAYGRQHDYFDHWDVIGWTREGNASHPNSGLATIMSDGPGGSKWMYVGRQKAGEVWHDMTGNRSGTVTINQDGWGHFFVNGGSVSVWVKR

SEQ ID NO: 31928 - protein, 485 aa, Bacillus sp.
HHDGTNGTIMQYFEWNVPNDGQHWNRLHNNAQNLKNAGITAIWIPPAWKGTSQVDVGYGAYDLYDLGEFNQKGTVRTKYGTKAELERAIRSLKANGIQVYGDVVMNHKGGADFTERVQAVEVNPQNRNQEVSGTYQIEAWTGFNFPGRGNQHSSFKWRWYHFDGTDWDQSRQLANRIYKFRGDGKAWDWEVDTENGNYDYLMYADVDMDHPEVINELNRWGVWYANTLNLDGFRLDAVKHIKFSFMRDWLGHVRGQTGKNLFAVAEYWKNDLGALENYLSKTNWTMSAFDVPLHYNLYQASNSSGNYDMRNLLNGTLVQRHPSHAVTFVDNHDTQPGEALESFVQGWFKPLAYATILTREQGYPQVFYGDYYGIPSDGVPSYRQQIDPLLKARQQYAYGRQHDYFDHWDVIGWTREGNASHPNSGLATIMSDGPGGSKWMYVGRQKAGEVWHDMTGNRSGTVTINQDGWGHFFVNGGSVSVWVKR

SEQ ID NO: 31929 - protein, 485 aa, Bacillus sp.
HHDGTNGTIMQYFEWNVPNDGQHWNRLHNNAQNLKNAGITAIWIPPAWKGTSQNDVGYGAYDLYDLGEFNQKGTVRTKYGTKAELERAIRSLKANGIQVYGDVVMNHKGGADFTERVQAVEVNPQNRNQEVSGTYQIEAWTGFNFPGRGNQHSSFKWRWYHFDGTDWDQSRQLANRIYKFRGDGKAWDWEVDTENGNYDYLMYADVDMDHPEVINELNRWGVWYANTLNLDGFRLDAVKHIKFSFMRDWLGHVRGQTGKNLFAVAEYWKNDLGELENYLSKTNWTMSAFDVPLHYNLYQASNSSGNYDMRNLLNGTLVQRHPSHAVTFVDNHDTQPGEALESFVQGWFKPLAYATILTREQGYPQVFYGDYYGIPSDGVPSYRQQIDPLLKARQQYAYGRQHDYFDHWDVIGWTREGNASHPNSGLATIMSDGPGGSKWMYVGRQKAGEVWHDMTGNRSGTVTINQDGWGHFFVNGGSVSVWVKR

SEQ ID NO: 31930 - protein, 485 aa, Bacillus sp.
HHDGTNGTIMQYFEWNVPNDGQHWNRLHNNAQNLKNAGITAIWIPPAWKGTSQNDVGYGAYDLYDLGEFNQKGTVRTKYGTKAELERAIRSLKANGIQVYGDVVMNHKGGADFTERVQAVEVNPQNRNQEVSGTYQIEAWTGFNFPGRGNQHSSFKWRWYHFDGTDWDQSRQLANRIYKFRGDGKAWDWEVDTENGNYDYLMYADVDMDHPEVINELNRWGVWYANYLNLDGFRLDAVKHIKFSFMRDWLGHVRGQTGKNLFAVAEYWKNDLGALENYLSKTNWTMSAFDVPLHYNLYQASNSSGNYDMRNLLNGTLVQRHPSHAVTFVDNHDTQPGEALESFVQGWFKPLAYATILTREQGYPQVFYGDYYGIPSDGVPSYRQQIDPLLKARQQYAYGRQHDYFDHWDVIGWTREGNASHPNSGLATIMSDGPGGSKWMYVGRQKAGEVWHDMTGNRSGTVTINQDGWGHFFVNGGSVSVWVKR

SEQ ID NO: 31931 - protein, 485 aa, Bacillus sp.
HHDGTNGTIMQYFEWNVPNDGQHWNRLHNNAQNLKNAGITAIWIPPAWKGTSQNDVGYGAYDLYDLGEFNQKGTVRTKYGTKAELERAIRSLKANGIQVYGDVVMNHKGGADFTERVQAVEVNPQNRNQEVSGTYQIEAWTGFNFPGRGNQHSSFKWRWYHFDGTDWDQSRQLANRIYKFRGDGKAWDWEVDTENGNYDYLMYADVDMDHPEVINELNRWGVWYANTLNLDGFRLDAVKHIKFSFMRDWLGHVRGQTGKNLFAVAEYWKNDLGALENYLSKTNWTMSAFDVPLHYNLYQASNSSGNYDMRNLLNGTLVQRHPSHAVTFVDNHDTQPGEALESFVQGWFKPLAYATILTREQGYPQVFYGDYYGIPSDGVPSYRQQWDPLLKARQQYAYGRQHDYFDHWDVIGWTREGNASHPNSGLATIMSDGPGGSKWMYVGRQKAGEVWHDMTGNRSGTVTINQDGWGHFFVNGGSVSVWVKR

SEQ ID NO: 31932 - protein, 485 aa, Bacillus sp.
HHDGTNGTIMQYFEWNVPNDGQHWNRLHNNAQNLKNAGITAIWIPPAWKGTSQNDVGYGAYDLYDLGEFNQKGTVRTKYGTKAELERAIRSLKANGIQVYGDVVMNHKGGADFTERVQAVEVNPQNRNQEVSGTYQIEAWTGFNFPGRGNQHSSFKWRWYHFDGTDWDQSRQLANRIYKFRGDGKAWDWEVDTENGNYDYLMYADVDMDHPEVINELNRWGVWYANTLNLDGFRLDAVKHIKFSFMRDWLGHVRGQTGKNLFAVAEYWKNDLWALENYLSKTNWTMSAFDVPLHYNLYQASNSSGNYDMRNLLNGTLVQRHPSHAVTFVDNHDTQPGEALESFVQGWFKPLAYATILTREQGYPQVFYGDYYGIPSDGVPSYRQQIDPLLKARQQYAYGRQHDYFDHWDVIGWTREGNASHPNSGLATIMSDGPGGSKWMYVGRQKAGEVWHDMTGNRSGTVTINQDGWGHFFVNGGSVSVWVKR

SEQ ID NO: 31933 - protein, 485 aa, Bacillus sp.
HHDGTNGTIMQYFEWNVPNDGQHWNRLHNNAQNLKNAGITAIWIPPAWKGTSQNDVGYGAYDLYDLGEFNQKGTVRTKYGTKAELERAIRSLKANGIQVYGDVVMNHKGGADFTERVQAVEVNPQNRNQEVSGTYQIEAWTGFNFPGRGNQHSSFKWRWYHFDGTDWDQSRQLANRIYKFRGDGKAWDWEVDTENGNYDYLMYPDVDMDHPEVINELNRWGVWYANTLNLDGFRLDAVKHIKFSFMRDWLGHVRGQTGKNLFAVAEYWKNDLGALENYLSKTNWTMSAFDVPLHYNLYQASNSSGNYDMRNLLNGTLVQRHPSHAVTFVDNHDTQPGEALESFVQGWFKPLAYATILTREQGYPQVFYGDYYGIPSDGVPSYRQQIDPLLKARQQYAYGRQHDYFDHWDVIGWTREGNASHPNSGLATIMSDGPGGSKWMYVGRQKAGEVWHDMTGNRSGTVTINQDGWGHFFVNGGSVSVWVKR

SEQ ID NO: 31934 - protein, 485 aa, Bacillus sp.
HHDGTNGTIMQYFEWNVPNDGQHWNRLHNNAQNLKNAGITAIWIPPAWKGTSQNDVGYGAYDLYDLGEFNQKGTVRTKYGTKAELERAIRSLKANGIQVYGDVVMNHKGGADFTERVQAVEVNPQNRNQEVSGTYQIEAWTGFNFPGRGNQHSSFKWRWYHFDGTDWDQSRQLANRIYKFRGDGKAWDWEVDTENGNYDYLMYADVDMDHPEVINELNRWGVWYANTLNLDGFRLDAVKHIKFSFMRDWLGHVRGQTGKNLFAVAEYWKNDLGALENYLSKTNWTMSAFDVPLHYNLYQASNSSGNYDMRNLLNGTLVQRHPSHAVTFVDNHDTQPGEALESFVQGWFKPLAYATILTREQGYPQVFYGDYYGIPSDGVPSYRQQIDPLVKARQQYAYGRQHDYFDHWDVIGWTREGNASHPNSGLATIMSDGPGGSKWMYVGRQKAGEVWHDMTGNRSGTVTINQDGWGHFFVNGGSVSVWVKR

SEQ ID NO: 31935 - protein, 485 aa, Bacillus sp.
HHDGTNGTIMQYFEWNVPNDGQHWNRLHNNAQNLKNAGITAIWIPPAWKGTSQNDVGYGAYDLYDLGEFNQKGTVRTKYGTKAELERAIRSLKANGIQVYGDVVMNHKGGADFTERVQAVEVNPQNRNQEVSGTYQIEAWTGFNFPGRGNQHSSFKWRWYHFDGTDWDQSRQLANRIYKFRGDGKAWDWEVDTENGNYDYLMYADVDMDHPEVINELNRWGVWYANTLNLDGFRLDAVKHIKFSFMRDWLGHVRGQTGKNLFAVAEYWKNDLGALENYLSKTNWTMSAFDVPLHYNLYQASNSSGNYDMRNLLNGTLVQRHPSHAVTFVDNHDTQPGEALESFVQGWFKPLAYATILTREQGYPQVFYGDYYGIPSDGVPSYRQQIDPLLKARQQYAYGRQHDYFVHWDVIGWTREGNASHPNSGLATIMSDGPGGSKWMYVGRQKAGEVWHDMTGNRSGTVTINQDGWGHFFVNGGSVSVWVKR

SEQ ID NO: 31936 - protein, 485 aa, Bacillus sp.
HHDGTNGTIMQYFEWNVPNDGQHWNRLHNNAQNLKNAGITAIWIPPAWKGTSQNDVGYGAYDLYDLGEFNQKGTVRTKYGTKAELERAIRSLKANGIQVYGDVVMNHKGGADFTERVQAVEVNPQNRNQEVSGTYQIEAWTGFNFPGRGNQHSSFKWRWYHFDGTDWDQSRQLANRIYKFRGDGKAWDGEVDTENGNYDYLMYADVDMDHPEVINELNRWGVWYANTLNLDGFRLDAVKHIKFSFMRDWLGHVRGQTGKNLFAVAEYWKNDLGALENYLSKTNWTMSAFDVPLHYNLYQASNSSGNYDMRNLLNGTLVQRHPSHAVTFVDNHDTQPGEALESFVQGWFKPLAYATILTREQGYPQVFYGDYYGIPSDGVPSYRQQIDPLLKARQQYAYGRQHDYFDHWDVIGWTREGNASHPNSGLATIMSDGPGGSKWMYVGRQKAGEVWHDMTGNRSGTVTINQDGWGHFFVNGGSVSVWVKR

SEQ ID NO: 31937 - protein, 485 aa, Bacillus sp.
HHDGTNGTIMQYFEWNVPNDGQHWNRLHNNAQNLKNAGITAIWIPPAWKGTSQNDVGYGAYDLYDLGEFNQKGTVRTKYGTKAELERAIRSLKANGIQVYGDVVMNHKGGADFTERVQAVEVNPQNRNQEVSGTYQIEAWTGFNFPGRGNQHSSFKWRWYHFDGTDWDQSRQLANRIYKFRGDGKAWDWEVDTENGNYDYLMYADVDMDHPEVINELNRWGVWYANTLNLDGFRLDAVKHIKFSFMRDWLGHVRGQTGKNLFAVAEYWKNDLGALENYLSKTNWTMSAFDVPLHYNLYQASSSSGNYDMRNLLNGTLVQRHPSHAVTFVDNHDTQPGEALESFVQGWFKPLAYATILTREQGYPQVFYGDYYGIPSDGVPSYRQQIDPLLKARQQYAYGRQHDYFDHWDVIGWTREGNASHPNSGLATIMSDGPGGSKWMYVGRQKAGEVWHDMTGNRSGTVTINQDGWGHFFVNGGSVSVWVKR

SEQ ID NO: 31938 - protein, 485 aa, Bacillus sp.
HHDGTNGTIMQYFEWNVPNDGQHWNRLHNNAQNLKNAGITAIWIPPAWKGTSQNDVGYGAYDLYDLGEFNQKGTVRTKYGTKAELERAIRSLKANGIQVYGDVVMNHKGGADFTERVQAVEVNPQNRNQEVSGTYQIEAWTGFNFPGRGNQHSSFKWRWYHFDGTDWDQSRQLANRIYKFRGDGKAWDWEVDTENGNYDYLMYADVDMDHPEVINELNRWGVWYANTLNLDGFRLDAVKHIKFSFMRDWLGHVRGQTGKNLFAVAEYWKNDLGALENYLSKCNWTMSAFDVPLHYNLYQASNSSGNYDMRNLLNGTLVQRHPSHAVTFVDNHDTQPGEALESFVQGWFKPLAYATILTREQGYPQVFYGDYYGIPSDGVPSYRQQIDPLLKARQQYAYGRQHDYFDHWDVIGWTREGNASHPNSGLATIMSDGPGGSKWMYVGRQKAGEVWHDMTGNRSGTVTINQDGWGHFFVNGGSVSVWVKR

SEQ ID NO: 31939 - protein, 485 aa, Bacillus sp.
HHDGTNGTIMQYFEWNVPNDGQHWNRLHNNAQNLKNAGITAIWIPPAWKGTSMNDVGYGAYDLYDLGEFNQKGTVRTKYGTKAELERAIRSLKANGIQVYGDVVMNHKGGADFTERVQAVEVNPQNRNQEVSGTYQIEAWTGFNFPGRGNQHSSFKWRWYHFDGTDWDQSRQLANRIYKFRGDGKAWDWEVDTENGNYDYLMYADVDMDHPEVINELNRWGVWYANTLNLDGFRLDAVKHIKFSFMRDWLGHVRGQTGKNLFAVAEYWKNDLGALENYLSKTNWTMSAFDVPLHYNLYQASNSSGNYDMRNLLNGTLVQRHPSHAVTFVDNHDTQPGEALESFVQGWFKPLAYATILTREQGYPQVFYGDYYGIPSDGVPSYRQQIDPLLKARQQYAYGRQHDYFDHWDVIGWTREGNASHPNSGLATIMSDGPGGSKWMYVGRQKAGEVWHDMTGNRSGTVTINQDGWGHFFVNGGSVSVWVKR

SEQ ID NO: 31940 - protein, 485 aa, Bacillus sp.
HHDGTNGTIMQYFEWNVPNDGQHWNRLHNNAQNLKNAGITAIWIPPAWKGTSQNDVGYGAYDLYDLGEFNQKGTVRTKYGTKAELERAIRSLKANGIQVYGDVVMNHKGGADFTERVQAVEVNPQNRNQEVSGTYQIEAWTGFNFPGRGNQHSSFKWRWYHFDGTDWDQSRQLANRIYKFRGDGKAWDWEVDTENGNYDYLMYADVDMDHPEVINELNRWGVWYANTLNLDGFRLDAVKHIKFSFMRDWLGHVRGQTGKNLFAVAEYWKNDLGALENYLSKTNWTMSAFDVPLHYNLYQASNSSGNYDMRNLLNGTLVQRHPSHAVTFVDNHDTQPGEALESFVQGWFKPLAYATILTREQGYPQVFYGDYYGIPSDGVPSYRQQIDPLLKARQQYAYGRQHDYFDHWDVIGWTREGNASHPNSGLATIMSDGPGGSKWMNVGRQKAGEVWHDMTGNRSGTVTINQDGWGHFFVNGGSVSVWVKR

SEQ ID NO: 31941 - protein, 485 aa, Bacillus sp.
HHDGTNGTIMQYFEWNVPNDGQHWNRLHNNAQNLKNAGITAIWIPPAWKGTSQNDVGYGAYDLYDLGEFNQKGTVRTKYGTKAELERAIRSLKANGIQVYGDVVMNHKGGADFTERVQAVEVNPQNRNQEVSGTYQIEAWTGFNFPGRGNQHSSFKWRWYHFDGTDWDQSRQLANRIYKFRGDGKAWDWEVDTENGNYDYLMYADVDMDHPEVINELNRWGVWYANTLNLDGFRLDAVKHIKFSFMRDWLGHVRGQTGKNLFAVAEYWKNDLGALENYLSKTNWTMSAFDVPLHYNLYQASNSSGNYDMRNLLNGTLVQRHPSHAVTFVDNHDTQPGEALESFVQGWFKPLAYATILTREQGYPQVFYGDYYGIPSDGVPSYRQQIDPLLKARQQYAYGRQHDYFDHWDVIGWTREGNASHPNSGLATIMSDGPGGSKWMYVGRQKAGEVWHDMTGNRSGTVTINQDGWGHFFVNKGSVSVWVKR

SEQ ID NO: 31942 - protein, 485 aa, Bacillus sp.
HHDGTNGTIMQYFEWNVPNDGQHWNRLHNNAQNLKNAGITAIWIPPAWKGTSQNDVGYGAYDLYDLGEFNQKGTVRTKYGTKAELERAIRSLKANGIQVYGDVVMNHKGGADFTERVQAVEVNPQNRNQEVSGTYQIEAWTGFNFPGRGNQHSSFKWRWYHFDGTDWDQSRQLANRIYKFRGDGKAWDWEVDTENGNYDYLMYADVDMDHPEVINELNRWGVWYANTLNLDGFRLDAVKHIKFSFMRDWLGHSRGQTGKNLFAVAEYWKNDLGALENYLSKTNWTMSAFDVPLHYNLYQASNSSGNYDMRNLLNGTLVQRHPSHAVTFVDNHDTQPGEALESFVQGWFKPLAYATILTREQGYPQVFYGDYYGIPSDGVPSYRQQIDPLLKARQQYAYGRQHDYFDHWDVIGWTREGNASHPNSGLATIMSDGPGGSKWMYVGRQKAGEVWHDMTGNRSGTVTINQDGWGHFFVNGGSVSVWVKR

SEQ ID NO: 31943 - protein, 485 aa, Bacillus sp.
HHDGTNGTIMQYFEWNVPNDGQHWNRLHNNAQNLKNANITAIWIPPAWKGTSQNDVGYGAYDLYDLGEFNQKGTVRTKYGTKAELERAIRSLKANGIQVYGDVVMNHKGGADFTERVQAVEVNPQNRNQEVSGTYQIEAWTGFNFPGRGNQHSSFKWRWYHFDGTDWDQSRQLANRIYKFRGDGKAWDWEVDTENGNYDYLMYADVDMDHPEVINELNRWGVWYANTLNLDGFRLDAVKHIKFSFMRDWLGHVRGQTGKNLFAVAEYWKNDLGALENYLSKTNWTMSAFDVPLHYNLYQASNSSGNYDMRNLLNGTLVQRHPSHAVTFVDNHDTQPGEALESFVQGWFKPLAYATILTREQGYPQVFYGDYYGIPSDGVPSYRQQIDPLLKARQQYAYGRQHDYFDHWDVIGWTREGNASHPNSGLATIMSDGPGGSKWMYVGRQKAGEVWHDMTGNRSGTVTINQDGWGHFFVNGGSVSVWVKR

SEQ ID NO: 31944 - protein, 485 aa, Bacillus sp.
HHDGTNGTIMQYFEWNVPNDGQHWNRLHNNAQNLKNAGITAIWIPPAWKGTSQNDVGYGAYDLYDLGEFNQKGTVRTKYGTKAELERAIRSLKANGIQVYGDVVMNHKGGADFTERVQAVEVNPQNRNQEVSGTYQIEAWTGFNFPGRGNQHSSFKWRWYHFDGTDWDQSRQLANRIYKFRGDGKAWDWEVDTENGNYDYLMYADVDRDHPEVINELNRWGVWYANTLNLDGFRLDAVKHIKFSFMRDWLGHVRGQTGKNLFAVAEYWKNDLGALENYLSKTNWTMSAFDVPLHYNLYQASNSSGNYDMRNLLNGTLVQRHPSHAVTFVDNHDTQPGEALESFVQGWFKPLAYATILTREQGYPQVFYGDYYGIPSDGVPSYRQQIDPLLKARQQYAYGRQHDYFDHWDVIGWTREGNASHPNSGLATIMSDGPGGSKWMYVGRQKAGEVWHDMTGNRSGTVTINQDGWGHFFVNGGSVSVWVKR

SEQ ID NO: 31945 - protein, 485 aa, Bacillus sp.
HHDGTNGTIMQYFEWNVPNDGQHWNRLHNNAQNLKNAGITAIWIPPAWKGTSQNDVGYGAYDLYDLGEFNQKGTVRTKYGTKAELERAIRSLKANGIQVYGDVVMNHKGGADFTERVQAVEVNPQNRNQEVSGTYQIEAWTGFNFPGRGNQHSSFKWRWYHFDGTDWDQSRQLANRIYKFRGDGKAWDWEVDTENGNYDYLMYADVDMDHPEVINELNRWGVFYANTLNLDGFRLDAVKHIKFSFMRDWLGHVRGQTGKNLFAVAEYWKNDLGALENYLSKTNWTMSAFDVPLHYNLYQASNSSGNYDMRNLLNGTLVQRHPSHAVTFVDNHDTQPGEALESFVQGWFKPLAYATILTREQGYPQVFYGDYYGIPSDGVPSYRQQIDPLLKARQQYAYGRQHDYFDHWDVIGWTREGNASHPNSGLATIMSDGPGGSKWMYVGRQKAGEVWHDMTGNRSGTVTINQDGWGHFFVNGGSVSVWVKR

SEQ ID NO: 31946 - protein, 485 aa, Bacillus sp.
HHDGTNGTIMQYFEWNVPNDGQHWNRLHNNAQNLKNAGITAIWIPPAWKGTSQNDVGYGAYDLYDLGEFNQKGTVRTKYGTKAELERVIRSLKANGIQVYGDVVMNHKGGADFTERVQAVEVNPQNRNQEVSGTYQIEAWTGFNFPGRGNQHSSFKWRWYHFDGTDWDQSRQLANRIYKFRGDGKAWDWEVDTENGNYDYLMYADVDMDHPEVINELNRWGVWYANTLNLDGFRLDAVKHIKFSFMRDWLGHVRGQTGKNLFAVAEYWKNDLGALENYLSKTNWTMSAFDVPLHYNLYQASNSSGNYDMRNLLNGTLVQRHPSHAVTFVDNHDTQPGEALESFVQGWFKPLAYATILTREQGYPQVFYGDYYGIPSDGVPSYRQQIDPLLKARQQYAYGRQHDYFDHWDVIGWTREGNASHPNSGLATIMSDGPGGSKWMYVGRQKAGEVWHDMTGNRSGTVTINQDGWGHFFVNGGSVSVWVKR

SEQ ID NO: 31947 - protein, 485 aa, Bacillus sp.
HHDGTNGTIMQYFEWNVPNDGQHWNRLHNNAQNLKNAGITAIWIPPAWKGTSQNDVGYGAYDLYDLGEFNQKGTVRTKYGTKAELERAIRSLKANGIQVYGDVVMNHKGGADFTERVQAVEVNPQNRNQEVSGTYQIEAWTGFNFPGRGNQHSSFKWRWYHFDGTDWDQSRQLANRIYKFRGDGKAWDWEVDTENGNYDYLMYADVDMDHPEVINELNRWGVWYANTLNLDGFRLDAVKHIKFSFMRDWLGHVRGQTGKNLFAVAEYWKNDLGALENYLSKTNWTMSAFDVPLHYNLYQASNSSGNYDMRNLLNGTLVQRHPSHAVTFVDNHDTQPGEALESFVQGWFKPLAYATILTREQGYPQVFYGDYYGIPSDGVPSYRQQIDPLLKARSQYAYGRQHDYFDHWDVIGWTREGNASHPNSGLATIMSDGPGGSKWMYVGRQKAGEVWHDMTGNRSGTVTINQDGWGHFFVNGGSVSVWVKR

SEQ ID NO: 31948 - protein, 485 aa, Bacillus sp.
HHDGTNGTIMQYFEWNVPNDGQHWNRLHNNAQNLKNAGITAIWIPPAWKGTSQNDVGYGAYDLYDLGEFNQKGTVRTKYGTKAELERAIRSLKANGIQVYGDVVMNHKGGADFTERVQAVEVNPQNRNQEVSGTYQIEAWTGFNFPGRGNQHSSFKWRWYHFDGTDWDQSRQLANRIYKFRGDGKAWDWEVDTENGNYDYLMYADVDMDHPEVINELNRWGVWYANTLNLDGFRLDAVKHIKFSFMRDWLGHVRGQTGKNLFAVAEYWKNDLGALENYLSKTNWTMSAFDVPLHYNLYQASNSSGNYDMRNLLNGTLVQRHPSHAVTFVDNHDTQPGEALESFVQGWFKPLAYATILTREQGYPQVFYGDYYGIPSDGVPSYRQQIDPLLKARQQYAYGRQHDYFDHWDVIGWTREGNASHPNSGLATIMSDGPGGSKWMYVGRQKAGEVWHDMTVNRSGTVTINQDGWGHFFVNGGSVSVWVKR

SEQ ID NO: 31949 - protein, 485 aa, Bacillus sp.
HHDGTNGTIMQYFEWNVPNDGQHWNRLHNNAQNLKNAGITAIWIPPAWKGTSQNDVGYGAYDLYDLGEFNQKGTVRTKYGTKAELERAIRSLKACGIQVYGDVVMNHKGGADFTERVQAVEVNPQNRNQEVSGTYQIEAWTGFNFPGRGNQHSSFKWRWYHFDGTDWDQSRQLANRIYKFRGDGKAWDWEVDTENGNYDYLMYADVDMDHPEVINELNRWGVWYANTLNLDGFRLDAVKHIKFSFMRDWLGHVRGQTGKNLFAVAEYWKNDLGALENYLSKTNWTMSAFDVPLHYNLYQASNSSGNYDMRNLLNGTLVQRHPSHAVTFVDNHDTQPGEALESFVQGWFKPLAYATILTREQGYPQVFYGDYYGIPSDGVPSYRQQIDPLLKARQQYAYGRQHDYFDHWDVIGWTREGNASHPNSGLATIMSDGPGGSKWMYVGRQKAGEVWHDMTGNRSGTVTINQDGWGHFFVNGGSVSVWVKR

SEQ ID NO: 31950 - protein, 485 aa, Bacillus sp.
HHDGTNGTIMQYFEWNVPNDGQHWNRLHNNAQNLKNAGITAIWIPPAWKGTSQNDVGYGAYDLYDLGEFNQKGTVRTKYGTKAELERAIRSLKANGIQVYGDVVMNHKGGADFTERVQAVEVNPQNRNQEVSGTYQIEAWTGFNFPGRGNQHSSFKWRWYHFDGTDWDQSRQLANRIYKFRGDGKAWDWEVDTENGNYDYLMYADVDMDHPEVINELNRWGVWYANTLNLDGFRLDAVKHIKFSFMRDWLGHVRGQTGKNLFAVAEYWKNDMGALENYLSKTNWTMSAFDVPLHYNLYQASNSSGNYDMRNLLNGTLVQRHPSHAVTFVDNHDTQPGEALESFVQGWFKPLAYATILTREQGYPQVFYGDYYGIPSDGVPSYRQQIDPLLKARQQYAYGRQHDYFDHWDVIGWTREGNASHPNSGLATIMSDGPGGSKWMYVGRQKAGEVWHDMTGNRSGTVTINQDGWGHFFVNGGSVSVWVKR

SEQ ID NO: 31951 - protein, 485 aa, Bacillus sp.
HHDGTNGTIMQYFEWNVPNDGQHWNRLHNNAQNLKNAGITAIWIPPAWKGTSQNDVGYGAYDLYDLGEFNQKGTVRTKYGTKAELERAIRSLKANGIQVYGDVVMNHKGGADFTERVQAVEVNPQNRNQEVSGTYQIEAWTGFNFPGRGNQHSSFKWRWYHFDGTDWDQSRQLANRIYKFRGDGKAWDWEADTENGNYDYLMYADVDMDHPEVINELNRWGVWYANTLNLDGFRLDAVKHIKFSFMRDWLGHVRGQTGKNLFAVAEYWKNDLGALENYLSKTNWTMSAFDVPLHYNLYQASNSSGNYDMRNLLNGTLVQRHPSHAVTFVDNHDTQPGEALESFVQGWFKPLAYATILTREQGYPQVFYGDYYGIPSDGVPSYRQQIDPLLKARQQYAYGRQHDYFDHWDVIGWTREGNASHPNSGLATIMSDGPGGSKWMYVGRQKAGEVWHDMTGNRSGTVTINQDGWGHFFVNGGSVSVWVKR

SEQ ID NO: 31952 - protein, 485 aa, Bacillus sp.
HHDGTNGTIMQYFEWNVPNDGQHWNRLHNNAQNLKNAGITAIWIPPAWKGTSQNDVGYGAYDLYDLGEFNQKGTVRTKYGTKAELERAIRSLKANGIQVYGDVVMNHKGGADFTERVQAVEVNPQNRNQEVSGTYQIEAWTGFNFPGRGNQHSSFKWQWYHFDGTDWDQSRQLANRIYKFRGDGKAWDWEVDTENGNYDYLMYADVDMDHPEVINELNRWGVWYANTLNLDGFRLDAVKHIKFSFMRDWLGHVRGQTGKNLFAVAEYWKNDLGALENYLSKTNWTMSAFDVPLHYNLYQASNSSGNYDMRNLLNGTLVQRHPSHAVTFVDNHDTQPGEALESFVQGWFKPLAYATILTREQGYPQVFYGDYYGIPSDGVPSYRQQIDPLLKARQQYAYGRQHDYFDHWDVIGWTREGNASHPNSGLATIMSDGPGGSKWMYVGRQKAGEVWHDMTGNRSGTVTINQDGWGHFFVNGGSVSVWVKR

SEQ ID NO: 31953 - protein, 485 aa, Bacillus sp.
HHDGTNGTIMQYFEWNVPNDGQHWNRLHNNAQNLKNAGITAIWIPPAWKGTSQNDVGYGAYDLYDLGEFNQKGTVRTKYGTKAELERAIRSLKANGIQVYGDVVMNHKGGADFTERVQAVEVNPQNRNQEVSGTYQIEAWTGFNFPGRGNQHSSFKWRWYHFDGTDWDQSRQLANRIYKFRGDGKAWDWEVDTENGNYDYLMYADVDMDHPEVINELNRWGVWYANTLNLDGFRLDAVKHIKFSFMRDWLGHVRGQTGKNLFAVAEYWKNDLGALENYLSKTNWTMSAFDVPLHYNLYQASNSSGNYDMRNLLNGTLVQRHPSHAVTFCDNHDTQPGEALESFVQGWFKPLAYATILTREQGYPQVFYGDYYGIPSDGVPSYRQQIDPLLKARQQYAYGRQHDYFDHWDVIGWTREGNASHPNSGLATIMSDGPGGSKWMYVGRQKAGEVWHDMTGNRSGTVTINQDGWGHFFVNGGSVSVWVKR

SEQ ID NO: 31954 - protein, 485 aa, Bacillus sp.
HHDGTNGTIMQYFEWNVPNDGQHWNRLHNNAQNLKNAGITAIWIPPAWKGTSQNDVGYGAYDLYDLGEFNQKGTVRTKYGTKAELERAIRSLKANGIQVYGDVVMNHKGGADFTERVQAVEVNPQNRNQEVSGTYQIEAWTGFNFPGRGNQHSSFKWRWYHFDGTDWDQSRQLANRIYKFRGDGKAWDWEVDTENGNYDYLMYADVDMDHPEVINELNRWGVWYANTLNLDGFRLDAVKHIKFSFMRDWLGHVRGQTGKNLFAVAEYWKNDLGALENYLSKTNWTMSAFDVPLHYNLYQASNSSGNYDMRNLLNGTLVQRHPSHAVTFVDNHDTQPGEALESFVQGWFKPLAYATILTREQGQPQVFYGDYYGIPSDGVPSYRQQIDPLLKARQQYAYGRQHDYFDHWDVIGWTREGNASHPNSGLATIMSDGPGGSKWMYVGRQKAGEVWHDMTGNRSGTVTINQDGWGHFFVNGGSVSVWVKR

SEQ ID NO: 31955 - protein, 485 aa, Bacillus sp.
HHDGTNGTIMQYFEWNVPNDGQHWNRLHNNAQNLKNAGITAIWIPPAWKGTSQNDVGYGAYDLYDLGEFNQKGTVRTKYGTKAELERAIRSLKANGIQVYGDVVMNHKGGADFTERVQAVEVNPQNRNQEVSGTYQIEAWTGFNFPGRGNQHSSFKWRWYHFDGTDWDQSRQLANRIYKFRGDGKAWDWEVDTENGNYDYLMYADVDMDHPEVINELNRWGVWYANTLNLDGFRLDAVKHIKFSFMRDWLGHVRGQTGKNLFAVAEYWKNDLGALENYLSKTNWTMSAFDVPLHYNLYQASNSSGVYDMRNLLNGTLVQRHPSHAVTFVDNHDTQPGEALESFVQGWFKPLAYATILTREQGYPQVFYGDYYGIPSDGVPSYRQQIDPLLKARQQYAYGRQHDYFDHWDVIGWTREGNASHPNSGLATIMSDGPGGSKWMYVGRQKAGEVWHDMTGNRSGTVTINQDGWGHFFVNGGSVSVWVKR

SEQ ID NO: 31956 - protein, 485 aa, Bacillus sp.
HHDGTNGTIMQYFEWNVPNDGQHWNRLHNNAQNLKNAGITAIWIPPAWKGTSQNDVGYGAYDLYDLGEFNQKGTVRTKYGTKAELERGIRSLKANGIQVYGDVVMNHKGGADFTERVQAVEVNPQNRNQEVSGTYQIEAWTGFNFPGRGNQHSSFKWRWYHFDGTDWDQSRQLANRIYKFRGDGKAWDWEVDTENGNYDYLMYADVDMDHPEVINELNRWGVWYANTLNLDGFRLDAVKHIKFSFMRDWLGHVRGQTGKNLFAVAEYWKNDLGALENYLSKTNWTMSAFDVPLHYNLYQASNSSGNYDMRNLLNGTLVQRHPSHAVTFVDNHDTQPGEALESFVQGWFKPLAYATILTREQGYPQVFYGDYYGIPSDGVPSYRQQIDPLLKARQQYAYGRQHDYFDHWDVIGWTREGNASHPNSGLATIMSDGPGGSKWMYVGRQKAGEVWHDMTGNRSGTVTINQDGWGHFFVNGGSVSVWVKR

SEQ ID NO: 31957 - protein, 485 aa, Bacillus sp.
HHDGTNGTIMQYFEWNVPNDGQHWNRLHNNAQNLKNAGITAIWIPPAWKGTSQNDVGYGAYDLYDLGEFNQKGTVRTKYGTKAELERAIRSLKANGIQVYGDVVMNHKGGADFTERVQYVEVNPQNRNQEVSGTYQIEAWTGFNFPGRGNQHSSFKWRWYHFDGTDWDQSRQLANRIYKFRGDGKAWDWEVDTENGNYDYLMYADVDMDHPEVINELNRWGVWYANTLNLDGFRLDAVKHIKFSFMRDWLGHVRGQTGKNLFAVAEYWKNDLGALENYLSKTNWTMSAFDVPLHYNLYQASNSSGNYDMRNLLNGTLVQRHPSHAVTFVDNHDTQPGEALESFVQGWFKPLAYATILTREQGYPQVFYGDYYGIPSDGVPSYRQQIDPLLKARQQYAYGRQHDYFDHWDVIGWTREGNASHPNSGLATIMSDGPGGSKWMYVGRQKAGEVWHDMTGNRSGTVTINQDGWGHFFVNGGSVSVWVKR

SEQ ID NO: 31958 - protein, 485 aa, Bacillus sp.
HHDGTNGTIMQYFEWNVPNDGQHWNRLHNNAQNLKNAGITAIWIPPAWKGTSQNDVGYGAYDLYDLGEFNQKGTVRTKYGTKAELERAIRSLKANGIQVYGDVVMNHKGGADFTERVQAVEVNPQNRNQEVSGTYQIEAWTGFNFPGRGNQHSSFKWRWYHFDGTDWDQSRQLANRIYKFRGDGKAWDWEVDTENGNYDYLMYADVDMDHPEVINELNRWGVWYANTLNLDGFRLDAVKHIKFSFMRDWLGHVRGQTGKNLFAVAEYWKNDLGALENYLSKTNWTMSAFDVPLHYNLYQASNSSGNYDMRNLLNRTLVQRHPSHAVTFVDNHDTQPGEALESFVQGWFKPLAYATILTREQGYPQVFYGDYYGIPSDGVPSYRQQIDPLLKARQQYAYGRQHDYFDHWDVIGWTREGNASHPNSGLATIMSDGPGGSKWMYVGRQKAGEVWHDMTGNRSGTVTINQDGWGHFFVNGGSVSVWVKR

SEQ ID NO: 31959 - protein, 485 aa, Bacillus sp.
HHDGTNGTIMQYFEWNVPNDGQHWNRLHNNAQNLKNAGITAIWIPPAWKGTSQNDVGYGAYDLYDLGEFNQKGTVRTKYGTKAELERAIRSLKANGIQVYGDVVMNHKGGADFTERVQAVEVNPQNRNQEVSGTYQIEAWTGFNFPGRGNQHSSFKWRWYHFDGTDWDQSRQLANRIYKFRGDGKAWDWEVDTENGNYDYLMYADVDMDHPEVINELNRWGVWYANTLNLDGFRLDAVKHIKFSFMRDWLGHVRGQTGKNLFAVAEYWKNDLGALENYLSKTNWTMSAFDVPLHYNLYQASNSSGNYDMRNLLNGTLVQRHPSHAVTFVDNHDTQPGEALESFVQGWFKPLAYATILTREQGYPQVFYGDYYGIPSDGVPSYRQQIDPLLKARQQYAYGRQHDYFDHWDVIGWTREGNASHPNSGLATIMSDGPGGSKWMYVGRQKAGEVWHDMTGNRSETVTINQDGWGHFFVNGGSVSVWVKR

SEQ ID NO: 31960 - protein, 485 aa, Bacillus sp.
HHDGTNGTIMQYFEWNVPNDGQHWNRLHNNAQNLKNAGITAIWIPPAWKGTSQNDVGYGAYDLYDLGEFNQKGTVRTKYGTKAELERAIRSLKANGIQVYGDVVMNHKGGADFTERVQAVEVNPQNRNQEVSGTYQIEAWTGFNFPGRGNQHSSFKWRWYHFDGTDWDQSRQLANRIYKFRGDGKAWDWEVDTENGNYDYLMYADVDMDHPEVINELNRWGVWYANTLNLDGFRLDAVKHIKFSFMRDWLGHVRGQTGKNLFAVAEYWKNDLGALENYLSKTNWTMSAFDVPLHYNLYQASNSSGNYDMRNLLNGTLVQRHPSHAVTFVDNHDTQPGEALESFVQGWFKPLAYATILTREQGYPQVFYGDYYGIPSDGVPSYRQQIDPLLKARQQYAYGRQHDYFDHWDVIGWTREGCASHPNSGLATIMSDGPGGSKWMYVGRQKAGEVWHDMTGNRSGTVTINQDGWGHFFVNGGSVSVWVKR

SEQ ID NO: 31961 - protein, 485 aa, Bacillus sp.
HHDGTNGTIMQYFEWNVPNDGQHWNRLHNNAQNLKNAGITAIWIPPAWKGTSLNDVGYGAYDLYDLGEFNQKGTVRTKYGTKAELERAIRSLKANGIQVYGDVVMNHKGGADFTERVQAVEVNPQNRNQEVSGTYQIEAWTGFNFPGRGNQHSSFKWRWYHFDGTDWDQSRQLANRIYKFRGDGKAWDWEVDTENGNYDYLMYADVDMDHPEVINELNRWGVWYANTLNLDGFRLDAVKHIKFSFMRDWLGHVRGQTGKNLFAVAEYWKNDLGALENYLSKTNWTMSAFDVPLHYNLYQASNSSGNYDMRNLLNGTLVQRHPSHAVTFVDNHDTQPGEALESFVQGWFKPLAYATILTREQGYPQVFYGDYYGIPSDGVPSYRQQIDPLLKARQQYAYGRQHDYFDHWDVIGWTREGNASHPNSGLATIMSDGPGGSKWMYVGRQKAGEVWHDMTGNRSGTVTINQDGWGHFFVNGGSVSVWVKR

SEQ ID NO: 31962 - protein, 485 aa, Bacillus sp.
HHDGTNGTIMQYFEWNVPNDGQHWNRLHNNAQNLKNAGITAIWIPPAWKGTSQNDVGYGAYDLYDLGEFNQKGTVRTKYGTKAELERAIRSLKANGIQVYGDVVMNHKGGADFTERVQAVEVNPQNRNQEVSGTYQIEAWTGFNFPGRGNQHSSFKWRWYHFDGTDWDQSRQLANRIYKFRGDGKAWDWEVDTENGNYDYLMYADVDMDHPEVINELNRWGVWYANTLNLDGFRLDAVKHIKFSFMRDWLGHVRGQTGLNLFAVAEYWKNDLGALENYLSKTNWTMSAFDVPLHYNLYQASNSSGNYDMRNLLNGTLVQRHPSHAVTFVDNHDTQPGEALESFVQGWFKPLAYATILTREQGYPQVFYGDYYGIPSDGVPSYRQQIDPLLKARQQYAYGRQHDYFDHWDVIGWTREGNASHPNSGLATIMSDGPGGSKWMYVGRQKAGEVWHDMTGNRSGTVTINQDGWGHFFVNGGSVSVWVKR

SEQ ID NO: 31963 - protein, 485 aa, Bacillus sp.
HHDGTNGTIMQYFEWNVPNDGQHWNRLHNNAQNLKNAGITAIWIPPAWKGTSQNDVGYGAYDLYDLGEFNQKGTVRTKYGTKAELERAIRSLKANGIQVYGDVVMNHKGGADFTERVQAVEVNPQNRNQEVSGTYQIEAWTGFNFPGRGNQHSSFKWRWYHFDGTDWDQSRQLANRIYKFRGDGKAWDWEVDTENGNYDYLMYADVDMDHPEVINELNRWGVWYANTLNLDGFRLDAVKHIKFSFMRDWLGHVRGQTGKNLFAVAEYWKNDLGALENYLSKINWTMSAFDVPLHYNLYQASNSSGNYDMRNLLNGTLVQRHPSHAVTFVDNHDTQPGEALESFVQGWFKPLAYATILTREQGYPQVFYGDYYGIPSDGVPSYRQQIDPLLKARQQYAYGRQHDYFDHWDVIGWTREGNASHPNSGLATIMSDGPGGSKWMYVGRQKAGEVWHDMTGNRSGTVTINQDGWGHFFVNGGSVSVWVKR

SEQ ID NO: 31964 - protein, 485 aa, Bacillus sp.
HHDGTNGTIMQYFEWNVPNDGQHWNRLHNNAQNLKNAGITAIWIPPAWKGTSQNDVGYGAYDLYDLGEFNQKGTVRTKYGTKAELERAIRSLKANGIQVYGDVVMNHKGGADFTERVQAVEVNPQNRNQEVSGTYQIEAWTGFNFPGRGNQHSSFKWRWYHFDGTDWDQSRQLANRIYKFRGDGKAWDWEVDTENGNYDYLMYADVDMDHPEVINELNRWGVWYANTLNLDGFRLDAVKHIKFSFMRDWLGHVRGQTGKNLFAVAEYWKNDLGALENYLSKTNWTMSAFDVPLHYNLYQASNSSGNYDMRNLLNGTLVQRHPSHAVTFVDNHDTQPGEALESFVQGWFKPLAYATILTREQGYPQVFYGDYYGIPSDGVPSYRQQIDPLLKARQQYAYGRQHDYFDHWDVIGWTREGNASHPNSGLATVMSDGPGGSKWMYVGRQKAGEVWHDMTGNRSGTVTINQDGWGHFFVNGGSVSVWVKR

SEQ ID NO: 31965 - protein, 485 aa, Bacillus sp.
HHDGTNGTIMQYFEWNVPNDGQHWNRLHNNAQNLKNAGITAIWIPPAWKGTSQNDVGYGAYDLYDLGEFNQKGTVRTKYGTKAELERAIRSLKANGIQVYGDVVMNHKGGADFTERVQAVEVNPQNRNQEVSGTYQIEAWTGFNFPGRGNQHSSFKWRWYHFDGTDWDQSRQLANRIYKFRGDGKAWDWEVDTENGNYDYLMYADVDMDHPEVINELNRWGVWYANTLNLDGFRLDAVKHIKFSFMRDWLGHVRGQTGKPLFAVAEYWKNDLGALENYLSKTNWTMSAFDVPLHYNLYQASNSSRNYDMRNLLNGTLVQRHPSHAVTFVDNHDTQPGEALESFVQGWFKPLAYATILTREQGYPQVFYGDYYGIPSDGVPSYRQQIDPLLKARQQYAYGRQHDYFDHWDVIGWTREGNASHPNSGLATIMSDGPGGSKWMYVGRQKAGEVWHDMTGNRSGTVTINQDGWGHFFVNGGSVSVWVKR

SEQ ID NO: 31966 - protein, 485 aa, Bacillus sp.
HHDGTNGTIMQYFEWNVPNDGQHWNRLHNNAQNLKNAGITAIWIPPAWKGTSQNDVGYGAYDLYDLGEFNQKGTVRTKYGLKAELERAIRSLKANGIQVYGDVVMNHKGGADFTERVQAVEVNPQNRNQEVSGTYQIEAWTGFNFPGRGNQHSSFKWRWYHFDGTDWDQSRQLANRIYKFRGDGKAWDWEVDTENGNYDYLMYADVDMDHPEVINELNRWGVWYANTLNLDGFRLDAVKHIKFSFMRDWLGHVRGQTGKNLFAVAEYWKNDLGALENYLSKTNWTMSAFDVPLHYNLYQASNSSGNYDMRNLLNGTLVQRHPSHAVTFVDNHDTQPGEALESFVQGWFKPLAYATILTREQGYPQVFYGDYYGIPSDGVPSYRQQIDPLLKARQQYAYGRQHDYFDHWDVIGWTREGNASHPNSGLATIMSDGPGGSKWMYVGRQKAGEVWHDMTGNRSGTVTINQDGWGHFFVNGGSVSVWVKR

SEQ ID NO: 31967 - protein, 485 aa, Bacillus sp.
HHDGTNGTIMQYFEWNVPNDGQHWNRLHNNAQNLKNAGITAIWIPPAWKGTSQNDVGYGAYDLYDLGEFNQKGTVRTKYGTKAELERAIRSLKANGIQVYGDVVMNHKGGADFTERVQAVEVNPQNRNQEVSGTYQIEAWTGFNFPGRGNQHSSFKWRWYHFDGTDWDQSRQLANRIYKFRGDGKAWDWEVDTENGNYDYLMYADVDMDHPEVIDELNRWGVWYANTLNLDGFRLDAVKHIKFSFMRDWLGHVRGQTGKNLFAVAEYWKNDLGALENYLSKTNWTMSAFDVPLHYNLYQASNSSGNYDMRNLLNGTLVQRHPSHAVTFVDNHDTQPGEALESFVQGWFKPLAYATILTREQGYPQVFYGDYYGIPSDGVPSYRQQIDPLLKARQQYAYGRQHDYFDHWDVIGWTREGNASHPNSGLATIMSDGPGGSKWMYVGRQKAGEVWHDMTGNRSGTVTINQDGWGHFFVNGGSVSVWVKR

SEQ ID NO: 31968 - protein, 485 aa, Bacillus sp.
HHDGTNGTIMQYFEWNVPNDGQHWNRLHNNAQNLKNAGITAIWIPPAWKGTSQNDVGYGAYDLYDLGEFNQKGTVRTKYGTKAELERAIRSLKANGIQVYGDVVMNHKGGADFTERVQAVEVNPQNRNQEVSGTYQIEAWTGFNFPGRGNQHSSFKWRWYHFDGTDWDQSRQLANRIYKFRGDGKAWDWEVDTENGNYDYLMYADVDMDHPEVINELNRWGVWYANTLNLDGFRLDAVKHIKFSFMRDWLGHVRGQTGKNLFAVAEYWWNDLGALENYLSKTNWTMSAFDVPLHYNLYQASNSSGNYDMRNLLNGTLVQRHPSHAVTFVDNHDTQPGEALESFVQGWFKPLAYATILTREQGYPQVFYGDYYGIPSDGVPSYRQQIDPLLKARQQYAYGRQHDYFDHWDVIGWTREGNASHPNSGLATIMSDGPGGSKWMYVGRQKAGEVWHDMTGNRSGTVTINQDGWGHFFVNGGSVSVWVKR

SEQ ID NO: 31969 - protein, 485 aa, Bacillus sp.
HHDGTNGTIMQYFEWNVPNDGQHWNRLHNNAQNLKNAGITAIWIPPAWKGTSQNDVGYGAYDLYDLGEFNQKGTVRTKYGTKAELERAIRSLKANGIQVYGDVVMNHKGGADFTERVQAVEVTPQNRNQEVSGTYQIEAWTGFNFPGRGNQHSSFKWRWYHFDGTDWDQSRQLANRIYKFRGDGKAWDWEVDTENGNYDYLMYADVDMDHPEVINELNRWGVWYANTLNLDGFRLDAVKHIKFSFMRDWLGHVRGQTGKNLFAVAEYWKNDLGALENYLSKTNWTMSAFDVPLHYNLYQASNSSGNYDMRNLLNGTLVQRHPSHAVTFVDNHDTQPGEALESFVQGWFKPLAYATILTREQGYPQVFYGDYYGIPSDGVPSYRQQIDPLLKARQQYAYGRQHDYFDHWDVIGWTREGNASHPNSGLATIMSDGPGGSKWMYVGRQKAGEVWHDMTGNRSGTVTINQDGWGHFFVNGGSVSVWVKR

SEQ ID NO: 31970 - protein, 485 aa, Bacillus sp.
HHDGTNGTIMQYFEWNVPNDGQHWNRLHNNAQNLKNAGITAIWIPPAWKGTSQNDVGYGAYDLYDLGEFNQKGTVRTKYGTKAELERAIRSLKANGIQVYGDVVMNHKGGADFTERVQAVEVNPQNRNQEVSATYQIEAWTGFNFPGRGNQHSSFKWRWYHFDGTDWDQSRQLANRIYKFRGDGKAWDWEVDTENGNYDYLMYADVDMDHPEVINELNRWGVWYANTLNLDGFRLDAVKHIKFSFMRDWLGHVRGQTGKNLFAVAEYWKNDLGALENYLSKTNWTMSAFDVPLHYNLYQASNSSGNYDMRNLLNGTLVQRHPSHAVTFVDNHDTQPGEALESFVQGWFKPLAYATILTREQGYPQVFYGDYYGIPSDGVPSYRQQIDPLLKARQQYAYGRQHDYFDHWDVIGWTREGNASHPNSGLATIMSDGPGGSKWMYVGRQKAGEVWHDMTGNRSGTVTINQDGWGHFFVNGGSVSVWVKR

SEQ ID NO: 31971 - protein, 485 aa, Bacillus sp.
HHDGTNGTIMQYFEWNVPNDGQHWNRLHNNAQNLKNAGITAIWIPPAWKGTSQNDVGYGAYDLYDLGEFNQKGTVRTKYGTKAELERAIRSLKANGIQVYGDVVMNHKGGADFTERVQAVEVNPQNRNQEVSGTYQIEAWTGFNFPGRGNQHSSFKWRWYHFDGTDWDQSRQLANRIYKFRGDGKAWDWEVDTENGNYDYLMYADVDMDHPEVINELNRWGVWYANTLNLDGLRLDAVKHIKFSFMRDWLGHVRGQTGKNLFAVAEYWKNDLGALENYLSKTNWTMSAFDVPLHYNLYQASNSSGNYDMRNLLNGTLVQRHPSHAVTFVDNHDTQPGEALESFVQGWFKPLAYATILTREQGYPQVFYGDYYGIPSDGVPSYRQQIDPLLKARQQYAYGRQHDYFDHWDVIGWTREGNASHPNSGLATIMSDGPGGSKWMYVGRQKAGEVWHDMTGNRSGTVTINQDGWGHFFVNGGSVSVWVKR

SEQ ID NO: 31972 - protein, 485 aa, Bacillus sp.
HHDGTNGTIMQYFEWNVPSDGQHWNRLHNNAQNLKNAGITAIWIPPAWKGTSQNDVGYGAYDLYDLGEFNQKGTVRTKYGTKAELERAIRSLKANGIQVYGDVVMNHKGGADFTERVQAVEVNPQNRNQEVSGTYQIEAWTGFNFPGRGNQHSSFKWRWYHFDGTDWDQSRQLANRIYKFRGDGKAWDWEVDTENGNYDYLMYADVDMDHPEVINELNRWGVWYANTLNLDGFRLDAVKHIKFSFMRDWLGHVRGQTGKNLFAVAEYWKNDLGALENYLSKTNWTMSAFDVPLHYNLYQASNSSGNYDMRNLLNGTLVQRHPSHAVTFVDNHDTQPGEALESFVQGWFKPLAYATILTREQGYPQVFYGDYYGIPSDGVPSYRQQIDPLLKARQQYAYGRQHDYFDHWDVIGWTREGNASHPNSGLATIMSDGPGGSKWMYVGRQKAGEVWHDMTGNRSGTVTINQDGWGHFFVNGGSVSVWVKR

SEQ ID NO: 31973 - protein, 485 aa, Bacillus sp.
HHDGTNGTIMQYFEWNVPNDGQHWNRLHNNAQNLKNAGITAIWIPPAWKGTSQNDVGYGAYDLYDLGEFNQKGTVRTKYGTKAELERAIRSLKANGIQVYGDVVMNHKGGADFTERVQAVEVNPQNRNQEVSGTYQIEAWTGFNFPGRGNQHSSFKWRWYHFDGTDWDQSRQLANRIYKFRGDGKAWDWEVDTENGNYDYLMYADVDMDHPEVINELNRWGVWYANTLNLDGFRLDAVKHIKFSFMRDWLGHVRGQTGKNLFAVAEYWKNDLGALENYLSKTNWTMSAFDVPLHYNLYQASNSSGNYDMRNLLNGTLVQRHPSHAVTFVDNHDTQPGEALESFVQGWFKPLAYATILTREQGYPQVFYGDYYGIPSDGVPSYRQQIDPLLKARQQYAYGRQHDYFDHWDVIGWTREGNASHPNSGLATIMSDGPGGSKWMYVGRQKAGEVWHDMTGRRSGTVTINQDGWGHFFVNGGSVSVWVKR

SEQ ID NO: 31974 - protein, 485 aa, Bacillus sp.
HHDGTNGTIMQYFEWNVPNDGQHWNRLHNNAQALKNAGITAIWIPPAWKGTSQNDVGYGAYDLYDLGEFNQKGTVRTKYGTKAELERAIRSLKANGIQVYGDVVMNHKGGADFTERVQAVEVNPQNRNQEVSGTYQIEAWTGFNFPGRGNQHSSFKWRWYHFDGTDWDQSRQLANRIYKFRGDGKAWDWEVDTENGNYDYLMYADVDMDHPEVINELNRWGVWYANTLNLDGFRLDAVKHIKFSFMRDWLGHVRGQTGKNLFAVAEYWKNDLGALENYLSKTNWTMSAFDVPLHYNLYQASNSSGNYDMRNLLNGTLVQRHPSHAVTFVDNHDTQPGEALESFVQGWFKPLAYATILTREQGYPQVFYGDYYGIPSDGVPSYRQQIDPLLKARQQYAYGRQHDYFDHWDVIGWTREGNASHPNSGLATIMSDGPGGSKWMYVGRQKAGEVWHDMTGNRSGTVTINQDGWGHFFVNGGSVSVWVKR

SEQ ID NO: 31975 - protein, 485 aa, Bacillus sp.
HHDGTNGTIMQYFEWNVPNDGQHWNRLHNNAQNLKNAGITAIWIPPAWKGTSQNDVGYGAYDLYDLGEFNQKGTVRTKYGTKAELERAIRSLKANGIQVYGDVVMNHKGGADFTERVQAVEVNPQNRNQEVSGTYQILAWTGFNFPGRGNQHSSFKWRWYHFDGTDWDQSRQLANRIYKFRGDGKAWDWEVDTENGNYDYLMYADVDMDHPEVINELNRWGVWYANTLNLDGFRLDAVKHIKFSFMRDWLGHVRGQTGKNLFAVAEYWKNDLGALENYLSKTNWTMSAFDVPLHYNLYQASNSSGNYDMRNLLNGTLVQRHPSHAVTFVDNHDTQPGEALESFVQGWFKPLAYATILTREQGYPQVFYGDYYGIPSDGVPSYRQQIDPLLKARQQYAYGRQHDYFDHWDVIGWTREGNASHPNSGLATIMSDGPGGSKWMYVGRQKAGEVWHDMTGNRSGTVTINQDGWGHFFVNGGSVSVWVKR

SEQ ID NO: 31976 - protein, 485 aa, Bacillus sp.
HHDGTNGTIMQYFEWNVPNDGQHWNRLHNNAQNLKNAGITAIWIPPAWKGTSQNDVGYGAYDLYDLGEFNQKGTVRTKYGTKAELERAIRSLKANGIQVYGDVVMNHKGGADFTERVQAVEVNPQNRNQEVSGTYQIEAWTGFNFPGRGNQHSSFKWRWYHFDGTDWDQSRQLANRIYKFRGDGKAWDWEVDTENGNYDYLMYADVDMDHPEVINELNRWGVWYANTLNLDGFRLDAVKHIKFSFMRDWLGHVRGQTGKNLFAVAEYWKNDLGALENYLSKTNWTMSAFDVPLHYNLYQASNSSGNYDMRNLLNGTLVQRHPSHAVTFVDNHDTQPGEALESFVQGWFKPLAYATILTREQGYPQVFYGDYIGIPSDGVPSYRQQIDPLLKARQQYAYGRQHDYFDHWDVIGWTREGNASHPNSGLATIMSDGPGGSKWMYVGRQKAGEVWHDMTGNRSGTVTINQDGWGHFFVNGGSVSVWVKR

SEQ ID NO: 31977 - protein, 485 aa, Bacillus sp.
HHDGTNGTIMQYFEWNVPNDGQHWNRLHNNAQNLKNAGITAIWIPPAWKGTSQNDVGYGAYDLYDLGEFNQKGTVRTKYGTKAELERAIRSLKANGIQVYGDVVMNHKGGADFTERVQAVEVNPQNRNQEVSGTYQIEAWTGFNFPGRGNQHSSFKWRWYHFDGTDWDQSRQLANRIYKFRGDGKAWDWEVDTENGNYDYLMYADVDMDHPEVINELNRWGVWYANTLNLDGFRLDAVKHIKFSFMRDWLGHVRGQTGKNLFAVAEYWKNDLGALENYLSKTNWTMSAFDVPLHYNLYQASNSSGNYDMRNLLNGTLVQRHPSHAVTFVDNHDTQPGEALESFVQGWFKPLAYATILTREQGYPQVFYGDYYGIPSDGVPSYRQQIDPLLKARQQYAYGRQHDYFDHWDVIGWTREGNASTPNSGLATIMSDGPGGSKWMYVGRQKAGEVWHDMTGNRSGTVTINQDGWGHFFVNGGSVSVWVKR

SEQ ID NO: 31978 - protein, 485 aa, Bacillus sp.
HHDGTNGTIMQYFEWNVPNDGQHWNRLHNNAQNLKNAGITAIWIPPAWKGTSQNDVGYGAYDLYDLGEFNQKGTVRTKYGTKAELERAIRSLKANGIQVYGDVVMNHKGGADFTERVQAVEVNPQNRNQEVSGTYQIEAWTGFNFPGRGNQHSSFKWRWYHFDGTDWDQSRQLANRIYKFRGDGKAWDWEVDTENGNYDYLMYADVDMDHPEVINELNRWGVWYANTLNLDGFRLDAVKHIKFSFMRDWLGHVRGQTGKNLFAVAEYWKNDLGALENYLSKTNWTMSAFDVPLHYNLYQASNSSGNYDMRNLLNGTLVPRHPSHAVTFVDNHDTQPGEALESFVQGWFKPLAYATILTREQGYPQVFYGDYYGIPSDGVPSYRQQIDPLLKARQQYAYGRQHDYFDHWDVIGWTREGNASHPNSGLATIMSDGPGGSKWMYVGRQKAGEVWHDMTGNRSGTVTINQDGWGHFFVNGGSVSVWVKR

SEQ ID NO: 31979 - protein, 485 aa, Bacillus sp.
HHDGTNGTIMQYFEWNVPNDGQHWNRLHNNAQNLKNAGITAIWIPPAWKGTSQNDVGYGAYDLYDLGEFNQKGTVRTKYGTKAELERAIRSLKANGIQVYGDVVMNHKGGADFTERVQAVEVNPQNRNQEVSGTYQIEAWTGFNFPGRGNQHSSFKWRWYHFDGTDWDQSRQLANRIYKFRGDGKAWDWEVDTQNGNYDYLMYADVDMDHPEVINELNRWGVWYANTLNLDGFRLDAVKHIKFSFMRDWLGHVRGQTGKNLFAVAEYWKNDLGALENYLSKTNWTMSAFDVPLHYNLYQASNSSGNYDMRNLLNGTLVQRHPSHAVTFVDNHDTQPGEALESFVQGWFKPLAYATILTREQGYPQVFYGDYYGIPSDGVPSYRQQIDPLLKARQQYAYGRQHDYFDHWDVIGWTREGNASHPNSGLATIMSDGPGGSKWMYVGRQKAGEVWHDMTGNRSGTVTINQDGWGHFFVNGGSVSVWVKR

SEQ ID NO: 31980 - protein, 485 aa, Bacillus sp.
HHDGTNGTIMQYFEWNVPNDGQHWNRLHNNAQNLKNAGITAIWIPPAIKGTSQNDVGYGAYDLYDLGEFNQKGTVRTKYGTKAELERAIRSLKANGIQVYGDVVMNHKGGADFTERVQAVEVNPQNRNQEVSGTYQIEAWTGFNFPGRGNQHSSFKWRWYHFDGTDWDQSRQLANRIYKFRGDGKAWDWEVDTENGNYDYLMYADVDMDHPEVINELNRWGVWYANTLNLDGFRLDAVKHIKFSFMRDWLGHVRGQTGKNLFAVAEYWKNDLGALENYLSKTNWTMSAFDVPLHYNLYQASNSSGNYDMRNLLNGTLVQRHPSHAVTFVDNHDTQPGEALESFVQGWFKPLAYATILTREQGYPQVFYGDYYGIPSDGVPSYRQQIDPLLKARQQYAYGRQHDYFDHWDVIGWTREGNASHPNSGLATIMSDGPGGSKWMYVGRQKAGEVWHDMTGNRSGTVTINQDGWGHFFVNGGSVSVWVKR

SEQ ID NO: 31981 - protein, 485 aa, Bacillus sp.
HHDGTNGTIMQYFEWNVPNDGQHWNRLHNNAQNLKNAGITAIWIPPAWKGTSQNDVGYGAYDLYDLGEFNQKGTVRTKYGTKAELERAIRSLKANGIQVYGDVVMNHKGGADFTERVQAVEVNPQNRNQEVSGTYQIEAWTGFNFPGRGNQHSSFKWRWYHFDGTDWDQSRQLANRIYKFRGDGKAWDWEVDTENGNYDYLMYADVDMDHPEVINELNRWGVWYANTLNLDGFRLDAVKHIKFSFMRDWLGHVRGQTGKNLFAVAEYWKNDLVALENYLSKTNWTMSAFDVPLHYNLYQASNSSGNYDMRNLLNGTLVQRHPSHAVTFVDNHDTQPGEALESFVQGWFKPLAYATILTREQGYPQVFYGDYYGIPSDGVPSYRQQIDPLLKARQQYAYGRQHDYFDHWDVIGWTREGNASHPNSGLATIMSDGPGGSKWMYVGRQKAGEVWHDMTGNRSGTVTINQDGWGHFFVNGGSVSVWVKR

SEQ ID NO: 31982 - protein, 485 aa, Bacillus sp.
HHDGTNGTIMQYFEWNVPNDGQHWNRLHNNAQNLKNAGITAIWIPPAWKGTSQNDVGYGAYDLYDLGEFNQKGTVRTKYGTKAELERAIRSLKANGIQVYGDVVMNHKGGADFTERVQAVEVNPQNRNQEVSGTYQIEAWTGFNFPGRGNQHSSFKWRWYHFDGTDWDQSRQLANRIYKFRGDGKAWDWEVDTENGNYDYLMYADVDMDWPEVINELNRWGVWYANTLNLDGFRLDAVKHIKFSFMRDWLGHVRGQTGKNLFAVAEYWKNDLGALENYLSKTNWTMSAFDVPLHYNLYQASNSSGNYDMRNLLNGTLVQRHPSHAVTFVDNHDTQPGEALESFVQGWFKPLAYATILTREQGYPQVFYGDYYGIPSDGVPSYRQQIDPLLKARQQYAYGRQHDYFDHWDVIGWTREGNASHPNSGLATIMSDGPGGSKWMYVGRQKAGEVWHDMTGNRSGTVTINQDGWGHFFVNGGSVSVWVKR

SEQ ID NO: 31983 - protein, 485 aa, Bacillus sp.
HHDGTNGTIMQYFEWNVPNDGQHWNRLHNNAQNLKNAGITAIWIPPAWKGTSQNDVGYGAYDLYDLGEFNQKGTVRTKYGTKAELERAIRSLKANGIQVYGDVVMNHKGGADFTERVQAVEVNPQNRNQEVSGTPQIEAWTGFNFPGRGNQHSSFKWRWYHFDGTDWDQSRQLANRIYKFRGDGKAWDWEVDTENGNYDYLMYADVDMDHPEVINELNRWGVWYANTLNLDGFRLDAVKHIKFSFMRDWLGHVRGQTGKNLFAVAEYWKNDLGALENYLSKTNWTMSAFDVPLHYNLYQASNSSGNYDMRNLLNGTLVQRHPSHAVTFVDNHDTQPGEALESFVQGWFKPLAYATILTREQGYPQVFYGDYYGIPSDGVPSYRQQIDPLLKARQQYAYGRQHDYFDHWDVIGWTREGNASHPNSGLATIMSDGPGGSKWMYVGRQKAGEVWHDMTGNRSGTVTINQDGWGHFFVNGGSVSVWVKR

SEQ ID NO: 31984 - protein, 485 aa, Bacillus sp.
HHDGTNGTIMQYFEWNVPNDGQHWNRLHNNAQNLKNAGITAIWIPPAWKGTSQNDVGYGAYDLYDLGEFNQKGTVRTKYGTKAELERAIRSLKANGIQVYGDVVMNHKGGADFTERVQAVEVNPQNRNQEVSGTYQIEAWTGFNFPGRGNQHSSFKWRWYHFDGTDWDQSRQLANRIYKFRGDGKAWDWEVDTENGNYDYLMYADVDMDHPEVINELNRWGVWYANTLNLDGFRLDAVKHIKFSFMRDWLGHVRGQTGKNLFAVAEYWKNDLGALENYLSKTNWTMSAFDVPLHYNLYQASNSSGNYDMRNLLNGTLVQRHPSHAVTFVDNHDTQPGEALESFVQGWFKPLAYATILTREQGYPQVFYEDYYGIPSDGVPSYRQQIDPLLKARQQYAYGRQHDYFDHWDVIGWTREGNASHPNSGLATIMSDGPGGSKWMYVGRQKAGEVWHDMTGNRSGTVTINQDGWGHFFVNGGSVSVWVKR

SEQ ID NO: 31985 - protein, 485 aa, Bacillus sp.
HHDGTNGTIMQYFEWNVPNDGQHWNRLHNNAQNLKNAGITAIWIPPAWKGTSQNDVGYGAYDLYDLGEFNQKGTVRTKYGTKAELERAIRSLKANGIQVYGDVVMNHKGGADFTERVQAVEVVPQNRNQEVSGTYQIEAWTGFNFPGRGNQHSSFKWRWYHFDGTDWDQSRQLANRIYKFRGDGKAWDWEVDTENGNYDYLMYADVDMDHPEVINELNRWGVWYANTLNLDGFRLDAVKHIKFSFMRDWLGHVRGQTGKNLFAVAEYWKNDLGALENYLSKTNWTMSAFDVPLHYNLYQASNSSGNYDMRNLLNGTLVQRHPSHAVTFVDNHDTQPGEALESFVQGWFKPLAYATILTREQGYPQVFYGDYYGIPSDGVPSYRQQIDPLLKARQQYAYGRQHDYFDHWDVIGWTREGNASHPNSGLATIMSDGPGGSKWMYVGRQKAGEVWHDMTGNRSGTVTINQDGWGHFFVNGGSVSVWVKR

SEQ ID NO: 31986 - protein, 485 aa, Bacillus sp.
HHDGTNGTIMQYFEWNVPNDGQHWNRLHNNAQNLKNAGITAIWIPPAWKGTSQNDVGYGAYDLYDLGEFNQKGTVRTKYGTKAELERAIRSLKANGIQVYGDVVMNHKGGADFTERVQAVEVNPQNRNQEVSGTYQIEAWTGFNFPGRGNQHSSFKWRWYHFDGTDWDQSRQLANRIYKFRGDGKAWDWEVDTENGNYDYLMYADVDMDHPEVINELNRWGVWYANTLNLDGFRLDAVKHIKFSFMRDWLGHVRGQTGKNLFAVAEYWKNDLGALENYLSKTNWTMSAFDVPLHYNLYQASNSSGNYDMRNLLNGTLVQRHPSHAVTFVDNHDTQPGEALESFVQGWFKPLAYATILTREQGYPQVFYGDYYGIPSDGVPSYRQQIDPLLKARQQYAYGRQHDYFDHWDVIGWTREGNASHPNSGLATIMSDGPGGSKWMQVGRQKAGEVWHDMTGNRSGTVTINQDGWGHFFVNGGSVSVWVKR

SEQ ID NO: 31987 - protein, 485 aa, Bacillus sp.
HHDGTNGTIMQYFEWNVPNDGQHWNRLHNNAQNLKNAGITAIWIPPAWKGTSQNDVGYGAYDLYDLGEFNQKGTVRTKYGTKAELERAIRSLKANGIQVYGDVVMNHKGGADFTERVQAVEVNPQNRNQEVSGTYQIEAWTGFNFPGRGNQHSSFKWRWYHFDGTDWDQSRQLANRIYKFRGDGKAWDWEVDTENGNYDYLMYADVDMDHPEVINELNRWGVWYANTLNLDGFRLDAVKHIKFSFMRGWLGHVRGQTGKNLFAVAEYWKNDLGALENYLSKTNWTMSAFDVPLHYNLYQASNSSGNYDMRNLLNGTLVQRHPSHAVTFVDNHDTQPGEALESFVQGWFKPLAYATILTREQGYPQVFYGDYYGIPSDGVPSYRQQIDPLLKARQQYAYGRQHDYFDHWDVIGWTREGNASHPNSGLATIMSDGPGGSKWMYVGRQKAGEVWHDMTGNRSGTVTINQDGWGHFFVNGGSVSVWVKR

SEQ ID NO: 31988 - protein, 485 aa, Bacillus sp.
HHDGTNGTIMQYFEWNVPNDGQHWNRLHNNAQNLKNAGITAIWIPPAWKGTSQNDVGYGAYDLYDLGEFNQKGTVRTKYGTKAELERAIRSLKANGIQVYGDVVMNHKGGADFTERVQAVEVNPQNRNQEVSGTYQIEAWTGFNFPGRGNQHSSFKWRWYHFDGTDWDQSRQLANRIYKFRGDGKAWDWEVDTDNGNYDYLMYADVDMDHPEVINELNRWGVWYANTLNLDGFRLDAVKHIKFSFMRDWLGHVRGQTGKNLFAVAEYWKNDLGALENYLSKTNWTMSAFDVPLHYNLYQASNSSGNYDMRNLLNGTLVQRHPSHAVTFVDNHDTQPGEALESFVQGWFKPLAYATILTREQGYPQVFYGDYYGIPSDGVPSYRQQIDPLLKARQQYAYGRQHDYFDHWDVIGWTREGNASHPNSGLATIMSDGPGGSKWMYVGRQKAGEVWHDMTGNRSGTVTINQDGWGHFFVNGGSVSVWVKR

SEQ ID NO: 31989 - protein, 483 aa, Bacillus sp.
HHNGTNGTMMQYFEWYLPNDGNHWNRLNSDASNLKSKGITAVWIPPAWKGTSQNDVGYGAYDLYDLGEFNQKGTVRTKYGTRSQLQAAVTSLKNNGIQVYGDVVMNHKGGADATEMVRAVEVNPNNRNQEVTGEYTIEAWTRFDFPGRGNTHSSFKWRWYHFDGVDWDQSRNLNNRIYKFRGKAWDWEVDTEFGNYDYLMYVDYDYDHPETTNEMRNWGVWYTNTLGLDGFRIDAVKHIKYSFTRDWINHVRSATGKNMFAVAEFWKNDLGAIENYLQKTNWNHSVFDVPLHYNLYNASKSQGNYDMRNIFNGTVVQRHPSHAVTFVDNHDSQPEEALESFVDTWFKPLAYALTLTREQGYPSVFYGDYYGIPTHGVPAMRSKIDPILEARQKYAYGPQHDYLDHPDVIGWTRKGDSSHPKSGLATLITDGPGGSNRMYAGLKNAGETWYDITGNRSDTVKIGSDGWGEFHVNDGSVSIYVQK

SEQ ID NO: 31990 - protein, 485 aa, Bacillus sp.
HHDGTNGTIMQYFEWNVPNDGQHWNRLHNNAQNLKNAGITAIWIPPAWKGTSQNDVGYGAYDLYDLGEFNQKGTVRTKYGTKAELERAIRSLKANGIQVYGDVVMNHKGGADFTERVQAVEVNPQNRNQEVSGTYQIEAWTGFNFPGRGNQHSSFKWRWYHFDGTDWDQSRQLANRIYLFRGDGKAWDWEVDTENGNYDYLMYADVDMDHPEVINELNRWGVWYANTLNLDGFRLDAVKHIKFSFMRDWLGHVRGQTGKNLFAVAEYWKNDLGALENYLSKTNWTMSAFDVPLHYNLYQASNSSGNYDMRNLLNGTLVQRHPSHAVTFVDNHDTQPGEALESFVQGWFKPLAYATILTREQGYPQVFYGDYYGIPSDGVPSYRQQIDPLLKARQQYAYGRQHDYFDHWDVIGWTREGNASHPNSGLATIMSDGPGGSKWMYVGRQKAGEVWHDMTGNRSGTVTINQDGWGHFFVNGGSVSVWVKR

SEQ ID NO: 31991 - protein, 485 aa, Bacillus sp.
HHDGTNGTIMQYFEWNVPNDGQHWNRLHNNAQNLKNAGISAIWIPPAWKGTSQNDVGYGAYDLYDLGEFNQKGTVRTKYGTKAELERAIRSLKANGIQVYGDVVMNHKGGADFTERVQAVEVNPQNRNQEVSGTYQIEAWTGFNFPGRGNQHSSFKWRWYHFDGTDWDQSRQLANRIYKFRGDGKAWDWEVDTENGNYDYLMYADVDMDHPEVINELNRWGVWYANTLNLDGFRLDAVKHIKFSFMRDWLGHVRGQTGKNLFAVAEYWKNDLGALENYLSKTNWTMSAFDVPLHYNLYQASNSSGNYDMRNLLNGTLVQRHPSHAVTFVDNHDTQPGEALESFVQGWFKPLAYATILTREQGYPQVFYGDYYGIPSDGVPSYRQQIDPLLKARQQYAYGRQHDYFDHWDVIGWTREGNASHPNSGLATIMSDGPGGSKWMYVGRQKAGEVWHDMTGNRSGTVTINQDGWGHFFVNGGSVSVWVKR

SEQ ID NO: 31992 - protein, 485 aa, Bacillus sp.
HHDGTNGTIMQYFEWNVPNDGQHWNRLHNNAQNLKNAGITAIWIPPAWKGTSQNDVGYGAYDLYDLGEFNQKGTVRTKYGTKAELERAIRSLKANGIQVYGDVVMNHKGGADFTERVQAVEVNPQNRNQEVSGTYQIEAWTGFNFPGRGNQHSSFKWRWYHFDGTDWDQSRQLANRIYKFRGDGKAWDWEVDTENGNYDYLMYADVDMDHPEVINELNRWGVWYANTLNLDGFRLDAVKHIKFSFMRDWLGHVRGQTGKNLFAVAEYWLNDLGALENYLSKTNWTMSAFDVPLHYNLYQASNSSGNYDMRNLLNGTLVQRHPSHAVTFVDNHDTQPGEALESFVQGWFKPLAYATILTREQGYPQVFYGDYYGIPSDGVPSYRQQIDPLLKARQQYAYGRQHDYFDHWDVIGWTREGNASHPNSGLATIMSDGPGGSKWMYVGRQKAGEVWHDMTGNRSGTVTINQDGWGHFFVNGGSVSVWVKR

SEQ ID NO: 31993 - protein, 485 aa, Bacillus sp.
HHDGTNGTIMQYFEWNVPNDGQHWNRLHNNAQNLKNAGITAIWIPPAWKGTSQNVVGYGAYDLYDLGEFNQKGTVRTKYGTKAELERAIRSLKANGIQVYGDVVMNHKGGADFTERVQAVEVNPQNRNQEVSGTYQIEAWTGFNFPGRGNQHSSFKWRWYHFDGTDWDQSRQLANRIYKFRGDGKAWDWEVDTENGNYDYLMYADVDMDHPEVINELNRWGVWYANTLNLDGFRLDAVKHIKFSFMRDWLGHVRGQTGKNLFAVAEYWKNDLGALENYLSKTNWTMSAFDVPLHYNLYQASNSSGNYDMRNLLNGTLVQRHPSHAVTFVDNHDTQPGEALESFVQGWFKPLAYATILTREQGYPQVFYGDYYGIPSDGVPSYRQQIDPLLKARQQYAYGRQHDYFDHWDVIGWTREGNASHPNSGLATIMSDGPGGSKWMYVGRQKAGEVWHDMTGNRSGTVTINQDGWGHFFVNGGSVSVWVKR

SEQ ID NO: 31994 - protein, 485 aa, Bacillus sp.
HHDGTNGTIMQYFEWNVPNDGQHWNRLHNNAQNLKNAGITAIWIPPAWKGTSQNDVGYGAYDLYDLGEFNQKGTVRTKYGTKAELERAIRSLKANGIQVYGDVVMNHKGGADFTERVQAVEVNPQNRNQEVSGTYQIEAWTGFNFPGRGNQHSSFKWRWYHFDGTDWDQSRQLANRIYKFRGDGKAWDWEVDTENGNYDYLMYADVDMDHPEVINELNRWGVWYANTLNLDGFRLDAVKHIKFSFMRDWLGHVRGQTGKNLFAVAEYWKNDLGALENYLSKTNWTMSAFDVPLHYNLYQASNSSGNYDMRNLLNGTLVQRHPSHAVTFVDNHDTQPGEALFSFVQGWFKPLAYATILTREQGYPQVFYGDYYGIPSDGVPSYRQQIDPLLKARQQYAYGRQHDYFDHWDVIGWTREGNASHPNSGLATIMSDGPGGSKWMYVGRQKAGEVWHDMTGNRSGTVTINQDGWGHFFVNGGSVSVWVKR

SEQ ID NO: 31995 - protein, 485 aa, Bacillus sp.
HHDGTNGTIMQYFEWNVPNDGQHWNRLHNNAQNLKNAGITAIWIPPAWKGTSQNDVGYGAYDLYDLGEFNQKGTVRTKYGTKAELERAIRSLKANGIQVYGDVVMNHKGGADFTERVQAVEVNPQNRNQEVSGTYQIEAWTGFNFPGRGNQHSSFKWRWYHFDGTDWDQSRQLANRIYKFRGDGKAWDWEVDTENGNYDYLMYADVDMDHPEVINELNRWGVWYANTLNLDGFRLDAVKHIKFSFMRDWLGHVRGQTGKNLFAVAEYWKNDLGALENYLSKTNWTMSAFDVPLHYNLYQASNSSGNYDMRNLLNGTLVQRHPSHAVTFVDNHDTQPGEALESFVQGWFKPLAYATILTREQGYPQVFYGDYYGIPSDGVPSYRQQIDPLLKARQQYASGRQHDYFDHWDVIGWTREGNASHPNSGLATIMSDGPGGSKWMYVGRQKAGEVWHDMTGNRSGTVTINQDGWGHFFVNGGSVSVWVKR

SEQ ID NO: 31996 - protein, 485 aa, Bacillus sp.
HHDGTNGTIMQYFEWNVPNDGQHWNRLHNNAQNLKNAGITAIWIPPAWKGTSQNDVGYGAYDLYDLGEFNQKGTVRTKYGTKAELERAIRSLKANGIQVYGDVVMNHKGGADFTERVQAVEVNPQNRNQEVSGTYQIEAWTGFNFPGRGNQHSSFKWRWYHFDGTDWDQSRQLANRIYKFRGDGKCWDWEVDTENGNYDYLMYADVDMDHPEVINELNRWGVWYANTLNLDGFRLDAVKHIKFSFMRDWLGHVRGQTGKNLFAVAEYWKNDLGALENYLSKTNWTMSAFDVPLHYNLYQASNSSGNYDMRNLLNGTLVQRHPSHAVTFVDNHDTQPGEALESFVQGWFKPLAYATILTREQGYPQVFYGDYYGIPSDGVPSYRQQIDPLLKARQQYAYGRQHDYFDHWDVIGWTREGNASHPNSGLATIMSDGPGGSKWMYVGRQKAGEVWHDMTGNRSGTVTINQDGWGHFFVNGGSVSVWVKR

SEQ ID NO: 31997 - protein, 485 aa, Bacillus sp.
HHDGTNGTIMQYFEFNVPNDGQHWNRLHNNAQNLKNAGITAIWIPPAWKGTSQNDVGYGAYDLYDLGEFNQKGTVRTKYGTKAELERAIRSLKANGIQVYGDVVMNHKGGADFTERVQAVEVNPQNRNQEVSGTYQIEAWTGFNFPGRGNQHSSFKWRWYHFDGTDWDQSRQLANRIYKFRGDGKAWDWEVDTENGNYDYLMYADVDMDHPEVINELNRWGVWYANTLNLDGFRLDAVKHIKFSFMRDWLGHVRGQTGKNLFAVAEYWKNDLGALENYLSKTNWTMSAFDVPLHYNLYQASNSSGNYDMRNLLNGTLVQRHPSHAVTFVDNHDTQPGEALESFVQGWFKPLAYATILTREQGYPQVFYGDYYGIPSDGVPSYRQQIDPLLKARQQYAYGRQHDYFDHWDVIGWTREGNASHPNSGLATIMSDGPGGSKWMYVGRQKAGEVWHDMTGNRSGTVTINQDGWGHFFVNGGSVSVWVKR

SEQ ID NO: 31998 - protein, 485 aa, Bacillus sp.
HHDGTNGTIMQYFEWNVPNDGQHWNRLHNNAQNLKNAGITAIWIPPAWKGTSQNDVGYGAYDLYDLGEFNQKGTVRTKYGTKAELERAIRSLKANGIQVYGDVVMNHKGGADFTERVQAVEVNPQNRNQEVSGTYQIEAWTGFNFPGRGNQHSSFKWRWYHFDGTDWDQSRQLANRIYKFRGDGKAWDWEVDTENGNYDYLMYADVDMDHPEVINELNRWGVWYANTLNLDGFRLDAVKHIKFSFMRDWLGHVRGQTGKNLFAVAEYWKNDLGALENYLSKTNWTMSAFDVPLHYNLYQASNSSGNYDMRNLLNGTLVQRHPSHAVTFVDNHDTQPGEALESFVQGWFKPLAYATILTREQGYPQVFYGDYYGIPSDGVPSYRQQIDPLLKARQQYAYGRQHDYFDHWDVIGWTREGNASHPNSGLATIMSDGPGGSKWMYVGRQKAGEVWHDMTGNRSGTVTINQDGWGHFFVNFGSVSVWVKR

SEQ ID NO: 31999 - protein, 485 aa, Bacillus sp.
HHDGTNGTIMQYFEWNVPNDGQHWNRLHNNAQNLKNAGITAIWIPPAWKGTSQNDVGYGAYDLYDLGEFNQKGTVRTKYGTKAELERAIRSLKANGIQVYGDVVMNHKGGADFTERVQAVEVNPQNRNQEVSGTYQIEAWTGFNFPGRGNQHSSFKWRWYHFDGTDWDQSRQLANRIYKFRGDGKAWDWEVDTENGNYDYLMYADVDMDHPEVINELNRWGVWYANTLNLDGFRLDAVKHIKFSFMRDWLGHVRGQTGKNLFAVAEYWKNDLGALENYLSKTNWTMSAFDVPLHYNLYQASNSSGNYDMRNLLNGTLVQRHPSHAVTFVDNHDTQPGEALESFVQGWFKPLAYATILTREQGYPQVFYGDYYGIPSDGVISYRQQIDPLLKARQQYAYGRQHDYFDHWDVIGWTREGNASHPNSGLATIMSDGPGGSKWMYVGRQKAGEVWHDMTGNRSGTVTINQDGWGHFFVNGGSVSVWVKR

SEQ ID NO: 32000 - protein, 485 aa, Bacillus sp.
HHDGTNGTIMQYFEWNVPNDGQHWNRLHNNAQNLKNAGITAIWIPPAWKGTSQNDVGYGAYDLYDLGEFNQKGTVRTKYGTKAELERAIRSLKANGIQVYGDVVMNHKGGADFTERVQAVEVNPQNRNQEVSGTYQIEAWTGFNFPGRGNQHSSFKWRWYHFDGTDWDQSRQLANRIYKFRGDGKAWDWEVDTENGNYDYLMYADVDMDHPEVINELNRWGVWYANTLNLDGFRLDAVKHIKFSFMRDWLGHVRGQTGKNLFAVAEYWKNDLGALENYLSKTNWTMSAFDVPLHYNLYQASNSSGNYDMRNLLNGTLVQRHPSHAVTFVDNHDTQPGEALESFVQGWFKPLAYATILTREQGYPQVFYGDYYGIPSDGVPSYRQQIDTLLKARQQYAYGRQHDYFDHWDVIGWTREGNASHPNSGLATIMSDGPGGSKWMYVGRQKAGEVWHDMTGNRSGTVTINQDGWGHFFVNGGSVSVWVKR

SEQ ID NO: 32001 - protein, 485 aa, Bacillus sp.
HHDGTNGTIMQYFEWNVPNDGQHWNRLHNNAQNLKNAGITAIWIPPAWKGTSQNDVGYGAYDLYDLGEFNQKGTVRTKYGTKAELERAIRSLKANGIQVYGDVVMNHKGGADFTERVQAVEVNPQNRNQEVSGTYQIEAWTGFNFPGRGNQHSSFKWRWYHFDGTDWDQSRQLANRIYKFRGDGKAWDWEVDTENGNYDYLMYADVDMDHPEVINELNRWGVWYANTLNLDGFRLDAVKHIKFSFMRDWLGHVRGQTGKNLFAVAEYWKNDLGALENYLSKTNWTMSAFDVPLHYNLYQASNSSGNYDMRNLLNGTLVQRHPSHAVTFVDNHDTQPGEALESFVQGWFKPLAYATILTRSQGYPQVFYGDYYGIPSDGVPSYRQQIDPLLKARQQYAYGRQHDYFDHWDVIGWTREGNASHPNSGLATIMSDGPGGSKWMYVGRQKAGEVWHDMTGNRSGTVTINQDGWGHFFVNGGSVSVWVKR

SEQ ID NO: 32002 - protein, 485 aa, Bacillus sp.
HHDGTNGTIMQYFEWNVPNDGQHWNRLHNNAQNLKNAGITAIWIPPAWKGTSQNDVGYGAYDLYDLGEFNQKGTVRTKYGTKAELERAIRSLKANGIQVYGDVVMNHKGGADFTERVQAVEVNPQNRNQEVSGTYQIEAWTGFNFPGRGNQHSSFKWRWYHFDGTDWDQSRQLANRIYKFRGDGKAWDWEVDTENGNYDYLMYADVDMDHPEVINELNRWGVWYANTLNLDGFRLDAVKHIKFSFMRDWLGHVRGQTGKNLFAVAEYWKNDLGALENYLSKTNWTMSAFDVPLHYNLYQASNSSGNYDMRNLLNGTLVQRHPSHAVTFVDNHDTQPGEALESFVQGWFKPLAYATILTREQGYPQVFYGDYYGIPSDGVPSYRQQIDPLLKARQQYAYGRQHDYFDHWDVIGWTQEGNASHPNSGLATIMSDGPGGSKWMYVGRQKAGEVWHDMTGNRSGTVTINQDGWGHFFVNGGSVSVWVKR

SEQ ID NO: 32003 - protein, 485 aa, Bacillus sp.
HHDGTNGTIMQYFEWNVPNDGQHWNRLHNNAQNLKNAGITAIWIPPAWKGTSQNDVGYGAYDLYDLGEFNQKGTVRTKYGTKAELERAIRSLKANGIQVYGDVVMNHKGGADFTERVQAVEVNPQNRNQEVSGTYQIEAWTGFNFPGRGNQHSSFKWRWYHFDGTDWDQSRQLANRIYKFRGDGKAWDWEVDTENGNYDYLMYADVDMDHPEVINELNRWGVWYANTLNLDGFRLDAVKHIKFSFMRDWLGHVRGQTGKNLFAVAEYWKNDLGALENYLSKTNWTMSAFDVPLHYNLYQASNSSGNYDMRNLLNGTLVQRHPSHAVTFVDNHDTQPGEALESFVQGWFKPLAYATILTREQGYPQVFYGDYYGIPSDGVPSYRQQIDPLLKARQQYAYGRQHDYFDHWDVIGWTREGNASHPNSGLATIMSDGPGGSKWMYVGRQQAGEVWHDMTGNRSGTVTINQDGWGHFFVNGGSVSVWVKR

SEQ ID NO: 32004 - protein, 485 aa, Bacillus sp.
HHDGTNGTIMQYFEWNVPNDGQHWNRLHNNAQNLKNAGITAIWIPPAWKGTSQNDVGYGAYDLYDLGEFNQKGTVRTKYGTKAELERAIRSLKANGIQVYGDVVMNHKGGADFTERVQAVEVNPQNRNQEVSGTYQIEAWTGFNFPGRGNQHSSFKWRWYHFDGTDWDQSRQLANRIYKFRGDGKAWDWEVDTENGNYDYLMYADVDMDHPEVINELNRWGVWYANTLNLDGFRLDAVKHIKFSFMRDWLGHVRGQTGKNLFAVAEYWKNDLGARENYLSKTNWTMSAFDVPLHYNLYQASNSSGNYDMRNLLNGTLVQRHPSHAVTFVDNHDTQPGEALESFVQGWFKPLAYATILTREQGYPQVFYGDYYGIPSDGVPSYRQQIDPLLKARQQYAYGRQHDYFDHWDVIGWTREGNASHPNSGLATIMSDGPGGSKWMYVGRQKAGEVWHDMTGNRSGTVTINQDGWGHFFVNGGSVSVWVKR

SEQ ID NO: 32005 - protein, 485 aa, Bacillus sp.
HHDGTNGTIMQYFEWNVPNDGQHWNRLHNNAQNLKNAGITAIWIPPAWKGTSQNDVGYGAYDLYDLGEFNQKGTVRTKYGTKAELERAIRSLKANGIQVYGDVVMNHKGGADFTERVQAVEVNPQNRNQEVSGTYQIEAWTGFNFPGRGNQHSSFKWRWYHFDGTDWDQSRQLANRIYKFRGDGKAWDWEVDTENGNYDYLMYADVDMDHPEVINELNRWGVWYANTLNLDGFRLDAVKHIKFSFMRDWLGHVRGQTGKNLFAVAEYWKNDLGALENYLSKTNETMSAFDVPLHYNLYQASNSSGNYDMRNLLNGTLVQRHPSHAVTFVDNHDTQPGEALESFVQGWFKPLAYATILTREQGYPQVFYGDYYGIPSDGVPSYRQQIDPLLKARQQYAYGRQHDYFDHWDVIGWTREGNASHPNSGLATIMSDGPGGSKWMYVGRQKAGEVWHDMTGNRSGTVTINQDGWGHFFVNGGSVSVWVKR

SEQ ID NO: 32006 - protein, 485 aa, Bacillus sp.
HHDGTNGTIMQYFEWNVPNDGQHWNRLHNNAQNLKNAGITAIWIPPAWKGTSQNDVGYGAYDLYDLGEFNQKGTVRTKYGTKAELERAIRSLKANGIQVYGDVVMNHKGGADFTERVQAVEVNPQNRNQEVSGTYQIEAWTGFNFPGRGNQHSSFKWRWYHFDGTDWDQSRQLANRIYKFRGDGKAWDWEVDTENGNYDYLMYADVDMDHPEVINELNREGVWYANTLNLDGFRLDAVKHIKFSFMRDWLGHVRGQTGKNLFAVAEYWKNDLGALENYLSKTNWTMSAFDVPLHYNLYQASNSSGNYDMRNLLNGTLVQRHPSHAVTFVDNHDTQPGEALESFVQGWFKPLAYATILTREQGYPQVFYGDYYGIPSDGVPSYRQQIDPLLKARQQYAYGRQHDYFDHWDVIGWTREGNASHPNSGLATIMSDGPGGSKWMYVGRQKAGEVWHDMTGNRSGTVTINQDGWGHFFVNGGSVSVWVKR

SEQ ID NO: 32007 - protein, 485 aa, Bacillus sp.
HHDGTNATIMQYFEWNVPNDGQHWNRLHNNAQNLKNAGITAIWIPPAWKGTSQNDVGYGAYDLYDLGEFNQKGTVRTKYGTKAELERAIRSLKANGIQVYGDVVMNHKGGADFTERVQAVEVNPQNRNQEVSGTYQIEAWTGFNFPGRGNQHSSFKWRWYHFDGTDWDQSRQLANRIYKFRGDGKAWDWEVDTENGNYDYLMYADVDMDHPEVINELNRWGVWYANTLNLDGFRLDAVKHIKFSFMRDWLGHVRGQTGKNLFAVAEYWKNDLGALENYLSKTNWTMSAFDVPLHYNLYQASNSSGNYDMRNLLNGTLVQRHPSHAVTFVDNHDTQPGEALESFVQGWFKPLAYATILTREQGYPQVFYGDYYGIPSDGVPSYRQQIDPLLKARQQYAYGRQHDYFDHWDVIGWTREGNASHPNSGLATIMSDGPGGSKWMYVGRQKAGEVWHDMTGNRSGTVTINQDGWGHFFVNGGSVSVWVKR

SEQ ID NO: 32008 - protein, 485 aa, Bacillus sp.
HHDGTNGTIMQYFEWNVPNDGQHWNRLHNNAQNLKNAGITAIWIPPAWKGTSQNDVGYGAYDLYDLGEFNQKGTVRTKYGTKAELERAIRSLKANGIQVYGDVVMNHKGGADFTERVQAVEVNPQNRNQEVSGTYQIEAWTGFNFPGRGNQHSSFKWRWYHFDGTDWDQSRQLANRIYKFRGDGKAWDWEVDTENGNYDYLMYADVDMDHPEVINELNRWGVWYANTLNLDGFRLDAVKHIKFSFMRDWLGHVRGQTGKNLFAVAEYWKNDLGALENYLSKTNWTMSAFDVPLHYNLYQASNSSGNYDMRNLLNGTLVQRHPSHAVTFVDNHDTQPGEALESFVQGWFKPLAYATILTREQGYPQVFYSDYYGIPSDGVPSYRQQIDPLLKARQQYAYGRQHDYFDHWDVIGWTREGNASHPNSGLATIMSDGPGGSKWMYVGRQKAGEVWHDMTGNRSGTVTINQDGWGHFFVNGGSVSVWVKR

SEQ ID NO: 32009 - protein, 485 aa, Bacillus sp.
HHDGTNGTIMQYFEWNVPNDGQHWNRLHNNAQNLKNAGITAIWIPPAWKGTSQNDVGYGAYDLYDLGEFNQKGTVRTKYGTKAELERAIRSLKANGIQVYGDVVMNHKGGADFTERVQAVEVNPQNRNQEVSGTYQIEAWTGFNFPGRGNQHSSFKWRWYHFDGTDWDQSRQLANRIYKFRGDGKAWDWEVDTENGNYDYLMYADVDMDHPEVINELNRWGVWYANTLNLDGFRLDAVKHIKFSFMRDWLGHVRGQTGKNLFAVAEYWKNDLGALENYLSKTNWTMSAFDVPLHYNLYQASNSSGNYDMRNLLNGTLVQRHPSHAVTFVDNHDTQPGEALESFVQGWFKPLAYATILTREQGYPQVFYGDYYGIPSDGVPSYRQQIDPLLKARQQYAYGRQHDYFDHWDVIGWTREGNASHPNSGLATIMSDGPGGSKWMYVGRQKAREVWHDMTGNRSGTVTINQDGWGHFFVNGGSVSVWVKR

SEQ ID NO: 32010 - protein, 485 aa, Bacillus sp.
HHDGTNGTIMQYFEWNVPNDGQHWNRLHNNAQNLKNAGITAIWIPPAWKGTSQNDVGYGAYDLYDLGEFNQKGTVRTKYGTKAELERAIRSLKANGIQVYGDVVMNHKGGADFTERVQAVEVNPQNRNQEVSGTYQIEAWTGFNFPGRGNQHSSFKWRWYHFDGTDWDQSRQLANRIYKFRGDGKAWDWEVDTENGNYDYLMYADVDMDHPEVINELNRWGVWYANTLNLDGFRLDAVKHIKFSFMRDWLGHVRGQTGKNLFAVAEYWKNDLGALENYLSKTNWTMSAFDVPLHYNLYQASNSSGNYDMRNLLNGTLVQRHPSHAVTFVDNHDTQPGEALESFVQGWFKELAYATILTREQGYPQVFYGDYYGIPSDGVPSYRQQIDPLLKARQQYAYGRQHDYFDHWDVIGWTREGNASHPNSGLATIMSDGPGGSKWMYVGRQKAGEVWHDMTGNRSGTVTINQDGWGHFFVNGGSVSVWVKR

SEQ ID NO: 32011 - protein, 485 aa, Bacillus sp.
HHDGTNGTIMQYFEWNVPNDGQHWNRLHNNAQNLKNAGITAIWIPPAWKGTSQKDVGYGAYDLYDLGEFNQKGTVRTKYGTKAELERAIRSLKANGIQVYGDVVMNHKGGADFTERVQAVEVNPQNRNQEVSGTYQIEAWTGFNFPGRGNQHSSFKWRWYHFDGTDWDQSRQLANRIYKFRGDGKAWDWEVDTENGNYDYLMYADVDMDHPEVINELNRWGVWYANTLNLDGFRLDAVKHIKFSFMRDWLGHVRGQTGKNLFAVAEYWKNDLGALENYLSKTNWTMSAFDVPLHYNLYQASNSSGNYDMRNLLNGTLVQRHPSHAVTFVDNHDTQPGEALESFVQGWFKPLAYATILTREQGYPQVFYGDYYGIPSDGVPSYRQQIDPLLKARQQYAYGRQHDYFDHWDVIGWTREGNASHPNSGLATIMSDGPGGSKWMYVGRQKAGEVWHDMTGNRSGTVTINQDGWGHFFVNGGSVSVWVKR

SEQ ID NO: 32012 - protein, 485 aa, Bacillus sp.
HHDGTNGTIMQYFEWNVPNDGQHWNRLHNNAQNLKNAGITAIWIPPAWKGTNQNDVGYGAYDLYDLGEFNQKGTVRTKYGTKAELERAIRSLKANGIQVYGDVVMNHKGGADFTERVQAVEVNPQNRNQEVSGTYQIEAWTGFNFPGRGNQHSSFKWRWYHFDGTDWDQSRQLANRIYKFRGDGKAWDWEVDTENGNYDYLMYADVDMDHPEVINELNRWGVWYANTLNLDGFRLDAVKHIKFSFMRDWLGHVRGQTGKNLFAVAEYWKNDLGALENYLSKTNWTMSAFDVPLHYNLYQASNSSGNYDMRNLLNGTLVQRHPSHAVTFVDNHDTQPGEALESFVQGWFKPLAYATILTREQGYPQVFYGDYYGIPSDGVPSYRQQIDPLLKARQQYAYGRQHDYFDHWDVIGWTREGNASHPNSGLATIMSDGPGGSKWMYVGRQKAGEVWHDMTGNRSGTVTINQDGWGHFFVNGGSVSVWVKR

SEQ ID NO: 32013 - protein, 485 aa, Bacillus sp.
HHDGTNGTIMQYFEWNVPNDGQHWNRLHNNAQNLKNAGITAIWIPPAWKGTSQNDVGYGAYDLYDLGEFNQKGTVRTKYGTKAELERAIRSLKANGIQVFGDVVMNHKGGADFTERVQAVEVNPQNRNQEVSGTYQIEAWTGFNFPGRGNQHSSFKWRWYHFDGTDWDQSRQLANRIYKFRGDGKAWDWEVDTENGNYDYLMYADVDMDHPEVINELNRWGVWYANTLNLDGFRLDAVKHIKFSFMRDWLGHVRGQTGKNLFAVAEYWKNDLGALENYLSKTNWTMSAFDVPLHYNLYQASNSSGNYDMRNLLNGTLVQRHPSHAVTFVDNHDTQPGEALESFVQGWFKPLAYATILTREQGYPQVFYGDYYGIPSDGVPSYRQQIDPLLKARQQYAYGRQHDYFDHWDVIGWTREGNASHPNSGLATIMSDGPGGSKWMYVGRQKAGEVWHDMTGNRSGTVTINQDGWGHFFVNGGSVSVWVKR

SEQ ID NO: 32014 - protein, 483 aa, Bacillus sp.
HHNGTNGTMMQYFEWYLPNDGNHWNRLNSDASNLKSKGIKAVWIPPAWKGASQNDVGYGAYDLYDLGEFNQRGTVRTKYGTRSQLQAAVTSLKNNGINVYGDVVMNHKGGADATEMVRAVEVNPNNRNQEVTGEYTIEAWTRFDFPGRGNTHSSFKWRWYHFDGVDFDQSRRLNNRIYKFRGKAWDWEVDTEFGNYDYLMYVDYDYDHPETTNEMRNWGVWYTNTLGLDGFRIDAVKHIKYSFTRDWINHVRIATGKNMFAVAEFWKNDLGAIENYLQKTNWNHSVFDVPLHYNLYNASKSGGNYDMRNIFNGTVVQAHPMHAVTFVDNHDSQPEEALESFVEEWFKPLAYALTLTREQGYPSVFYGDYYGIPTHGVPAMRSKIDPILEARQKYAYGPQHDYLDHPDVIGWTREGDSSHPKSGLATLITDGPGGSKRMYAGLKNAGETWYDITGNRSDTVKIGSDGWGEFHVNDGSVSIYVQK

SEQ ID NO: 32015 - protein, 485 aa, Bacillus sp.
HHDGTNGTIMQYFEWNVPNDGQHWNRLHNNAQNLKNAGITAIWIPPAWKGTSQNDVGYGAYDLYDLGEFNQKGTVRTKYGTKAELERAIRSLKANGIQVYGDVVMNHKGGADFTERVQAVEVNPQNRNQEVSGTYQIEAWTGFNFPGRGNQHSSFKWRWYHFDGTDWDQSRQLANRIYKFRGDGKAWDWEVDTENGNYDYLMYADVDMDHPEVINELNRWGVWYANTLNLDGFRLDAVKHIKFSFMRDWLGHVRGQTGKNLFAVAEYWKNDLGALENYVSKTNWTMSAFDVPLHYNLYQASNSSGNYDMRNLLNGTLVQRHPSHAVTFVDNHDTQPGEALESFVQGWFKPLAYATILTREQGYPQVFYGDYYGIPSDGVPSYRQQIDPLLKARQQYAYGRQHDYFDHWDVIGWTREGNASHPNSGLATIMSDGPGGSKWMYVGRQKAGEVWHDMTGNRSGTVTINQDGWGHFFVNGGSVSVWVKR

SEQ ID NO: 32016 - protein, 485 aa, Bacillus sp.
HHDGTNGTIMQYFEWNVPNDGQHWNRLHNNAQNLKNAGITAIWIPPAWKGTSQNDVGYGAYDLYDLGEFNQKGTVRTKYGTKAELERAIRSLKANGIQVYGDVVMNHKGGADFTERVQAVEVNPQNRNQEVSGTYQIEAWTGFNFPGRGNQHSSFKWRWYHFDGTDWDQSRQLANRIYKFRGDGKAWDWEVDTENGNYDYLMYADVDMDHPEVINELNRWGVWYANTLNLDGFRLDAVKHIKFSFMRDWLGHVRGQTGKNLFAVAEYWKNDLGALENYLSKTNWTMSAFDVPLHYNLYQASNSSGNYDMRNLLNGTLVQRHPSHAVTFVDNHDTQPGEALESFVQGWFKPLAYATILTREQGYPQVFHGDYYGIPSDGVPSYRQQIDPLLKARQQYAYGRQHDYFDHWDVIGWTREGNASHPNSGLATIMSDGPGGSKWMYVGRQKAGEVWHDMTGNRSGTVTINQDGWGHFFVNGGSVSVWVKR

SEQ ID NO: 32017 - protein, 485 aa, Bacillus sp.
HHDGTNGTIMQYFEWNVPNDGQHWNRLHNNAQNLKNAGITAIWIPPAWKGTSQNDVGYGAYDLYDLGEFNQKGTVRTKYGTKAELERAIRSLKANGIQVYGDVVMNHKGGADFTERIQAVEVNPQNRNQEVSGTYQIEAWTGFNFPGRGNQHSSFKWRWYHFDGTDWDQSRQLANRIYKFRGDGKAWDWEVDTENGNYDYLMYADVDMDHPEVINELNRWGVWYANTLNLDGFRLDAVKHIKFSFMRDWLGHVRGQTGKNLFAVAEYWKNDLGALENYLSKTNWTMSAFDVPLHYNLYQASNSSGNYDMRNLLNGTLVQRHPSHAVTFVDNHDTQPGEALESFVQGWFKPLAYATILTREQGYPQVFYGDYYGIPSDGVPSYRQQIDPLLKARQQYAYGRQHDYFDHWDVIGWTREGNASHPNSGLATIMSDGPGGSKWMYVGRQKAGEVWHDMTGNRSGTVTINQDGWGHFFVNGGSVSVWVKR

SEQ ID NO: 32018 - protein, 485 aa, Bacillus sp.
HHDGTNGTIMQYFEWNVPNDGQHWNRLHNNAQNLKNAGITAIWIPPAWKGTSQNDVGYGAYDLYDLGEFNQKGTVRTKYGTKAELERAIRSLKANGIQVYGDVVMNHKGGADFTERVQAVEVNPQNRNQEVSGTYQIEAWTGFNFPGRGNQHSSFKWRWYHFDGTDWDQSRQLANRIYKFRGDGKAWDWEVDTENGNYDYLMYADVDMDHPEVINELNRWGVWYANTLNLDGFRLDAVKHIKFSFMRDWLGHVRGQTGKNLFAVAEYWKNDLGALENYLSKTNWTMSAFDVPLHYNLYQASNSSGNYDMRNLLNGTLVQRHPSHAVTFVDNHDTQPGEALESFVQGWFKPLAYATILTREQGYPQVFYGDYYGIPSDGVPSYRQQIDPLLKARQQYAYGRQHDYFDHWDVIGWTREGNASHPNSGLATIMSDGPGGSKWMYVGRQKAGEVWHDMTGNRSGTVLINQDGWGHFFVNGGSVSVWVKR

SEQ ID NO: 32019 - protein, 485 aa, Bacillus sp.
HHDGTNGTIMQYFEWNVPNDGQHWNRLHNNAQNLKNAGITAIWIPPAWKGTSQNDVGYGAYDLYDLGEFNQKGTVRTKYGTKAELERAIRSLKANGIQVYGDVVMNHKGGADFTERVQAVEVNPQNRNQEVSGTYQIEAWTGFNFPGRGNQHSSFKWRWYHFDGTDWDQSRQLANRIYKFRGDGKAWDWEVDTENGNYDYLMYADVDMDHPEVINELNRWGVWYANTLNLDGARLDAVKHIKFSFMRDWLGHVRGQTGKNLFAVAEYWKNDLGALENYLSKTNWTMSAFDVPLHYNLYQASNSSGNYDMRNLLNGTLVQRHPSHAVTFVDNHDTQPGEALESFVQGWFKPLAYATILTREQGYPQVFYGDYYGIPSDGVPSYRQQIDPLLKARQQYAYGRQHDYFDHWDVIGWTREGNASHPNSGLATIMSDGPGGSKWMYVGRQKAGEVWHDMTGNRSGTVTINQDGWGHFFVNGGSVSVWVKR

SEQ ID NO: 32020 - protein, 485 aa, Bacillus sp.
HHDGTNGTIMQYFEWNVPNDGQHWNRLHNNAQNLKNAGITAIWIPPAWKGTSQNDVGYGAYDLYDLGEFNQKGTVRTKYGTKAELERAIRSLKANGIQVYGDVVMNHKGGADFTERVQAVEVNPQNRNQEVSGTYQIEAWTGFNFPGRGNQHSSFKWRWYHFDGTDWDQSRQLANRIYKFRGDGKAWDWEVDTENGNYDYLMYADVDMDHPEVINELNRWGVWYANTLNLDGFRLDAVKHIKFSFMRDWLGHVRGQTGKNLFAVAEYWKNDLGALENYLSKTNWTMSAFDVPLHYNLYQASNISGNYDMRNLLNGTLVQRHPSHAVTFVDNHDTQPGEALESFVQGWFKPLAYATILTREQGYPQVFYGDYYGIPSDGVPSYRQQIDPLLKARQQYAYGRQHDYFDHWDVIGWTREGNASHPNSGLATIMSDGPGGSKWMYVGRQKAGEVWHDMTGNRSGTVTINQDGWGHFFVNGGSVSVWVKR

SEQ ID NO: 32021 - protein, 483 aa, Bacillus sp. (in: firmicutes)
HHDGTNGTIMQYFEWNVPNDGQHWNRLHNNAQNLKNAGITAIWIPPAWKGTSQNDVGYGAYDLYDLGEFNQKGTVRTKYGTKAELERAIRSLKANGIQVYGDVVMNHKGGADFTERVQAVEVNPQNRNQEVSGTYQIEAWTGFNFPGRGNQHSSFKWRWYHFDGTDWDQSRQLANRIYKFRGKAWDWEVDTENGNYDYLMYADVDMDHPEVINELNRWGVWYANTLNLDGFRLDAVKHIKFSFMRDWLGHVRGQTGKNLFAIGEFWKNDLGALENYLSKTNWTMSAFDVPLHYNLYQASNSSGNYDMRNLLNGTLVQRHPSHAVTFVDNHDTQPGEALESFVQGWFKPLAYATILTREQGYPQVFYGDYYGIPSDGVPSYRQQIDPLLKARQQYAYGRQHDYFDHWDVIGWTREGNASHPNSGLATIMSDGPGGSKWMYVGRQKAGEVWHDMTGNRSGTVTINQDGWGHFFVNGGSVSVWVKR

SEQ ID NO: 32022 - protein, 485 aa, Bacillus sp.
HHDGTNGTIMQYFEWNVPNDGQHWNRLHNNAQNLKNAGITAIWIPPAWKGTSQNDVGYGAYDLYDLGEFNQKGTVRTKYGTKAELERAIRSLKANGIQVYGDVVMNHKGGADFTERVQAVEVNPQNRNQEVSGTYQIEAWTGFNFPGRGNQHSSFKWRWYHFDGTDWDQSRQLANRIYKFRGDGKAWDWEVDTENGNYDYLMYADVDMDHPEVINELNRWGVWYANTLNLDGFRLDAVKHIKFSFMRDWLGHVRGQTGKNLFAVAEYWKNDLGALENYLSKTNWTMSAFDVPLHYNLYQASNASGNYDMRNLLNGTLVQRHPSHAVTFVDNHDTQPGEALESFVQGWFKPLAYATILTREQGYPQVFYGDYYGIPSDGVPSYRQQIDPLLKARQQYAYGRQHDYFDHWDVIGWTREGNASHPNSGLATIMSDGPGGSKWMYVGRQKAGEVWHDMTGNRSGTVTINQDGWGHFFVNGGSVSVWVKR

SEQ ID NO: 32023 - protein, 485 aa, Bacillus sp.
HHDGTNGTIMQYFEWNVPNDGQHWNRLHNNAQNLKNAGITAIWIPPAWKGTSQNDVGYGAYDLYDLGEFNQKGTVRTKYGTKAELERAIRSLKANGIQVYGDVVMNHKGGADFTERVQAVEVNPQNRNQEVSGTYQIEAWTGFNFPGRGNQHSSFKWRWYHFDGTDWDQSRQLANRIYKFRGDGKAWDWEVDTENGNYDYLMYADADMDHPEVINELNRWGVWYANTLNLDGFRLDAVKHIKFSFMRDWLGHVRGQTGKNLFAVAEYWKNDLGALENYLSKTNWTMSAFDVPLHYNLYQASNSSGNYDMRNLLNGTLVQRHPSHAVTFVDNHDTQPGEALESFVQGWFKPLAYATILTREQGYPQVFYGDYYGIPSDGVPSYRQQIDPLLKARQQYAYGRQHDYFDHWDVIGWTREGNASHPNSGLATIMSDGPGGSKWMYVGRQKAGEVWHDMTGNRSGTVTINQDGWGHFFVNGGSVSVWVKR

SEQ ID NO: 32024 - protein, 485 aa, Bacillus sp.
HHDGTNGTIMQYFEWNVPNDGQHWNRLHNNAQNLKNAGITAIWIPPAWKGTSQNDVGYGAFDLYDLGEFNQKGTVRTKYGTKAELERAIRSLKANGIQVYGDVVMNHKGGADFTERVQAVEVNPQNRNQEVSGTYQIEAWTGFNFPGRGNQHSSFKWRWYHFDGTDWDQSRQLANRIYKFRGDGKAWDWEVDTENGNYDYLMYADVDMDHPEVINELNRWGVWYANTLNLDGFRLDAVKHIKFSFMRDWLGHVRGQTGKNLFAVAEYWKNDLGALENYLSKTNWTMSAFDVPLHYNLYQASNSSGNYDMRNLLNGTLVQRHPSHAVTFVDNHDTQPGEALESFVQGWFKPLAYATILTREQGYPQVFYGDYYGIPSDGVPSYRQQIDPLLKARQQYAYGRQHDYFDHWDVIGWTREGNASHPNSGLATIMSDGPGGSKWMYVGRQKAGEVWHDMTGNRSGTVTINQDGWGHFFVNGGSVSVWVKR

SEQ ID NO: 32025 - protein, 485 aa, Bacillus sp.
HHDGTNGTIMQYFEWNVPNDGQHWNRLHNNAQNLKNAGITAIWIPPAWKGTSQNDVGYGAYDLYDLGEFNQKGTVRTKYGTKAELERAIRSLKANGIQVYGDVVMNHKGGADFTERVQAVEVNPQNRNQEVSGTYQIEAWTGFNFPGRGNQHSSFKWRWYHFDGTDWDQSRQLANRIYKFRGDGKAWDWEVDTENGNYDYLMYADVDMDHPEVINELNRWGVWYANTLNLDGFRLDAVKHIKFSFMRDWLGHVRGQTGKNLFAVAEYWKNDLGALENYLSKTNWTMSAFDVPLHYNLYQASNSSGNYDMRNLLNGTLVQRHPSHAVTFIDNHDTQPGEALESFVQGWFKPLAYATILTREQGYPQVFYGDYYGIPSDGVPSYRQQIDPLLKARQQYAYGRQHDYFDHWDVIGWTREGNASHPNSGLATIMSDGPGGSKWMYVGRQKAGEVWHDMTGNRSGTVTINQDGWGHFFVNGGSVSVWVKR

SEQ ID NO: 32026 - protein, 485 aa, Bacillus sp.
HHDGTNGTIMQYFEWNVPNDGQHWNRLHNNAQNLKNAGITAIWIPPAWKGTSQNDVGYGAYDLYDLGEFNQKGTVRTKYGTKAELERAIRSLKANGIQVYGDVVMNHKGGADFTERVQAVEVNPQNRNQEVSGTYQIEAWTGFNFPGRGNQHSSFKWRWYHFDGTDWDQSRQLANRIYKFRGDGKAWDWEVDTENGNYDYLMYADVDMDHPEVINELNRWGVWYANTLNLDGFRLDAVKHIKFSFMRDWLGHVRGQTGKNLFAVAEYWKNDLGALENYLSKTNWTMSAFDVPLHYNLYQASNSSGNYDMRNLLNGTLVQRHPSHAVTFVDNHDTQPGEALESFVQGWFKPLAYATILTREQGYPQVFYGDYYGIPSDGVPSYRQQIDPLLKARQQYAYGRQHPYFDHWDVIGWTREGNASHPNSGLATIMSDGPGGSKWMYVGRQKAGEVWHDMTGNRSGTVTINQDGWGHFFVNGGSVSVWVKR

SEQ ID NO: 32027 - protein, 485 aa, Bacillus sp.
HHDGTNGTIMQYFEWNVPNDGQHWNRLHNNAQNLKNAGITAIWIPPAWKGTSQNDVGYGAYDLYDLGEFNQKGTVRTKYGTKAELERAIRSLKANGIQVYGDVVMNHKGGADFTERVQAVEVNPQNRNQEVSGTYQIEAWTGFNFPGRGNQHSSFKWRWYHFDGTDWDQSRQLANRIYKFRGDGKAWDWEVDTENGNYDYLMYADVDMDHPEVINELNRWGVWYANTLNLDGFRLDAVKHIKFSFMRDWLGHVRGQTGKNLFAVAEYWKNDLGALENYLSKTNWTMSAFDVPLHYNLYQASNSSGNYDMRNLLNGTLVQRHPSHAVTFVDNHDTQPGEALESFVQGWFKPLAYATILTREQGYPQVFYGDYYGIPSDGVPSYRQQIDPLLKARQQYACGRQHDYFDHWDVIGWTREGNASHPNSGLATIMSDGPGGSKWMYVGRQKAGEVWHDMTGNRSGTVTINQDGWGHFFVNGGSVSVWVKR

SEQ ID NO: 32028 - protein, 485 aa, Bacillus sp.
HHDGTNGTIMQYFEWNVPNDGQHWNRLHNNAQNLKNAGITAIWIPPAWKGTSQNDVGYGAYDLYDLGEFNQKGTVRTKYGTKAELERAIRSLKANGIQVYGDVVMNHKGGADFTERVQAVEVNPQNRNQEVSGTYQIEAWTGFNFPGRGNQHSSFKWRWYHFDGTDWDQSRQLANRIYKFRGDGKAWDWEVDTENGNYDYLMYADVDMDHPEVINELNRWGVWYANTLNLDGFRLDAVKHIKFSFMRDWLGHVRGQTGKNLFAVAEYWKNDLGALENYLSKTNWTMSAFDVPLHYNLYQASNSSGNYDMRNLLNGTLVQRHPSHAVTFVDNHDTQPCEALESFVQGWFKPLAYATILTREQGYPQVFYGDYYGIPSDGVPSYRQQIDPLLKARQQYAYGRQHDYFDHWDVIGWTREGNASHPNSGLATIMSDGPGGSKWMYVGRQKAGEVWHDMTGNRSGTVTINQDGWGHFFVNGGSVSVWVKR

SEQ ID NO: 32029 - protein, 485 aa, Bacillus sp.
HHDGTNGTIMQYFEWNVPNDGQHWNRLHNNAQNLKNAGITAIWIPPAWKGTSQNDVGYGAYDLYDLGEFNQKGTVRTKYGTKAELERAIRSLKANGIQVYGDVVMNHKGGADFTERVQAVEVNPQNRNQEVSGTYQIEAWTGFNFPGRGNQHSSFKWRWYHFDGTDWDQSRQLANRIYKFRGDGKAWDWEVDTENGNYDYLMYADVDMDHPEVINELNRWGVWYANTLNLDGFRLDAVKHIKFSFMRDWAGHVRGQTGKNLFAVAEYWKNDLGALENYLSKTNWTMSAFDVPLHYNLYQASNSSGNYDMRNLLNGTLVQRHPSHAVTFVDNHDTQPGEALESFVQGWFKPLAYATILTREQGYPQVFYGDYYGIPSDGVPSYRQQIDPLLKARQQYAYGRQHDYFDHWDVIGWTREGNASHPNSGLATIMSDGPGGSKWMYVGRQKAGEVWHDMTGNRSGTVTINQDGWGHFFVNGGSVSVWVKR

SEQ ID NO: 32030 - protein, 485 aa, Bacillus sp.
HHDGTNGTIMQYFEWNVPNDGQHWNRLHNNAQNLKNAGITAIWVPPAWKGTSQNDVGYGAYDLYDLGEFNQKGTVRTKYGTKAELERAIRSLKANGIQVYGDVVMNHKGGADFTERVQAVEVNPQNRNQEVSGTYQIEAWTGFNFPGRGNQHSSFKWRWYHFDGTDWDQSRQLANRIYKFRGDGKAWDWEVDTENGNYDYLMYADVDMDHPEVINELNRWGVWYANTLNLDGFRLDAVKHIKFSFMRDWLGHVRGQTGKNLFAVAEYWKNDLGALENYLSKTNWTMSAFDVPLHYNLYQASNSSGNYDMRNLLNGTLVQRHPSHAVTFVDNHDTQPGEALESFVQGWFKPLAYATILTREQGYPQVFYGDYYGIPSDGVPSYRQQIDPLLKARQQYAYGRQHDYFDHWDVIGWTREGNASHPNSGLATIMSDGPGGSKWMYVGRQKAGEVWHDMTGNRSGTVTINQDGWGHFFVNGGSVSVWVKR

SEQ ID NO: 32031 - protein, 485 aa, Bacillus sp.
HHDGTNGTIMQYFEWNVPNDGQHWNRLHNNAQNLKNAGITAIWIPPAWKGTSQNDVGYGAYDLYDLGEFNQKGTVRTKYGTKAELERAHRSLKANGIQVYGDVVMNHKGGADFTERVQAVEVNPQNRNQEVSGTYQIEAWTGFNFPGRGNQHSSFKWRWYHFDGTDWDQSRQLANRIYKFRGDGKAWDWEVDTENGNYDYLMYADVDMDHPEVINELNRWGVWYANTLNLDGFRLDAVKHIKFSFMRDWLGHVRGQTGKNLFAVAEYWKNDLGALENYLSKTNWTMSAFDVPLHYNLYQASNSSGNYDMRNLLNGTLVQRHPSHAVTFVDNHDTQPGEALESFVQGWFKPLAYATILTREQGYPQVFYGDYYGIPSDGVPSYRQQIDPLLKARQQYAYGRQHDYFDHWDVIGWTREGNASHPNSGLATIMSDGPGGSKWMYVGRQKAGEVWHDMTGNRSGTVTINQDGWGHFFVNGGSVSVWVKR

SEQ ID NO: 32032 - protein, 485 aa, Bacillus sp.
HHDGTNGTIMQYFEWNVPNDGQHWNRLHNNAQNLKNAGITAIWIPPAWKGTSQNDVGYGAYDLYDLGEFNQKGTVRTKYGTKAELERAIRSLKANGIQVYGDVVMNHKGGADFTERVQAVEVNPQNRNQEVSGTYQIEAWTGFNFPGRGNQHSSFKWRWYHFDGTDWDQSRQLANRIYKFRGDGKAWDWEVDTENGNYDYLMYADVDMDHPEVINELNRWGVWYANTLNLDGFRLDAVKHIKFSFMRDWLGHVRGQTGKNLFAVAEYWKNDLGALENYLSKTNWTMSAFDVPLHYNLYQASNSSGNYDMRNLLNGTLVQRHPSHAVTFVDNHDTQPGEALESFVVGWFKPLAYATILTREQGYPQVFYGDYYGIPSDGVPSYRQQIDPLLKARQQYAYGRQHDYFDHWDVIGWTREGNASHPNSGLATIMSDGPGGSKWMYVGRQKAGEVWHDMTGNRSGTVTINQDGWGHFFVNGGSVSVWVKR

SEQ ID NO: 32033 - protein, 485 aa, Bacillus sp.
HHDGTNGTIMQYFEWNVPNDGQHWNRLHNNAQNLKNAGITAIWIPPAWKGTSQNDVGYGAYDLYDLGEFNQKGTVRTKYGTKAELERAIRSLKANGIQVYGDVVMNHKGGADFTERVQAVEVNPQNRNQEVSGTYQIEAWTGFNFPGRGNQHSSFKWRWYHFDGTDWDQSRQLANRIYKFRGDGKAWDWEVDTENGNYSYLMYADVDMDHPEVINELNRWGVWYANTLNLDGFRLDAVKHIKFSFMRDWLGHVRGQTGKNLFAVAEYWKNDLGALENYLSKTNWTMSAFDVPLHYNLYQASNSSGNYDMRNLLNGTLVQRHPSHAVTFVDNHDTQPGEALESFVQGWFKPLAYATILTREQGYPQVFYGDYYGIPSDGVPSYRQQIDPLLKARQQYAYGRQHDYFDHWDVIGWTREGNASHPNSGLATIMSDGPGGSKWMYVGRQKAGEVWHDMTGNRSGTVTINQDGWGHFFVNGGSVSVWVKR

SEQ ID NO: 32034 - protein, 485 aa, Bacillus sp.
HHDGTNGTIMQYFEWNVPNDGQHWNRLHNNAQNLKNAGITAIWIPPAWKGTSQNDVGYGAYDLYDLGEFNQKGTVRTKYGTKAELERAIRSLKANGIQVYGDVVMNHKGGADFTERVQAVEVNPQNRNQEVSGTYQIEAWTGFNFPGRGNQHSSFKWRWYHIDGTDWDQSRQLANRIYKFRGDGKAWDWEVDTENGNYDYLMYADVDMDHPEVINELNRWGVWYANTLNLDGFRLDAVKHIKFSFMRDWLGHVRGQTGKNLFAVAEYWKNDLGALENYLSKTNWTMSAFDVPLHYNLYQASNSSGNYDMRNLLNGTLVQRHPSHAVTFVDNHDTQPGEALESFVQGWFKPLAYATILTREQGYPQVFYGDYYGIPSDGVPSYRQQIDPLLKARQQYAYGRQHDYFDHWDVIGWTREGNASHPNSGLATIMSDGPGGSKWMYVGRQKAGEVWHDMTGNRSGTVTINQDGWGHFFVNGGSVSVWVKR

SEQ ID NO: 32035 - protein, 485 aa, Bacillus sp.
HHDGTNGTIMQYFEWNVPNDGQHWNRLHNNAQNLKNAGITAIWIPPAWKGTSQNDVGYGAYDLYDLGEFNQKGTVATKYGTKAELERAIRSLKANGIQVYGDVVMNHKGGADFTERVQAVEVNPQNRNQEVSGTYQIEAWTGFNFPGRGNQHSSFKWRWYHFDGTDWDQSRQLANRIYKFRGDGKAWDWEVDTENGNYDYLMYADVDMDHPEVINELNRWGVWYANTLNLDGFRLDAVKHIKFSFMRDWLGHVRGQTGKNLFAVAEYWKNDLGALENYLSKTNWTMSAFDVPLHYNLYQASNSSGNYDMRNLLNGTLVQRHPSHAVTFVDNHDTQPGEALESFVQGWFKPLAYATILTREQGYPQVFYGDYYGIPSDGVPSYRQQIDPLLKARQQYAYGRQHDYFDHWDVIGWTREGNASHPNSGLATIMSDGPGGSKWMYVGRQKAGEVWHDMTGNRSGTVTINQDGWGHFFVNGGSVSVWVKR

SEQ ID NO: 32036 - protein, 485 aa, Bacillus sp.
HHDGTNGTIMQYFEWNVPNDGQHWNRLHNNAQNLKNAGITAIWIPPAWKGTSQNDVGYGAYDLYDLGEFNQKGTVRTKYGTKAELERAIRSLKANGIQVYGDVVMNHKGGADFTERVQAVEVNPQNRNQEVSGTYQIEAWTGFNFPGRGNQHSSFKWRWYHFDGTDWDQSRQLANRIYKFRGDGKAWDWEVDTENGNYDYLMYADVDMDHPEVINELNRWGVWYANTLNADGFRLDAVKHIKFSFMRDWLGHVRGQTGKNLFAVAEYWKNDLGALENYLSKTNWTMSAFDVPLHYNLYQASNSSGNYDMRNLLNGTLVQRHPSHAVTFVDNHDTQPGEALESFVQGWFKPLAYATILTREQGYPQVFYGDYYGIPSDGVPSYRQQIDPLLKARQQYAYGRQHDYFDHWDVIGWTREGNASHPNSGLATIMSDGPGGSKWMYVGRQKAGEVWHDMTGNRSGTVTINQDGWGHFFVNGGSVSVWVKR

SEQ ID NO: 32037 - protein, 484 aa, Bacillus sp. (in: firmicutes)
HHDGTNGTIMQYFEWNVPNDGQHWNRLHNNAQNLKNAGITAIWIPPAWKGTSQNDVGYGAYDLYDLGEFNQKGTVRTKYGTKAELERAIRSLKANGIQVYGDVVMNHKGGADFTERVQAVEVNPQNRNQEVSGTYQIEAWTGFNFPGRGNQHSSFKWRWYHFDGTDWDQSRQLANRIYKFSGSKAWDWEVDTENGNYDYLMYADVDMDHPEVINELNRWGVWYANTLNLDGFRLDAVKHIKFSFMRDWLGHVRGQTGKNLFAVAEYWKNDLGALENYLSKTNWTMSAFDVPLHYNLYQASNSSGNYDMRNLLNGTLVQRHPSHAVTFVDNHDTQPGEALESFVQGWFKPLAYATILTREQGYPQVFYGDYYGIPSDGVPSYRQQIDPLLKARQQYAYGRQHDYFDHWDVIGWTREGNASHPNSGLATIMSDGPGGSKWMYVGRQKAGEVWHDMTGNRSGTVTINQDGWGHFFVNGGSVSVWVKR

SEQ ID NO: 32038 - protein, 485 aa, Bacillus sp.
HHDGTNGTIMQYFEWNVPNDGQHWNRLHNNAQNLKNAGITAIWIPPAWKGTSQNDVGYGAYDLYDLGEFNQKGTVRTKYGTKAELERAIRSLKANGIQVYGDVVMNHKFGADFTERVQAVEVNPQNRNQEVSGTYQIEAWTGFNFPGRGNQHSSFKWRWYHFDGTDWDQSRQLANRIYKFRGDGKAWDWEVDTENGNYDYLMYADVDMDHPEVINELNRWGVWYANTLNLDGFRLDAVKHIKFSFMRDWLGHVRGQTGKNLFAVAEYWKNDLGALENYLSKTNWTMSAFDVPLHYNLYQASNSSGNYDMRNLLNGTLVQRHPSHAVTFVDNHDTQPGEALESFVQGWFKPLAYATILTREQGYPQVFYGDYYGIPSDGVPSYRQQIDPLLKARQQYAYGRQHDYFDHWDVIGWTREGNASHPNSGLATIMSDGPGGSKWMYVGRQKAGEVWHDMTGNRSGTVTINQDGWGHFFVNGGSVSVWVKR

SEQ ID NO: 32039 - protein, 485 aa, Bacillus sp.
HHDGTNGTIMQYFEWNVPNDGQHWNRLHNNAQNLKNAGITAIWIPPAWKGTSQNDVGYGAYDLYDLGEFNQKGTVRTKYGTKAELERAIRSLKANGIQVYGDVVMNHKGGADFTERVQAVEVNPQNRNQEVSGTYQIEAWTGFNFPGRGNQHSSFKWRWYHFDGTDWDQSRQLANRIYKFRGDGKAWDWEVDTENGNYDYLMYADVDMDHPEVINELNRWGVWYANTLNLDGTRLDAVKHIKFSFMRDWLGHVRGQTGKNLFAVAEYWKNDLGALENYLSKTNWTMSAFDVPLHYNLYQASNSSGNYDMRNLLNGTLVQRHPSHAVTFVDNHDTQPGEALESFVQGWFKPLAYATILTREQGYPQVFYGDYYGIPSDGVPSYRQQIDPLLKARQQYAYGRQHDYFDHWDVIGWTREGNASHPNSGLATIMSDGPGGSKWMYVGRQKAGEVWHDMTGNRSGTVTINQDGWGHFFVNGGSVSVWVKR

SEQ ID NO: 32040 - protein, 485 aa, Bacillus sp.
HHDGTNGTIMQYFEWNVPNDGQHWNRLHNNAQNLKNAGITAIWIPPAWKGTSQNDVGYGAYDLYDLGEFNQKGTVRTKYGTKAELERAIRSLKANGIQVYGDVVMNHKGGADFTERVQAVEVNPQNRNQEVSGTYQIEAWTGFNFPGRGNQHSSFKWRWYHFDGTDWDQSRQLANRIYKFRGDGKAWDWEVDTENGNYDYLMYADVDMDHPEVINELNRWGVWYANTLNLDGFRLDAVKHILFSFMRDWLGHVRGQTGKNLFAVAEYWKNDLGALENYLSKTNWTMSAFDVPLHYNLYQASNSSGNYDMRNLLNGTLVQRHPSHAVTFVDNHDTQPGEALESFVQGWFKPLAYATILTREQGYPQVFYGDYYGIPSDGVPSYRQQIDPLLKARQQYAYGRQHDYFDHWDVIGWTREGNASHPNSGLATIMSDGPGGSKWMYVGRQKAGEVWHDMTGNRSGTVTINQDGWGHFFVNGGSVSVWVKR

SEQ ID NO: 32041 - protein, 485 aa, Bacillus sp.
HHDGTNGTIMQYFEWNVPNDGQHWNRLHNNAQNLKNAGITAIWIPPAWKGTSQNDVGYGAYDLYDLGEFNQKGTVRTKYGTKAELERAIRSLKANGIQVYGDVVMNHKGGADFTERVQAVEVNPQNRNQEVSGTYQIEAWTGFNFPGRGNQHSSFKWRWYHFDGTDWDQTRQLANRIYKFRGDGKAWDWEVDTENGNYDYLMYADVDMDHPEVINELNRWGVWYANTLNLDGFRLDAVKHIKFSFMRDWLGHVRGQTGKNLFAVAEYWKNDLGALENYLSKTNWTMSAFDVPLHYNLYQASNSSGNYDMRNLLNGTLVQRHPSHAVTFVDNHDTQPGEALESFVQGWFKPLAYATILTREQGYPQVFYGDYYGIPSDGVPSYRQQIDPLLKARQQYAYGRQHDYFDHWDVIGWTREGNASHPNSGLATIMSDGPGGSKWMYVGRQKAGEVWHDMTGNRSGTVTINQDGWGHFFVNGGSVSVWVKR

SEQ ID NO: 32042 - protein, 485 aa, Bacillus sp.
HHDGTNGTIMQYFEWNVPNDGQHWNRLHNNAQNLKNAGITAIWIPPAWKGTSQNDVGYGAYDLYDLGEFNQKGTVRTKYGTKAELERAIRSLKANGIQVYGDVVMNHKGGADFTERVQAVEVNPQNRNQEVSGTYQIEAWTGFNFPGRGNQHSSFKWRWYHFDGTDWDQSRQLANRIYKFRGDGKAWDWEVDTENGNYDYLMYADVDMYHPEVINELNRWGVWYANTLNLDGFRLDAVKHIKFSFMRDWLGHVRGQTGKNLFAVAEYWKNDLGALENYLSKTNWTMSAFDVPLHYNLYQASNSSGNYDMRNLLNGTLVQRHPSHAVTFVDNHDTQPGEALESFVQGWFKPLAYATILTREQGYPQVFYGDYYGIPSDGVPSYRQQIDPLLKARQQYAYGRQHDYFDHWDVIGWTREGNASHPNSGLATIMSDGPGGSKWMYVGRQKAGEVWHDMTGNRSGTVTINQDGWGHFFVNGGSVSVWVKR

SEQ ID NO: 32043 - protein, 485 aa, Bacillus sp.
HHDGTNGTIMQYFEWNVPNDGQHWNRLHNNAQNLKNAMITAIWIPPAWKGTSQNDVGYGAYDLYDLGEFNQKGTVRTKYGTKAELERAIRSLKANGIQVYGDVVMNHKGGADFTERVQAVEVNPQNRNQEVSGTYQIEAWTGFNFPGRGNQHSSFKWRWYHFDGTDWDQSRQLANRIYKFRGDGKAWDWEVDTENGNYDYLMYADVDMDHPEVINELNRWGVWYANTLNLDGFRLDAVKHIKFSFMRDWLGHVRGQTGKNLFAVAEYWKNDLGALENYLSKTNWTMSAFDVPLHYNLYQASNSSGNYDMRNLLNGTLVQRHPSHAVTFVDNHDTQPGEALESFVQGWFKPLAYATILTREQGYPQVFYGDYYGIPSDGVPSYRQQIDPLLKARQQYAYGRQHDYFDHWDVIGWTREGNASHPNSGLATIMSDGPGGSKWMYVGRQKAGEVWHDMTGNRSGTVTINQDGWGHFFVNGGSVSVWVKR

SEQ ID NO: 32044 - protein, 485 aa, Bacillus sp.
HHDGTNGTIMQYFEWNVPNDGQHWNRLHNNAQNLKNAGITAIWIPPAWKGTSQNDVGYGAYDLYDLGEFNQKGTVRTKYGTKAELERAIRSLKANGIQVYGDVVMNHKGGADFTERVQAVEVNPQNRNQEVSGTYQIEAWTGFNFPGRGNQHSSFKWRWYHFDGTDWDQSRQLANRIYKFRGDGKAWDWEVDTENGNYDYLMYADVDMDHPEVINELNRWGVWYANTLNLDGFRLDAVKHIKFSFMRDWLGHVRGQTGKNLFAVAEYWKNDLGALENYLSKTNWTMSAFDVPLHYNLYQASNSSGNYDMRNLLNGTLVQRHPSHAVTFVDNHDTQPGEALESFVQGWFKPLAYATILTREQGYPQVFYADYYGIPSDGVPSYRQQIDPLLKARQQYAYGRQHDYFDHWDVIGWTREGNASHPNSGLATIMSDGPGGSKWMYVGRQKAGEVWHDMTGNRSGTVTINQDGWGHFFVNGGSVSVWVKR

SEQ ID NO: 32045 - protein, 485 aa, Bacillus sp.
HHDGTNGTIMQYFEWNVPNDGQHWNRLHNNAQNLKNAGITAIWIPPAWKGTSQNDVGYGAYDLYDLGEFNQKGTVRTKYGTKAELERAIRSLGANGIQVYGDVVMNHKGGADFTERVQAVEVNPQNRNQEVSGTYQIEAWTGFNFPGRGNQHSSFKWRWYHFDGTDWDQSRQLANRIYKFRGDGKAWDWEVDTENGNYDYLMYADVDMDHPEVINELNRWGVWYANTLNLDGFRLDAVKHIKFSFMRDWLGHVRGQTGKNLFAVAEYWKNDLGALENYLSKTNWTMSAFDVPLHYNLYQASNSSGNYDMRNLLNGTLVQRHPSHAVTFVDNHDTQPGEALESFVQGWFKPLAYATILTREQGYPQVFYGDYYGIPSDGVPSYRQQIDPLLKARQQYAYGRQHDYFDHWDVIGWTREGNASHPNSGLATIMSDGPGGSKWMYVGRQKAGEVWHDMTGNRSGTVTINQDGWGHFFVNGGSVSVWVKR

SEQ ID NO: 32046 - protein, 483 aa, Bacillus sp.
HHDGTNGTIMQYFEWNVPNDGQHWNRLHNNAQNLKNAGITAIWIPPAWKGTSQNDVGYGAYDLYDLGEFNQKGTVRTKYGTKAELERAIRSLKANGIQVYGDVVMNHKGGADFTERVQAVEVNPQNRNQEVSGTYQIEAWTGFNFPGRGNQHSSFKWRWYHFDGTDWDQSRQLANRIYKFRGKAWDWEVDTEXGNYDYLMYADVDMDHPEVINELNRWGVWYANTLNLDGFRLDAVKHIKFSFMRDWLGHVRGQTGKNLFAVAEYWKNDLGALENYLSKTNWTMSAFDVPLHYNLYQASNSSGNYDMRNLLNGTLVQRHPSHAVTFVDNHDTQPGEALESFVQGWFKPLAYATILTREQGYPQVFYGDYYGIPSDGVPSYRQQIDPLLKARQQYAYGRQHDYFDHWDVIGWTREGNASHPNSGLATIMSDGPGGSKWMYVGRQKAGEVWHDMTGNRSGTVTINQDGWGHFFVNGGSVSVWVKR

SEQ ID NO: 32047 - protein, 483 aa, Bacillus sp. (in: firmicutes)
HHDGTNGTMMQYFEWNVPNDGQHWNRLHNNAQNLKNAGITAIWIPPAWKGTSQNDVGYGAYDLYDLGEFNQKGTVRTKYGTKAELERAIRSLKANGIQVYGDVVMNHKGGADFTERVQAVEVNPQNRNQEVSGTYQIEAWTGFNFPGRGNQHSSFKWRWYHFDGTDWDQSRQLANRIYKFRGKAWDWEVDTEFGNYDYLMYADVDMDHPEVINELNRWGVWYANTLNLDGFRLDAVKHIKFSFMRDWLGHVRGQTGKNLFAVAEYWQNDLGKLENYLSKTNWTMSAFDVPLHYNLYQASNSSGNYDMRNLLNGTLVQRHPSHAVTFVDNHDTQPGEALESFVQGWFKPLAYATILTREQGYPSVFYGDYYGIPSDGVPSYRQQIDPLLKARQQYAYGRQHDYFDHWDVIGWTREGNASHPNSGLATIMSDGPGGSKWMYVGRQKAGEVWHDMTGNRSGTVTINQDGWGHFFVNGGSVSVWVKR

SEQ ID NO: 32048 - protein, 485 aa, Bacillus sp.
HHDGTNGTIMQYFEWNVPNDGQHWNRLHNNAQNLKNAGITAIWIPPAWKGTSQNDVGYGAYDLYDLGEFNQKGTVRTKYGTKAELERAIRSLKANGIHVYGDVVMNHKGGADFTERVQAVEVNPQNRNQEVSGTYQIEAWTGFNFPGRGNQHSSFKWRWYHFDGTDWDQSRQLANRIYKFRGDGKAWDWEVDTENGNYDYLMYADVDMDHPEVINELNRWGVWYANTLNLDGFRLDAVKHIKFSFMRDWLGHVRGQTGKNLFAVAEYWKNDLGALENYLSKTNWTMSAFDVPLHYNLYQASNSSGNYDMRNLLNGTLVQRHPSHAVTFVDNHDTQPGEALESFVQGWFKPLAYATILTREQGYPQVFYGDYYGIPSDGVPSYRQQIDPLLKARQQYAYGRQHDYFDHWDVIGWTREGNASHPNSGLATIMSDGPGGSKWMYVGRQKAGEVWHDMTGNRSGTVTINQDGWGHFFVNGGSVSVWVKR

SEQ ID NO: 32049 - protein, 485 aa, Bacillus sp.
HHDGTNGTIMQYFEWNVPNDGQHWNRLHNNAQNLKNAGITAIWIPPAWKGTSQNDVGYGAYDLYDLGEFNQKGTVRTKYGTKAELERAIRSLKANGIQVYGDVVMNHKGGADFTERVQAVEVNPQNRNQEVSGTYQIEAWTGFNFPGRGNQHSSFKWRWYHFDGTDWDQSRQLANRIYKFRGDGKQWDWEVDTENGNYDYLMYADVDMDHPEVINELNRWGVWYANTLNLDGFRLDAVKHIKFSFMRDWLGHVRGQTGKNLFAVAEYWKNDLGALENYLSKTNWTMSAFDVPLHYNLYQASNSSGNYDMRNLLNGTLVQRHPSHAVTFVDNHDTQPGEALESFVQGWFKPLAYATILTREQGYPQVFYGDYYGIPSDGVPSYRQQIDPLLKARQQYAYGRQHDYFDHWDVIGWTREGNASHPNSGLATIMSDGPGGSKWMYVGRQKAGEVWHDMTGNRSGTVTINQDGWGHFFVNGGSVSVWVKR

SEQ ID NO: 32050 - protein, 485 aa, Bacillus sp.
HHDGTNGTIMQYFEWNVPNDGQHWNRLHNNAQNLKNAGITAIWIPPAWKGTSQNDVGYGAYDLYDLGEFNQKGTVRTKYGTKAELERAIRSLKANGIQVYGDVVMNHKGGADFTERVQAVEVNPQNRNQEVSGTYQIEAWTGFNFPGRGNQHSSFKWRWYHFDGTDWDQSRQLANRIYKFRGDGKAWDWEVDTENGNYDYLMYADVDMDHPEVINELNRWGVWYANTLNLDGFRLDAVKHIKFSFMRDWLGHVRGQTGKNLFAVAEYWKNDLGALENYLSKTNWTMSAFDVPLHYNLYQASNSSGNYDMRNLLNGTLVQRHPSHAVTFVDNHDTQPGEALESFVQGWFKPLAYATILTREQGYPQVFYGDYYGIPSDGVPSYRQQIDPLLKARQQYAYGRQHDYFDHWDVIGWTREGNASHPNSGLATIMSDGPGGSKWLYVGRQKAGEVWHDMTGNRSGTVTINQDGWGHFFVNGGSVSVWVKR

SEQ ID NO: 32051 - protein, 485 aa, Bacillus sp.
HHDGTNGTIMQYFEWNVPNDGQHWNRLHNNAQNLKNAGITAIWIPPAWKGTSQNDVGYGAYDLYDLGEFNQKGTVRTKYGTKAELERAIRSLKANGIQVYGDVVMNHKGGADFTERVQAVEVNPQNRNQEVSGTYQIEAWTGFNFPGRGNQHTSFKWRWYHFDGTDWDQSRQLANRIYKFRGDGKAWDWEVDTENGNYDYLMYADVDMDHPEVINELNRWGVWYANTLNLDGFRLDAVKHIKFSFMRDWLGHVRGQTGKNLFAVAEYWKNDLGALENYLSKTNWTMSAFDVPLHYNLYQASNSSGNYDMRNLLNGTLVQRHPSHAVTFVDNHDTQPGEALESFVQGWFKPLAYATILTREQGYPQVFYGDYYGIPSDGVPSYRQQIDPLLKARQQYAYGRQHDYFDHWDVIGWTREGNASHPNSGLATIMSDGPGGSKWMYVGRQKAGEVWHDMTGNRSGTVTINQDGWGHFFVNGGSVSVWVKR

SEQ ID NO: 32052 - protein, 485 aa, Bacillus sp.
HHDGTNGTIMQYFEWNVPNDGQHWNRLHNNAQNLKNAGITAIWIPPAWKGTSQNDVGYGAYDLYDLGEFNQKGTVRTKYGTKAELERAIRSLKANGIQVYGDVVMNHKGGADFTERVQAVEVNPQNRNQEVSGTYQIEAWTGFNFPGRGNQHSSFKWRWYHFDGTDWDQSRQLANRIYKFXGDGKAWDWEVDTENGNYDYLMYADVDMDHPEVINELNRWGVWYANTLNLDGFRLDAVKHIKFSFMRDWLGHVRGQTGKNLFAVAEYWKNDLGALENYLSKTNWTMSAFDVPLHYNLYQASNSSGNYDMRNLLNGTLVQRHPSHAVTFVDNHDTQPGEALESFVQGWFKPLAYATILTREQGYPQVFYGDYYGIPSDGVPSYRQQIDPLLKARQQYAYGRQHDYFDHWDVIGWTREGNASHPNSGLATIMSDGPGGSKWMYVGRQKAGEVWHDMTGNRSGTVTINQDGWGHFFVNGGSVSVWVKR

SEQ ID NO: 32053 - protein, 485 aa, Bacillus sp.
HHDGTNGTIMQYFEWNVPNDGQHWNRLHNNAQNLKNAGITAIWIPPAWKGTSQNDVGYGAYDLYDLGEFNQKGTVRTKYGTKAELERAIRSLKANGIQVYGDVVMNHKGGADFTERVQAVEVNPQNRNQEVSGTYQIEAWTGFNFPGRANQHSSFKWRWYHFDGTDWDQSRQLANRIYKFRGDGKAWDWEVDTENGNYDYLMYADVDMDHPEVINELNRWGVWYANTLNLDGFRLDAVKHIKFSFMRDWLGHVRGQTGKNLFAVAEYWKNDLGALENYLSKTNWTMSAFDVPLHYNLYQASNSSGNYDMRNLLNGTLVQRHPSHAVTFVDNHDTQPGEALESFVQGWFKPLAYATILTREQGYPQVFYGDYYGIPSDGVPSYRQQIDPLLKARQQYAYGRQHDYFDHWDVIGWTREGNASHPNSGLATIMSDGPGGSKWMYVGRQKAGEVWHDMTGNRSGTVTINQDGWGHFFVNGGSVSVWVKR

SEQ ID NO: 32054 - protein, 485 aa, Bacillus sp.
HHDGTNGTIMQYFEWNVPNDGQHWNRLHNNAQNLKNAGITAIWIPPAWKGTSQNDVGYGAYDLYDLGEFNQKGTVRTKYGTKAELERAIRSLKANGIQVYGDVVMNHKGGADFTERVQAVEVNPQNRNQEVSGTYQIEAWTGFNFPGRGNQHSSFKWRWYHFDGTDWDQSRQLANRIYKFRGDGKAWDWEVDTENGNYDYLMYADVDMDHPEVINELNRWGVWYANCLNLDGFRLDAVKHIKFSFMRDWLGHVRGQTGKNLFAVAEYWKNDLGALENYLSKTNWTMSAFDVPLHYNLYQASNSSGNYDMRNLLNGTLVQRHPSHAVTFVDNHDTQPGEALESFVQGWFKPLAYATILTREQGYPQVFYGDYYGIPSDGVPSYRQQIDPLLKARQQYAYGRQHDYFDHWDVIGWTREGNASHPNSGLATIMSDGPGGSKWMYVGRQKAGEVWHDMTGNRSGTVTINQDGWGHFFVNGGSVSVWVKR

SEQ ID NO: 32055 - protein, 485 aa, Bacillus sp.
HHDGTNGTIMQYFEWNVPNDGQHWNRLHNNAQNLKNAGITAIWIPPAWKGTSQNDVGYGAYDLYDLGEFNQKGTVRTKYGTKAELERAIRSLKANGIQVYGDVVMNHKGGADFTERVQAVEVNPQNRNQEVSGTYQIEAWTGFNFPGRGNQHSSFKWRWYHFDGTDWDQSRQLANRIYKFRGDGKAWDWEVDTENGNYDYLMYADVDMDHPEVINELNRWGVWYANTLNLDGFRLDAVKHIKFSFMRDWLGHVRGQTGKNLFAVAEYWKNDLGALENYLSKTNWTMSAFDVPLHYNLYQASNSSGNYDMRNLLNGTLVQRHPSHAVTFVDNHDTQPGEALESFVQGWFKPLAYATILTREQGYPQVFYGDYYGIPSDGVPSYRQQIDPLLKARQQYAYGRQHDYFDHWDVIGWTREGNASHPNSGLATIMSDGPGGSKWMYVGRQKAGEVWHDMLGNRSGTVTINQDGWGHFFVNGGSVSVWVKR

SEQ ID NO: 32056 - protein, 485 aa, Bacillus sp.
HHDGTNGTIMQYFEWNVPNDGQHWNRLHNNAQNLKNAGITAIWIPPAWKGTSQNDVGYGAYDLYDLGEFNQKGTVRTKYGTKAELERAIRSLKANGIQVYGDVVMNHKGGADFTERVQAVEVNPQNRNQEVSGTYQIEAWTGFNFPGRGNQHSSFKWRWYHFDGTDWDQSRQLANRIYKFRGDGKAWDWEVDTENGNYDYLMYADVDMDHPGVINELNRWGVWYANTLNLDGFRLDAVKHIKFSFMRDWLGHVRGQTGKNLFAVAEYWKNDLGALENYLSKTNWTMSAFDVPLHYNLYQASNSSGNYDMRNLLNGTLVQRHPSHAVTFVDNHDTQPGEALESFVQGWFKPLAYATILTREQGYPQVFYGDYYGIPSDGVPSYRQQIDPLLKARQQYAYGRQHDYFDHWDVIGWTREGNASHPNSGLATIMSDGPGGSKWMYVGRQKAGEVWHDMTGNRSGTVTINQDGWGHFFVNGGSVSVWVKR

SEQ ID NO: 32057 - protein, 485 aa, Bacillus sp.
HHDGTNGTIMQYFEWNVPNDGQHWNRLHNNAQNLKNAGITAIWIPPAWKGTSQNDVGYGAYDLYDLGEFNQKGTVRTKYGTKAELERAIRSLKANGIQVYGDVVMNHKGGADFTERVQAVEVNPQNRNQEVSGTYQIEAWTGFNFPGRGNQHSSFKWRWYHFDGTDWDQSRQLANRIYKFRGDGKAWDWEVDTENGNYDYLMYADVDMDHPEVINELNRWGVWYANTLNLDGFRLDAAKHIKFSFMRDWLGHVRGQTGKNLFAVAEYWKNDLGALENYLSKTNWTMSAFDVPLHYNLYQASNSSGNYDMRNLLNGTLVQRHPSHAVTFVDNHDTQPGEALESFVQGWFKPLAYATILTREQGYPQVFYGDYYGIPSDGVPSYRQQIDPLLKARQQYAYGRQHDYFDHWDVIGWTREGNASHPNSGLATIMSDGPGGSKWMYVGRQKAGEVWHDMTGNRSGTVTINQDGWGHFFVNGGSVSVWVKR

SEQ ID NO: 32058 - protein, 485 aa, Bacillus sp.
HHDGTNGTIMQYFEWNVPNDGQHWNRLHNNAQNLKNAGITAIWIPPAWKGTSQNDVGYGAYDLYDLGDFNQKGTVRTKYGTKAELERAIRSLKANGIQVYGDVVMNHKGGADFTERVQAVEVNPQNRNQEVSGTYQIEAWTGFNFPGRGNQHSSFKWRWYHFDGTDWDQSRQLANRIYKFRGDGKAWDWEVDTENGNYDYLMYADVDMDHPEVINELNRWGVWYANTLNLDGFRLDAVKHIKFSFMRDWLGHVRGQTGKNLFAVAEYWKNDLGALENYLSKTNWTMSAFDVPLHYNLYQASNSSGNYDMRNLLNGTLVQRHPSHAVTFVDNHDTQPGEALESFVQGWFKPLAYATILTREQGYPQVFYGDYYGIPSDGVPSYRQQIDPLLKARQQYAYGRQHDYFDHWDVIGWTREGNASHPNSGLATIMSDGPGGSKWMYVGRQKAGEVWHDMTGNRSGTVTINQDGWGHFFVNGGSVSVWVKR

SEQ ID NO: 32059 - protein, 485 aa, Bacillus sp.
HHDGTNGTIMQYFEWNVPNDGQHWNRLHNNAQNLKNAGITAIWIPPAWKGTSQNDVGYGAYDLYDLGEFNQKGTVRTKYGTKAELERAIRSLKANGIQVYGDVVMNHKGGADFTERVQAVEVNPQNRNQEVSGTYQIEAWTGFNFPGRGNQHSSFKWRWYHFDGTDWDQSRQLANRIYKFRGDGKAWDWEVDTENANYDYLMYADVDMDHPEVINELNRWGVWYANTLNLDGFRLDAVKHIKFSFMRDWLGHVRGQTGKNLFAVAEYWKNDLGALENYLSKTNWTMSAFDVPLHYNLYQASNSSGNYDMRNLLNGTLVQRHPSHAVTFVDNHDTQPGEALESFVQGWFKPLAYATILTREQGYPQVFYGDYYGIPSDGVPSYRQQIDPLLKARQQYAYGRQHDYFDHWDVIGWTREGNASHPNSGLATIMSDGPGGSKWMYVGRQKAGEVWHDMTGNRSGTVTINQDGWGHFFVNGGSVSVWVKR

SEQ ID NO: 32060 - protein, 485 aa, Bacillus sp.
HHDGTNGTIMQYFEWNVPNDGQHWNRLHNNAQNLKNAGITAIWIPPAWKGTSQNDVGYGAYDLYDLGEFNQKGTVRTKYGTKAELERAIRSLKANGIQVYGDVVMNHKGGADFTERVQAVEVNPQNRNQEVSGTYQIEAWTGFNFCGRGNQHSSFKWRWYHFDGTDWDQSRQLANRIYKFRGDGKAWDWEVDTENGNYDYLMYADVDMDHPEVINELNRWGVWYANTLNLDGFRLDAVKHIKFSFMRDWLGHVRGQTGKNLFAVAEYWKNDLGALENYLSKTNWTMSAFDVPLHYNLYQASNSSGNYDMRNLLNGTLVQRHPSHAVTFVDNHDTQPGEALESFVQGWFKPLAYATILTREQGYPQVFYGDYYGIPSDGVPSYRQQIDPLLKARQQYAYGRQHDYFDHWDVIGWTREGNASHPNSGLATIMSDGPGGSKWMYVGRQKAGEVWHDMTGNRSGTVTINQDGWGHFFVNGGSVSVWVKR

SEQ ID NO: 32061 - protein, 485 aa, Bacillus sp.
HHDGTNGTIMQYFEWNVPNDGQHWNRLHNNAQNLKNAGITAIWIPPAWKGTSQNDVGYGAYDLYDLGEFNQKGTVRTKYGTKAELERAIRSLKANGIQVYGDVVMNHKGGADFTERVQAVEVNPQNRNQEVSGTYQIEAWTGFNFPGRGNQHSSFKWRWYHFDGTDWDQSRQLANRIYKFRGDGKAWDWEVDTENGNYDYLMYADVDMDHPEVINELNRWGVWYANTLNLDGFRLDAVKHIKFSFMRDWLGHVRGQTGKNLFAVAEYWKNDLGALENYLSKTNWTMSAFDVPLHYNLYQASNSSGNYDMRNLLNGTLVQRHPSHAVTFVDNHDTQPGEALESFVQGWFAPLAYATILTREQGYPQVFYGDYYGIPSDGVPSYRQQIDPLLKARQQYAYGRQHDYFDHWDVIGWTREGNASHPNSGLATIMSDGPGGSKWMYVGRQKAGEVWHDMTGNRSGTVTINQDGWGHFFVNGGSVSVWVKR

SEQ ID NO: 32062 - protein, 485 aa, Bacillus sp.
HHDGTNGTIMQYFEWNVPNDGQHWNRLHNNAQNLKNAGITAIWIPPAWKGTSQNDVGYGAYDLYDLGEFNQKGTVRTKYGTKAELERAIRSLKANGIQVYGDVVMNHKGGADFTERVQAVEVNPQNRNQEVSGTYQIEAWTGFNFPGRGNQHSSFKWRWYHFDGTDWDQSRQLANRIYKFRGDGKAWDWEVDTENGNYDYLMYADVDMDHPEVINEGNRWGVWYANTLNLDGFRLDAVKHIKFSFMRDWLGHVRGQTGKNLFAVAEYWKNDLGALENYLSKTNWTMSAFDVPLHYNLYQASNSSGNYDMRNLLNGTLVQRHPSHAVTFVDNHDTQPGEALESFVQGWFKPLAYATILTREQGYPQVFYGDYYGIPSDGVPSYRQQIDPLLKARQQYAYGRQHDYFDHWDVIGWTREGNASHPNSGLATIMSDGPGGSKWMYVGRQKAGEVWHDMTGNRSGTVTINQDGWGHFFVNGGSVSVWVKR

SEQ ID NO: 32063 - protein, 485 aa, Bacillus sp.
HHDGTNGTIMQYFEWNVPNDGQHWNRLHNNAQNLKNAGITAIWIPPAWKNTSQNDVGYGAYDLYDLGEFNQKGTVRTKYGTKAELERAIRSLKANGIQVYGDVVMNHKGGADFTERVQAVEVNPQNRNQEVSGTYQIEAWTGFNFPGRGNQHSSFKWRWYHFDGTDWDQSRQLANRIYKFRGDGKAWDWEVDTENGNYDYLMYADVDMDHPEVINELNRWGVWYANTLNLDGFRLDAVKHIKFSFMRDWLGHVRGQTGKNLFAVAEYWKNDLGALENYLSKTNWTMSAFDVPLHYNLYQASNSSGNYDMRNLLNGTLVQRHPSHAVTFVDNHDTQPGEALESFVQGWFKPLAYATILTREQGYPQVFYGDYYGIPSDGVPSYRQQIDPLLKARQQYAYGRQHDYFDHWDVIGWTREGNASHPNSGLATIMSDGPGGSKWMYVGRQKAGEVWHDMTGNRSGTVTINQDGWGHFFVNGGSVSVWVKR

SEQ ID NO: 32064 - protein, 485 aa, Bacillus sp.
HHDGTNGTIMQYFEWNVPNDGQHWNRLHNNAQNYKNAGITAIWIPPAWKGTSQNDVGYGAYDLYDLGEFNQKGTVRTKYGTKAELERAIRSLKANGIQVYGDVVMNHKGGADFTERVQAVEVNPQNRNQEVSGTYQIEAWTGFNFPGRGNQHSSFKWRWYHFDGTDWDQSRQLANRIYKFRGDGKAWDWEVDTENGNYDYLMYADVDMDHPEVINELNRWGVWYANTLNLDGFRLDAVKHIKFSFMRDWLGHVRGQTGKNLFAVAEYWKNDLGALENYLSKTNWTMSAFDVPLHYNLYQASNSSGNYDMRNLLNGTLVQRHPSHAVTFVDNHDTQPGEALESFVQGWFKPLAYATILTREQGYPQVFYGDYYGIPSDGVPSYRQQIDPLLKARQQYAYGRQHDYFDHWDVIGWTREGNASHPNSGLATIMSDGPGGSKWMYVGRQKAGEVWHDMTGNRSGTVTINQDGWGHFFVNGGSVSVWVKR

SEQ ID NO: 32065 - protein, 485 aa, Bacillus sp.
HHDGTNGTIMQYFEWNVPNDGQHWNRLHNNAQNLKNAGITAIWIPPAWKGTSQNDVGYGAYDLYDLGEFNQKGTVRTKYGTKAELERAIRSLKANGIQVYGDVVMNHKGGADFTERCQAVEVNPQNRNQEVSGTYQIEAWTGFNFPGRGNQHSSFKWRWYHFDGTDWDQSRQLANRIYKFRGDGKAWDWEVDTENGNYDYLMYADVDMDHPEVINELNRWGVWYANTLNLDGFRLDAVKHIKFSFMRDWLGHVRGQTGKNLFAVAEYWKNDLGALENYLSKTNWTMSAFDVPLHYNLYQASNSSGNYDMRNLLNGTLVQRHPSHAVTFVDNHDTQPGEALESFVQGWFKPLAYATILTREQGYPQVFYGDYYGIPSDGVPSYRQQIDPLLKARQQYAYGRQHDYFDHWDVIGWTREGNASHPNSGLATIMSDGPGGSKWMYVGRQKAGEVWHDMTGNRSGTVTINQDGWGHFFVNGGSVSVWVKR

SEQ ID NO: 32066 - protein, 485 aa, Bacillus sp.
HHDGTNGTIMQYFEWNVPNDGQHWNRLHNNAQNLKNAGITAIWIPPAWKGTSQNDVGYGAYDLYDLGEFNQKGTVRTKYGTKAELERAIRSLKANGIQVYGDVVMNHKGGADFTERVQAVEVNPQNRNQEVSGTYQIEAWTGFNFPGRGNQHSSFKWRWYHFDGTDWDQSRQLANRIYKFRGDGKAWDWEVDTENGNYDYLMYADVDMDHPEVINELNRWGVWYANTLNLDGFRLDAVKHIKFSFMRDWLGHVRGQTGKNLFAVAEYWKNDLGALENYLSKTNWTMSAFDVPLHYNLYQASNSSGNYDMRNLLNGTLVQRHPSHAVTFVDNHDTQWGEALESFVQGWFKPLAYATILTREQGYPQVFYGDYYGIPSDGVPSYRQQIDPLLKARQQYAYGRQHDYFDHWDVIGWTREGNASHPNSGLATIMSDGPGGSKWMYVGRQKAGEVWHDMTGNRSGTVTINQDGWGHFFVNGGSVSVWVKR

SEQ ID NO: 32067 - protein, 485 aa, Bacillus sp.
HHDGTNGTIMQYFEWNVPNDGQHWNRLHNNAQNLKNAGITAIWIPPAWKGTSQNDVGYGAYDLYDLGEFNQKGTVRTKYGTKAELERAIRSLKANGIQSYGDVVMNHKGGADFTERVQAVEVNPQNRNQEVSGTYQIEAWTGFNFPGRGNQHSSFKWRWYHFDGTDWDQSRQLANRIYKFRGDGKAWDWEVDTENGNYDYLMYADVDMDHPEVINELNRWGVWYANTLNLDGFRLDAVKHIKFSFMRDWLGHVRGQTGKNLFAVAEYWKNDLGALENYLSKTNWTMSAFDVPLHYNLYQASNSSGNYDMRNLLNGTLVQRHPSHAVTFVDNHDTQPGEALESFVQGWFKPLAYATILTREQGYPQVFYGDYYGIPSDGVPSYRQQIDPLLKARQQYAYGRQHDYFDHWDVIGWTREGNASHPNSGLATIMSDGPGGSKWMYVGRQKAGEVWHDMTGNRSGTVTINQDGWGHFFVNGGSVSVWVKR

SEQ ID NO: 32068 - protein, 485 aa, Bacillus sp.
HHDGTNGTIMQYFEWNVPNDGQHWNRLHNNAQNLKNAGITAIWIPPAWKGTSQNDVGYGAYDLYDLGEFNQKGTVRTKYGTKAELERAIRSLKANGIQVYGDVVMNHKGGADFTERVQAVEVNPQNRNQEVSGTYQIEAWTGINFPGRGNQHSSFKWRWYHFDGTDWDQSRQLANRIYKFRGDGKAWDWEVDTENGNYDYLMYADVDMDHPEVINELNRWGVWYANTLNLDGFRLDAVKHIKFSFMRDWLGHVRGQTGKNLFAVAEYWKNDLGALENYLSKTNWTMSAFDVPLHYNLYQASNSSGNYDMRNLLNGTLVQRHPSHAVTFVDNHDTQPGEALESFVQGWFKPLAYATILTREQGYPQVFYGDYYGIPSDGVPSYRQQIDPLLKARQQYAYGRQHDYFDHWDVIGWTREGNASHPNSGLATIMSDGPGGSKWMYVGRQKAGEVWHDMTGNRSGTVTINQDGWGHFFVNGGSVSVWVKR

SEQ ID NO: 32069 - protein, 485 aa, Bacillus sp.
HHDGTNGTIMQYFEWNVPNDGQHWNRLHNNAQNLKNAGIAAIWIPPAWKGTSQNDVGYGAYDLYDLGEFNQKGTVRTKYGTKAELERAIRSLKANGIQVYGDVVMNHKGGADFTERVQAVEVNPQNRNQEVSGTYQIEAWTGFNFPGRGNQHSSFKWRWYHFDGTDWDQSRQLANRIYKFRGDGKAWDWEVDTENGNYDYLMYADVDMDHPEVINELNRWGVWYANTLNLDGFRLDAVKHIKFSFMRDWLGHVRGQTGKNLFAVAEYWKNDLGALENYLSKTNWTMSAFDVPLHYNLYQASNSSGNYDMRNLLNGTLVQRHPSHAVTFVDNHDTQPGEALESFVQGWFKPLAYATILTREQGYPQVFYGDYYGIPSDGVPSYRQQIDPLLKARQQYAYGRQHDYFDHWDVIGWTREGNASHPNSGLATIMSDGPGGSKWMYVGRQKAGEVWHDMTGNRSGTVTINQDGWGHFFVNGGSVSVWVKR

SEQ ID NO: 32070 - protein, 485 aa, Bacillus sp.
HHDGTNGTIMQYFEWNVPNDGQHWNRLHNNAQNLKNAGITAIWIPPAWKGTSQNDVGYGAYDLYDLGEFNQKGTVRTKYGTKAELERAIRSLKANGIQVYGDVVMNHKGGADFTERVQAVEVNPQNRNQEVSGTYQIEAWTGFNFPGRGNQHSSFKWRWYHFDGTDWDQSRQLANRIYKFRGDGKAWDWEVDTENGNYDYLMYADVDMDHPEVINELNRWGVWYANTLNLDGFRLDAVKHIKFSFMRDWLGHVRGQTGKNLFAVAEYWKNDLGALENYLSKTNWTMSAFDVPLHYNLYQASNSSGNYDMRNLLNGTLVQRHPSHAVTFVDNHDTQPGEALESFVQGWFKPLAYCTILTREQGYPQVFYGDYYGIPSDGVPSYRQQIDPLLKARQQYAYGRQHDYFDHWDVIGWTREGNASHPNSGLATIMSDGPGGSKWMYVGRQKAGEVWHDMTGNRSGTVTINQDGWGHFFVNGGSVSVWVKR

SEQ ID NO: 32071 - protein, 485 aa, Bacillus sp.
HHDGTNGTIMQYFEWNVPNDGQHWNRLHNNAQNLKNAGITAIWIPPAWKGTSQNDVGYGAYDLYDLGEFNQKGTVRTKYGTKAELERAIRSLKANGIQVYGDVVMNHKGGADFTERVQAVEVNPQNRNQEVSGTYQIEAWTGFNFPGRGNQHSSFKWRWYHFDGTDWDQSRQLANRIYKFRGDGKAWDWEVDTENGNYDYLMYADVDMDHPEVINELNRWGVWYANTLNLDGFRLDAVKHIKFSFMRDWLGHVRGQTGKNLFAVAEYWKNDLGALENYLSKTNWTMSAFDVPLHYNLYQASNSSGNYDMRNLLNGTLVQRHPSHAVTFVDNHDTQPGEALESFVQGWFKPLAYATILTRMQGYPQVFYGDYYGIPSDGVPSYRQQIDPLLKARQQYAYGRQHDYFDHWDVIGWTREGNASHPNSGLATIMSDGPGGSKWMYVGRQKAGEVWHDMTGNRSGTVTINQDGWGHFFVNGGSVSVWVKR

SEQ ID NO: 32072 - protein, 485 aa, Bacillus sp.
HHDGQNGTIMQYFEWNVPNDGQHWNRLHNNAQNLKNAGITAIWIPPAWKGTSQNDVGYGAYDLYDLGEFNQKGTVRTKYGTKAELERAIRSLKANGIQVYGDVVMNHKGGADFTERVQAVEVNPQNRNQEVSGTYQIEAWTGFNFPGRGNQHSSFKWRWYHFDGTDWDQSRQLANRIYKFRGDGKAWDWEVDTENGNYDYLMYADVDMDHPEVINELNRWGVWYANTLNLDGFRLDAVKHIKFSFMRDWLGHVRGQTGKNLFAVAEYWKNDLGALENYLSKTNWTMSAFDVPLHYNLYQASNSSGNYDMRNLLNGTLVQRHPSHAVTFVDNHDTQPGEALESFVQGWFKPLAYATILTREQGYPQVFYGDYYGIPSDGVPSYRQQIDPLLKARQQYAYGRQHDYFDHWDVIGWTREGNASHPNSGLATIMSDGPGGSKWMYVGRQKAGEVWHDMTGNRSGTVTINQDGWGHFFVNGGSVSVWVKR

SEQ ID NO: 32073 - protein, 485 aa, Bacillus sp.
HHDGTNGTIMQYFEWNVPNDGQHWNRLHNNAQNLKNAGITAIWIPPAWKGTSQNDVGYGAYDLYDLGEFNQKGTVRTKYGTKAELERAIRSLKANGIQVYGDVVMNHKGGADFTERVQAVEVNPQNRNQEVSGTYQIEAWTGFNFPGRGNQHSSFKWRWYHFDGTDWDQSRQLANRIYKFRGDGKAWDWEVDTENGNYDYLMYADVDMDHPEVINELNRWGVWYANTLNLDGFRLDAVKHIKFSFMRDWLGHVRGQTGKNLFAVAEYWKNDLGALENYLSKTNWTMSAFDVPLHYNLYQASNSSGNYDMRNLLNGTLVQRHPSHAVTFVDNHDTQPGEALESFVQGWFKPLAYATILTREQGYPQVFYGDYYGIPSDGVPSYRQQIDPLLKARQQYAYGRQHDYFDHWDVIGWTREGNASHPNSGLATIMSDGPGGSKWMYVGRQKQGEVWHDMTGNRSGTVTINQDGWGHFFVNGGSVSVWVKR

SEQ ID NO: 32074 - protein, 485 aa, Bacillus sp.
HHDGTNGTIMQYFEWNVPNDGQHWNRLHNNAQNLKNAGITAIWIPPAWKGTSQNDVGYGAYDLYDLGEFNQKGTVRTKYGTKAELERAIRSLKANGIQVYGDVVMNHKGGADFTERVQAVEVNPQNRNQEVSGTYQIEAWTGFNFPGRGNQHSSFKWRWYHFDGTDWDQSRQLANRIYKFRGDGKAWDWEVDTETGNYDYLMYADVDMDHPEVINELNRWGVWYANTLNLDGFRLDAVKHIKFSFMRDWLGHVRGQTGKNLFAVAEYWKNDLGALENYLSKTNWTMSAFDVPLHYNLYQASNSSGNYDMRNLLNGTLVQRHPSHAVTFVDNHDTQPGEALESFVQGWFKPLAYATILTREQGYPQVFYGDYYGIPSDGVPSYRQQIDPLLKARQQYAYGRQHDYFDHWDVIGWTREGNASHPNSGLATIMSDGPGGSKWMYVGRQKAGEVWHDMTGNRSGTVTINQDGWGHFFVNGGSVSVWVKR

SEQ ID NO: 32075 - protein, 485 aa, Bacillus sp.
HHDGTNGTIMQYFEWNVPNDGQHWNRLHNNAQNLKNAGITAIWIPPAWKGTSQNDVGYGAYDLYDLGEFNQKGTVRTKYGTKAELERAIRSLKANGIQVYGDVVMNHKGGADFTERVQAVEVNPQNRNQEVSGTYQIEAWTGFNFPGRGNQHSSFKWRWRHFDGTDWDQSRQLANRIYKFRGDGKAWDWEVDTENGNYDYLMYADVDMDHPEVINELNRWGVWYANTLNLDGFRLDAVKHIKFSFMRDWLGHVRGQTGKNLFAVAEYWKNDLGALENYLSKTNWTMSAFDVPLHYNLYQASNSSGNYDMRNLLNGTLVQRHPSHAVTFVDNHDTQPGEALESFVQGWFKPLAYATILTREQGYPQVFYGDYYGIPSDGVPSYRQQIDPLLKARQQYAYGRQHDYFDHWDVIGWTREGNASHPNSGLATIMSDGPGGSKWMYVGRQKAGEVWHDMTGNRSGTVTINQDGWGHFFVNGGSVSVWVKR

SEQ ID NO: 32076 - protein, 485 aa, Bacillus sp.
HHDGTNGTIMQYFFWNVPNDGQHWNRLHNNAQNLKNAGITAIWIPPAWKGTSQNDVGYGAYDLYDLGEFNQKGTVRTKYGTKAELERAIRSLKANGIQVYGDVVMNHKGGADFTERVQAVEVNPQNRNQEVSGTYQIEAWTGFNFPGRGNQHSSFKWRWYHFDGTDWDQSRQLANRIYKFRGDGKAWDWEVDTENGNYDYLMYADVDMDHPEVINELNRWGVWYANTLNLDGFRLDAVKHIKFSFMRDWLGHVRGQTGKNLFAVAEYWKNDLGALENYLSKTNWTMSAFDVPLHYNLYQASNSSGNYDMRNLLNGTLVQRHPSHAVTFVDNHDTQPGEALESFVQGWFKPLAYATILTREQGYPQVFYGDYYGIPSDGVPSYRQQIDPLLKARQQYAYGRQHDYFDHWDVIGWTREGNASHPNSGLATIMSDGPGGSKWMYVGRQKAGEVWHDMTGNRSGTVTINQDGWGHFFVNGGSVSVWVKR

SEQ ID NO: 32077 - protein, 485 aa, Bacillus sp.
HHDGTNGTIMQYFEWNVPNDGQHWNRLHNNAQNLKNAGITAIWIPPAWKGTSQNDVGYGAYDLYDLGEFNQKGTVRTKYGTKAELERAIRSLKANGIFVYGDVVMNHKGGADFTERVQAVEVNPQNRNQEVSGTYQIEAWTGFNFPGRGNQHSSFKWRWYHFDGTDWDQSRQLANRIYKFRGDGKAWDWEVDTENGNYDYLMYADVDMDHPEVINELNRWGVWYANTLNLDGFRLDAVKHIKFSFMRDWLGHVRGQTGKNLFAVAEYWKNDLGALENYLSKTNWTMSAFDVPLHYNLYQASNSSGNYDMRNLLNGTLVQRHPSHAVTFVDNHDTQPGEALESFVQGWFKPLAYATILTREQGYPQVFYGDYYGIPSDGVPSYRQQIDPLLKARQQYAYGRQHDYFDHWDVIGWTREGNASHPNSGLATIMSDGPGGSKWMYVGRQKAGEVWHDMTGNRSGTVTINQDGWGHFFVNGGSVSVWVKR

SEQ ID NO: 32078 - protein, 485 aa, Bacillus sp.
HHDGTNGTIMQYFEWNVPNDGQHWNRLHNNAQNLKNAGITAIWIPPAWKGTSQNDVGYGAYDLYDLGEFNQKGTVRTKYGTKAELERAIRSLKANGIQVYGDVVMNHKGGADFTERAQAVEVNPQNRNQEVSGTYQIEAWTGFNFPGRGNQHSSFKWRWYHFDGTDWDQSRQLANRIYKFRGDGKAWDWEVDTENGNYDYLMYADVDMDHPEVINELNRWGVWYANTLNLDGFRLDAVKHIKFSFMRDWLGHVRGQTGKNLFAVAEYWKNDLGALENYLSKTNWTMSAFDVPLHYNLYQASNSSGNYDMRNLLNGTLVQRHPSHAVTFVDNHDTQPGEALESFVQGWFKPLAYATILTREQGYPQVFYGDYYGIPSDGVPSYRQQIDPLLKARQQYAYGRQHDYFDHWDVIGWTREGNASHPNSGLATIMSDGPGGSKWMYVGRQKAGEVWHDMTGNRSGTVTINQDGWGHFFVNGGSVSVWVKR

SEQ ID NO: 32079 - protein, 485 aa, Bacillus sp.
HHDGTNGTIMQYFEWNVPNDGQHWNRLHNNAQNLKNAGITAIWIPPAWKGTSQNDVGYGAYDLYDLGEFNQKGTVRTKYGTKAELERAIRSLKANGIQVYGDVVMNHKGGADFTERVQAVEVPPQNRNQEVSGTYQIEAWTGFNFPGRGNQHSSFKWRWYHFDGTDWDQSRQLANRIYKFRGDGKAWDWEVDTENGNYDYLMYADVDMDHPEVINELNRWGVWYANTLNLDGFRLDAVKHIKFSFMRDWLGHVRGQTGKNLFAVAEYWKNDLGALENYLSKTNWTMSAFDVPLHYNLYQASNSSGNYDMRNLLNGTLVQRHPSHAVTFVDNHDTQPGEALESFVQGWFKPLAYATILTREQGYPQVFYGDYYGIPSDGVPSYRQQIDPLLKARQQYAYGRQHDYFDHWDVIGWTREGNASHPNSGLATIMSDGPGGSKWMYVGRQKAGEVWHDMTGNRSGTVTINQDGWGHFFVNGGSVSVWVKR

SEQ ID NO: 32080 - protein, 485 aa, Bacillus sp.
HHDGTNGTIMQYFEWNVPNDGQHWNRLHNNAQNLKNAGITAIWIPPAWKGTSQNDVGYGAYDLYDLGEFNQKGTVRTKYGTKAELERAIRSLKANGIQVYGDVVMNHKGGADFTERVQAVEVNPQNRNQEVSGTYQIEAWTGFNFPGRGNQHSSFKWRWYHFDGTDWDQSVQLANRIYKFRGDGKAWDWEVDTENGNYDYLMYADVDMDHPEVINELNRWGVWYANTLNLDGFRLDAVKHIKFSFMRDWLGHVRGQTGKNLFAVAEYWKNDLGALENYLSKTNWTMSAFDVPLHYNLYQASNSSGNYDMRNLLNGTLVQRHPSHAVTFVDNHDTQPGEALESFVQGWFKPLAYATILTREQGYPQVFYGDYYGIPSDGVPSYRQQIDPLLKARQQYAYGRQHDYFDHWDVIGWTREGNASHPNSGLATIMSDGPGGSKWMYVGRQKAGEVWHDMTGNRSGTVTINQDGWGHFFVNGGSVSVWVKR

SEQ ID NO: 32081 - protein, 485 aa, Bacillus sp.
HHDGTNGTIMQYFEWNVPNDGQHWNRLHNNAQNLKNAGITAIWIPPAWKGTSQNDVGYGAYDLYDLGEFNQKGTVRTKYGTKAELERAIRSLKANGIQVYGDVVMNHKGGADFTERVQAVEVNPQNRNQCVSGTYQIEAWTGFNFPGRGNQHSSFKWRWYHFDGTDWDQSRQLANRIYKFRGDGKAWDWEVDTENGNYDYLMYADVDMDHPEVINELNRWGVWYANTLNLDGFRLDAVKHIKFSFMRDWLGHVRGQTGKNLFAVAEYWKNDLGALENYLSKTNWTMSAFDVPLHYNLYQASNSSGNYDMRNLLNGTLVQRHPSHAVTFVDNHDTQPGEALESFVQGWFKPLAYATILTREQGYPQVFYGDYYGIPSDGVPSYRQQIDPLLKARQQYAYGRQHDYFDHWDVIGWTREGNASHPNSGLATIMSDGPGGSKWMYVGRQKAGEVWHDMTGNRSGTVTINQDGWGHFFVNGGSVSVWVKR

SEQ ID NO: 32082 - protein, 485 aa, Bacillus sp.
HHDGTNGTIMQYFEWNVPNDGQHWNRLHNNAQNLKNAGITAIWIPPAWKGTSQNDVGYGAYDLYDLGEFNQKGTVRTKYGTKAELERAIRSLKANGIQVYGDVVMNHKGGADFTERVQAVEVNPQNRNQEVSGTYQIEAWTGFNFPGRGNQHSSFKWRWYHFDGTDWDQSRQLANRIYKFRGDGKAWDWEVDTENGNYDYLMYADVDMDHPEVINELNRWGVWYANTLNLDGFRLDAVKHIKFSFMRDWLGHVRGQTGKNLFAVAEYWKNDLGALENYLSKTNWTMSAFDVPLHYNLYQASNSSGNYDMRNLLNGTLVQRHPSHAVTFVDNHDTQPGEALESFVQGWFKPLAYATILTREQGYPQVFYGDYYGIPSDGVPSYRQQIDPLLKARQQYAYGRQHDYFDHWDVIGWTREGMASHPNSGLATIMSDGPGGSKWMYVGRQKAGEVWHDMTGNRSGTVTINQDGWGHFFVNGGSVSVWVKR

SEQ ID NO: 32083 - protein, 485 aa, Bacillus sp.
HHDGTNGTIMQYFEWNVPNDGQHWNRLHNNAQNLKNAGITAIWIPPAWKGTSGNDVGYGAYDLYDLGEFNQKGTVRTKYGTKAELERAIRSLKANGIQVYGDVVMNHKGGADFTERVQAVEVNPQNRNQEVSGTYQIEAWTGFNFPGRGNQHSSFKWRWYHFDGTDWDQSRQLANRIYKFRGDGKAWDWEVDTENGNYDYLMYADVDMDHPEVINELNRWGVWYANTLNLDGFRLDAVKHIKFSFMRDWLGHVRGQTGKNLFAVAEYWKNDLGALENYLSKTNWTMSAFDVPLHYNLYQASNSSGNYDMRNLLNGTLVQRHPSHAVTFVDNHDTQPGEALESFVQGWFKPLAYATILTREQGYPQVFYGDYYGIPSDGVPSYRQQIDPLLKARQQYAYGRQHDYFDHWDVIGWTREGNASHPNSGLATIMSDGPGGSKWMYVGRQKAGEVWHDMTGNRSGTVTINQDGWGHFFVNGGSVSVWVKR

SEQ ID NO: 32084 - protein, 485 aa, Bacillus sp.
HHDGTNGTIMQYFEWNVPNDGQHWNRLHNNAQNLKNAGITAIWIPPAWKGTSQNDVGYGAYDLYDLGEFNQKGTVRTKYGTKAELERAIRSLKANGIQVYGDVVMNHKGGADFTERVQAVEVNPQNRNQEVSGTYQIEAWTGFNFPGRGNQHSSHKWRWYHFDGTDWDQSRQLANRIYKFRGDGKAWDWEVDTENGNYDYLMYADVDMDHPEVINELNRWGVWYANTLNLDGFRLDAVKHIKFSFMRDWLGHVRGQTGKNLFAVAEYWKNDLGALENYLSKTNWTMSAFDVPLHYNLYQASNSSGNYDMRNLLNGTLVQRHPSHAVTFVDNHDTQPGEALESFVQGWFKPLAYATILTREQGYPQVFYGDYYGIPSDGVPSYRQQIDPLLKARQQYAYGRQHDYFDHWDVIGWTREGNASHPNSGLATIMSDGPGGSKWMYVGRQKAGEVWHDMTGNRSGTVTINQDGWGHFFVNGGSVSVWVKR

SEQ ID NO: 32085 - protein, 485 aa, Bacillus sp.
HHDRTNGTIMQYFEWNVPNDGQHWNRLHNNAQNLKNAGITAIWIPPAWKGTSQNDVGYGAYDLYDLGEFNQKGTVRTKYGTKAELERAIRSLKANGIQVYGDVVMNHKGGADFTERVQAVEVNPQNRNQEVSGTYQIEAWTGFNFPGRGNQHSSFKWRWYHFDGTDWDQSRQLANRIYKFRGDGKAWDWEVDTENGNYDYLMYADVDMDHPEVINELNRWGVWYANTLNLDGFRLDAVKHIKFSFMRDWLGHVRGQTGKNLFAVAEYWKNDLGALENYLSKTNWTMSAFDVPLHYNLYQASNSSGNYDMRNLLNGTLVQRHPSHAVTFVDNHDTQPGEALESFVQGWFKPLAYATILTREQGYPQVFYGDYYGIPSDGVPSYRQQIDPLLKARQQYAYGRQHDYFDHWDVIGWTREGNASHPNSGLATIMSDGPGGSKWMYVGRQKAGEVWHDMTGNRSGTVTINQDGWGHFFVNGGSVSVWVKR

SEQ ID NO: 32086 - protein, 485 aa, Bacillus sp.
HHDGTNGTIMQYFEWNVPNDGQHWNRLHNNAQNLKNAGITAIWIPPAWKGTSQNDVGYGAYDLYDLGEFNQKGTVRTKYGTKAELERAIRSLKANGIQVYGDVVMNHKGGADFTERVQAVEVNPQNRNQEVSGTYQIEAWTGFNFPGRGNQHSSFKWRWYHFDGTDWDQSRQLANRIYKFRGDGKAWDWEVDTENGNYDYLMYADVDMDHPEVINELNRWGVWYANTLNLDGFRLDAVKHIKFSFMRDWLGHVRGQTGKNLFAVAEYWKNDLGALENYLSKTNWTMSAFDVPLHYNLYQASNSSGNYDMRNLLNGTLVQRHPSHAVTFVDNHDTQPGEALESFVQGWFKPLAYATILTREQGYPQVFYGDYYGIPSDGVPSYRQQIDPLLKARQQYAYGRQHDYFDHWDVIGWTREGNASHPNSGLATIMSDGPGGSKWMYVGRQKAGEVWHDMTGNRSDTVTINQDGWGHFFVNGGSVSVWVKR

SEQ ID NO: 32087 - protein, 485 aa, Bacillus sp.
HHDGTNGTIMQYFEWNVPNDGQHWNRLHNNAQNLKNAGITAIWIPPAWKGTSQNDVGYGAYDLYDLGEFNQKGTVRTKYGTKAELERAIRSLKANGIQVYGDVVMNHKGGADFTERVQAVEVNPQNRNQEVSGTYQIEAWTGFNFPGRGNQHSSFKWRWYHFDGTDWDQSRQLANRIYKFRGDGKAWDWEVDTENGNYDYLMYADVDMDHPEVINELNRWGVWYANTLNLDGFRLDAVKHIKFSFMRDWLGHVRGQTDKNLFAVAEYWKNDLGALENYLSKTNWTMSAFDVPLHYNLYQASNSSGNYDMRNLLNGTLVQRHPSHAVTFVDNHDTQPGEALESFVQGWFKPLAYATILTREQGYPQVFYGDYYGIPSDGVPSYRQQIDPLLKARQQYAYGRQHDYFDHWDVIGWTREGNASHPNSGLATIMSDGPGGSKWMYVGRQKAGEVWHDMTGNRSGTVTINQDGWGHFFVNGGSVSVWVKR

SEQ ID NO: 32088 - protein, 485 aa, Bacillus sp.
HHDGTNGTIMQYFEWNVPNDGQHWNRLHNNAQNLKNAGITAIWIPPAWKGTSQNDVGYGAYDLYDLGEFNQKGTVRTKYGTKAELERAIRSLKANGIQVYGDVVMNHKGGADFTEREQAVEVNPQNRNQEVSGTYQIEAWTGFNFPGRGNQHSSFKWRWYHFDGTDWDQSRQLANRIYKFRGDGKAWDWEVDTENGNYDYLMYADVDMDHPEVINELNRWGVWYANTLNLDGFRLDAVKHIKFSFMRDWLGHVRGQTGKNLFAVAEYWKNDLGALENYLSKTNWTMSAFDVPLHYNLYQASNSSGNYDMRNLLNGTLVQRHPSHAVTFVDNHDTQPGEALESFVQGWFKPLAYATILTREQGYPQVFYGDYYGIPSDGVPSYRQQIDPLLKARQQYAYGRQHDYFDHWDVIGWTREGNASHPNSGLATIMSDGPGGSKWMYVGRQKAGEVWHDMTGNRSGTVTINQDGWGHFFVNGGSVSVWVKR

SEQ ID NO: 32089 - protein, 485 aa, Bacillus sp.
HHDGTNGTIMQYFEWNVPNDGQHWNRLHNNAQNLKNAGITEIWIPPAWKGTSQNDVGYGAYDLYDLGEFNQKGTVRTKYGTKAELERAIRSLKANGIQVYGDVVMNHKGGADFTERVQAVEVNPQNRNQEVSGTYQIEAWTGFNFPGRGNQHSSFKWRWYHFDGTDWDQSRQLANRIYKFRGDGKAWDWEVDTENGNYDYLMYADVDMDHPEVINELNRWGVWYANTLNLDGFRLDAVKHIKFSFMRDWLGHVRGQTGKNLFAVAEYWKNDLGALENYLSKTNWTMSAFDVPLHYNLYQASNSSGNYDMRNLLNGTLVQRHPSHAVTFVDNHDTQPGEALESFVQGWFKPLAYATILTREQGYPQVFYGDYYGIPSDGVPSYRQQIDPLLKARQQYAYGRQHDYFDHWDVIGWTREGNASHPNSGLATIMSDGPGGSKWMYVGRQKAGEVWHDMTGNRSGTVTINQDGWGHFFVNGGSVSVWVKR

SEQ ID NO: 32090 - protein, 485 aa, Bacillus sp.
HHDGTNGTIMQYFEWNVPNDGQHWNRLHNNAQNLKNAGITAIWIPPAWKGTSQNDVGYGAYDLYDLGEFNQKGTVRTKYGTKAELERAIRSLKANGIQVYGDVVMNHKGGADFTERVQAVEVNPQNRNQEVSGTYQIEAWTGFNFPGRGNQHSSFKWRWYHFDGTDWDQSRQLANRIYKFRGDGKAWDWEVDTENGNYDYLMYADVDMDHPEVINELNRWGVWYANTLNLDGFRLDAVKHIKFSFMRDWLGHVRGQTGKNLFAVAEYWKNDLGALENYLSKTNWTMSAFDVPLHYNLYQASNSSGNYDMRNLLNGTLVQRHPSHAVTFVDNHDTQPGHALESFVQGWFKPLAYATILTREQGYPQVFYGDYYGIPSDGVPSYRQQIDPLLKARQQYAYGRQHDYFDHWDVIGWTREGNASHPNSGLATIMSDGPGGSKWMYVGRQKAGEVWHDMTGNRSGTVTINQDGWGHFFVNGGSVSVWVKR

SEQ ID NO: 32091 - protein, 485 aa, Bacillus sp.
HHDGTNGTIMQYFEWNVPNDGQHWNRLHNNAQNLKNAGITAIWIPPAWKGTSQNDVGYGAYDLYDLGEFNQKGTVRTKYGTKAELERAIRSLKANGIQVYGDVVMNHKGGADFTERVQAVEVNPQNRNQEVSGTYQIEAWTGFNFPGRGNQHSSFKWRWYHFDGTDWDQSRQLANRIYKFRGDGKAWDWEVDTENGNYDYLMYADVDMDHPEVINELNRWGVWYANTLNLDGFRLDAVKHIKFSFMRDWLGHVRGQTGKNLFAVAEYWKNDLGALENYLSKTNWTMSAFDVPLHYNLYQASNSSGNYDMRNLLNGTLVQRHPSHAVTFVDNHDTQPGEALESFVQGWFKPLAYATILTREQGYPQVFYGDYYGIPSDGVPSYRQQIDPLLKARQQYAYGRQHDYPDHWDVIGWTREGNASHPNSGLATIMSDGPGGSKWMYVGRQKAGEVWHDMTGNRSGTVTINQDGWGHFFVNGGSVSVWVKR

SEQ ID NO: 32092 - protein, 485 aa, Bacillus sp.
HHDGTNGTIMQYFEWNVPNDGQHWNRLHNNAQNLKNAGITAIWIPPAWKGTSQNDVGYGAYDLYDLGEFNQKGTVRTKYGTKAELERAIRSLKANGIQVYGDVVMNHKGGADFTERVQAVEVNPQNRNQEVSGTYQIEAWTGFNFPGRGNQHSSFKWRWYHFDGTDWDQSRQLANRIYKFRGDGKAWDWEVDTENGNYDYLMYADVDMDHPEVINELNRWGVWYANTLNLDGFRLDAVKHIKFSFMRDWLGHVRGQTGKNLFAVAEYWKNDLGALENYLSKTNWTMSAFDVPLHYNLYQASNSSGNYDMRNLLNGTLVQRHPSHAVTFVDNHDTQPGEALESFVQGWFKPLAYATILTREQGYPQVFYGDYYGIPSDGVPSYRQQIDPLLKARQQYAYGRQHDYFDHWDVIGWTRAGNASHPNSGLATIMSDGPGGSKWMYVGRQKAGEVWHDMTGNRSGTVTINQDGWGHFFVNGGSVSVWVKR

SEQ ID NO: 32093 - protein, 485 aa, Bacillus sp.
HHDGTNGTIMQYFEWNVPNDGQHWNRLHNNAQNLKNAGITAVWIPPAWKGTSQNDVGYGAYDLYDLGEFNQKGTVRTKYGTKAELERAIRSLKANGIQVYGDVVMNHKGGADFTERVQAVEVNPQNRNQEVSGTYQIEAWTGFNFPGRGNQHSSFKWRWYHFDGTDWDQSRQLANRIYKFRGDGKAWDWEVDTENGNYDYLMYADVDMDHPEVINELNRWGVWYANTLNLDGFRLDAVKHIKFSFMRDWLGHVRGQTGKNLFAVAEYWKNDLGALENYLSKTNWTMSAFDVPLHYNLYQASNSSGNYDMRNLLNGTLVQRHPSHAVTFVDNHDTQPGEALESFVQGWFKPLAYATILTREQGYPQVFYGDYYGIPSDGVPSYRQQIDPLLKARQQYAYGRQHDYFDHWDVIGWTREGNASHPNSGLATIMSDGPGGSKWMYVGRQKAGEVWHDMTGNRSGTVTINQDGWGHFFVNGGSVSVWVKR

SEQ ID NO: 32094 - protein, 485 aa, Bacillus sp.
HHDGTNGTIMQYFEWNVPNDGQHWNRLHNNAQNLKNAGITAIWIPPAWKGTSQNDVGYGAYDLYDLGEFNQKGTVRTKYGTKAELERAIRSLKANGIQVYGDVVMNHKGGADFTERVQAVEVNPQNRNQEVSGTYQIEAWTGFNFPGRGNQHSSFKWRWYHFDGTDWDQSRQLANRIYKFRGDGKAWDWEVDTENGNYDYLMYADVDMDHPEVINELNRPGVWYANTLNLDGFRLDAVKHIKFSFMRDWLGHVRGQTGKNLFAVAEYWKNDLGALENYLSKTNWTMSAFDVPLHYNLYQASNSSGNYDMRNLLNGTLVQRHPSHAVTFVDNHDTQPGEALESFVQGWFKPLAYATILTREQGYPQVFYGDYYGIPSDGVPSYRQQIDPLLKARQQYAYGRQHDYFDHWDVIGWTREGNASHPNSGLATIMSDGPGGSKWMYVGRQKAGEVWHDMTGNRSGTVTINQDGWGHFFVNGGSVSVWVKR

SEQ ID NO: 32095 - protein, 485 aa, Bacillus sp.
HHDGTNGTIMQYFEWNVPNDGQHWNRLHNNAQNLKNAGITAIWIPPAWKGTSQNDVGYGAYDLYDLGEFNQKGTVRTKYGTKAELERAIRSLKANGIQVYGDVVMNHKGGADFTERVQAVEVNPQNRNQEVSGTYQIEAWTGFNFPGRGNQHSSFKWRWYHFDGTDWDQSRQLANRIYKFRGDGKAWDWEVDTENGNYDYLMYADVDMDHPEVINELNRWGVWYANTLNLDGFRLDAVKHIKFSFMRDWLGHVRGQTGKNLFAVAEYWKNDLGAEENYLSKTNWTMSAFDVPLHYNLYQASNSSGNYDMRNLLNGTLVQRHPSHAVTFVDNHDTQPGEALESFVQGWFKPLAYATILTREQGYPQVFYGDYYGIPSDGVPSYRQQIDPLLKARQQYAYGRQHDYFDHWDVIGWTREGNASHPNSGLATIMSDGPGGSKWMYVGRQKAGEVWHDMTGNRSGTVTINQDGWGHFFVNGGSVSVWVKR

SEQ ID NO: 32096 - protein, 485 aa, Bacillus sp.
HHDGTNGTIMQYFEWNVPNDGQHWNALHNNAQNLKNAGITAIWIPPAWKGTSQNDVGYGAYDLYDLGEFNQKGTVRTKYGTKAELERAIRSLKANGIQVYGDVVMNHKGGADFTERVQAVEVNPQNRNQEVSGTYQIEAWTGFNFPGRGNQHSSFKWRWYHFDGTDWDQSRQLANRIYKFRGDGKAWDWEVDTENGNYDYLMYADVDMDHPEVINELNRWGVWYANTLNLDGFRLDAVKHIKFSFMRDWLGHVRGQTGKNLFAVAEYWKNDLGALENYLSKTNWTMSAFDVPLHYNLYQASNSSGNYDMRNLLNGTLVQRHPSHAVTFVDNHDTQPGEALESFVQGWFKPLAYATILTREQGYPQVFYGDYYGIPSDGVPSYRQQIDPLLKARQQYAYGRQHDYFDHWDVIGWTREGNASHPNSGLATIMSDGPGGSKWMYVGRQKAGEVWHDMTGNRSGTVTINQDGWGHFFVNGGSVSVWVKR

SEQ ID NO: 32097 - protein, 485 aa, Bacillus sp.
HHDGTNGTIMQYFEWNVPNDGQHWNRLHNNAQNLKNAGITAIWIPPAWKGTSQNDVGYGAYDLYDLGEFNQKGTVRTKYGTKAELERAIRSLKANGIQVYGDVVMNHKGGADFTERVQAVEVNPQNRNQEVSGTYQIEAWTGFNFPGRGNQHSSFKWRWYHFDGTDWDQSRQLANRIYKFRGDGKAWDWEVDTENGNYDYLMYADVDMDHPEVINELNRWGVWYANTLNLDGFRLDAVKHIKFSFMRDWLGHVRGQTGKNLFAVAEYWKNDLGALENYLSKTNWTMSAFDVPLHYNLYQASNSSGNYDMRNLLNGTLVDRHPSHAVTFVDNHDTQPGEALESFVQGWFKPLAYATILTREQGYPQVFYGDYYGIPSDGVPSYRQQIDPLLKARQQYAYGRQHDYFDHWDVIGWTREGNASHPNSGLATIMSDGPGGSKWMYVGRQKAGEVWHDMTGNRSGTVTINQDGWGHFFVNGGSVSVWVKR

SEQ ID NO: 32098 - protein, 485 aa, Bacillus sp.
HHDGTNGTIMQYFEWNVPNDGQHWNRLHNNAQNLKNAGITAIWIPPAWKGTSQNDVGYGAYDLYDLGEFNQKGTVRTKYGTKAELERAIRSLKANGIQVYGDVVMNHKGGADFTERVQAVEVNPQNRNQEVSGTYQIEAWTGFNFPGRGNQHSSFKWRWYHFDGTDWDQSRQLANRIYKFRGDGKAWDWEVDTENGNYDYLMYADVDMDHPEVINELNRWGVWYANTLNLDGFRLDAVKHIKFSCMRDWLGHVRGQTGKNLFAVAEYWKNDLGALENYLSKTNWTMSAFDVPLHYNLYQASNSSGNYDMRNLLNGTLVQRHPSHAVTFVDNHDTQPGEALESFVQGWFKPLAYATILTREQGYPQVFYGDYYGIPSDGVPSYRQQIDPLLKARQQYAYGRQHDYFDHWDVIGWTREGNASHPNSGLATIMSDGPGGSKWMYVGRQKAGEVWHDMTGNRSGTVTINQDGWGHFFVNGGSVSVWVKR

SEQ ID NO: 32099 - protein, 485 aa, Bacillus sp.
HHDGTNGTIMQYFEWNVPNDGQHWNRLHNNAQNLKNAGITAIWIPPAWKGTSQNDVGYGAYDLYDLGEFNQKGTVRTKYGTKAELERAIRSLKANGIQVYGDVVMNHKGGADFTERVQAVEVNPQNRNQEVSGTYQIEAWTGFNFPGRGNQHSSFKWRWYHFDGTDWDQSRQLANRIYKFRGDGKAWDWEVDTENGNYDYLMYADVDMDHPEVIVELNRWGVWYANTLNLDGFRLDAVKHIKFSFMRDWLGHVRGQTGKNLFAVAEYWKNDLGALENYLSKTNWTMSAFDVPLHYNLYQASNSSGNYDMRNLLNGTLVQRHPSHAVTFVDNHDTQPGEALESFVQGWFKPLAYATILTREQGYPQVFYGDYYGIPSDGVPSYRQQIDPLLKARQQYAYGRQHDYFDHWDVIGWTREGNASHPNSGLATIMSDGPGGSKWMYVGRQKAGEVWHDMTGNRSGTVTINQDGWGHFFVNGGSVSVWVKR

SEQ ID NO: 32100 - protein, 485 aa, Bacillus sp.
HHDGTNGTIMQYFEWNVPNDGQHWNRLHNNAQNLKNAGITAIWIPPAWKGTSQNDVGYGAYDLYDLGEFNQKGTVRTKYGTKAELERAIRSLKANGIQVYGDVVMNHKGGADFTERVQAVEVNPQNRNQEVSGTYQIEAWTGFNFPGRGNQHSSFKWRWYHFDGTDWDQSRQLANRIYKFRGDGKAWDWEVDTENGNYDYLMYADVDMDHPEVINELNRWGVWYANTLNLDGFRLDAVKHIKFSFMRDWLGHVRGQTGKNLFAVAEYWKNDLGALENYLSKTNWTMSAFDVPLHYNLYQASNSSGNYDMRNLLNGTLVQRHPSHAVTFVDNHDTQPGEALESFVQGWFKPLAYATILTREQGYPQVFYGDYYGIPSDGVPSYRQQIDPLLKARQQYAYGRQHDYFDHWDVIGWTREGNASHPNSGLATIMSDGPGGSKWMYVGRQKRGEVWHDMTGNRSGTVTINQDGWGHFFVNGGSVSVWVKR

SEQ ID NO: 32101 - protein, 485 aa, Bacillus sp.
HHDGTNGTIMQYFEWNVPNDGQHWNRLHNNAQNLKNAGITAIWIPPAWKGTSQNDVGYGAYDLYDLGEFNQKGTVRTKYGTKAELERAIRSLKANGIQVYGDVVMNHKGGADFTERVQAVEVNPQNRNQEVSGTYQIEAWTGFNFPGRGNQHSSFKWRWYHFDGTDWDQSRQLANRIYKFRGDGKAWDWEVDTENGNYDYLMYADVDMDHPEVINELNRWGVWYANTLNLDGFRLDAVKHIKFSFMRDWLGHVRGQTGKNLFAVAEYWKNDLGALENYLSKTNWTMSAFDVRLHYNLYQASNSSGNYDMRNLLNGTLVQRHPSHAVTFVDNHDTQPGEALESFVQGWFKPLAYATILTREQGYPQVFYGDYYGIPSDGVPSYRQQIDPLLKARQQYAYGRQHDYFDHWDVIGWTREGNASHPNSGLATIMSDGPGGSKWMYVGRQKAGEVWHDMTGNRSGTVTINQDGWGHFFVNGGSVSVWVKR

SEQ ID NO: 32102 - protein, 485 aa, Bacillus sp.
HHDGTNGTIMQYFEWNVPNDGQHWNRLHNNAQNLKNAGITAIWIPPAWKGTSQNDVGYGAYDLYDLGEFNQKGTVRTKYGTKAELERAIRSLKANGIQVYGDVVMNHKGGADFTERVQAVEVNPQNRNQEVSGTYQIEAWTGFNFPGRGNQHSSFKWRWYHFDGTDWDQSRQLANRIYKFRGDGKAWDWEVDTENGNYDYLMYADVDMDHPEVINELNRWGVWYANTLNLDGFRLDAVKHIPFSFMRDWLGHVRGQTGKNLFAVAEYWKNDLGALENYLSKTNWTMSAFDVPLHYNLYQASNSSGNYDMRNLLNGTLVQRHPSHAVTFVDNHDTQPGEALESFVQGWFKPLAYATILTREQGYPQVFYGDYYGIPSDGVPSYRQQIDPLLKARQQYAYGRQHDYFDHWDVIGWTREGNASHPNSGLATIMSDGPGGSKWMYVGRQKAGEVWHDMTGNRSGTVTINQDGWGHFFVNGGSVSVWVKR

SEQ ID NO: 32103 - protein, 483 aa, Bacillus sp. (in: firmicutes)
HHDGTNGTIMQYFEWNVPNDGQHWNRLHNNAQNLKNAGITAIWIPPAWKGTSQNDVGYGAYDLYDLGEFNQKGTVRTKYGTKAELERAIRSLKANGIQVYGDVVMNHKGGADFTERVQAVEVNPQNRNQEVSGTYQIEAWTGFNFPGRGNQHSSFKWRWYHFDGTDWDQSRQLANRIYKFRGKAWDWEVDTENGNYDYLMYADVDMDHPEVINELNRWGVWYANTLNLDGFRLDAVKHIKFSFMRDWLGHVRGQTGKNLFAIGEFWKNDLGALENYLSKTNWTMSAFDVPLHYNLYQASNSSGNYDMRNLLNGTLVQRHPSHAVTFVDNHDTQPGEALESFVQGWFKPLAYATILTREQGYPCVFYGDYYGIPSDGVPSYRQQIDPLLKARQQYAYGRQHDYFDHWDVIGWTREGNASHPNSGLATIMSDGPGGSKWMYVGRQKAGEVWHDMTGNRSGTVTINQDGWGHFFVNGGSVSVWVKR

SEQ ID NO: 32104 - protein, 483 aa, Bacillus sp. (in: firmicutes)
HHDGTNGTIMQYFEWNVPNDGQHWNRLHNNAQNLKNAGITAIWIPPAWKGTSQNDVGYGAYDLYDLGEFNQKGTVRTKYGTKAELERAIRSLKANGIQVYGDVVMNHKGGADFTERVQAVEVNPQNRNQEVSGTHQIEAWTGFNFPGRGNQHSSFKWRWYHFDGTDWDQSRQLANRIYKFRGKAWDWEVDTENGNYDYLMYADVDMDHPEVINELNRWGVWYANTLNLDGFRLDAVKHIKFSFMRDWLGHVRGQTGKNLFAVAEYWKNDLGALENYLSKTNWTMSAFDVPLHYNLYQASNSSGNYDMRNLLNGTLVQRHPSHAVTFVDNHDTQPGEALESFVQGWFKPLAYATILTREQGYPQVFYGDYYGIPSDGVPSYRQQIDPLLKARQQYAYGRQHDYFDHWDVIGWTREGNASHPNSGLATIMSDGPGGSKWMYVGRQKAGEVWHDMTGNRSGTVTINQDGWGHFFVNGGSVSVWVKR

SEQ ID NO: 32105 - protein, 485 aa, Bacillus sp.
HHDGTNGTIMQYFEWNVPNDGQHWNRLHNNAQNLKNAGITAIWIPPAWKGTSQNDVGYGAYDLYDLGEFNQKGTVRTKYGTKAELERAIRSLKANGIQVYGDVVMNHKGGADFTERVQAVEVNPQNRNQEVSGTYQIEAWTGFNFPGRGNQHSSFKWRWYHFDGTDWDQSRQLANRIYKFRGDGKAWDWEVDTENGNYDYLMYADVDMEHPEVINELNRWGVWYANTLNLDGFRLDAVKHIKFSFMRDWLGHVRGQTGKNLFAVAEYWKNDLGALENYLSKTNWTMSAFDVPLHYNLYQASNSSGNYDMRNLLNGTLVQRHPSHAVTFVDNHDTQPGEALESFVQGWFKPLAYATILTREQGYPQVFYGDYYGIPSDGVPSYRQQIDPLLKARQQYAYGRQHDYFDHWDVIGWTREGNASHPNSGLATIMSDGPGGSKWMYVGRQKAGEVWHDMTGNRSGTVTINQDGWGHFFVNGGSVSVWVKR

SEQ ID NO: 32106 - protein, 485 aa, Bacillus sp.
HHDGTNGTIMQYFEWNVPNDGQHWNRLHNNAQNLKNAGITAIWIPPAWKGTSQNDVGYGAYDLYDLGEFNQKGTVRTKYGTKAELERAIRSLKANGIQVYGDVVMNHKGGADFTERVQAVEVNPQNRNQEVSGTYQIEAWTGFNFPGRGNQHSSFKWRWYHFDGTDWDQSRQLANRIYKFRGDGKAWDWEVDTENGNYDYLMYADVDMDHPEVINELNRWGVWYANTLNLDGFRLDAVKHIKFSFMRDWFGHVRGQTGKNLFAVAEYWKNDLGALENYLSKTNWTMSAFDVPLHYNLYQASNSSGNYDMRNLLNGTLVQRHPSHAVTFVDNHDTQPGEALESFVQGWFKPLAYATILTREQGYPQVFYGDYYGIPSDGVPSYRQQIDPLLKARQQYAYGRQHDYFDHWDVIGWTREGNASHPNSGLATIMSDGPGGSKWMYVGRQKAGEVWHDMTGNRSGTVTINQDGWGHFFVNGGSVSVWVKR

SEQ ID NO: 32107 - protein, 485 aa, Bacillus sp.
HHDGTNGTIMQYFEWNVPNDGQHWNRLHNNAQNLKNAGITAIWIPPAWKGTSQNDVGYGAYDLYDLGEFNQKGTVRTKYGTKAELERAIRSLKANGIQVYGDVVMNHKGGADFTERVQAVEVNPQNRNQEVSGTYQIEAWTGFNFPGRGNQHSSFKWRWYHFDGTDWDQSRELANRIYKFRGDGKAWDWEVDTENGNYDYLMYADVDMDHPEVINELNRWGVWYANTLNLDGFRLDAVKHIKFSFMRDWLGHVRGQTGKNLFAVAEYWKNDLGALENYLSKTNWTMSAFDVPLHYNLYQASNSSGNYDMRNLLNGTLVQRHPSHAVTFVDNHDTQPGEALESFVQGWFKPLAYATILTREQGYPQVFYGDYYGIPSDGVPSYRQQIDPLLKARQQYAYGRQHDYFDHWDVIGWTREGNASHPNSGLATIMSDGPGGSKWMYVGRQKAGEVWHDMTGNRSGTVTINQDGWGHFFVNGGSVSVWVKR

SEQ ID NO: 32108 - protein, 485 aa, Bacillus sp.
HHDGTNGTIMQYFEWNVPNDGQHWNRLHNNAQNLKNAGITAIWIPPAWKGTSQNDVGYGAYDLYDLGEFNQKGTVRTKYGTKAELERAIRSLKANGIQVYGDVVMNHKGGADFTERVQAVEVNPQNRNQEVSGTYQIEAWTGFNFPGRGNQHSSFKWRWYHFDGTDWDQSRQLANRIYKFRGDGKAWDWEVDTENGNYDYLMYADVDMDHPEVINELNRWGVWYANTLNLDGFRLDAVKHIKFSFMRDWLGHVRGQTGKNLFAVAEYWKNDLGALENYLSKTNWTMSAFDVPLHYNLYQASNSSSNYDMRNLLNGTLVQRHPSHAVTFVDNHDTQPGEALESFVQGWFKPLAYATILTREQGYPQVFYGDYYGIPSDGVPSYRQQIDPLLKARQQYAYGRQHDYFDHWDVIGWTREGNASHPNSGLATIMSDGPGGSKWMYVGRQKAGEVWHDMTGNRSGTVTINQDGWGHFFVNGGSVSVWVKR

SEQ ID NO: 32109 - protein, 485 aa, Bacillus sp.
HHDGTNGTIMQYFEWNVPNDGQHWNRLHNNAQNLKNAGITAIWIPPAWKGTSQNDVGYGAYDLYDLGEFNQKGTVRTKYGTKAELERAIRSLKANGIQVYGDVVMNHKGGADFTERVQAVEVEPQNRNQEVSGTYQIEAWTGFNFPGRGNQHSSFKWRWYHFDGTDWDQSRQLANRIYKFRGDGKAWDWEVDTENGNYDYLMYADVDMDHPEVINELNRWGVWYANTLNLDGFRLDAVKHIKFSFMRDWLGHVRGQTGKNLFAVAEYWKNDLGALENYLSKTNWTMSAFDVPLHYNLYQASNSSGNYDMRNLLNGTLVQRHPSHAVTFVDNHDTQPGEALESFVQGWFKPLAYATILTREQGYPQVFYGDYYGIPSDGVPSYRQQIDPLLKARQQYAYGRQHDYFDHWDVIGWTREGNASHPNSGLATIMSDGPGGSKWMYVGRQKAGEVWHDMTGNRSGTVTINQDGWGHFFVNGGSVSVWVKR

SEQ ID NO: 32110 - protein, 485 aa, Bacillus sp.
HHDGTNGTIMQYFEWNVPNDGQHWNRLHNNAQNLKNAGITAIWIPPAWKGTSQNDVGYGAYDLYDLGEFNQKGTVRTKYGTKAELERAIRSLKANGIQVYGDVVMNHKGGADFTERVQAVEVNPQNRNQEVSGTYQIEAWTGFNFPGRGNQHSSFKWRWYHFDGTDWDQSRQLANRIYKFRGDGKAWDWEVDTENGNYDYLMYADVDMDHPEVINELNRWGVWYANTLNLDGFRLDAVKHIKFSFMRDWLGHLRGQTGKNLFAVAEYWKNDLGALENYLSKTNWTMSAFDVPLHYNLYQASNSSGNYDMRNLLNGTLVQRHPSHAVTFVDNHDTQPGEALESFVQGWFKPLAYATILTREQGYPQVFYGDYYGIPSDGVPSYRQQIDPLLKARQQYAYGRQHDYFDHWDVIGWTREGNASHPNSGLATIMSDGPGGSKWMYVGRQKAGEVWHDMTGNRSGTVTINQDGWGHFFVNGGSVSVWVKR

SEQ ID NO: 32111 - protein, 485 aa, Bacillus sp.
HHDGTNGTIMQYFEWNVPNDGQHWNRLHNNAQNLKNAGITAIWIPPAWKGTSQNDVGYGAYDLYDLGEFNQKGTVRTKYGTKAELERAIRSLKANGIQVYGDVVMNHKGGADFTERVQAVEVNPQNRNQEVSGTYQGEAWTGFNFPGRGNQHSSFKWRWYHFDGTDWDQSRQLANRIYKFRGDGKAWDWEVDTENGNYDYLMYADVDMDHPEVINELNRWGVWYANTLNLDGFRLDAVKHIKFSFMRDWLGHVRGQTGKNLFAVAEYWKNDLGALENYLSKTNWTMSAFDVPLHYNLYQASNSSGNYDMRNLLNGTLVQRHPSHAVTFVDNHDTQPGEALESFVQGWFKPLAYATILTREQGYPQVFYGDYYGIPSDGVPSYRQQIDPLLKARQQYAYGRQHDYFDHWDVIGWTREGNASHPNSGLATIMSDGPGGSKWMYVGRQKAGEVWHDMTGNRSGTVTINQDGWGHFFVNGGSVSVWVKR

SEQ ID NO: 32112 - protein, 485 aa, Bacillus sp.
HHDGTNGTIMQYFEWNVPNDGQHWNRLHNNAQNLKNAGITAIWIPPAWKGTSQNDVGYGAYDLYDLGEFNQKGTVRTKYGTKAELERAIRSLKANGIQVYGDVVMNHKGGADFTERVQAVEVNPQNRNQEVSGTYQIEAWTGFNFPGRGNQHSSFKWRWYHFDGTDWDQSRQLANRIYKFRGDGKAWDWEVDTENGNYDYLMSADVDMDHPEVINELNRWGVWYANTLNLDGFRLDAVKHIKFSFMRDWLGHVRGQTGKNLFAVAEYWKNDLGALENYLSKTNWTMSAFDVPLHYNLYQASNSSGNYDMRNLLNGTLVQRHPSHAVTFVDNHDTQPGEALESFVQGWFKPLAYATILTREQGYPQVFYGDYYGIPSDGVPSYRQQIDPLLKARQQYAYGRQHDYFDHWDVIGWTREGNASHPNSGLATIMSDGPGGSKWMYVGRQKAGEVWHDMTGNRSGTVTINQDGWGHFFVNGGSVSVWVKR

SEQ ID NO: 32113 - protein, 485 aa, Bacillus sp.
HHDGTNGTIMQYFEWNVPNDGQHWNRLHNNAQNLKNAGITAIWIPPAWKGTSQNDVGYGAYDLRDLGEFNQKGTVRTKYGTKAELERAIRSLKANGIQVYGDVVMNHKGGADFTERVQAVEVNPQNRNQEVSGTYQIEAWTGFNFPGRGNQHSSFKWRWYHFDGTDWDQSRQLANRIYKFRGDGKAWDWEVDTENGNYDYLMYADVDMDHPEVINELNRWGVWYANTLNLDGFRLDAVKHIKFSFMRDWLGHVRGQTGKNLFAVAEYWKNDLGALENYLSKTNWTMSAFDVPLHYNLYQASNSSGNYDMRNLLNGTLVQRHPSHAVTFVDNHDTQPGEALESFVQGWFKPLAYATILTREQGYPQVFYGDYYGIPSDGVPSYRQQIDPLLKARQQYAYGRQHDYFDHWDVIGWTREGNASHPNSGLATIMSDGPGGSKWMYVGRQKAGEVWHDMTGNRSGTVTINQDGWGHFFVNGGSVSVWVKR

SEQ ID NO: 32114 - protein, 485 aa, Bacillus sp.
HHDGTNGTIMQYFEWNVPNDGQHWNRLHNNAQNLKNAGITAIWIPPAWKGTSQNDVGYGAYDLYDLGEFNQKGTVRTKYGTKAELERAIRSLKANGIQVYGDVVMNHKGGADFTERVQAVEVNPQNRNQEVSGTYQIEAWTGFNFPGRGNQHSSFKWRWYHFDGTDWDQSRQLANRIYKFRGDGKAWDWEVDTENGNYDYLMYADVDMDHPEVINELNRWGVWYANTLNLDGFRLDAVKHIKFSFMRDWLGHVRGQTGKNLFAVAEYWKNDLGALENYLSKTNWTMSAFDVPLHYNLYQASNSSGNYDMRNLMNGTLVQRHPSHAVTFVDNHDTQPGEALESFVQGWFKPLAYATILTREQGYPQVFYGDYYGIPSDGVPSYRQQIDPLLKARQQYAYGRQHDYFDHWDVIGWTREGNASHPNSGLATIMSDGPGGSKWMYVGRQKAGEVWHDMTGNRSGTVTINQDGWGHFFVNGGSVSVWVKR

SEQ ID NO: 32115 - protein, 485 aa, Bacillus sp.
HHDGTNGTIMQYFEWNVPNDGQHWNRLHNNAQNLKNAGITAIWIPPAWKGTSQNDVGYGAYDLYDLGEFNQKGTVRTKYGTKAELERAIRSLKANGIQVYGDVVMNHKGGADFTERVQAVEVNPQNRNQEVSGTYQIEAWTGFNFPGRGNQHSSFKWRWYHFDGTDWDQSRQLANRIYKFRGDGKAWDWEVDTENGNYDYLMYADVDMDHPEVINELNRWGVWYANTLNLDGFRLDAVKHIKFSFMRDWLGHVRGQTGKNLFAVAEYWKNDLGALENYLSKTNWTMSAFDVPLHYNLYQASNSSGNYDMRNLLNGTLVQRHPSHAVTFVDNHDTQPGEALESFVQGWFKPLAYATILTREQGYPQVFYGDYYGIPSDGVPSYRQQIDPLLKARQQYAYGRQYDYFDHWDVIGWTREGNASHPNSGLATIMSDGPGGSKWMYVGRQKAGEVWHDMTGNRSGTVTINQDGWGHFFVNGGSVSVWVKR

SEQ ID NO: 32116 - protein, 485 aa, Bacillus sp.
HHDGTNGTIMQYFEWNVPNDGQHWNRLHNNAQNLKNAGITAIWIPPAWKGTSQNDVGYGAYDLYDLGEFNQKGTVRTKYGTKAELERAIRSLKANGIQVYGDVVMNHKGGADFTERVQAVEVNPQNRNQEVSGTYQIEAWTGFNFPGRGNQHSSFKWRWYHFDGTDWDQSRQLANRIYKFRGDGKAWDWEVDTENGNYDYLMYADVDMDHPEVINELNRWGVWYANTLNLDGFRLDAVKHIKFSFMRDWLGHVRGQTGKNLFAVAEYWKNDLGALENYLSKTNWTMSAFDVPLHYNLYQASNSSGNYDMRNLLNGKLVQRHPSHAVTFVDNHDTQPGEALESFVQGWFKPLAYATILTREQGYPQVFYGDYYGIPSDGVPSYRQQIDPLLKARQQYAYGRQHDYFDHWDVIGWTREGNASHPNSGLATIMSDGPGGSKWMYVGRQKAGEVWHDMTGNRSGTVTINQDGWGHFFVNGGSVSVWVKR

SEQ ID NO: 32117 - protein, 485 aa, Bacillus sp.
HHDGTNGTIMQYFEWNVPNDGQHWNRLHNNAQNLKNAGITAIWIPPAWKGTSQNDVGYGAYDLYDLGEFNQKGTVRTKYGTKAELERAIRSLKANGIQVYGDVVMNHKGGADFTERVQAVEVNPQNRNQEVSGTYQIEAWTGFNFPGRGNQHSSFKWRWYHFDGTDWDQSRQLANRIYKFRGDGKAWDWEVDTENGNYDYLMYADVDMDHPEVINELNRWGVWYANTLNLDGFRLDAVKHIKFSFMRDWLGTVRGQTGKNLFAVAEYWKNDLGALENYLSKTNWTMSAFDVPLHYNLYQASNSSGNYDMRNLLNGTLVQRHPSHAVTFVDNHDTQPGEALESFVQGWFKPLAYATILTREQGYPQVFYGDYYGIPSDGVPSYRQQIDPLLKARQQYAYGRQHDYFDHWDVIGWTREGNASHPNSGLATIMSDGPGGSKWMYVGRQKAGEVWHDMTGNRSGTVTINQDGWGHFFVNGGSVSVWVKR

SEQ ID NO: 32118 - protein, 485 aa, Bacillus sp.
HHDGTNGTIMQYFEWNVPNDGQHWNRLHNNAQNLKNAGITAIWIPPAWKGTSQNDVGYGAYDLYDLGEFNQKGTVRTKYGTKAELERAIRSLKANGIQVYGDVVMNHKGGADFTERVQAVEVNPQNRNQEVSSTYQIEAWTGFNFPGRGNQHSSFKWRWYHFDGTDWDQSRQLANRIYKFRGDGKAWDWEVDTENGNYDYLMYADVDMDHPEVINELNRWGVWYANTLNLDGFRLDAVKHIKFSFMRDWLGHVRGQTGKNLFAVAEYWKNDLGALENYLSKTNWTMSAFDVPLHYNLYQASNSSGNYDMRNLLNGTLVQRHPSHAVTFVDNHDTQPGEALESFVQGWFKPLAYATILTREQGYPQVFYGDYYGIPSDGVPSYRQQIDPLLKARQQYAYGRQHDYFDHWDVIGWTREGNASHPNSGLATIMSDGPGGSKWMYVGRQKAGEVWHDMTGNRSGTVTINQDGWGHFFVNGGSVSVWVKR

SEQ ID NO: 32119 - protein, 485 aa, Bacillus sp.
HHDGTNGTIMQYFEWNVPNDGQHWNRLHNNAQNLKNAGITAIWIPPAWKGTSQNDVGYGAYDLYDLGEFNQKGTVRTKYGTKAELERAIRSLKANGIQVYGDVVMNHKGGADFTERVQAVEVNPQNRNQEVSGTYQIEAWTGFNFPGRGNQHSSFKWRWYHFDGTDWDQSRQLANRIYKFRGDGKAWDWEVDTENGNYDYLMYADMDMDHPEVINELNRWGVWYANTLNLDGFRLDAVKHIKFSFMRDWLGHVRGQTGKNLFAVAEYWKNDLGALENYLSKTNWTMSAFDVPLHYNLYQASNSSGNYDMRNLLNGTLVQRHPSHAVTFVDNHDTQPGEALESFVQGWFKPLAYATILTREQGYPQVFYGDYYGIPSDGVPSYRQQIDPLLKARQQYAYGRQHDYFDHWDVIGWTREGNASHPNSGLATIMSDGPGGSKWMYVGRQKAGEVWHDMTGNRSGTVTINQDGWGHFFVNGGSVSVWVKR

SEQ ID NO: 32120 - protein, 485 aa, Bacillus sp.
HHDGTNGTIMQYFEWNVPNDGQHWNRLHNNAQNLKNAGITAIWIPPAWKGTSQNDVGYGAYDLYDLGEFNQKGTVRTKYGTKAELERAIRSLKANGIQVYGDAVMNHKGGADFTERVQAVEVNPQNRNQEVSGTYQIEAWTGFNFPGRGNQHSSFKWRWYHFDGTDWDQSRQLANRIYKFRGDGKAWDWEVDTENGNYDYLMYADVDMDHPEVINELNRWGVWYANTLNLDGFRLDAVKHIKFSFMRDWLGHVRGQTGKNLFAVAEYWKNDLGALENYLSKTNWTMSAFDVPLHYNLYQASNSSGNYDMRNLLNGTLVQRHPSHAVTFVDNHDTQPGEALESFVQGWFKPLAYATILTREQGYPQVFYGDYYGIPSDGVPSYRQQIDPLLKARQQYAYGRQHDYFDHWDVIGWTREGNASHPNSGLATIMSDGPGGSKWMYVGRQKAGEVWHDMTGNRSGTVTINQDGWGHFFVNGGSVSVWVKR

SEQ ID NO: 32121 - protein, 485 aa, Bacillus sp.
HHDGTNGTIMQYFEWNVPNDGQHWNRLHNNAQNLKNAGITAIWIPPAWKGTSQNDVGYGAYDLYDLGEFNQKGTVRTKYGTKAELERAIRSLKANGIQVYGDVVMNHKGGADFTERVQAVEVNPQNYNQEVSGTYQIEAWTGFNFPGRGNQHSSFKWRWYHFDGTDWDQSRQLANRIYKFRGDGKAWDWEVDTENGNYDYLMYADVDMDHPEVINELNRWGVWYANTLNLDGFRLDAVKHIKFSFMRDWLGHVRGQTGKNLFAVAEYWKNDLGALENYLSKTNWTMSAFDVPLHYNLYQASNSSGNYDMRNLLNGTLVQRHPSHAVTFVDNHDTQPGEALESFVQGWFKPLAYATILTREQGYPQVFYGDYYGIPSDGVPSYRQQIDPLLKARQQYAYGRQHDYFDHWDVIGWTREGNASHPNSGLATIMSDGPGGSKWMYVGRQKAGEVWHDMTGNRSGTVTINQDGWGHFFVNGGSVSVWVKR

SEQ ID NO: 32122 - protein, 485 aa, Bacillus sp.
HHDGTNGTIMQYFEWNVPNDGQHWNRLHNNAQNLKNAGITAIWIPPAWKGTSQNDVGYGAYDLYDLGEFNQKGTVRTKYGTKAELERAIRSLKANGIQVYGDVVMNHKGGADFTERVQAVEVNPQNRNQEVSGTYQIEAWTGFNFPGRGNQHSSFKWRWYHFDGTDWDQSRQLANRIYKFRGDGKAWDWEVDTENGNYDYLMYADVDMDHPEVINELNRWGVWYANTLNLDGFRLDAVKHIKFSFMRDWLGHVRGQTGKNLFAVAEYWKNDLGALENYLSKTNWTMSAFDVPLHYNWYQASNSSGNYDMRNLLNGTLVQRHPSHAVTFVDNHDTQPGEALESFVQGWFKPLAYATILTREQGYPQVFYGDYYGIPSDGVPSYRQQIDPLLKARQQYAYGRQHDYFDHWDVIGWTREGNASHPNSGLATIMSDGPGGSKWMYVGRQKAGEVWHDMTGNRSGTVTINQDGWGHFFVNGGSVSVWVKR

SEQ ID NO: 32123 - protein, 485 aa, Bacillus sp.
HHDGTNGTIMQYFEWNVPNDGQHWNRLHNNAQNLKNAGITAIWIPPAWKGTSQNDVGYGAYDLYDLGEFNQKGTVRTKYGTKAELERAIRSLKANGIQVYGDVVMNHKGGADFTERVQAVEVNPQNRNQEVSGTYQIEAWTGFNFPGRGNQHSSFKWRWYHFDGTDWDQSRQLANRIYKFRGDGKAWDWEVDTENGNYDYLMYADVDMDHPEVINELNRWGVWYANTLNLDGFRLDAVKHIKFSFMRDWLGHVRGQTGKNLFAVAEYWKNDLGALENYLSKTNWTMSAFDVPLHYNLYQASNSSGNYDMRNLLNGTLVQRHPSHAVTFVDNHDTQPGEALESFVQGWFKPLAYATILTREDGYPQVFYGDYYGIPSDGVPSYRQQIDPLLKARQQYAYGRQHDYFDHWDVIGWTREGNASHPNSGLATIMSDGPGGSKWMYVGRQKAGEVWHDMTGNRSGTVTINQDGWGHFFVNGGSVSVWVKR

SEQ ID NO: 32124 - protein, 485 aa, Bacillus sp.
HHDGTNGTIMQYFEWNVPNDGQHWNRLHNNAQNLKNAGITAIWIPPAWKGTSQNDVGYGAYDLYDLGEFNQKGTVRTKYGTKAELERAIRSLKANGIQVYGDVVMNHKGGADFTERVQAVEVNPQNRNQEVSGTYQIEAWTGFNFPGRGNQHSSFKWRWYHFDGTDWDQSRQLANRIYKFRGDGKAWDWEVDTENGNYDYLMYADVDMDHPEVINELNRWGVWYANTLNLDGFRLDAVKHIKFSFMRDWLGHVRGQTGKNLFAVAEYWKNDLGALENYLSKTNWTMSAFDVPLHYNLYQASNSSGNYDMRNLLNGTLVQRHPSHAVTFVDNHDTQPGEALESFVQGWFKPLAYATILTREQGYPQVFYGDYYGIPSDGVPSYRQQIDPLLKARQQYAYGRQHDYFDHWDVIGWTREGNASHPNSGLATIMSDGPGGSKWMYVGRQKAGEVWHDMTGNRSGTVTINQDGWGHFFVHGGSVSVWVKR

SEQ ID NO: 32125 - protein, 485 aa, Bacillus sp.
HHDGTNGTIMQYFEWNVPNDGQHWNRLHNNAQNLKNAGITAIWIPPAWKGTLQNDVGYGAYDLYDLGEFNQKGTVRTKYGTKAELERAIRSLKANGIQVYGDVVMNHKGGADFTERVQAVEVNPQNRNQEVSGTYQIEAWTGFNFPGRGNQHSSFKWRWYHFDGTDWDQSRQLANRIYKFRGDGKAWDWEVDTENGNYDYLMYADVDMDHPEVINELNRWGVWYANTLNLDGFRLDAVKHIKFSFMRDWLGHVRGQTGKNLFAVAEYWKNDLGALENYLSKTNWTMSAFDVPLHYNLYQASNSSGNYDMRNLLNGTLVQRHPSHAVTFVDNHDTQPGEALESFVQGWFKPLAYATILTREQGYPQVFYGDYYGIPSDGVPSYRQQIDPLLKARQQYAYGRQHDYFDHWDVIGWTREGNASHPNSGLATIMSDGPGGSKWMYVGRQKAGEVWHDMTGNRSGTVTINQDGWGHFFVNGGSVSVWVKR

SEQ ID NO: 32126 - protein, 485 aa, Bacillus sp.
HHDGTNGTIMQYFEWNVPNDGQHWNRLHNNAQNLKNAGITAIWIPPAWKGTSQNDVGYGAYDLYDLGEFNQKGTVRTKYGTKAELERAIRSLKANGIQVYGDVVMNHKGGADFTERVQAVEVNPQNRNQEVSGTYQIEAWTGFNFPGRGNQHSSFKWRWYHFDGTDWDQSRQLANRIYKFRGDGKAWDWEVDTENGNYDYLMYADVDMDHPEVINELNRWGVWYANTLNLDGFRLDAVKHIKFSFMRDWLGHVRGQTGKNLFAVAEYWKNDLGALENYLSKTNWTMSAFDVPLHYNLYQASNSSGNYDMRNLLNGTLVQRHPSHAVTFVDNHDTQPGEALESFVQGWFKPLAYATILTREQGYPQVFYGDYYGIPSDGVPSYRQQIDPLLKARQQYSYGRQHDYFDHWDVIGWTREGNASHPNSGLATIMSDGPGGSKWMYVGRQKAGEVWHDMTGNRSGTVTINQDGWGHFFVNGGSVSVWVKR

SEQ ID NO: 32127 - protein, 485 aa, Bacillus sp.
HHDGTNGTIMQYFEWNVPNDGQHWNRLHNNAQNLKNAGITAIWIPPAWKGTSQNDVGYGAYDLYDLGEFNQKGTVRTKYGTKAELERAIRSLKANGIQVYGDVVMNHKGGADFTERVQAVEVNPQNRNQEVSLTYQIEAWTGFNFPGRGNQHSSFKWRWYHFDGTDWDQSRQLANRIYKFRGDGKAWDWEVDTENGNYDYLMYADVDMDHPEVINELNRWGVWYANTLNLDGFRLDAVKHIKFSFMRDWLGHVRGQTGKNLFAVAEYWKNDLGALENYLSKTNWTMSAFDVPLHYNLYQASNSSGNYDMRNLLNGTLVQRHPSHAVTFVDNHDTQPGEALESFVQGWFKPLAYATILTREQGYPQVFYGDYYGIPSDGVPSYRQQIDPLLKARQQYAYGRQHDYFDHWDVIGWTREGNASHPNSGLATIMSDGPGGSKWMYVGRQKAGEVWHDMTGNRSGTVTINQDGWGHFFVNGGSVSVWVKR

SEQ ID NO: 32128 - protein, 485 aa, Bacillus sp.
HHDGTNGTIMQYFEWNVPNDGQHWNRLHNNAQNLKNAGITAIWIPPAWKGTSQNDVGYGAYDLYDLGEFNQKGTVRTKYGTKAELERAIRSLKANGIQVYGDVVMNHKGGADFTERVQAVEVNPQNRNQEVSGTYQIEAWTGFNFPGRGNQHSSFKWRWYHFDGTDWDQSRQLANRIYKFRGDGKAWDWEVDTENGNYDYLMYADVDMDHPEVINELNRWGVWYANTLNLDGFRLDAVKHIKFSFMRDWLGHVRGQTGKNLFAVAEYWKNDLGALENYLSKTNWTMSAFDVPLHYNLYQASNSSGNYDMRNLLNGTLVQRHPSHAVTFVDNHDTQPGEALESFVQGWFKPLAYATILTREQGYPQVFYGDYYGIPSDGVPSYRQQIDPLLKARQQYAYGRQHDYFDHWDVIGWTREGNASHPNSGLATIMSDGPGGSKEMYVGRQKAGEVWHDMTGNRSGTVTINQDGWGHFFVNGGSVSVWVKR

SEQ ID NO: 32129 - protein, 485 aa, Bacillus sp.
HHDGTNGTIMQYFEWNVPNDGQHWNRLHNNAQNLKNAGITAIWIPPAWKGTSQNDVGYGAYDLYDLGEFNQKLTVRTKYGTKAELERAIRSLKANGIQVYGDVVMNHKGGADFTERVQAVEVNPQNRNQEVSGTYQIEAWTGFNFPGRGNQHSSFKWRWYHFDGTDWDQSRQLANRIYKFRGDGKAWDWEVDTENGNYDYLMYADVDMDHPEVINELNRWGVWYANTLNLDGFRLDAVKHIKFSFMRDWLGHVRGQTGKNLFAVAEYWKNDLGALENYLSKTNWTMSAFDVPLHYNLYQASNSSGNYDMRNLLNGTLVQRHPSHAVTFVDNHDTQPGEALESFVQGWFKPLAYATILTREQGYPQVFYGDYYGIPSDGVPSYRQQIDPLLKARQQYAYGRQHDYFDHWDVIGWTREGNASHPNSGLATIMSDGPGGSKWMYVGRQKAGEVWHDMTGNRSGTVTINQDGWGHFFVNGGSVSVWVKR

SEQ ID NO: 32130 - protein, 485 aa, Bacillus sp.
HHDGTNGTIMQYFEWNVPNDGQHWNRLHNNAQNLKNAGITAIWIPPAWKGTSQNDVGYGAYDLYDLGEFNQKGTVRTKYGTKAELERAIRSLKANGIQVYGDVVMNHKGGADFTERVQAVEVNPQNRNQEVSGTYQIEAWTGFNFPGRGNQHSSFKWRWYHFDGTDWDQSRQLANRIYKFRGDGKAWDWEVDTENGNYDYLMYADVDMDHPEVINELNRWGVWYANTLNLDGFRLDAVKHIKFSFMRDWLGHVRGQTGKNLFAVAEYWKNDLGALENYLSKTNWTMSAFDVPLHYNLYQASNSSGNYDMRNLLNGTLVQRHPSHAVTFVDNHDTQPGEALESFVQGWFKPLAYATILTREQGYPQVFYGDYYGIPSDGVPSYRQQIDPLLKARQQYAYGRQHDYFDHWDVIGWTREGNASHPNSGLATIMSDGPIGSKWMYVGRQKAGEVWHDMTGNRSGTVTINQDGWGHFFVNGGSVSVWVKR

SEQ ID NO: 32131 - protein, 485 aa, Bacillus sp.
HHDGTNGTIMQYFEWNVPNDGQHWNRLHNNAQNLKNAGITAIWIPPAWKGTSQNDVGYGAYDLYDLGEFNQKGTVRTKYGTKAELERAIRSLKANGIQVYGDVVMNHKGGADFTERVQAVEVNPQNRNQEVSGTYQIEAWTGFNFPGRGNQHSSFKWRWYHFDGTDWDQSRQLANRIYKFRGDGKAWDWEVDTENGNYDYLMYADVDMDHPEVINELNRWGVWYANTLNLDGFRLDAVKHIKFSFMRDWLGHVRGQTGKNLFAVAEYWKNDLGALENYLSKTNWTMSAFDVPLHYNLYQASNSSGNYDMRNLLNGTLVQRHPSHAVTFVDNHDTQPGEALESFVQGWFKPLAYATILTREQGYPQVFYGDYYGIPSDGVPSYRQQIDPLLKARQQYAYGRQHDYFDHWDVIGWTREGNASHPNSGLATIMSDGPGGSKWMYVGRQKAGEVWHDMTLNRSGTVTINQDGWGHFFVNGGSVSVWVKR

SEQ ID NO: 32132 - protein, 485 aa, Bacillus sp.
HHDGTNGTIMQYFEWNVPNDGQHWNRLHNNAQNLKNAGITAIWIPPAWKGTSQNDVGYGAYDLYDLGEFNQKGTVRTKYGTKAELERAIRSLKANGIQVYGDVVMNHKGGADFTERVQAVEVNPQNRNQEVSGTYQIEAWTGFNFVGRGNQHSSFKWRWYHFDGTDWDQSRQLANRIYKFRGDGKAWDWEVDTENGNYDYLMYADVDMDHPEVINELNRWGVWYANTLNLDGFRLDAVKHIKFSFMRDWLGHVRGQTGKNLFAVAEYWKNDLGALENYLSKTNWTMSAFDVPLHYNLYQASNSSGNYDMRNLLNGTLVQRHPSHAVTFVDNHDTQPGEALESFVQGWFKPLAYATILTREQGYPQVFYGDYYGIPSDGVPSYRQQIDPLLKARQQYAYGRQHDYFDHWDVIGWTREGNASHPNSGLATIMSDGPGGSKWMYVGRQKAGEVWHDMTGNRSGTVTINQDGWGHFFVNGGSVSVWVKR

SEQ ID NO: 32133 - protein, 485 aa, Bacillus sp.
HHDGTNGTIMQYFEWNVPNDGQHWNRLHNNAQNLKNAGITAIWIPPAWKGTSQNDVGYGAYDLYDLGEFNQKGTVRTKYGTKAELERAIRSLKANGIQVYGDVVMNHKGGADFTERVQAVEVNPQNRNQEVSGTYQIEAWTGFNFPGRGNQHSSFKWRWYHFDGTDWDQSRQLANRIYKFRGDGKAWDWEVDTENGNYDYLMYADVDMMHPEVINELNRWGVWYANTLNLDGFRLDAVKHIKFSFMRDWLGHVRGQTGKNLFAVAEYWKNDLGALENYLSKTNWTMSAFDVPLHYNLYQASNSSGNYDMRNLLNGTLVQRHPSHAVTFVDNHDTQPGEALESFVQGWFKPLAYATILTREQGYPQVFYGDYYGIPSDGVPSYRQQIDPLLKARQQYAYGRQHDYFDHWDVIGWTREGNASHPNSGLATIMSDGPGGSKWMYVGRQKAGEVWHDMTGNRSGTVTINQDGWGHFFVNGGSVSVWVKR

SEQ ID NO: 32134 - protein, 485 aa, Bacillus sp.
HHDGTNGTIMQYFEWNVPNDGQHWNRLHNNAQNLKNAGITAIWIPPAWKGTSQNDVGYGAYDLYDLGEFNQKGTVRTKYGTKAELERAIRSLKANGIQVYGDVVMNHKGGADFTERVQAVEVNPQNRNQEVSGTYQIEAWTGFNFPGRGNQHSSFKWRWYHFDGTDWDQSRQLANRIYKFRGDGKAWDWEVDTENGNYDYLMGADVDMDHPEVINELNRWGVWYANTLNLDGFRLDAVKHIKFSFMRDWLGHVRGQTGKNLFAVAEYWKNDLGALENYLSKTNWTMSAFDVPLHYNLYQASNSSGNYDMRNLLNGTLVQRHPSHAVTFVDNHDTQPGEALESFVQGWFKPLAYATILTREQGYPQVFYGDYYGIPSDGVPSYRQQIDPLLKARQQYAYGRQHDYFDHWDVIGWTREGNASHPNSGLATIMSDGPGGSKWMYVGRQKAGEVWHDMTGNRSGTVTINQDGWGHFFVNGGSVSVWVKR

SEQ ID NO: 32135 - protein, 485 aa, Bacillus sp.
HHDGTNGTIMQYFEWNVPNDGQHWNRLHNNAQNLKAAGITAIWIPPAWKGTSQNDVGYGAYDLYDLGEFNQKGTVRTKYGTKAELERAIRSLKANGIQVYGDVVMNHKGGADFTERVQAVEVNPQNRNQEVSGTYQIEAWTGFNFPGRGNQHSSFKWRWYHFDGTDWDQSRQLANRIYKFRGDGKAWDWEVDTENGNYDYLMYADVDMDHPEVINELNRWGVWYANTLNLDGFRLDAVKHIKFSFMRDWLGHVRGQTGKNLFAVAEYWKNDLGALENYLSKTNWTMSAFDVPLHYNLYQASNSSGNYDMRNLLNGTLVQRHPSHAVTFVDNHDTQPGEALESFVQGWFKPLAYATILTREQGYPQVFYGDYYGIPSDGVPSYRQQIDPLLKARQQYAYGRQHDYFDHWDVIGWTREGNASHPNSGLATIMSDGPGGSKWMYVGRQKAGEVWHDMTGNRSGTVTINQDGWGHFFVNGGSVSVWVKR

SEQ ID NO: 32136 - protein, 485 aa, Bacillus sp.
HHDGTNGTIMQYFEWNVPNDGQHWNRLHNNAQNLKNAGITAIWIPPAWKGTSQNDVGYGAYDLYDLGEFNQKGTVRTKYGTKAELERAIRSLKANGIQVYGDVVMNHKGGADFTERVQAVEVNPQNRNQEVSGTYQIEAWTGFNFPGRGNQHSSFKWRWYHFDGTDWDQSRQLANRIYFFRGDGKAWDWEVDTENGNYDYLMYADVDMDHPEVINELNRWGVWYANTLNLDGFRLDAVKHIKFSFMRDWLGHVRGQTGKNLFAVAEYWKNDLGALENYLSKTNWTMSAFDVPLHYNLYQASNSSGNYDMRNLLNGTLVQRHPSHAVTFVDNHDTQPGEALESFVQGWFKPLAYATILTREQGYPQVFYGDYYGIPSDGVPSYRQQIDPLLKARQQYAYGRQHDYFDHWDVIGWTREGNASHPNSGLATIMSDGPGGSKWMYVGRQKAGEVWHDMTGNRSGTVTINQDGWGHFFVNGGSVSVWVKR

SEQ ID NO: 32137 - protein, 485 aa, Bacillus sp.
HHDGTNGTIMQYFEWNVPNDGQHWNRLHNNAQNLKNAGITAIWIPPAWKGTSQNDVGYGAYDLYDLGEFNQKGTVRTKYGTKAELERAIRSLKANGIQVYGDVVMNHKGGADFTERVQAVEVNPQNRNQEVSGTYQIEAWTGFNFPGRGNQHSSFKWRWYHFKGTDWDQSRQLANRIYKFRGDGKAWDWEVDTENGNYDYLMYADVDMDHPEVINELNRWGVWYANTLNLDGFRLDAVKHIKFSFMRDWLGHVRGQTGKNLFAVAEYWKNDLGALENYLSKTNWTMSAFDVPLHYNLYQASNSSGNYDMRNLLNGTLVQRHPSHAVTFVDNHDTQPGEALESFVQGWFKPLAYATILTREQGYPQVFYGDYYGIPSDGVPSYRQQIDPLLKARQQYAYGRQHDYFDHWDVIGWTREGNASHPNSGLATIMSDGPGGSKWMYVGRQKAGEVWHDMTGNRSGTVTINQDGWGHFFVNGGSVSVWVKR

SEQ ID NO: 32138 - protein, 485 aa, Bacillus sp.
HHDGTNGTIMQYFEWNVPNDGQHWNRLHNNAQNLKNAGITAIWIPPAWKGTSQNDVGYGAYDLYDLGEFNQKGTVRTKYGTKAELERAIRSLKANGIQVYGDVVMNHKGGADFTERVQAVEVNPQNSNQEVSGTYQIEAWTGFNFPGRGNQHSSFKWRWYHFDGTDWDQSRQLANRIYKFRGDGKAWDWEVDTENGNYDYLMYADVDMDHPEVINELNRWGVWYANTLNLDGFRLDAVKHIKFSFMRDWLGHVRGQTGKNLFAVAEYWKNDLGALENYLSKTNWTMSAFDVPLHYNLYQASNSSGNYDMRNLLNGTLVQRHPSHAVTFVDNHDTQPGEALESFVQGWFKPLAYATILTREQGYPQVFYGDYYGIPSDGVPSYRQQIDPLLKARQQYAYGRQHDYFDHWDVIGWTREGNASHPNSGLATIMSDGPGGSKWMYVGRQKAGEVWHDMTGNRSGTVTINQDGWGHFFVNGGSVSVWVKR

SEQ ID NO: 32139 - protein, 485 aa, Bacillus sp.
HHDGTNGTIMQYFEWNVPNDGQHWNRLHNNAQNLKNAGITAIWIPPAWKGTSQNDVGYGAYDLYDLGEFNQKGTVRTKYGTKAELERAIRSLKANGIQVYGDVVMNHKGGADFTERVQAVEVNPQNRNQEVSGTYQIEAWTGFNFPGRGNQHSSFKWRWYHFDGTDWDQSRQLANRIYKFRGDGKAWDWEVDTENGNYDYLMYADVDMDHPECINELNRWGVWYANTLNLDGFRLDAVKHIKFSFMRDWLGHVRGQTGKNLFAVAEYWKNDLGALENYLSKTNWTMSAFDVPLHYNLYQASNSSGNYDMRNLLNGTLVQRHPSHAVTFVDNHDTQPGEALESFVQGWFKPLAYATILTREQGYPQVFYGDYYGIPSDGVPSYRQQIDPLLKARQQYAYGRQHDYFDHWDVIGWTREGNASHPNSGLATIMSDGPGGSKWMYVGRQKAGEVWHDMTGNRSGTVTINQDGWGHFFVNGGSVSVWVKR

SEQ ID NO: 32140 - protein, 485 aa, Bacillus sp.
HHDGTNGTIMQYFEWNVPNDGQHWNRLHNNAQNLKNAGITAIWIPPAWKGTSQNDVGYGAYDLYDLGEFNQKGTVRTKYGTKAELERAIRSLKANGIQVYGDVVMNHKGGADFTERVQAVEVNPQNRNQEVSGTYQIEAWTGFNFPGRGNQHSSFKWRWYHFDGTDWDQSRQLANRIYKFRGDGKAWDWEVDTENGNYDYLMYADVDMDHPEVINELNRWGVWYANTLNLDGFRLDAVKHIKFSFMRDWLGHVRGQTGKNLFAVAEYWKNDLGALENYLSKTNWTMSAFDVPLHYNLYQASMSSGNYDMRNLLNGTLVQRHPSHAVTFVDNHDTQPGEALESFVQGWFKPLAYATILTREQGYPQVFYGDYYGIPSDGVPSYRQQIDPLLKARQQYAYGRQHDYFDHWDVIGWTREGNASHPNSGLATIMSDGPGGSKWMYVGRQKAGEVWHDMTGNRSGTVTINQDGWGHFFVNGGSVSVWVKR

SEQ ID NO: 32141 - protein, 483 aa, Bacillus sp. (in: firmicutes)
HHDGTNGTIMQYFEWNVPNDGQHWNRLHNNAQNLKNAGITAIWIPPAWKGTSQNDVGYGAYDLYDLGEFNQKGTVRTKYGTKAELERAIRSLKANGIQVYGDVVMNHKGGADFTERVQAVEVNPQNRNQEVSGTYQIEAWTGFNFPGRGNQHSSFKWRWYHFDGTDWDQSRQLANRIYKFRGKAWDWEVDTEFGNYDYLMYADVDMDHPEVINELNRWGVWYANTLNLDGFRLDAVKHIKFSFMRDWLGHVRGQTGKNLFAVAEYWKNDLGALENYLSKTNWTLSAFDVPLHYNLYQASNSSGNYDMRNLLNGTLVQRHPSHAVTFVDNHDTQPGEALESFVQGWFKPLAYATILTREQGYPQVFYGDYYGIPSDGVPSYRQQIDPLLKARQQYAYGRQHDYFDHWDVIGWTREGNASHPNSGLATIMSDGPGGSKWMYVGRQKAGEVWHDMTGNRSGTVTINQDGWGHFFVNGGSVSVWVKR

SEQ ID NO: 32142 - protein, 485 aa, Bacillus sp.
HHDGTNGTIMQYFEWNVPNDGQHWNRLHNNAQNLKNAGITAIWIPPAWKGTSQNDVGYGAYDLYDLGEFNQKGTGRTKYGTKAELERAIRSLKANGIQVYGDVVMNHKGGADFTERVQAVEVNPQNRNQEVSGTYQIEAWTGFNFPGRGNQHSSFKWRWYHFDGTDWDQSRQLANRIYKFRGDGKAWDWEVDTENGNYDYLMYADVDMDHPEVINELNRWGVWYANTLNLDGFRLDAVKHIKFSFMRDWLGHVRGQTGKNLFAVAEYWKNDLGALENYLSKTNWTMSAFDVPLHYNLYQASNSSGNYDMRNLLNGTLVQRHPSHAVTFVDNHDTQPGEALESFVQGWFKPLAYATILTREQGYPQVFYGDYYGIPSDGVPSYRQQIDPLLKARQQYAYGRQHDYFDHWDVIGWTREGNASHPNSGLATIMSDGPGGSKWMYVGRQKAGEVWHDMTGNRSGTVTINQDGWGHFFVNGGSVSVWVKR

SEQ ID NO: 32143 - protein, 485 aa, Bacillus sp.
HHDGTNGTIMQYFEWNVPNDGQHWNRLHNNAQNLKNAGITAIWIPPAWKGTSQNDVGYGAYDLYDLGEFNQKGTVRTKYGTKAELERAIRSLKANGIQVYGDVVMNHKGGADFTERVQAVEVNPQNRNQEVSGTYQIEAWTGFNFPGRGNQHSSFKWRWYHFDGTDWDQSRQLANRIYKFRGDGKAWDWEVDTENGNYDYLMYADVDMDHPEVINELNHWGVWYANTLNLDGFRLDAVKHIKFSFMRDWLGHVRGQTGKNLFAVAEYWKNDLGALENYLSKTNWTMSAFDVPLHYNLYQASNSSGNYDMRNLLNGTLVQRHPSHAVTFVDNHDTQPGEALESFVQGWFKPLAYATILTREQGYPQVFYGDYYGIPSDGVPSYRQQIDPLLKARQQYAYGRQHDYFDHWDVIGWTREGNASHPNSGLATIMSDGPGGSKWMYVGRQKAGEVWHDMTGNRSGTVTINQDGWGHFFVNGGSVSVWVKR

SEQ ID NO: 32144 - protein, 485 aa, Bacillus sp.
HHDGTNGTIMQYFEWNVPNDGQHWNRLHNNAQNLKNAGITAIWIPPAWKGTSQNDVGYGAYDLYDLGEFNQKGTVRTKYGTKAELERAIRSLKANGIQVYGDVVMNHKGGADFTERVQAVEVNPQNRNQEVSGTYQIEAWTGFNFPGRGNQHSSFKWRWYHFDGTDWDQSRQLANRIYKFRGDGKAWDWEVDTENGNYDYLMYADVDMDHPEVINELNRWGVWYANTLNLDGFRLDAVKHLKFSFMRDWLGHVRGQTGKNLFAVAEYWKNDLGALENYLSKTNWTMSAFDVPLHYNLYQASNSSGNYDMRNLLNGTLVQRHPSHAVTFVDNHDTQPGEALESFVQGWFKPLAYATILTREQGYPQVFYGDYYGIPSDGVPSYRQQIDPLLKARQQYAYGRQHDYFDHWDVIGWTREGNASHPNSGLATIMSDGPGGSKWMYVGRQKAGEVWHDMTGNRSGTVTINQDGWGHFFVNGGSVSVWVKR

SEQ ID NO: 32145 - protein, 485 aa, Bacillus sp.
HHDGTNGTIMQYFEWNVPNDGQHWNRLHNNAQNLKNAGITAIWIPPAWKGTSQNDVGYGAYDLYDLGEFNQKGTVRTKYGTKAELERAIRSLKANGIQVYGDVVMNHKGGADFTERVQAVEVNPQNRNQEVSGTYQIEAWTGFNFPGRGNQHSSFKWRWYHFDGTDWDQSRQLANRIYKFRGDGKAWDWEVQTENGNYDYLMYADVDMDHPEVINELNRWGVWYANTLNLDGFRLDAVKHIKFSFMRDWLGHVRGQTGKNLFAVAEYWKNDLGALENYLSKTNWTMSAFDVPLHYNLYQASNSSGNYDMRNLLNGTLVQRHPSHAVTFVDNHDTQPGEALESFVQGWFKPLAYATILTREQGYPQVFYGDYYGIPSDGVPSYRQQIDPLLKARQQYAYGRQHDYFDHWDVIGWTREGNASHPNSGLATIMSDGPGGSKWMYVGRQKAGEVWHDMTGNRSGTVTINQDGWGHFFVNGGSVSVWVKR

SEQ ID NO: 32146 - protein, 485 aa, Bacillus sp.
HHDGTNGTIMQYFEWNVPNDGQHWNRLHNNAQNLKNAGITAIWIPPAWKGTSQNDVGYGAYDLYDLGEFNQKGTVRTKYGTKAELERAIRSLKANGIQVYGDVVMNHKGGADFTERVQAVEVNPQNRNQEVSGTWQIEAWTGFNFPGRGNQHSSFKWRWYHFDGTDWDQSRQLANRIYKFRGDGKAWDWEVDTENGNYDYLMYADVDMDHPEVINELNRWGVWYANTLNLDGFRLDAVKHIKFSFMRDWLGHVRGQTGKNLFAVAEYWKNDLGALENYLSKTNWTMSAFDVPLHYNLYQASNSSGNYDMRNLLNGTLVQRHPSHAVTFVDNHDTQPGEALESFVQGWFKPLAYATILTREQGYPQVFYGDYYGIPSDGVPSYRQQIDPLLKARQQYAYGRQHDYFDHWDVIGWTREGNASHPNSGLATIMSDGPGGSKWMYVGRQKAGEVWHDMTGNRSGTVTINQDGWGHFFVNGGSVSVWVKR

SEQ ID NO: 32147 - protein, 485 aa, Bacillus sp.
HHDGTNGTIMQYFEWNVLNDGQHWNRLHNNAQNLKNAGITAIWIPPAWKGTSQNDVGYGAYDLYDLGEFNQKGTVRTKYGTKAELERAIRSLKANGIQVYGDVVMNHKGGADFTERVQAVEVNPQNRNQEVSGTYQIEAWTGFNFPGRGNQHSSFKWRWYHFDGTDWDQSRQLANRIYKFRGDGKAWDWEVDTENGNYDYLMYADVDMDHPEVINELNRWGVWYANTLNLDGFRLDAVKHIKFSFMRDWLGHVRGQTGKNLFAVAEYWKNDLGALENYLSKTNWTMSAFDVPLHYNLYQASNSSGNYDMRNLLNGTLVQRHPSHAVTFVDNHDTQPGEALESFVQGWFKPLAYATILTREQGYPQVFYGDYYGIPSDGVPSYRQQIDPLLKARQQYAYGRQHDYFDHWDVIGWTREGNASHPNSGLATIMSDGPGGSKWMYVGRQKAGEVWHDMTGNRSGTVTINQDGWGHFFVNGGSVSVWVKR

SEQ ID NO: 32148 - protein, 485 aa, Bacillus sp.
HHDGTNGTIMQYFEWNVPNDGQHWNRLHNNAQNLKNAGITAIWIPPAWKGTSQNDVGYGAYDLYDLGEFNQKGTVRTKYGTKAELERAIRSLKANGIQVYGDVVMNHKGGADFTERWQAVEVNPQNRNQEVSGTYQIEAWTGFNFPGRGNQHSSFKWRWYHFDGTDWDQSRQLANRIYKFRGDGKAWDWEVDTENGNYDYLMYADVDMDHPEVINELNRWGVWYANTLNLDGFRLDAVKHIKFSFMRDWLGHVRGQTGKNLFAVAEYWKNDLGALENYLSKTNWTMSAFDVPLHYNLYQASNSSGNYDMRNLLNGTLVQRHPSHAVTFVDNHDTQPGEALESFVQGWFKPLAYATILTREQGYPQVFYGDYYGIPSDGVPSYRQQIDPLLKARQQYAYGRQHDYFDHWDVIGWTREGNASHPNSGLATIMSDGPGGSKWMYVGRQKAGEVWHDMTGNRSGTVTINQDGWGHFFVNGGSVSVWVKR

SEQ ID NO: 32149 - protein, 485 aa, Bacillus sp.
HHDGTNGTIMQYFEWNVPNDGQHWNRLHNNAQNLKNAGITAIWIPPAWKGTSQNDVGYGAYDLYDLGEFNQKGTVRTKYGTKAELERAIRSLKANGIQVYGDVVMNHKGGADFTERVQAVEVNPQNRNQEVSGTYQIEAWTGFNFPGRGNQHSSFKWRWYHFDGTDWDQSRQLANRIYKFRGDGKAWDWEVDTENGNYDYLMYADVDMDHPEVINELNRWGVWYANTLNLDGFRLDAVKHIKFSFMRDWLGHVRGQTGKNLFAVAEYWKNDLGALENYLSKTNWTMSAFDVPLHYNLYQASNSSGNYDMRNLLNGTLVQRHPSHAVTFVDNHDTQPGEALESFVQGWFKPLAYATILTREQGYPQVFYGDYYGIPSDGVPSYRQQIDPLLKARQQYAYGRQHDYFDHWDVIGWTREGNASHPNSGLATIMSDGPGGSKWMYVGRQTAGEVWHDMTGNRSGTVTINQDGWGHFFVNGGSVSVWVKR

SEQ ID NO: 32150 - protein, 485 aa, Bacillus sp.
HHDGTNGTIMQYFEWNVPNDGQHWNRLHNNAQNLKNAGITAIWIPPAWKGTSQNDVGYGAYDLYDLGEFNQKGTVRTKYGTKAELERAIRSLKANGIQVYGDVVMNHKGGADFTERVQAVEVNPQNRNQEVSGTYQIEAWTGFNFPGRGNQHSSFKWRWYHFDGTDWDQSRQLANRIYKFRGDGKAWDWEVDTENGNYDYLMYADVDMDHPEVINELNRWGVWYANTLNLDGFRLDAVKHIKFSFMRDWLGHVRGQTGKNLFAVAEYWKNDLGALENYLSKTNWTMSAFDVPLHYNLYQASNSSGNYDMRNLLNGTLVQRHPSHAVTFSDNHDTQPGEALESFVQGWFKPLAYATILTREQGYPQVFYGDYYGIPSDGVPSYRQQIDPLLKARQQYAYGRQHDYFDHWDVIGWTREGNASHPNSGLATIMSDGPGGSKWMYVGRQKAGEVWHDMTGNRSGTVTINQDGWGHFFVNGGSVSVWVKR

SEQ ID NO: 32151 - protein, 485 aa, Bacillus sp.
HHDGTNGTIMQYFEWNVPNDGQHWNRLHNNAQNLKNAGITAIWIPPAWKGTSQNDVGYGAYDLYDLGEFNQKGTVRTKYGTKAELERAIRSLKANGIQVYGDVVMNHKGGADFTERVQAVEVNPQNRNQEVSGTYQIEAWTGFNFPGRGNQHSSFKWRWYHFDGTDWDQSRQLANRIYKFRGDGKAWDWEVDTENGNYDYLMYADVDMDHPEVINELNRWGVWYANTLNLDGFRLDAWKHIKFSFMRDWLGHVRGQTGKNLFAVAEYWKNDLGALENYLSKTNWTMSAFDVPLHYNLYQASNSSGNYDMRNLLNGTLVQRHPSHAVTFVDNHDTQPGEALESFVQGWFKPLAYATILTREQGYPQVFYGDYYGIPSDGVPSYRQQIDPLLKARQQYAYGRQHDYFDHWDVIGWTREGNASHPNSGLATIMSDGPGGSKWMYVGRQKAGEVWHDMTGNRSGTVTINQDGWGHFFVNGGSVSVWVKR

SEQ ID NO: 32152 - protein, 483 aa, Bacillus sp. (in: firmicutes)
HHDGTNGTIMQYFEWNVPNDGQHWNRLHNNAQNLKNAGITAIWIPPAWKGTSQNDVGYGAYDLYDLGEFNQKGTVRTKYGTKAELERAIRSLKANGIQVYGDVAMNHKGGADFTERVQAVEVNPQNRNQEVSGTYQIEAWTGFNFPGRGNQHSSFKWRWYHFDGTDWDQSRQLANRIYKFRGKAWDWEVDTEFGNYDYLMYADVDMDHPEVINELNRWGVWYANTLNLDGFRLDAVKHIKFSFMRDWLGHVRGQTGKNLFAVAEYWKNDLGALENYLSKTNWTMSAFDVPLHYNLYQASNSSGNYDMRNLLNGTLVQRHPSHAVTFVDNHDTQPGEALESFVQGWFKPLAYATILTREQGYPSVFYGDYYGIPSDGVPSYRQQIDPLLKARQQYAYGRQHDYFDHWDVIGWTREGNASHPNSGLATIMSDGPGGSKWMYVGRQKAGEVWHDMTGNRSGTVTINQDGWGHFFVNGGSVSVWVKR

SEQ ID NO: 32153 - protein, 485 aa, Bacillus sp.
HHDGTNGTIMQYFEWNVPNDGQHWNRLHNNAQNLKNAGITAIWIPPAWKGTSQNDVGYGAYDLYDLGEFNQKGTVRTKYGTKAELERAIRSLKANGIQVYGDVVMNHKGGADFTERVQAVEVNPQNRNQEVSGTYQIEAWTGFNFPGRGNQHSSFKWRWYHFDGTDWDQSRQLANRIYKFRGDGKAWDWEVDTENGNYDYLMYADVDMDHPEVINELNRWGVWYANTLNLDGFRLDAVKHIKFSFMRDWLGHVRGQTGKNLFAVAEYWKNDLGALENYLSKTNWTMSAFDVPLHYNLYQASNSSGNYDMRNLLNGTLVQRHPSHAVTFVDNHDTQPGEALESFVQGWFKPLAYATILTREQGYPQVFYGTYYGIPSDGVPSYRQQIDPLLKARQQYAYGRQHDYFDHWDVIGWTREGNASHPNSGLATIMSDGPGGSKWMYVGRQKAGEVWHDMTGNRSGTVTINQDGWGHFFVNGGSVSVWVKR

SEQ ID NO: 32154 - protein, 485 aa, Bacillus sp.
HHDGTNGTIMQYFEWNVPNDGQHWNRLHNNAQNLKNAGITAIWIPPAWKGTSQNDVGYGAYDLYDLGEFNQKGTVRTKYGTKAELERAIRSLKANGIQVYGDVVMNHKGGADFTERVQAVEVNPQNRNQEVSGTYQIEAWTGFNFPGRGNQHSSFKWRWYHFDGTDWDQSRQLANRIYKFRGDGKAWDWEVDTENGNYDYLMYADVDMDHPEVINELNRWGVWYANTLNLDGFRLDAVKHIKFSFMRDWLGHVRGQTGKNLFAVAEYWKNDLGALENYLSKTNWTMSAFDVPLHYNLYQASNSSGNYDMRNLLNGTLVQRHPSHAVTFVDNHDTQPGEALESFVQGWFKPLAYATILTREQGYPQVFYGAYYGIPSDGVPSYRQQIDPLLKARQQYAYGRQHDYFDHWDVIGWTREGNASHPNSGLATIMSDGPGGSKWMYVGRQKAGEVWHDMTGNRSGTVTINQDGWGHFFVNGGSVSVWVKR

SEQ ID NO: 32155 - protein, 485 aa, Bacillus sp.
HHDGTNGTIMQYFEWNVPNDGQHWNRLHNNAQNLKNAGITAIWIPPAWKGTSQNDVGYGAYDLYDLGEFNQKGTVRTKYGTKAELERAIRSLKANGIQVYGDVVMNHKGGADFTERVQAVEVNPQNRNQEVSGTYQIEAWTGFNFPGRGNQHSSFKWRWYHFDGTDWDQSRQLANRIYKFRGDGKAWDWEVDTENGNYDYLMYADVDMDHPEVINELNRWGVWYANTLNLDGFRLDAVKHIKFSFMRDWLGHVRGQTGKNLFAVAEYWKNDLGALENYLSKTNWTMSAFDVPLHYNLYQASNSSGNYDMRNLLNGTLVQRHPSHAVTFVDNHDTQPGEALESFVQGWFKPLAYATILTREQGYPQVFYGDYYGIPSDGVPSYRQQIDPLLKARQQYAYGRQHDYFDHWDVIGWTREGAASHPNSGLATIMSDGPGGSKWMYVGRQKAGEVWHDMTGNRSGTVTINQDGWGHFFVNGGSVSVWVKR

SEQ ID NO: 32156 - protein, 485 aa, Bacillus sp.
HHDGTNGTIMQYFEWNVPVDGQHWNRLHNNAQNLKNAGITAIWIPPAWKGTSQNDVGYGAYDLYDLGEFNQKGTVRTKYGTKAELERAIRSLKANGIQVYGDVVMNHKGGADFTERVQAVEVNPQNRNQEVSGTYQIEAWTGFNFPGRGNQHSSFKWRWYHFDGTDWDQSRQLANRIYKFRGDGKAWDWEVDTENGNYDYLMYADVDMDHPEVINELNRWGVWYANTLNLDGFRLDAVKHIKFSFMRDWLGHVRGQTGKNLFAVAEYWKNDLGALENYLSKTNWTMSAFDVPLHYNLYQASNSSGNYDMRNLLNGTLVQRHPSHAVTFVDNHDTQPGEALESFVQGWFKPLAYATILTREQGYPQVFYGDYYGIPSDGVPSYRQQIDPLLKARQQYAYGRQHDYFDHWDVIGWTREGNASHPNSGLATIMSDGPGGSKWMYVGRQKAGEVWHDMTGNRSGTVTINQDGWGHFFVNGGSVSVWVKR

SEQ ID NO: 32157 - protein, 485 aa, Bacillus sp.
HHDGTNGTIMQYFEWNVPNDGQHWNRLHNNAQNLKNAGITAIWIPPAWKGTSQNDVGYGAYDLYDLGEFNQKGTVRTKYGTKAELERAIRSLKANGIQVYGDVVMNHKGGADFTERVQAVEVNPQNRNQEVSGTYQIEAWTGFNFPGRGNQHSSFKWRWYHFDGTDWDQSRQLANRIYKFRGDGKAWDWEVDTENGNYDYLMYADVDMDHPEVINELNRWGVWYANTLNLDGFRLDAVKHIKFSFMRDWLGHVRGQTGKNLFAVAEYWKNDLGALENYLSKTNWTMSAFDVPLHYNLYQASNSSGNYDMRNLLNGTLVQRHPSHAVTFVDNHDTQPGEALESFVQGWFKPLAYATILTREQGYPQVFYGDYYGIPSDGVPSYRQQIDPLLKARQQYAYGRQHDKFDHWDVIGWTREGNASHPNSGLATIMSDGPGGSKWMYVGRQKAGEVWHDMTGNRSGTVTINQDGWGHFFVNGGSVSVWVKR

SEQ ID NO: 32158 - protein, 485 aa, Bacillus sp.
HHDGTNGTIMQYFEWNVPNDGQHWNRLHNNAQNLKNAGITAIWIPPAWKGTSQNDVGYGAYDLYDLGEFNQKGTVRTKYGTKAELERAIRSLKANGIQVYGDVVMNHKGGADFTERVQAVEVNPQNRNQEVSGTYQIEAWTGFNFPGRGNQHSSFKWRWYHFDGTDWDQSRQLANRIYKFRGDGKAWDWEVDTENGNYDYLMYADVDMDHPEVINELNRWGVWYANTLNLDGFRLDAVKHIKFSFMRDWLGHVRGQTGKNLFALAEYWKNDLGALENYLSKTNWTMSAFDVPLHYNLYQASNSSGNYDMRNLLNGTLVQRHPSHAVTFVDNHDTQPGEALESFVQGWFKPLAYATILTREQGYPQVFYGDYYGIPSDGVPSYRQQIDPLLKARQQYAYGRQHDYFDHWDVIGWTREGNASHPNSGLATIMSDGPGGSKWMYVGRQKAGEVWHDMTGNRSGTVTINQDGWGHFFVNGGSVSVWVKR

SEQ ID NO: 32159 - protein, 485 aa, Bacillus sp.
HHDGTNGTIMQYFEWNVPNDGQHWNRLHNNAQNLKNAGITAIWIPPAWKGTSQNDVGYGAYDLYDLGEFNQKGTVRTKYGTKAELERAIRSLKANGIQVYGDVVMNHKGGADFTERVQAVEVNPQNRNQEVSGTYQIEAWTGFNFPGRGNQHSSFKWRWVHFDGTDWDQSRQLANRIYKFRGDGKAWDWEVDTENGNYDYLMYADVDMDHPEVINELNRWGVWYANTLNLDGFRLDAVKHIKFSFMRDWLGHVRGQTGKNLFAVAEYWKNDLGALENYLSKTNWTMSAFDVPLHYNLYQASNSSGNYDMRNLLNGTLVQRHPSHAVTFVDNHDTQPGEALESFVQGWFKPLAYATILTREQGYPQVFYGDYYGIPSDGVPSYRQQIDPLLKARQQYAYGRQHDYFDHWDVIGWTREGNASHPNSGLATIMSDGPGGSKWMYVGRQKAGEVWHDMTGNRSGTVTINQDGWGHFFVNGGSVSVWVKR

SEQ ID NO: 32160 - protein, 485 aa, Bacillus sp.
HHDGTNGTIMQYFEWNVPNDGQHWNRLHNNAQNLKNAGITAIWIPPAWKGTSQNDVGYGAYDLYDLGEFNQKGTVRTKYGTKAELERAIRSLKANGIQVYGDVVMNHKGGADFTERVQAVEVNPQNRNQEVSGTYQIEAWTGFNFPGRGNQHSSFKWRWYHFDGTDWDQSRQLANRIYKFRGDGKAWDWEVDTENGNYDYLMYADVDMDHPEVINELNRWGVWYANTLNLDGFRLDAVKHIKFSFMRDWLGHVRGQTGKNLFAVAEYWKNDLGALENYLSKTNWTMSAFDVPLHYNLYQASNSSGNYDMRNLLNGTLVQRHPSHAVTFVDNHDTQPGEALESFVQGWFKPLAYATILTREQGYPQVFYGDYGGIPSDGVPSYRQQIDPLLKARQQYAYGRQHDYFDHWDVIGWTREGNASHPNSGLATIMSDGPGGSKWMYVGRQKAGEVWHDMTGNRSGTVTINQDGWGHFFVNGGSVSVWVKR

SEQ ID NO: 32161 - protein, 485 aa, Bacillus sp.
HHDGTNGTIMQYFEWNVPNDGQHWNRLHNNAQNLKNAGITAIWIPPAWKGTSQNDVGYGAYDLYDLGEFNQKGTVRTKYGTKAELERAIRSLKANGIQVYGDVVMNHKGGADFTERVQAVEVNPQNRNCEVSGTYQIEAWTGFNFPGRGNQHSSFKWRWYHFDGTDWDQSRQLANRIYKFRGDGKAWDWEVDTENGNYDYLMYADVDMDHPEVINELNRWGVWYANTLNLDGFRLDAVKHIKFSFMRDWLGHVRGQTGKNLFAVAEYWKNDLGALENYLSKTNWTMSAFDVPLHYNLYQASNSSGNYDMRNLLNGTLVQRHPSHAVTFVDNHDTQPGEALESFVQGWFKPLAYATILTREQGYPQVFYGDYYGIPSDGVPSYRQQIDPLLKARQQYAYGRQHDYFDHWDVIGWTREGNASHPNSGLATIMSDGPGGSKWMYVGRQKAGEVWHDMTGNRSGTVTINQDGWGHFFVNGGSVSVWVKR

SEQ ID NO: 32162 - protein, 485 aa, Bacillus sp.
HHDGTNGTIMQYFEWNVPNDGQHWNRLHNNAQNLKNAGITAIWIPPAWKGTSQNDVGYGAYDLYDLGEFNQKGTVRTKYGTKAELERAIRSLKANGIQVYGDVVMNHKGGADFTERVQAVEVNPQNRNQEVSGTYQIEAWTGFNFPGRGNQHSSFKWRWYHFDGTDWDQSRQLANRIYKFRGDGKAWDWEVDTENGNYDYLMYADVDMDHPEVINELNRWGVWYANTLNLDGFRLDAVKHIKFSFMRDWLGHVRGQTGKNLVAVAEYWKNDLGALENYLSKTNWTMSAFDVPLHYNLYQASNSSGNYDMRNLLNGTLVQRHPSHAVTFVDNHDTQPGEALESFVQGWFKPLAYATILTREQGYPQVFYGDYYGIPSDGVPSYRQQIDPLLKARQQYAYGRQHDYFDHWDVIGWTREGNASHPNSGLATIMSDGPGGSKWMYVGRQKAGEVWHDMTGNRSGTVTINQDGWGHFFVNGGSVSVWVKR

SEQ ID NO: 32163 - protein, 485 aa, Bacillus sp.
HHDGTNGTIMQYFEWNVPNDGQHWNRLHNNAQNLKNAGITAIWIPPAWKGTSQNDVGYGAYDLYDLGEFNQKGTVRTKYGTKAELERAIRSLKANGIQVYGDVVMNHKGGADFTERVQAVEVNPQNRNQEVSGTYQIEAWTGFNFPGRGNQHSSFKWRWYHFDGTDWDQSRQLANRIYKFRGDGKAWDWEVDTENGNYDYLMYADVDMDHPEVINELNRWGVWYANTLNLDGFRLDAVKHIKFSFMRDWLGHVRGQTGKNLFAVAEYWKNDLGALENYLSKTNWTMSAFDVPLHYNLYQASNSSGNYDMRNLLNGTLVQRHPSHAVTFVDNHDTQPGEALESFVQGWFKPLAYATILTREQGYPQVFYGDYYGIPSDGVPSYRQQIDPLLKARQQYAYGRQHDYFDHWDVIGWTREGNASHPNSGLATIMSDGPGGSKWMYVGRQKAGEVWHDMTGNRSGTVTINQDGWGHFFVNGLSVSVWVKR

SEQ ID NO: 32164 - protein, 485 aa, Bacillus sp.
HHDGTNGTIMQYFEWNVPNDGQHWNRLHNNAQNLKNAGITAIWIPPAWKGTSQNDVGYGAYDLYDLGEFNQKGTVRTKYGTKAELERAIRSLKANGIQVYGDVVMNHKGGADFTERVQAVEVNPQNRNQEVSGTYQIEAWTGFNFPGRGNQHSSFKWRWYHFDGTDWDQSRQLANRIYKFRGDGKAWDWEVDTENGNYDYLMYADVDMDHPEVINELNRWGVWYANTLNLDGFRLDAVKHIKFSFMRDWLGHVRGQTGKNLFAVAEYWKNDLGALENYLSKTNWTMSAFDVPLHYNLYQASNSSGNYDMRNLLNGTLVQRHPSHAVTFVDNHDTQPGEALESFVQGWFKPLAYATILTREQGYPQVFYGDYYGIPSDGVPSYRQQIDPLLKARQQYAYGRQHDYFDHWDVIGWTREGNASHPNSGLATIMSDGPGGSKWMYVGRQKAGEVWHDMTGNRSGTVTINQDGWGHFFVNYGSVSVWVKR

SEQ ID NO: 32165 - protein, 485 aa, Bacillus sp.
HHDGTNGTIMQYFEWNVPNDGQHWNRLHNNAQNLKNAGITAIWIPPAWKGTSQNDVGYGAYDLYDLGEFNQKGTVRTKYGTKAELERAIRSLKANGIQVYGDVVMNHKGGADFTERVQAVEVNPQNRAQEVSGTYQIEAWTGFNFPGRGNQHSSFKWRWYHFDGTDWDQSRQLANRIYKFRGDGKAWDWEVDTENGNYDYLMYADVDMDHPEVINELNRWGVWYANTLNLDGFRLDAVKHIKFSFMRDWLGHVRGQTGKNLFAVAEYWKNDLGALENYLSKTNWTMSAFDVPLHYNLYQASNSSGNYDMRNLLNGTLVQRHPSHAVTFVDNHDTQPGEALESFVQGWFKPLAYATILTREQGYPQVFYGDYYGIPSDGVPSYRQQIDPLLKARQQYAYGRQHDYFDHWDVIGWTREGNASHPNSGLATIMSDGPGGSKWMYVGRQKAGEVWHDMTGNRSGTVTINQDGWGHFFVNGGSVSVWVKR

SEQ ID NO: 32166 - protein, 485 aa, Bacillus sp.
HHDGTNGTIMQYFEWNVPNDGQHWNRLHNNAQNLKNAGITAIWIPPAWKGTSQNDVGYGAYDLYDLGEFNQKGTVRTKYGTKAELERAIRSLKANGIQVYGDVVMNHKGGADFTERVQAVEVNPQNRNQEVSGTYQIEAWTGFNFPGRGNQHSSFKWRWYHFDGTDWDQSRQLANRIYKFRGDGKAWDWEVDTENGNYDYLMYADVDMDHPMVINELNRWGVWYANTLNLDGFRLDAVKHIKFSFMRDWLGHVRGQTGKNLFAVAEYWKNDLGALENYLSKTNWTMSAFDVPLHYNLYQASNSSGNYDMRNLLNGTLVQRHPSHAVTFVDNHDTQPGEALESFVQGWFKPLAYATILTREQGYPQVFYGDYYGIPSDGVPSYRQQIDPLLKARQQYAYGRQHDYFDHWDVIGWTREGNASHPNSGLATIMSDGPGGSKWMYVGRQKAGEVWHDMTGNRSGTVTINQDGWGHFFVNGGSVSVWVKR

SEQ ID NO: 32167 - protein, 485 aa, Bacillus sp.
HHDGTNGTIMQYFEWNVPNDGQHWNRLHNNAQNLKNAGITAIWIPPAWKGTSQNDVGYGAYDLYDLGEFNQKGTVRTKYGTKAELERAIRSLKANGICVYGDVVMNHKGGADFTERVQAVEVNPQNRNQEVSGTYQIEAWTGFNFPGRGNQHSSFKWRWYHFDGTDWDQSRQLANRIYKFRGDGKAWDWEVDTENGNYDYLMYADVDMDHPEVINELNRWGVWYANTLNLDGFRLDAVKHIKFSFMRDWLGHVRGQTGKNLFAVAEYWKNDLGALENYLSKTNWTMSAFDVPLHYNLYQASNSSGNYDMRNLLNGTLVQRHPSHAVTFVDNHDTQPGEALESFVQGWFKPLAYATILTREQGYPQVFYGDYYGIPSDGVPSYRQQIDPLLKARQQYAYGRQHDYFDHWDVIGWTREGNASHPNSGLATIMSDGPGGSKWMYVGRQKAGEVWHDMTGNRSGTVTINQDGWGHFFVNGGSVSVWVKR

SEQ ID NO: 32168 - protein, 485 aa, Bacillus sp.
HHDGTNGTIMQYFEWNVPNDGQHWNRLHNNAQNLKNAGITAIWIPPAWKGTSQNDVGYGAYDLYDLGEFNQKGTVRTKYGTKAELERAIRSLKANGIQVYGDVVMNHKGGADFTERVQAVEVNPQNRNQEVSGTYQIEAWTGFNFPGRGNQHSSFKWRWYHFDGTDWDQSRQLANRIYKFRGDGKAWDWEVDTENGNYDYLMYADVDMDHPEVINELNRWGVWYANTLNLDGFRLDAVKHIKFSFMRDWLGHVRGQTGKNLFAVAEYWKNDLGALENYLSKTNWTMSAFDVPLHYNLYQASNSSGNYDMRNLLNGTLVQRHPSHAVTFVDNHDTQPGEALESFVQGWFKPLAYATILTREQGYPQLFYGDYYGIPSDGVPSYRQQIDPLLKARQQYAYGRQHDYFDHWDVIGWTREGNASHPNSGLATIMSDGPGGSKWMYVGRQKAGEVWHDMTGNRSGTVTINQDGWGHFFVNGGSVSVWVKR

SEQ ID NO: 32169 - protein, 485 aa, Bacillus sp.
HHDGTNGTIMQYFEWNVPNDGQHWNRLHNNAQNLKNAGITAIWIPPAWKGTSQNDVGYGAYDLYDLGEFNQKGTVRTKYGTKAELERAIRSLKANGIQVYGDVVMNHKGGADFTERVQAVEVNPQNRNQEVSGTYQIEAWTGFNFPGRGNQHSSFKWRWYHFDGTDWDQSRQLANRIYKFRGDGKAWDWEVDTENGNYDYLMYADVDMDHPEVINELNRWGVWYANTLNLDGFRLDAVKHIKFSFMRDWLGHVRGQTGKNLFAVAEYWKNDLGALENYLSKTNWTMSAFDVPLHYNLYQASNSSGNYDMRNLLNGTLVQRHPSHAVTFVDNHDTQPGEALESFVQGWFKPLAYATILTRERGYPQVFYGDYYGIPSDGVPSYRQQIDPLLKARQQYAYGRQHDYFDHWDVIGWTREGNASHPNSGLATIMSDGPGGSKWMYVGRQKAGEVWHDMTGNRSGTVTINQDGWGHFFVNGGSVSVWVKR

SEQ ID NO: 32170 - protein, 485 aa, Bacillus sp.
HHDGTNGTIMQYFEWNVPNDGQHWNRLHNNAQNLKNAGITAIWIPPAWKGTSQNDVGYGGYDLYDLGEFNQKGTVRTKYGTKAELERAIRSLKANGIQVYGDVVMNHKGGADFTERVQAVEVNPQNRNQEVSGTYQIEAWTGFNFPGRGNQHSSFKWRWYHFDGTDWDQSRQLANRIYKFRGDGKAWDWEVDTENGNYDYLMYADVDMDHPEVINELNRWGVWYANTLNLDGFRLDAVKHIKFSFMRDWLGHVRGQTGKNLFAVAEYWKNDLGALENYLSKTNWTMSAFDVPLHYNLYQASNSSGNYDMRNLLNGTLVQRHPSHAVTFVDNHDTQPGEALESFVQGWFKPLAYATILTREQGYPQVFYGDYYGIPSDGVPSYRQQIDPLLKARQQYAYGRQHDYFDHWDVIGWTREGNASHPNSGLATIMSDGPGGSKWMYVGRQKAGEVWHDMTGNRSGTVTINQDGWGHFFVNGGSVSVWVKR

SEQ ID NO: 32171 - protein, 485 aa, Bacillus sp.
HHDGTNGTIMQYFEWNVPNDGQHWNRLHNNAQNLKNAGITAIWIPPAWKGTSQNDVGYGAYDLYDLGEFNQKGTVRTKYGTKAELERAIRSLKANGIQVYGDVVMNHKGGADFTERVQAVEVNPQNRNQEVSGTYQIEAWTGFNFPGRGNQHSSFKWRWYHFDGTDWDQSRQLANRIYKFRGDGKAWDWEMDTENGNYDYLMYADVDMDHPEVINELNRWGVWYANTLNLDGFRLDAVKHIKFSFMRDWLGHVRGQTGKNLFAVAEYWKNDLGALENYLSKTNWTMSAFDVPLHYNLYQASNSSGNYDMRNLLNGTLVQRHPSHAVTFVDNHDTQPGEALESFVQGWFKPLAYATILTREQGYPQVFYGDYYGIPSDGVPSYRQQIDPLLKARQQYAYGRQHDYFDHWDVIGWTREGNASHPNSGLATIMSDGPGGSKWMYVGRQKAGEVWHDMTGNRSGTVTINQDGWGHFFVNGGSVSVWVKR

SEQ ID NO: 32172 - protein, 485 aa, Bacillus sp.
HHDGTNGTIMQYFEWNVPNDGQHWNRLHNNAQNLKNAGITAIWIPPAWKGTSQNDVGYGAYDLYDLGEFNQKGTVRTKYGTKAELERAIRSLKANGIQVYGDVVMNHKGGADFTERVQAVEVNPQNRNQEVSGTYQIEAYTGFNFPGRGNQHSSFKWRWYHFDGTDWDQSRQLANRIYKFRGDGKAWDWEVDTENGNYDYLMYADVDMDHPEVINELNRWGVWYANTLNLDGFRLDAVKHIKFSFMRDWLGHVRGQTGKNLFAVAEYWKNDLGALENYLSKTNWTMSAFDVPLHYNLYQASNSSGNYDMRNLLNGTLVQRHPSHAVTFVDNHDTQPGEALESFVQGWFKPLAYATILTREQGYPQVFYGDYYGIPSDGVPSYRQQIDPLLKARQQYAYGRQHDYFDHWDVIGWTREGNASHPNSGLATIMSDGPGGSKWMYVGRQKAGEVWHDMTGNRSGTVTINQDGWGHFFVNGGSVSVWVKR

SEQ ID NO: 32173 - protein, 485 aa, Bacillus sp.
HHDGTNGTIMQYFEWNVPNDGQHWNRLHNNAQNLKNAGITAIWIPPAWKGTSQNDVGYGAYDLYDLGMFNQKGTVRTKYGTKAELERAIRSLKANGIQVYGDVVMNHKGGADFTERVQAVEVNPQNRNQEVSGTYQIEAWTGFNFPGRGNQHSSFKWRWYHFDGTDWDQSRQLANRIYKFRGDGKAWDWEVDTENGNYDYLMYADVDMDHPEVINELNRWGVWYANTLNLDGFRLDAVKHIKFSFMRDWLGHVRGQTGKNLFAVAEYWKNDLGALENYLSKTNWTMSAFDVPLHYNLYQASNSSGNYDMRNLLNGTLVQRHPSHAVTFVDNHDTQPGEALESFVQGWFKPLAYATILTREQGYPQVFYGDYYGIPSDGVPSYRQQIDPLLKARQQYAYGRQHDYFDHWDVIGWTREGNASHPNSGLATIMSDGPGGSKWMYVGRQKAGEVWHDMTGNRSGTVTINQDGWGHFFVNGGSVSVWVKR

SEQ ID NO: 32174 - protein, 485 aa, Bacillus sp.
HHDGTNGTIMQYFEWNVPNDGQHWNRLHNNAQNLKNAGITAIWIPPAWKGTSQNDVGYGAYDLYDLGEFNQKGTVRTKYGTKAELERAIRSLKANGIQVYGDVVMNHKGGAVFTERVQAVEVNPQNRNQEVSGTYQIEAWTGFNFPGRGNQHSSFKWRWYHFDGTDWDQSRQLANRIYKFRGDGKAWDWEVDTENGNYDYLMYADVDMDHPEVINELNRWGVWYANTLNLDGFRLDAVKHIKFSFMRDWLGHVRGQTGKNLFAVAEYWKNDLGALENYLSKTNWTMSAFDVPLHYNLYQASNSSGNYDMRNLLNGTLVQRHPSHAVTFVDNHDTQPGEALESFVQGWFKPLAYATILTREQGYPQVFYGDYYGIPSDGVPSYRQQIDPLLKARQQYAYGRQHDYFDHWDVIGWTREGNASHPNSGLATIMSDGPGGSKWMYVGRQKAGEVWHDMTGNRSGTVTINQDGWGHFFVNGGSVSVWVKR

SEQ ID NO: 32175 - protein, 485 aa, Bacillus sp.
HHDGTNGTIMQYFEWNVPNDGQHWNRLHNNAQNLKNAGITAIWIPPAWKGTSQNDVGYGAYDLYDLGEFNQKGTVRTKYGTKAELERAIRSLKANGIQVYGDVVMNHKGGADFTERVQAVEVNPQNRNQEVSGTYQIEAWTGFNFPGRGNQHSSFKWRWYHFDGTDWDQSRQLANRIYKFRGDGKAWDWEVDTENGNYDYLMYADVDMDHPEVINELNRWGVWYANLLNLDGFRLDAVKHIKFSFMRDWLGHVRGQTGKNLFAVAEYWKNDLGALENYLSKTNWTMSAFDVPLHYNLYQASNSSGNYDMRNLLNGTLVQRHPSHAVTFVDNHDTQPGEALESFVQGWFKPLAYATILTREQGYPQVFYGDYYGIPSDGVPSYRQQIDPLLKARQQYAYGRQHDYFDHWDVIGWTREGNASHPNSGLATIMSDGPGGSKWMYVGRQKAGEVWHDMTGNRSGTVTINQDGWGHFFVNGGSVSVWVKR

SEQ ID NO: 32176 - protein, 485 aa, Bacillus sp.
HHDGTNGTIMQYFEWNVPNDGQHWNRAHNNAQNLKNAGITAIWIPPAWKGTSQNDVGYGAYDLYDLGEFNQKGTVRTKYGTKAELERAIRSLKANGIQVYGDVVMNHKGGADFTERVQAVEVNPQNRNQEVSGTYQIEAWTGFNFPGRGNQHSSFKWRWYHFDGTDWDQSRQLANRIYKFRGDGKAWDWEVDTENGNYDYLMYADVDMDHPEVINELNRWGVWYANTLNLDGFRLDAVKHIKFSFMRDWLGHVRGQTGKNLFAVAEYWKNDLGALENYLSKTNWTMSAFDVPLHYNLYQASNSSGNYDMRNLLNGTLVQRHPSHAVTFVDNHDTQPGEALESFVQGWFKPLAYATILTREQGYPQVFYGDYYGIPSDGVPSYRQQIDPLLKARQQYAYGRQHDYFDHWDVIGWTREGNASHPNSGLATIMSDGPGGSKWMYVGRQKAGEVWHDMTGNRSGTVTINQDGWGHFFVNGGSVSVWVKR

SEQ ID NO: 32177 - protein, 485 aa, Bacillus sp.
HHDGTNGTIMQYFEWNVPNDGQHWNRLHNNAQNLKNAGITAIWIPPAWKGTSQNDVGYGAYDLYDLGEFNQKGTVRTKYGTKAELERAIRSLKANGIQVYGDVVMNHKGGADFTERVQAVEVNPQNRNQEVSGTYQIEAWTGFNFPGRGNQHSSFKWRWYHFDGTDWDQSRQLANRIYKFRGDGKAWDWEVDTENGNYDYLMYADVDMDHPEVINELNRWGVWYANTLNLDGFRLDAVKHIKFSFMRDWLGHVRGQTGKNLFAVAEYWKNDLGALENYLSKTNWTMSAFDVPLHYNLYQASNSSGNYDMRNLLNGTLVQRHPSHAVTFVDNHDTQPGEALESFVQGWFKPLAYATILTREQGYPQVFYGDYYGIPSDGVPSYRQQIDPLTKARQQYAYGRQHDYFDHWDVIGWTREGNASHPNSGLATIMSDGPGGSKWMYVGRQKAGEVWHDMTGNRSGTVTINQDGWGHFFVNGGSVSVWVKR

SEQ ID NO: 32178 - protein, 485 aa, Bacillus sp.
HHDGTNGTIMQYFEWNVPNDGQHWNRLHNNAQNLKNAGITAIWIPPAWKGTSQNDVGYGAYDLYDLGEFNQKGTVRTKYGTKAELERAIRSLKANGIQVYGDVVMNHKGGADFTERVQAVEVNPQNRNQEVSGTYQIEAWTGFNFPGRGNQHSSFKWRWYHFDGTDWDQSRQLANRIYKFRGDGKAWDWEVDTENGNYDYLMYADVDMDHPEVINELNRWGVWYANTLNLDGFRLDAVKHIKFSFMRDWLGHVRGQTGKNLFAVAEYWKNDLGALENYLSKTNWTMSAFDVPLHYNLYQASNSSGNYDMRNLLNGTLVQRHPSHAVTFVDNHDTQPGEALESFVQGWFKPLAYATITTREQGYPQVFYGDYYGIPSDGVPSYRQQIDPLLKARQQYAYGRQHDYFDHWDVIGWTREGNASHPNSGLATIMSDGPGGSKWMYVGRQKAGEVWHDMTGNRSGTVTINQDGWGHFFVNGGSVSVWVKR

SEQ ID NO: 32179 - protein, 485 aa, Bacillus sp.
HHDGTNGTIMQYFEWNVPNDGQHWNRLHNNAQNLKNAGITAIWIPPAWKGTSQNDVGYGAYDGYDLGEFNQKGTVRTKYGTKAELERAIRSLKANGIQVYGDVVMNHKGGADFTERVQAVEVNPQNRNQEVSGTYQIEAWTGFNFPGRGNQHSSFKWRWYHFDGTDWDQSRQLANRIYKFRGDGKAWDWEVDTENGNYDYLMYADVDMDHPEVINELNRWGVWYANTLNLDGFRLDAVKHIKFSFMRDWLGHVRGQTGKNLFAVAEYWKNDLGALENYLSKTNWTMSAFDVPLHYNLYQASNSSGNYDMRNLLNGTLVQRHPSHAVTFVDNHDTQPGEALESFVQGWFKPLAYATILTREQGYPQVFYGDYYGIPSDGVPSYRQQIDPLLKARQQYAYGRQHDYFDHWDVIGWTREGNASHPNSGLATIMSDGPGGSKWMYVGRQKAGEVWHDMTGNRSGTVTINQDGWGHFFVNGGSVSVWVKR

SEQ ID NO: 32180 - protein, 485 aa, Bacillus sp.
HHDGTNGTIMQYFEWNVPNDGQHWNRLHNNAQNLKNAGITAIWIPPAWKGTSQNDVGYGAYDLYDLGEFNQKGTVRTKYGTKAELERAIRSLKANGIQVYGDVVMNHKGGADFTERVQAVEVNPQNRNQEVSGTYQIEAWTGFNFPGRGNQHSSFVWRWYHFDGTDWDQSRQLANRIYKFRGDGKAWDWEVDTENGNYDYLMYADVDMDHPEVINELNRWGVWYANTLNLDGFRLDAVKHIKFSFMRDWLGHVRGQTGKNLFAVAEYWKNDLGALENYLSKTNWTMSAFDVPLHYNLYQASNSSGNYDMRNLLNGTLVQRHPSHAVTFVDNHDTQPGEALESFVQGWFKPLAYATILTREQGYPQVFYGDYYGIPSDGVPSYRQQIDPLLKARQQYAYGRQHDYFDHWDVIGWTREGNASHPNSGLATIMSDGPGGSKWMYVGRQKAGEVWHDMTGNRSGTVTINQDGWGHFFVNGGSVSVWVKR

SEQ ID NO: 32181 - protein, 485 aa, Bacillus sp.
HHDGTNGTIMQYFEWNVPNDGQHWNRLHNNAQNLKNAGITAIWIPPAWKGTSQNDVGYGAYDLYDLGEFNQKGTVRTKYGTKAELERAIRSLKANGIQVYGDVVMNHKGGADFTERVQAVEVNPQNRNQEVSGTYQIEAWTGFNFPGRGNQHSSFKWGWYHFDGTDWDQSRQLANRIYKFRGDGKAWDWEVDTENGNYDYLMYADVDMDHPEVINELNRWGVWYANTLNLDGFRLDAVKHIKFSFMRDWLGHVRGQTGKNLFAVAEYWKNDLGALENYLSKTNWTMSAFDVPLHYNLYQASNSSGNYDMRNLLNGTLVQRHPSHAVTFVDNHDTQPGEALESFVQGWFKPLAYATILTREQGYPQVFYGDYYGIPSDGVPSYRQQIDPLLKARQQYAYGRQHDYFDHWDVIGWTREGNASHPNSGLATIMSDGPGGSKWMYVGRQKAGEVWHDMTGNRSGTVTINQDGWGHFFVNGGSVSVWVKR

SEQ ID NO: 32182 - protein, 485 aa, Bacillus sp.
HHDGTNGTIMQYFEWNVPNDGQHWNRLHNNAQNLKNAGITAIWIPPAWKGTSQNDVGYGAYDLYDLGEFNQKGTVRTKYGTKAELERAIRSLKANGIQVYGDVVMNHKGGADFTERVQAVEVNPQNRNQEVSGTYQIEAWTGFNFPGRGNQHSSFKWRWYHFDGTDWDQSRQLANRIYKFRGDGKAWDWEVDTENGNYDYLMYADVDMDHPEVINELNRWGVWYANTLNLDGFRLDAVKHIKFSFMRDWLGHVRGQTGINLFAVAEYWKNDLGALENYLSKTNWTMSAFDVPLHYNLYQASNSSGNYDMRNLLNGTLVQRHPSHAVTFVDNHDTQPGEALESFVQGWFKPLAYATILTREQGYPQVFYGDYYGIPSDGVPSYRQQIDPLLKARQQYAYGRQHDYFDHWDVIGWTREGNASHPNSGLATIMSDGPGGSKWMYVGRQKAGEVWHDMTGNRSGTVTINQDGWGHFFVNGGSVSVWVKR

SEQ ID NO: 32183 - protein, 485 aa, Bacillus sp.
HHDGTNGTIMQYFEWNVPNDGQHWNRLHNNAQNLKNAGITAIWIPPAWKGTSQNDVGYGAYDLYDLGEFNQKGTVRTKYGTKAELERAIRSLKANGIQVYGDVVMNHKGGADFTERVQAVEVNPQNRNQEVSGTYQIEAWTGFNFPGRGNQHSSFKWRWYHFDGTDWDQSRQLANRIYKFRGDGKAWDWEVDTENGNYDYLMYADVDMDHPEVINELNRWGVWYANTLNLDGFRLDAVKHIKFSFMRDWLGHVRGQTGKNLFAVAEYWKNDLGALENYLSKTQWTMSAFDVPLHYNLYQASNSSGNYDMRNLLNGTLVQRHPSHAVTFVDNHDTQPGEALESFVQGWFKPLAYATILTREQGYPQVFYGDYYGIPSDGVPSYRQQIDPLLKARQQYAYGRQHDYFDHWDVIGWTREGNASHPNSGLATIMSDGPGGSKWMYVGRQKAGEVWHDMTGNRSGTVTINQDGWGHFFVNGGSVSVWVKR

SEQ ID NO: 32184 - protein, 485 aa, Bacillus sp.
HHDGTNGTIMQYFEWNVPNDGQHWNRLHNNAQNLKNAGITAIWIPPAWKGTSQNDVGYGAYDLYDLGEFNQKGTVRTKYGTKAELERAIRSLKANGIQVYGDVVMNHKGGADFTERVQAVEVNPQNRNQEVSGTYQIEAWTGFNFPGRGNQHSSFKWRWYHFDGTDWDQSRQLANRIYKFRGDGKAWDWEVDTENGNYDYLMYADVDMDHPEVINELNMWGVWYANTLNLDGFRLDAVKHIKFSFMRDWLGHVRGQTGKNLFAVAEYWKNDLGALENYLSKTNWTMSAFDVPLHYNLYQASNSSGNYDMRNLLNGTLVQRHPSHAVTFVDNHDTQPGEALESFVQGWFKPLAYATILTREQGYPQVFYGDYYGIPSDGVPSYRQQIDPLLKARQQYAYGRQHDYFDHWDVIGWTREGNASHPNSGLATIMSDGPGGSKWMYVGRQKAGEVWHDMTGNRSGTVTINQDGWGHFFVNGGSVSVWVKR

SEQ ID NO: 32185 - protein, 485 aa, Bacillus sp.
HHDGTNGTIMQYFEWNVPNDGQHWNRLHNNAQNLKNAGITAIWIPPAWKGLSQNDVGYGAYDLYDLGEFNQKGTVRTKYGTKAELERAIRSLKANGIQVYGDVVMNHKGGADFTERVQAVEVNPQNRNQEVSGTYQIEAWTGFNFPGRGNQHSSFKWRWYHFDGTDWDQSRQLANRIYKFRGDGKAWDWEVDTENGNYDYLMYADVDMDHPEVINELNRWGVWYANTLNLDGFRLDAVKHIKFSFMRDWLGHVRGQTGKNLFAVAEYWKNDLGALENYLSKTNWTMSAFDVPLHYNLYQASNSSGNYDMRNLLNGTLVQRHPSHAVTFVDNHDTQPGEALESFVQGWFKPLAYATILTREQGYPQVFYGDYYGIPSDGVPSYRQQIDPLLKARQQYAYGRQHDYFDHWDVIGWTREGNASHPNSGLATIMSDGPGGSKWMYVGRQKAGEVWHDMTGNRSGTVTINQDGWGHFFVNGGSVSVWVKR

SEQ ID NO: 32186 - protein, 485 aa, Bacillus sp.
HHDGTNGTIMQYFEWNVPNDGQHWNRLHNNAQNLKNAGITAIWIPPAWKGTSQNDVGYGAYDLYDLGEFNQKGTVRTKYGTKAELERAIRSLKANGIQVYGDVVMNHKGGADFTERVQAVEVNPQNRNQEVSGTYQIEAWTGFNFPGRGNQHSSFKWRWYHFDGTDWDQSRQLANRIYKFRGDGKAWDWEVDTENGNYDYLMYADVDMDHPEVINELNRWGVWYANTLNLDGFRLDAVKHIKFSFMRDWLGHVRGQTGKNLFAVAEYWKNDLGALENYQSKTNWTMSAFDVPLHYNLYQASNSSGNYDMRNLLNGTLVQRHPSHAVTFVDNHDTQPGEALESFVQGWFKPLAYATILTREQGYPQVFYGDYYGIPSDGVPSYRQQIDPLLKARQQYAYGRQHDYFDHWDVIGWTREGNASHPNSGLATIMSDGPGGSKWMYVGRQKAGEVWHDMTGNRSGTVTINQDGWGHFFVNGGSVSVWVKR

SEQ ID NO: 32187 - protein, 485 aa, Bacillus sp.
HHDGTNGTIMQYFEWNVPNDGQHWNRLHNNAQNLKNAGITAIWIPPAWKGTSQNDVGYGAYDLYDLGEFNQKGTVRTKYGTKAELERAIRSLKANGIQVYGDVVMNHKGGADFTERVQAVEVNPQNRNQEVSGTYQIEAWTGFNFPGRGNQHSSFKWRWYHFDGTDWDQSRQLANRIYKFRGDGKAWDWEVDTENGNYDYLMYADVDMDHPEVINELNRWGVWYANTLNLDGFRLDAVKHIKFSFMRDWLGHVRGQTGKNLFAVAEYWKNDLGSLENYLSKTNWTMSAFDVPLHYNLYQASNSSGNYDMRNLLNGTLVQRHPSHAVTFVDNHDTQPGEALESFVQGWFKPLAYATILTREQGYPQVFYGDYYGIPSDGVPSYRQQIDPLLKARQQYAYGRQHDYFDHWDVIGWTREGNASHPNSGLATIMSDGPGGSKWMYVGRQKAGEVWHDMTGNRSGTVTINQDGWGHFFVNGGSVSVWVKR

SEQ ID NO: 32188 - protein, 485 aa, Bacillus sp.
HHDGTNGTIMQYFEWNVPNDGQHWNRLHNNAQNLKNAGITAIWIPPAWKGTSQNDVGYGAYDLYDLGEFNQKGTVRTKYGTKAELERAIRSLKANGIQVYGDVVMNHKGGADFTERVQAVEVNPQNRNQEVSGTYQIEAWTGFNFPGRGNQHSSFKWRWYHFDGTDWDQSRQLANRIYKFRGDGKAWDWEVDTENGNYDYLMYADVDMDHPERINELNRWGVWYANTLNLDGFRLDAVKHIKFSFMRDWLGHVRGQTGKNLFAVAEYWKNDLGALENYLSKTNWTMSAFDVPLHYNLYQASNSSGNYDMRNLLNGTLVQRHPSHAVTFVDNHDTQPGEALESFVQGWFKPLAYATILTREQGYPQVFYGDYYGIPSDGVPSYRQQIDPLLKARQQYAYGRQHDYFDHWDVIGWTREGNASHPNSGLATIMSDGPGGSKWMYVGRQKAGEVWHDMTGNRSGTVTINQDGWGHFFVNGGSVSVWVKR

SEQ ID NO: 32189 - protein, 485 aa, Bacillus sp.
HHDGTNGTIMQYFEWNVPNDGQHWNRLHNNAQNLKNAGITAIWIPPAWKGTSQNDVGYGAYDLYDLGEFNQKGTVRTKYGTKAELERAIRSLKANGIQVYGDVVMNHKGGADFTERVQAVEVNPQNRNQEVSGTYQIEAWTGFNFPGRGNQHSSFKWRWYHFDGTDWDQSRQLANRIYKFRGDGKAWDWEVDTENGNYDYLMYLDVDMDHPEVINELNRWGVWYANTLNLDGFRLDAVKHIKFSFMRDWLGHVRGQTGKNLFAVAEYWKNDLGALENYLSKTNWTMSAFDVPLHYNLYQASNSSGNYDMRNLLNGTLVQRHPSHAVTFVDNHDTQPGEALESFVQGWFKPLAYATILTREQGYPQVFYGDYYGIPSDGVPSYRQQIDPLLKARQQYAYGRQHDYFDHWDVIGWTREGNASHPNSGLATIMSDGPGGSKWMYVGRQKAGEVWHDMTGNRSGTVTINQDGWGHFFVNGGSVSVWVKR

SEQ ID NO: 32190 - protein, 485 aa, Bacillus sp.
HHDGTNGTIMQYFEWNVPNDGQHWNRLHNNAQNLKNAGITAIWIPPAWKGTSQNDVGYGAYDLYDLGEFNQKGTVRTKYGTKAELERAIRSLKANGIQVYGDVVMNHKGGADFTERVQAVEVGPQNRNQEVSGTYQIEAWTGFNFPGRGNQHSSFKWRWYHFDGTDWDQSRQLANRIYKFRGDGKAWDWEVDTENGNYDYLMYADVDMDHPEVINELNRWGVWYANTLNLDGFRLDAVKHIKFSFMRDWLGHVRGQTGKNLFAVAEYWKNDLGALENYLSKTNWTMSAFDVPLHYNLYQASNSSGNYDMRNLLNGTLVQRHPSHAVTFVDNHDTQPGEALESFVQGWFKPLAYATILTREQGYPQVFYGDYYGIPSDGVPSYRQQIDPLLKARQQYAYGRQHDYFDHWDVIGWTREGNASHPNSGLATIMSDGPGGSKWMYVGRQKAGEVWHDMTGNRSGTVTINQDGWGHFFVNGGSVSVWVKR

SEQ ID NO: 32191 - protein, 485 aa, Bacillus sp.
HHDGTNGTIMQYFEWNVPNDGQHWNRLHNNAQNLKNAGITAIWIPPAWKGTSQNDVGYGAYDLYDLGEFNQKGTVRTKYGTKAELERAIRSLKANGIQVYGDVVMNHKGGADFTERVQAVEVNPQNRNQEVSGTYQIEAWTGFNFPGRGNQHSSFKWRWYHFDGTDWDQSRQLANRIYKFRGDGKAWDWEVDTENGNYDYLMYADVDMDHPEVINELNRWGVWYANTLNLDGFRLDAVKHIKFSFMRDWLGHVRGQTGKNLFAVAEYWKNDLGALENYLSKTNWTMSAFDVPLHYNLYQASNSSGNYDMRNLLNGTLVQRHPSHAVTFVDNHDTQPGEALESFVQGWFKPLAYATILTREQGYPQVFYGDYYGIPSDGVPSYRQQIDPLLKARQQYAYGRQHDYFDHWDVIGWTREGNASHPNSGLATIMSDGPGGSKWMYVGRQKEGEVWHDMTGNRSGTVTINQDGWGHFFVNGGSVSVWVKR

SEQ ID NO: 32192 - protein, 485 aa, Bacillus sp.
HHDGTNGTIMQYFEWNVPNDGQHWNRLHNNAQNLKNAGITAIWIPPAWKGTSQNDVGYGAYDLYDLGEFNQKGTVRTKYGTKAELERAIRSLKANGIQVYGDVVMNHKGGADFTERVQAVEVNPQNRNQEVSGTYQIEAWTGFNFPGRGNQHSSFKWRWYHFDGTDWDQSRQLANRIYKFRGDGKAWDWEVDTENGNYDYLMYALVDMDHPEVINELNRWGVWYANTLNLDGFRLDAVKHIKFSFMRDWLGHVRGQTGKNLFAVAEYWKNDLGALENYLSKTNWTMSAFDVPLHYNLYQASNSSGNYDMRNLLNGTLVQRHPSHAVTFVDNHDTQPGEALESFVQGWFKPLAYATILTREQGYPQVFYGDYYGIPSDGVPSYRQQIDPLLKARQQYAYGRQHDYFDHWDVIGWTREGNASHPNSGLATIMSDGPGGSKWMYVGRQKAGEVWHDMTGNRSGTVTINQDGWGHFFVNGGSVSVWVKR

SEQ ID NO: 32193 - protein, 485 aa, Bacillus sp.
HHDGTNGTIMQYFEWNVPNDGQHWNRLHNNAQNLKNAGITAIWIPPAWKGTSQNDVGYGAYDLYDLGEFNQKGTVRTKYGTKAELERAIRSLKANGIQVYGDVVMNHKGGADFTERVQAVEVNPQNRNQEVSGTYQIEAWTGFNFPGRGNQHSSFKWRWYHFDGTDWDQSRQLANRIYKFRGDGKAWDWEVDTENGNYDYLMYADVDMDHPEVINELNRWGVWYANTLNLDGFRLDAVKHIKFSFMRDWLGHVRGQTGKNLFAVAEYWKNDLGALENYLSKTNWTMSAFDVPLHYNLYQASNSSGNYDMRNVLNGTLVQRHPSHAVTFVDNHDTQPGEALESFVQGWFKPLAYATILTREQGYPQVFYGDYYGIPSDGVPSYRQQIDPLLKARQQYAYGRQHDYFDHWDVIGWTREGNASHPNSGLATIMSDGPGGSKWMYVGRQKAGEVWHDMTGNRSGTVTINQDGWGHFFVNGGSVSVWVKR

SEQ ID NO: 32194 - protein, 485 aa, Bacillus sp.
HHDGTNGTIMQYFEWNVPNDGQHWNRLHNNAQNLKNAGITAIWIPPAWKGTSQNDVGYGAYDLYDLGEFNQKGTVRTKYGTKAELERAIRSLKANGIQVYGDVVMNHKGGADFTERVQAVEVNPQNRNQEVSGTYQIEAWTGFNFPGRGNQHSSFKWRWYHFDGTDWDQSRQLANRIYKFRGDGKAWDWEVDTENGNYDYLMYADVDMDHPEVINELNRWGVWYANTLNLDGFRLDAVKHIKFSFMRDWLGHVRGQTGKNLFAVAEYWKNDLGALENYLSKTNWTMSAFDVPLHYNLYQASNSSGNYDMRNLLNGTLVQRHPSHAVTFVDNHDTQPGEALESFVQGWFKPLAYATILTREQGYPQVFYGDYYGIPSDGVPSYRQQIDPLLKARQQYAYGRQDDYFDHWDVIGWTREGNASHPNSGLATIMSDGPGGSKWMYVGRQKAGEVWHDMTGNRSGTVTINQDGWGHFFVNGGSVSVWVKR

SEQ ID NO: 32195 - protein, 485 aa, Bacillus sp.
HHDGTNGTIMQYFEWNVPNDGQHWNRLHNNAQNLKNAGITAIWIPPAWKGTSQNDVGYGAYDLYDLGEFNQKGTVRTKYGTKAELERAIRSLKANGIQVYGDVVMNHKGGADFTERVQAVEVNPQNRNQEVSGTYQIEAWTGFNAPGRGNQHSSFKWRWYHFDGTDWDQSRQLANRIYKFRGDGKAWDWEVDTENGNYDYLMYADVDMDHPEVINELNRWGVWYANTLNLDGFRLDAVKHIKFSFMRDWLGHVRGQTGKNLFAVAEYWKNDLGALENYLSKTNWTMSAFDVPLHYNLYQASNSSGNYDMRNLLNGTLVQRHPSHAVTFVDNHDTQPGEALESFVQGWFKPLAYATILTREQGYPQVFYGDYYGIPSDGVPSYRQQIDPLLKARQQYAYGRQHDYFDHWDVIGWTREGNASHPNSGLATIMSDGPGGSKWMYVGRQKAGEVWHDMTGNRSGTVTINQDGWGHFFVNGGSVSVWVKR

SEQ ID NO: 32196 - protein, 485 aa, Bacillus sp.
HHDGTNGTIMQYFEWNVPNDGQHWNRLHNNAQNLKNAGITAIWIPPAWKGTSQNDVGYGAYDLYDLGEFNQKGTVRTKYGTKAELERAIRSLKANGIMVYGDVVMNHKGGADFTERVQAVEVNPQNRNQEVSGTYQIEAWTGFNFPGRGNQHSSFKWRWYHFDGTDWDQSRQLANRIYKFRGDGKAWDWEVDTENGNYDYLMYADVDMDHPEVINELNRWGVWYANTLNLDGFRLDAVKHIKFSFMRDWLGHVRGQTGKNLFAVAEYWKNDLGALENYLSKTNWTMSAFDVPLHYNLYQASNSSGNYDMRNLLNGTLVQRHPSHAVTFVDNHDTQPGEALESFVQGWFKPLAYATILTREQGYPQVFYGDYYGIPSDGVPSYRQQIDPLLKARQQYAYGRQHDYFDHWDVIGWTREGNASHPNSGLATIMSDGPGGSKWMYVGRQKAGEVWHDMTGNRSGTVTINQDGWGHFFVNGGSVSVWVKR

SEQ ID NO: 32197 - protein, 485 aa, Bacillus sp.
HHDGTNGTIMQYFEWNVPNDGQHWNRLHNNAQNLKNAGITAIWIPPAWKGTSQNDVGYGAYDLYDLGEFNQKGTVRTKYGTKAELERAIRSLKANGIQVYGDVVMNHKGGADFTERVQAVEVNPQNRNQEVSGTYQIEAWTGFNFPGRGNQHSSFKWRWYHFDGTDWDQSRQLANRIYKFRGDGKAWDWEVDTENGNYDYLMYADVDPDHPEVINELNRWGVWYANTLNLDGFRLDAVKHIKFSFMRDWLGHVRGQTGKNLFAVAEYWKNDLGALENYLSKTNWTMSAFDVPLHYNLYQASNSSGNYDMRNLLNGTLVQRHPSHAVTFVDNHDTQPGEALESFVQGWFKPLAYATILTREQGYPQVFYGDYYGIPSDGVPSYRQQIDPLLKARQQYAYGRQHDYFDHWDVIGWTREGNASHPNSGLATIMSDGPGGSKWMYVGRQKAGEVWHDMTGNRSGTVTINQDGWGHFFVNGGSVSVWVKR

SEQ ID NO: 32198 - protein, 485 aa, Bacillus sp.
HHDGTNGTIMQYFEWNVPNDGQHWNRLHNNAQNLKNAGITAIWIPPAWKGTSQNDVGYGAYDLYDLGEFNQKGTVRTKYGTKAELERAIRSLKANGIQVYGDVVMNHKGGADFTERVQAVEVNPQNRNQEVSGTYQIEAWTGFNFPGRGNQHSSFKWRWYHFDGTDWDQSRQLANRIYKFRGDGKAWLWEVDTENGNYDYLMYADVDMDHPEVINELNRWGVWYANTLNLDGFRLDAVKHIKFSFMRDWLGHVRGQTGKNLFAVAEYWKNDLGALENYLSKTNWTMSAFDVPLHYNLYQASNSSGNYDMRNLLNGTLVQRHPSHAVTFVDNHDTQPGEALESFVQGWFKPLAYATILTREQGYPQVFYGDYYGIPSDGVPSYRQQIDPLLKARQQYAYGRQHDYFDHWDVIGWTREGNASHPNSGLATIMSDGPGGSKWMYVGRQKAGEVWHDMTGNRSGTVTINQDGWGHFFVNGGSVSVWVKR

SEQ ID NO: 32199 - protein, 485 aa, Bacillus sp.
HHDGTNGTIMQYFEWNVPNDGQHWNRLHNNAQNLKNAGITAIWIPPAWKGTSQNDVGYGAYDLYDLGEFNQKGTVRTKYGTKAELERAIRSLKANGIQVYGDVVMNHKGGADFTERVQAVEVNPQNRNQEVSGTYQIEAWTGFNFPGRGNQHSSFKWRWYHFDGTDWDQSRQLANRIYKFRGDGKAWDWEVDTENGNYDYLMYADVDMDHPEVINELNRWGVWYANTLNLDGFRLDAVKHIKFSFMRDWLGHVRGQTGKNLFAVAEYWKNDLGALENYLSKTNWTMSAFDVPLHYNLYQASNSSGNYDMRNLLNGTLVQRHPSHAVTFVDNHDTQPGEALESFVQGWFKPLAYATILTREQGYPQVFYGDYYRIPSDGVPSYRQQIDPLLKARQQYAYGRQHDYFDHWDVIGWTREGNASHPNSGLATIMSDGPGGSKWMYVGRQKAGEVWHDMTGNRSGTVTINQDGWGHFFVNGGSVSVWVKR

SEQ ID NO: 32200 - protein, 485 aa, Bacillus sp.
HHDGTNGTIMQYFEWNVPNDGQHWNRLHNNAQNLKNAGITAIWIPPAWKGTSQNDVGYGAYDLYDLGEFNQKGTVRTKYGTKAELERAIRSLKANGIQVYGDVVMNHKGGADFTERVQAVEVNPQNRNQEVSGTYQIEAWTGFNFPGRGNQHSSFKWRWYHFDGTDWDQSRQLANRIYKFRGDGKAWDWEVDTENGNYDYLMYADVDMDHPEVINELNRWGVWYANTLNLDGFRLDAVKHIKFSFMRDWLGCVRGQTGKNLFAVAEYWKNDLGALENYLSKTNWTMSAFDVPLHYNLYQASNSSGNYDMRNLLNGTLVQRHPSHAVTFVDNHDTQPGEALESFVQGWFKPLAYATILTREQGYPQVFYGDYYGIPSDGVPSYRQQIDPLLKARQQYAYGRQHDYFDHWDVIGWTREGNASHPNSGLATIMSDGPGGSKWMYVGRQKAGEVWHDMTGNRSGTVTINQDGWGHFFVNGGSVSVWVKR

SEQ ID NO: 32201 - protein, 485 aa, Bacillus sp.
HHDGTNGTIMQYFEWNVPNDGQHWNRLHNNAQNLKNAGITAIWIPPAWKGTSQNDVGYGAYDLYDLGEFNQKGTVRTKYGTKAELERAIRSLKANGIQVYGDVVMNHKGGADFTERVQAVEVNPQNRNQEVSGTYQIEAWTGFNFPGRGNQHSSFKWRWYHFDGTDWDQSRQLANRIYKFRGDGKAWDWEVDTENGNYDYLMYADVDMDHPEVINELNRWGVWYANTLNLDGFRLDAVKHIKFSFMRDWLGHVRGQTGKNLFAVAEYWKNDLGALENYLSKTNWTMSAFDVPLHYNLYQASNSSGNYDMRNLLNGTLVQRHPSHAVTFVDNHDTQPGEALESFVQGWFKPLAYATILTREQGYPQVFYGDYYGIPSDGVPSYRQQIDPLLKARQQYAYGRQHDYFDHWDVIGWTREGNASHPNSGLATIMSDGPGGSKCMYVGRQKAGEVWHDMTGNRSGTVTINQDGWGHFFVNGGSVSVWVKR

SEQ ID NO: 32202 - protein, 485 aa, Bacillus sp.
HHDGTNGTIMQYFEWNVPNDGQHWNRLHNNAQNLKNAGITAIWIPPAWKGTSQNDVGYGAYDLYDLGEFNQKGTVRTKYGTKAELERAIRSLKANGIQVYGDVVMNHKGGADFTERVQAVEVNPQNRNQEVSGTYQIEAWTGFNFPGRGNQHSSFKWRWYHFDGTDWDQSRQLANRIYKFRGDGKAWDWEVDTENGNYDYLMYADVDMFHPEVINELNRWGVWYANTLNLDGFRLDAVKHIKFSFMRDWLGHVRGQTGKNLFAVAEYWKNDLGALENYLSKTNWTMSAFDVPLHYNLYQASNSSGNYDMRNLLNGTLVQRHPSHAVTFVDNHDTQPGEALESFVQGWFKPLAYATILTREQGYPQVFYGDYYGIPSDGVPSYRQQIDPLLKARQQYAYGRQHDYFDHWDVIGWTREGNASHPNSGLATIMSDGPGGSKWMYVGRQKAGEVWHDMTGNRSGTVTINQDGWGHFFVNGGSVSVWVKR

SEQ ID NO: 32203 - protein, 485 aa, Bacillus sp.
HHDGTNGTIMQYFEWNVPNDGQHWNRLHNNAQNLKNAGITAIWIPPAWKGTSQNDVGYGAYDLYDLGEFNQKGTVRTKYGTKAELERAIRSLKANGIQVYGDVVMNHKGGADFTERVQAVEVNPQNRNQEVSGTYQIEAWTGFNFPGRGNQHSSFKWRWYHFDGTDWDQSRQLANRIYKFRGDGKAWDWEVDTENGNYDYLMYADVDMDHPEVINELNRWGVWYANTLNLDGFRLDAVKHIKFSFMRDWLGHVRGQTGKNLFAVAEYWKNDLGALRNYLSKTNWTMSAFDVPLHYNLYQASNSSGNYDMRNLLNGTLVQRHPSHAVTFVDNHDTQPGEALESFVQGWFKPLAYATILTREQGYPQVFYGDYYGIPSDGVPSYRQQIDPLLKARQQYAYGRQHDYFDHWDVIGWTREGNASHPNSGLATIMSDGPGGSKWMYVGRQKAGEVWHDMTGNRSGTVTINQDGWGHFFVNGGSVSVWVKR

SEQ ID NO: 32204 - protein, 485 aa, Bacillus sp.
HHDGTNGTIMQYFEWNVPNDGQHWNRLHNNAQNLKNAGITAIWIPPAWKGTSQNDVGYGAYDLYDLGEFNQKGTVRTKYGTKAELERAIRSLKANGIQVYGDVVMNHKGGADFTERVQAVEVNPQNRNQEVSGTYQIEAWTGFNFPGRGNQHSSFKWRWYHFDGTDWDQSRQLANRIYKFRGDGKAWDWEVDTENGNYDYLMYADVDMDHPEVINELNRWGVWYANTLNLDGFRLDAVKHIKFSFMRDWLGHVRGQTGKNLFAVAEYWKNDLGALENYLSKTNWTMSAFDVPLHYNLYQASNSSGNYDMRNLLNGTLVQRHPSHAVTFVDNHDTQPGEALESFVQGWFKPSAYATILTREQGYPQVFYGDYYGIPSDGVPSYRQQIDPLLKARQQYAYGRQHDYFDHWDVIGWTREGNASHPNSGLATIMSDGPGGSKWMYVGRQKAGEVWHDMTGNRSGTVTINQDGWGHFFVNGGSVSVWVKR

SEQ ID NO: 32205 - protein, 485 aa, Bacillus sp.
HHDGTNGTIMQYFEWNVPNDGQHWNRLHNNAQNLKNAGITAIWIPPAWKGTSQNDVGYGAYDLYDLGEFNQKGTVRTKYGTKAELERAIRSLKANGIQVYGDVVMNHKGGADFTERVQAVEVNPQNRNQEVSGTYQIEAWTGFNFPGRGNQHSSFKWRWYHFDGTDWDQSRLLANRIYKFRGDGKAWDWEVDTENGNYDYLMYADVDMDHPEVINELNRWGVWYANTLNLDGFRLDAVKHIKFSFMRDWLGHVRGQTGKNLFAVAEYWKNDLGALENYLSKTNWTMSAFDVPLHYNLYQASNSSGNYDMRNLLNGTLVQRHPSHAVTFVDNHDTQPGEALESFVQGWFKPLAYATILTREQGYPQVFYGDYYGIPSDGVPSYRQQIDPLLKARQQYAYGRQHDYFDHWDVIGWTREGNASHPNSGLATIMSDGPGGSKWMYVGRQKAGEVWHDMTGNRSGTVTINQDGWGHFFVNGGSVSVWVKR

SEQ ID NO: 32206 - protein, 485 aa, Bacillus sp.
HHDGTNGTIMQYFEWNVPNDGQHWNRLHNNAQNLKNAGITAIWIPPAWKGTSQNDVGYGAYDLYDLGEFNQKGTVRTKYGTKAELERAIRSLKANGIQVYGDVVMNQKGGADFTERVQAVEVNPQNRNQEVSGTYQIEAWTGFNFPGRGNQHSSFKWRWYHFDGTDWDQSRQLANRIYKFRGDGKAWDWEVDTENGNYDYLMYADVDMDHPEVINELNRWGVWYANTLNLDGFRLDAVKHIKFSFMRDWLGHVRGQTGKNLFAVAEYWKNDLGALENYLSKTNWTMSAFDVPLHYNLYQASNSSGNYDMRNLLNGTLVQRHPSHAVTFVDNHDTQPGEALESFVQGWFKPLAYATILTREQGYPQVFYGDYYGIPSDGVPSYRQQIDPLLKARQQYAYGRQHDYFDHWDVIGWTREGNASHPNSGLATIMSDGPGGSKWMYVGRQKAGEVWHDMTGNRSGTVTINQDGWGHFFVNGGSVSVWVKR

SEQ ID NO: 32207 - protein, 485 aa, Bacillus sp.
HHDGTNGTIMQYFEWNVPNDGQHWNRLHNNAQNLKNAGITAIWIPPAWKGTSQNDVGYGAYDLYDLGEFNQKGTVRTKYGTKAELERAIRSLKAWGIQVYGDVVMNHKGGADFTERVQAVEVNPQNRNQEVSGTYQIEAWTGFNFPGRGNQHSSFKWRWYHFDGTDWDQSRQLANRIYKFRGDGKAWDWEVDTENGNYDYLMYADVDMDHPEVINELNRWGVWYANTLNLDGFRLDAVKHIKFSFMRDWLGHVRGQTGKNLFAVAEYWKNDLGALENYLSKTNWTMSAFDVPLHYNLYQASNSSGNYDMRNLLNGTLVQRHPSHAVTFVDNHDTQPGEALESFVQGWFKPLAYATILTREQGYPQVFYGDYYGIPSDGVPSYRQQIDPLLKARQQYAYGRQHDYFDHWDVIGWTREGNASHPNSGLATIMSDGPGGSKWMYVGRQKAGEVWHDMTGNRSGTVTINQDGWGHFFVNGGSVSVWVKR

SEQ ID NO: 32208 - protein, 485 aa, Bacillus sp.
HHDGTNGTIMQYFEWNVPNDGQHWNRLHNNAQNLKNAGITAIWIPPAWKGTSQNDVGYGAYDLYDLGEFNQKGTVRTKYGTKAELERAIRSLKANGIQVYGDVVMNHKGGADFTERVQAVEVNPQNRNQEVSGTYQIEAWTGFNFPGRGNQHSSFKWRWYHFDGTDWDQSRQLANRIYKFRGDGKAWDWEVDTENGNYDYLMYADVDMDHWEVINELNRWGVWYANTLNLDGFRLDAVKHIKFSFMRDWLGHVRGQTGKNLFAVAEYWKNDLGALENYLSKTNWTMSAFDVPLHYNLYQASNSSGNYDMRNLLNGTLVQRHPSHAVTFVDNHDTQPGEALESFVQGWFKPLAYATILTREQGYPQVFYGDYYGIPSDGVPSYRQQIDPLLKARQQYAYGRQHDYFDHWDVIGWTREGNASHPNSGLATIMSDGPGGSKWMYVGRQKAGEVWHDMTGNRSGTVTINQDGWGHFFVNGGSVSVWVKR

SEQ ID NO: 32209 - protein, 485 aa, Bacillus sp.
HHDGTNGTIMQYFEWNVPNDGQHWNRLHNNAQNLKNAGITAIWIPPAWKGTSQNDVGYGAYDLYDLGEFNQKGTVRTKYGTKAELERAIRSLKANGIQVYGDVVMNHKGGADFTERVQAVEVNPQNRNQEVSGTYQIEAWTGFNFPGRGNQHSSFKWRWYHFDGTDWDQSRQLANRIYKFRGDGKAWDWEVDTENGNYDYLMYADVDMDHPEVINELNRWGVWYANTLNLDGFRLDAVKHIKFSFMRDWLGHVRGQTGKNLFAVAEYWKNDLGALENYLSKTNWTMSAFDVPEHYNLYQASNSSGNYDMRNLLNGTLVQRHPSHAVTFVDNHDTQPGEALESFVQGWFKPLAYATILTREQGYPQVFYGDYYGIPSDGVPSYRQQIDPLLKARQQYAYGRQHDYFDHWDVIGWTREGNASHPNSGLATIMSDGPGGSKWMYVGRQKAGEVWHDMTGNRSGTVTINQDGWGHFFVNGGSVSVWVKR

SEQ ID NO: 32210 - protein, 485 aa, Bacillus sp.
HHDGTNGTIMQYFEWNVPNDGQHWNRLHNNAQNLKNAGITAIWIPPAWKGTSQNDVGYGAYDLYDLGEFNQKGTVRTKYGTKAELERAIRSLKANGIQVYGDVVMNHKGGADFTERVQAVEVNPQNRNQEVSGTYQIEAWTGFNFPGRGNQHSSFKWRWYHFDGTDWDQSRQLANRIYKFRGDGKAWDWEVDTENGNYDYLMTADVDMDHPEVINELNRWGVWYANTLNLDGFRLDAVKHIKFSFMRDWLGHVRGQTGKNLFAVAEYWKNDLGALENYLSKTNWTMSAFDVPLHYNLYQASNSSGNYDMRNLLNGTLVQRHPSHAVTFVDNHDTQPGEALESFVQGWFKPLAYATILTREQGYPQVFYGDYYGIPSDGVPSYRQQIDPLLKARQQYAYGRQHDYFDHWDVIGWTREGNASHPNSGLATIMSDGPGGSKWMYVGRQKAGEVWHDMTGNRSGTVTINQDGWGHFFVNGGSVSVWVKR

SEQ ID NO: 32211 - protein, 485 aa, Bacillus sp.
HHDGTNGTIMQYFEWNVPNDGQHWNRLHNNAQNLKNAGITAIWIPPAWKGTSQNDVGYGAYDLYDLGEFNQKGTVRTKYGTKAELERAIRSLKANGIQVYGDVVMNHKGGADFTERVQAVEVNPQNRNQEVSGTYQIEAWTGFNFPGRGNQHSSFKWRWYHFDGTDWDQSRQLANRIYKFRGDGKAWDWEVDTENGNYDYLMYADVDMDHPEVINELNRWGVWYANTLNLDGFRLDAVKHIKFSFMRDWLGHVRGQTGKNLFAVAEYWKNDLGALENYLSKTNWTMSAFDVPLHYNLYQASNSSGNYDMRNLLNGTLVQRHPSHAVTFVDNHDTQPGEALESFVQGWFKPLAYATILTREQGYPQVFYGDYYGIPSDGVPSYRQQIDLLLKARQQYAYGRQHDYFDHWDVIGWTREGNASHPNSGLATIMSDGPGGSKWMYVGRQKAGEVWHDMTGNRSGTVTINQDGWGHFFVNGGSVSVWVKR

SEQ ID NO: 32212 - protein, 485 aa, Bacillus sp.
HHDGTNGTIMQYFEWNVPNDGQHWNRLHNNAQNLKNAGITAIWIPPAWKGTSQNDVGYGAYDLYDLGEFNQKGTVRTKYGTKAELERAIRSLKANGIQVYGDVVMNHKGGADFTERVQAVEVNPQNRNQEVSGTYQIEAWTGFNFPGRGNQHSSFKWRWYHFDGTDWDQSRQLANRIYKFRGDGKAWDWEVDTENGNYDYLMYADVDMDHPEVINELNRWGVWYANTLNLDGFRLDAVKHIKFSFMRDWLGHVRGQTGKNLFAVAEYWKNDLGALENYLSKTNWTMSAFDVPLHYNLYQASNSSGNYDMRNLLNGTLVQRHPSHAVTFVDNHDTQPGEALESFVQGWFKPLAYATILTREQGYPQVFYGDYYGIPSDGVPSYRQQIDPLLKARQQYAYGRQHDYFDHWDVIGWTREGNASHPNSGSATIMSDGPGGSKWMYVGRQKAGEVWHDMTGNRSGTVTINQDGWGHFFVNGGSVSVWVKR

SEQ ID NO: 32213 - protein, 485 aa, Bacillus sp.
HHDGTNGTIMQYFEWNVPNDGQHWNRLHNNAQNLKNAGITAIWIPPAWKGTSQNDVGYGAYDLYDLGEFNQKGTVRTKYGTKAELERAIRSLKANGIQVYGDVVMNHKGGADFTERVQAVEVNPQNRNQEVSGTYQIEAWTGFNFPGRGNQHSSFKWRWYHFDGTDWDQSRQLANRIYKFRGDGKAWDWEVDTENGNYDYLMYADVDMDHPEVINELNRAGVWYANTLNLDGFRLDAVKHIKFSFMRDWLGHVRGQTGKNLFAVAEYWKNDLGALENYLSKTNWTMSAFDVPLHYNLYQASNSSGNYDMRNLLNGTLVQRHPSHAVTFVDNHDTQPGEALESFVQGWFKPLAYATILTREQGYPQVFYGDYYGIPSDGVPSYRQQIDPLLKARQQYAYGRQHDYFDHWDVIGWTREGNASHPNSGLATIMSDGPGGSKWMYVGRQKAGEVWHDMTGNRSGTVTINQDGWGHFFVNGGSVSVWVKR

SEQ ID NO: 32214 - protein, 485 aa, Bacillus sp.
HHNGTNGTMMQYFEWYLPNDGNHWNRLNSDASNLKSKGITAVWIPPAWKGTSQNDVGYGAYDLYDLGEFNQKGTVRTKYGTRSQLQAAVTSLKNNGIQVYGDVVMNHKGGADATEMVRAVEVNPNNRNQEVTGEYTIEAWTRFDFPGRGNTHSSFKWRWYHFDGVDWDQSRNLNNRIYKFRGHGKAWDWEVDTEFGNYDYLMYVDYDYDHPETTNEMRNWGVWYTNTLGLDGFRIDAVKHIKYSFTRDWINHVRSATGKNMFAVAEFWKNDLGAIENYLQKTNWNHSVFDVPLHYNLYNASKSQGNYDMRNIFNGTVVQRHPSHAVTFVDNHDSQPEEALESFVDTWFKPLAYALTLTREQGYPSVFYGDYYGIPTHGVPAMRSKIDPILEARQKYAYGPQHDYLDHPDVIGWTRKGDSSHPKSGLATLITDGPGGSNRMYAGLKNAGETWYDITGNRSDTVKIGSDGWGEFHVNDGSVSIYVQK

SEQ ID NO: 32215 - protein, 485 aa, Bacillus sp.
HHDGTNGTIMQYFEWNVPNDGQHWNRLHNNAQNLKNAGITAIWIPPAWKGTSQNDVGYGAYDLYDLGEFNQKGTVRTKYGTKAELERAIRSLKANGIQVYGDVVMNHKGGADFTERVQAVEVNPQNRCQEVSGTYQIEAWTGFNFPGRGNQHSSFKWRWYHFDGTDWDQSRQLANRIYKFRGDGKAWDWEVDTENGNYDYLMYADVDMDHPEVINELNRWGVWYANTLNLDGFRLDAVKHIKFSFMRDWLGHVRGQTGKNLFAVAEYWKNDLGALENYLSKTNWTMSAFDVPLHYNLYQASNSSGNYDMRNLLNGTLVQRHPSHAVTFVDNHDTQPGEALESFVQGWFKPLAYATILTREQGYPQVFYGDYYGIPSDGVPSYRQQIDPLLKARQQYAYGRQHDYFDHWDVIGWTREGNASHPNSGLATIMSDGPGGSKWMYVGRQKAGEVWHDMTGNRSGTVTINQDGWGHFFVNGGSVSVWVKR

SEQ ID NO: 32216 - protein, 485 aa, Bacillus sp.
HHDGTNGTIMQYFEWNVPNDGQHWNRLHNNAQNLKNAGITAIWIPPAWKGTSQNDVGYGAYDLYDLGEFNQKGTVRTKYGTKAELERAIRSLKANGIQVYGDVVMNHKGGADFTERVQAVEVNPQNRNQEVSGTYQIEAWTGFNFPGRGNQHSSFKWRWYHFDGTDWDQSRQLANRIYKFRGDGKAWDWEVDTENGNYDYLMYADVDMDHPEVINELNRWGVWYANTLNLDGFRLDAVKHIKFSFMRDWLGHVRGQTGKNLFAVAEYWKNDLGALENYLSKTNWTMSAFDVPLHYNLYQASNSSGNYDMRNLLNGTLVQRTPSHAVTFVDNHDTQPGEALESFVQGWFKPLAYATILTREQGYPQVFYGDYYGIPSDGVPSYRQQIDPLLKARQQYAYGRQHDYFDHWDVIGWTREGNASHPNSGLATIMSDGPGGSKWMYVGRQKAGEVWHDMTGNRSGTVTINQDGWGHFFVNGGSVSVWVKR

SEQ ID NO: 32217 - protein, 485 aa, Bacillus sp.
HHDGTNGTIMQYFEWNVPNDGQHWNRLHNNAQNLKNAGITAIWIPPAWKGTSQNDVGYGAYDLYDLGEFNQKGTVRTKYGTKAELERAIRSLKANGIQVYGDVVMNHKGGADFTERVQAVEVNPQNRNQEVSGTYQIEAWTGFNFPGRGNQHSSFKWRWYHFDGTDWDQSRQLANRIYKFRGDGKAWDWEVDTENGNYDYLMYADVDMDHPEVINELNRWGVWYANTLNLDGFRLDAVKHIKFSFMRDWLGHVRGQTGKNLFAVAEYWKNDLGALENYLSKTNWTMSAFDVPGHYNLYQASNSSGNYDMRNLLNGTLVQRHPSHAVTFVDNHDTQPGEALESFVQGWFKPLAYATILTREQGYPQVFYGDYYGIPSDGVPSYRQQIDPLLKARQQYAYGRQHDYFDHWDVIGWTREGNASHPNSGLATIMSDGPGGSKWMYVGRQKAGEVWHDMTGNRSGTVTINQDGWGHFFVNGGSVSVWVKR

SEQ ID NO: 32218 - protein, 485 aa, Bacillus sp.
HPDGTNGTIMQYFEWNVPNDGQHWNRLHNNAQNLKNAGITAIWIPPAWKGTSQNDVGYGAYDLYDLGEFNQKGTVRTKYGTKAELERAIRSLKANGIQVYGDVVMNHKGGADFTERVQAVEVNPQNRNQEVSGTYQIEAWTGFNFPGRGNQHSSFKWRWYHFDGTDWDQSRQLANRIYKFRGDGKAWDWEVDTENGNYDYLMYADVDMDHPEVINELNRWGVWYANTLNLDGFRLDAVKHIKFSFMRDWLGHVRGQTGKNLFAVAEYWKNDLGALENYLSKTNWTMSAFDVPLHYNLYQASNSSGNYDMRNLLNGTLVQRHPSHAVTFVDNHDTQPGEALESFVQGWFKPLAYATILTREQGYPQVFYGDYYGIPSDGVPSYRQQIDPLLKARQQYAYGRQHDYFDHWDVIGWTREGNASHPNSGLATIMSDGPGGSKWMYVGRQKAGEVWHDMTGNRSGTVTINQDGWGHFFVNGGSVSVWVKR

SEQ ID NO: 32219 - protein, 485 aa, Bacillus sp.
HHDGTNGTIMQYFEWNVPNDGQHWNRLHNNAQNLKNAGITAIWIPPAWKGTSQNDVGYGAYDLYDLGEFNQKGTVRTKYGTKAELERAIRSLKANGIQVYGDVVMNMKGGADFTERVQAVEVNPQNRNQEVSGTYQIEAWTGFNFPGRGNQHSSFKWRWYHFDGTDWDQSRQLANRIYKFRGDGKAWDWEVDTENGNYDYLMYADVDMDHPEVINELNRWGVWYANTLNLDGFRLDAVKHIKFSFMRDWLGHVRGQTGKNLFAVAEYWKNDLGALENYLSKTNWTMSAFDVPLHYNLYQASNSSGNYDMRNLLNGTLVQRHPSHAVTFVDNHDTQPGEALESFVQGWFKPLAYATILTREQGYPQVFYGDYYGIPSDGVPSYRQQIDPLLKARQQYAYGRQHDYFDHWDVIGWTREGNASHPNSGLATIMSDGPGGSKWMYVGRQKAGEVWHDMTGNRSGTVTINQDGWGHFFVNGGSVSVWVKR

SEQ ID NO: 32220 - protein, 485 aa, Bacillus sp.
HHDGTNGTIMQYFEWNVPNDGQHWNRLHNNAQNLKNAGITAIWIPPAWKGTSQNDVGYGAYDLYDLGEFNQKGTVRTKYGTKAELERAIRSLKANGIQVYGDVVMNHKGGADFTERVQAVEVNPQNRNQEVSGTYQIEAWTGFNFPGRGNQHSSFKWRWYHFDGTDWDQSRQLANRIYKFRGDGKAWDWEVDTENGNYDYLMYADVDMDHPEVINECNRWGVWYANTLNLDGFRLDAVKHIKFSFMRDWLGHVRGQTGKNLFAVAEYWKNDLGALENYLSKTNWTMSAFDVPLHYNLYQASNSSGNYDMRNLLNGTLVQRHPSHAVTFVDNHDTQPGEALESFVQGWFKPLAYATILTREQGYPQVFYGDYYGIPSDGVPSYRQQIDPLLKARQQYAYGRQHDYFDHWDVIGWTREGNASHPNSGLATIMSDGPGGSKWMYVGRQKAGEVWHDMTGNRSGTVTINQDGWGHFFVNGGSVSVWVKR

SEQ ID NO: 32221 - protein, 485 aa, Bacillus sp.
HHDGTNGTIMQYFEWNVPNDGQHWNRLHNNAQNLKNAGITAIWIPPAWKGTSQNDVGYGAYDLYDLGEFNQKGTVRTKYGTKAELERAIRSLKANGIQVYGDVVMNHKGGADFTERVQAVEVNPQNRNQEVSGTYQIEAWTGFNFPGRGNQHSSFKWRWYHFDGTDWDQSRQLANRIYKFRGDGKAWDWEVDTENGNYDYLMYADVDMDHPEVINELNRWGVWYANTLNLDGFRLDAVKHIKFSFMRDWLGHVRGQTGKNLFAVAEYWKNDLGALENYLSKTNWTMSAFDVPLHYNLYQASNSSGNYDMRNLLNGTLVQRVPSHAVTFVDNHDTQPGEALESFVQGWFKPLAYATILTREQGYPQVFYGDYYGIPSDGVPSYRQQIDPLLKARQQYAYGRQHDYFDHWDVIGWTREGNASHPNSGLATIMSDGPGGSKWMYVGRQKAGEVWHDMTGNRSGTVTINQDGWGHFFVNGGSVSVWVKR

SEQ ID NO: 32222 - protein, 485 aa, Bacillus sp.
HHDGTNGTIMQYFEWNVPNDGQHWNRLHNNAQNLKNAGITAIWIPPAWKGTSQNDVGYGAYDLYDLGEFNQKGTVRTKYGTKAELERAIRSLKANGIQVYGDVVMNHKGGADFTERVQAVEVNPQNRNQEVSGTYQIEAWTGFNFPGRGNQHSSFKWRWYHFDGTDWDQSRQLANRIYKFRGDGKAWDWEVDTENGNYDYLMYADVDMDHPEVINELNRWGVWYANTLNLDGFRLDAVKHIKFSFMRDWLGHVRGQTGKNLFAVAEYWKNDLGALENYLSKTNWTMSAFDVPLHYNLYQASNSSGNYDMRNLLNGTLVQRHPSHAVTFVDNHDTQPGEALESFVQGWFKPLAYATILTREQGYPQVFYGDYYGIPSDGVPSYRQQIDPLLKARQQYAYGRQHDYFDHWDVIGWTREGNASHPNSGLATIMSDGPGGSKWMKVGRQKAGEVWHDMTGNRSGTVTINQDGWGHFFVNGGSVSVWVKR

SEQ ID NO: 32223 - protein, 485 aa, Bacillus sp.
HHDGTNGTIMQYFEWNVPNDGQHWNRLHNNAQNLKNAGITAIWIPPAWKGTSQNDVGYGAYDLYDLGEFNQKGTVRTLYGTKAELERAIRSLKANGIQVYGDVVMNHKGGADFTERVQAVEVNPQNRNQEVSGTYQIEAWTGFNFPGRGNQHSSFKWRWYHFDGTDWDQSRQLANRIYKFRGDGKAWDWEVDTENGNYDYLMYADVDMDHPEVINELNRWGVWYANTLNLDGFRLDAVKHIKFSFMRDWLGHVRGQTGKNLFAVAEYWKNDLGALENYLSKTNWTMSAFDVPLHYNLYQASNSSGNYDMRNLLNGTLVQRHPSHAVTFVDNHDTQPGEALESFVQGWFKPLAYATILTREQGYPQVFYGDYYGIPSDGVPSYRQQIDPLLKARQQYAYGRQHDYFDHWDVIGWTREGNASHPNSGLATIMSDGPGGSKWMYVGRQKAGEVWHDMTGNRSGTVTINQDGWGHFFVNGGSVSVWVKR

SEQ ID NO: 32224 - protein, 485 aa, Bacillus sp.
HHDGTNGTIMQYFEWNVPNDGQHWNRLHNNAQNLKNAGITAIWIPPAWKGTSQNDVGYGAYDLYDLGEFNQKGTVRTKYGTKAELERAIRSLKANGIQVYGDVVMNHKGGADFTARVQAVEVNPQNRNQEVSGTYQIEAWTGFNFPGRGNQHSSFKWRWYHFDGTDWDQSRQLANRIYKFRGDGKAWDWEVDTENGNYDYLMYADVDMDHPEVINELNRWGVWYANTLNLDGFRLDAVKHIKFSFMRDWLGHVRGQTGKNLFAVAEYWKNDLGALENYLSKTNWTMSAFDVPLHYNLYQASNSSGNYDMRNLLNGTLVQRHPSHAVTFVDNHDTQPGEALESFVQGWFKPLAYATILTREQGYPQVFYGDYYGIPSDGVPSYRQQIDPLLKARQQYAYGRQHDYFDHWDVIGWTREGNASHPNSGLATIMSDGPGGSKWMYVGRQKAGEVWHDMTGNRSGTVTINQDGWGHFFVNGGSVSVWVKR

SEQ ID NO: 32225 - protein, 485 aa, Bacillus sp.
HHDGWNGTIMQYFEWNVPNDGQHWNRLHNNAQNLKNAGITAIWIPPAWKGTSQNDVGYGAYDLYDLGEFNQKGTVRTKYGTKAELERAIRSLKANGIQVYGDVVMNHKGGADFTERVQAVEVNPQNRNQEVSGTYQIEAWTGFNFPGRGNQHSSFKWRWYHFDGTDWDQSRQLANRIYKFRGDGKAWDWEVDTENGNYDYLMYADVDMDHPEVINELNRWGVWYANTLNLDGFRLDAVKHIKFSFMRDWLGHVRGQTGKNLFAVAEYWKNDLGALENYLSKTNWTMSAFDVPLHYNLYQASNSSGNYDMRNLLNGTLVQRHPSHAVTFVDNHDTQPGEALESFVQGWFKPLAYATILTREQGYPQVFYGDYYGIPSDGVPSYRQQIDPLLKARQQYAYGRQHDYFDHWDVIGWTREGNASHPNSGLATIMSDGPGGSKWMYVGRQKAGEVWHDMTGNRSGTVTINQDGWGHFFVNGGSVSVWVKR

SEQ ID NO: 32226 - protein, 485 aa, Bacillus sp.
HHDGTNGTIMQYFEWNVPNDGQHWNRLHNNAQNLKNAGITAIWIPPAWKGTSQNDVGYGAYDLYDLGEFNNKGTVRTKYGTKAELERAIRSLKANGIQVYGDVVMNHKGGADFTERVQAVEVNPQNRNQEVSGTYQIEAWTGFNFPGRGNQHSSFKWRWYHFDGTDWDQSRQLANRIYKFRGDGKAWDWEVDTENGNYDYLMYADVDMDHPEVINELNRWGVWYANTLNLDGFRLDAVKHIKFSFMRDWLGHVRGQTGKNLFAVAEYWKNDLGALENYLSKTNWTMSAFDVPLHYNLYQASNSSGNYDMRNLLNGTLVQRHPSHAVTFVDNHDTQPGEALESFVQGWFKPLAYATILTREQGYPQVFYGDYYGIPSDGVPSYRQQIDPLLKARQQYAYGRQHDYFDHWDVIGWTREGNASHPNSGLATIMSDGPGGSKWMYVGRQKAGEVWHDMTGNRSGTVTINQDGWGHFFVNGGSVSVWVKR

SEQ ID NO: 32227 - protein, 485 aa, Bacillus sp.
HHDGTNGTIMQYFEWNVPNDGQHWNRLHNNAQNLKNAGITAIWIPPAWKGTSQNDVGYGAYDLYDLGEFNQKGTVRTKYGTKAELERAIRSLKANGIQVYGDVVMNHKGGADFTERVQAVEVNPQNRNQEVSGTYQIEAWTGFNFPGRGNQHSSFKWRWYHFDGTDWMQSRQLANRIYKFRGDGKAWDWEVDTENGNYDYLMYADVDMDHPEVINELNRWGVWYANTLNLDGFRLDAVKHIKFSFMRDWLGHVRGQTGKNLFAVAEYWKNDLGALENYLSKTNWTMSAFDVPLHYNLYQASNSSGNYDMRNLLNGTLVQRHPSHAVTFVDNHDTQPGEALESFVQGWFKPLAYATILTREQGYPQVFYGDYYGIPSDGVPSYRQQIDPLLKARQQYAYGRQHDYFDHWDVIGWTREGNASHPNSGLATIMSDGPGGSKWMYVGRQKAGEVWHDMTGNRSGTVTINQDGWGHFFVNGGSVSVWVKR

SEQ ID NO: 32228 - protein, 485 aa, Bacillus sp.
HHDGTNGTIMQYFEWNVPNDGQHWNRLHNNAQNLKNAGITAIWIPPAWKGTSQNDVGYGAYDLYDLGEFNQKGTVRTKYGTKAELERAIRSLKANGITVYGDVVMNHKGGADFTERVQAVEVNPQNRNQEVSGTYQIEAWTGFNFPGRGNQHSSFKWRWYHFDGTDWDQSRQLANRIYKFRGDGKAWDWEVDTENGNYDYLMYADVDMDHPEVINELNRWGVWYANTLNLDGFRLDAVKHIKFSFMRDWLGHVRGQTGKNLFAVAEYWKNDLGALENYLSKTNWTMSAFDVPLHYNLYQASNSSGNYDMRNLLNGTLVQRHPSHAVTFVDNHDTQPGEALESFVQGWFKPLAYATILTREQGYPQVFYGDYYGIPSDGVPSYRQQIDPLLKARQQYAYGRQHDYFDHWDVIGWTREGNASHPNSGLATIMSDGPGGSKWMYVGRQKAGEVWHDMTGNRSGTVTINQDGWGHFFVNGGSVSVWVKR

SEQ ID NO: 32229 - protein, 485 aa, Bacillus sp.
HHDGTNGTIMQYFEWNVPNDGQHWNRLHNNAQNLKNAGITAIWIPPAWKGTSQNDVGYGAYDLYDLGEFNQKGTVRTKYGTKAELRRAIRSLKANGIQVYGDVVMNHKGGADFTERVQAVEVNPQNRNQEVSGTYQIEAWTGFNFPGRGNQHSSFKWRWYHFDGTDWDQSRQLANRIYKFRGDGKAWDWEVDTENGNYDYLMYADVDMDHPEVINELNRWGVWYANTLNLDGFRLDAVKHIKFSFMRDWLGHVRGQTGKNLFAVAEYWKNDLGALENYLSKTNWTMSAFDVPLHYNLYQASNSSGNYDMRNLLNGTLVQRHPSHAVTFVDNHDTQPGEALESFVQGWFKPLAYATILTREQGYPQVFYGDYYGIPSDGVPSYRQQIDPLLKARQQYAYGRQHDYFDHWDVIGWTREGNASHPNSGLATIMSDGPGGSKWMYVGRQKAGEVWHDMTGNRSGTVTINQDGWGHFFVNGGSVSVWVKR

SEQ ID NO: 32230 - protein, 485 aa, Bacillus sp.
HHDGTNGTIMQYFEWNVPNDGQHWNRLHNNAQNLKNAGITAIWLPPAWKGTSQNDVGYGAYDLYDLGEFNQKGTVRTKYGTKAELERAIRSLKANGIQVYGDVVMNHKGGADFTERVQAVEVNPQNRNQEVSGTYQIEAWTGFNFPGRGNQHSSFKWRWYHFDGTDWDQSRQLANRIYKFRGDGKAWDWEVDTENGNYDYLMYADVDMDHPEVINELNRWGVWYANTLNLDGFRLDAVKHIKFSFMRDWLGHVRGQTGKNLFAVAEYWKNDLGALENYLSKTNWTMSAFDVPLHYNLYQASNSSGNYDMRNLLNGTLVQRHPSHAVTFVDNHDTQPGEALESFVQGWFKPLAYATILTREQGYPQVFYGDYYGIPSDGVPSYRQQIDPLLKARQQYAYGRQHDYFDHWDVIGWTREGNASHPNSGLATIMSDGPGGSKWMYVGRQKAGEVWHDMTGNRSGTVTINQDGWGHFFVNGGSVSVWVKR

SEQ ID NO: 32231 - protein, 485 aa, Bacillus sp.
HHDGTNGTIMQYFEWNVPNDGQHWNRLHNNAQNLKNAGITAIWIPPAWKGTSQNDVGYGAYDLYDLGEFNQKGTVRTKYGTKAELERAIRSLKANGIQVYGDVVMNHKGGADFTERVQAVEVNPQNRNQEVSGTYQIEAWTGFNFPGRGNQHSSFKWRWYHFDGTDWDQSRQLANRIYKFRGDGKAWDWEVDTENGNYDYLMYADVDMDHPEVINELNRWGVWYANTLNLDGFRLDAVKHIKFSFMRDWLGHVRGQTGKNLFAVAEYWKNDLGALENYLSKTNWTMSAFDVPLHYNLYQCSNSSGNYDMRNLLNGTLVQRHPSHAVTFVDNHDTQPGEALESFVQGWFKPLAYATILTREQGYPQVFYGDYYGIPSDGVPSYRQQIDPLLKARQQYAYGRQHDYFDHWDVIGWTREGNASHPNSGLATIMSDGPGGSKWMYVGRQKAGEVWHDMTGNRSGTVTINQDGWGHFFVNGGSVSVWVKR

SEQ ID NO: 32232 - protein, 485 aa, Bacillus sp.
HHDGTNGTIMQYFEWNVPNDGQHWNRLHNNAQNLKNAGITAIWIPPAWKGTSQNDVGYGAYDLYDLGEFNQKGTVRTKYGTKAELERAPRSLKANGIQVYGDVVMNHKGGADFTERVQAVEVNPQNRNQEVSGTYQIEAWTGFNFPGRGNQHSSFKWRWYHFDGTDWDQSRQLANRIYKFRGDGKAWDWEVDTENGNYDYLMYADVDMDHPEVINELNRWGVWYANTLNLDGFRLDAVKHIKFSFMRDWLGHVRGQTGKNLFAVAEYWKNDLGALENYLSKTNWTMSAFDVPLHYNLYQASNSSGNYDMRNLLNGTLVQRHPSHAVTFVDNHDTQPGEALESFVQGWFKPLAYATILTREQGYPQVFYGDYYGIPSDGVPSYRQQIDPLLKARQQYAYGRQHDYFDHWDVIGWTREGNASHPNSGLATIMSDGPGGSKWMYVGRQKAGEVWHDMTGNRSGTVTINQDGWGHFFVNGGSVSVWVKR

SEQ ID NO: 32233 - protein, 485 aa, Bacillus sp.
HHDGTNGTIMQYFEWNVPNDGQHWNRLHNNAQNLKNAGITAIWIPPAWKGTSQNDVGYGAYDLYDLGEFNQKGTVRTKYGTKAELERAIRSLKANGIQVYGDVVMNHKGGADFTERVQAVEVNPQNRNQEVSGTYQIEAWTGFNFPGRGNQHSSFKWRWYHFDGTDWDQSRQLANRIYKFRGDGKAWDWEVDTENGNYDYLMYADVDMDHPEVINELNRWGVWYANTLNLDGFRLDAVKHIKFSFMRDWLGHVRGQTGKNLFAVAEYWKNDLGALENYLSKTNWTMSAFDVPLHYNLYQASNSSGNYDMRNLLNGTLVQRHPSHAVTFVDNHDTQPGEALESFVQGWFKPLAYATILTREQGYPQVFYGDYYGLPSDGVPSYRQQIDPLLKARQQYAYGRQHDYFDHWDVIGWTREGNASHPNSGLATIMSDGPGGSKWMYVGRQKAGEVWHDMTGNRSGTVTINQDGWGHFFVNGGSVSVWVKR

SEQ ID NO: 32234 - protein, 485 aa, Bacillus sp.
HHDGTNGTIMQYFEWNVPNDGQHWNRLHNNAQNLKNAGITAIWIPPAWKGTSQNDVGYGAYDLYDLGEFNQKGTVRTKYGTKAELERAIRSLKANGIPVYGDVVMNHKGGADFTERVQAVEVNPQNRNQEVSGTYQIEAWTGFNFPGRGNQHSSFKWRWYHFDGTDWDQSRQLANRIYKFRGDGKAWDWEVDTENGNYDYLMYADVDMDHPEVINELNRWGVWYANTLNLDGFRLDAVKHIKFSFMRDWLGHVRGQTGKNLFAVAEYWKNDLGALENYLSKTNWTMSAFDVPLHYNLYQASNSSGNYDMRNLLNGTLVQRHPSHAVTFVDNHDTQPGEALESFVQGWFKPLAYATILTREQGYPQVFYGDYYGIPSDGVPSYRQQIDPLLKARQQYAYGRQHDYFDHWDVIGWTREGNASHPNSGLATIMSDGPGGSKWMYVGRQKAGEVWHDMTGNRSGTVTINQDGWGHFFVNGGSVSVWVKR

SEQ ID NO: 32235 - protein, 485 aa, Bacillus sp.
HHDGTNGTIMQYFEWNVPNDGQHWNRLHNNAQNLKNAGITAIWIPPAWKGTSQNDVGYGAYDLYDLGEFNQKGTVRTKYGTKAELERAIRSLKANGIQVYGDVVMNHKGGADFTERVQAVEVNPQNRNQEVSGTYQIEAWTGFNFPGRGNQHSSFKWRWYHFDGTDWDQSRQLANRIYKFRGDGKAWDWEVDTENGNYDYLMYADVDMDHPEVINELNRWGVWYANTLNLDGFRLDAVKHIKFSFMRDWLGHVRGQTGKNLFAVAEYWKNDLGALENYLSKTNWTMSAFDVPLHYNLYQASNSSGNYDMRNLLNGTLVQRHPSHAVTFVDNHDTQPGEALESFVQGWFKPLAYATILTREQGYPQVFYGDYYGIPSDGVLSYRQQIDPLLKARQQYAYGRQHDYFDHWDVIGWTREGNASHPNSGLATIMSDGPGGSKWMYVGRQKAGEVWHDMTGNRSGTVTINQDGWGHFFVNGGSVSVWVKR

SEQ ID NO: 32236 - protein, 485 aa, Bacillus sp.
HHDGTNGTIMQYFEWNVPNDGQHWNRLHNNAQNLKNAGITAIWIPPAWKGTSQNDVGYGAYDLYDLGEFNQKGTVRTKYGTKAELERAIRSLKANGIQVYGDVVMNHKGGADFTERVQAVEVNPQNRNQEVSGTYQIEAWTGFNFPGRGNQHSSFKWRWYHFDGTDWDQSRQLANRIYKFRGDGKAWDWEVDTENGNYDYLMYADVDMDHPEVINELNRWGVWYANTLNLDGFRLDAVKHIKFSFMRDWLGHVRGQTGKNLFAVAEYWKNDLGALENYLSKTNWTMSAFDVPLHYNLYQASNSSGNYDMRNLLNGTLVQRHPSHAVTFVDNHDTQPGEALESFVQGWFKPLAYATILTREQGYPQVFYGDYYGILSDGVPSYRQQIDPLLKARQQYAYGRQHDYFDHWDVIGWTREGNASHPNSGLATIMSDGPGGSKWMYVGRQKAGEVWHDMTGNRSGTVTINQDGWGHFFVNGGSVSVWVKR

SEQ ID NO: 32237 - protein, 485 aa, Bacillus sp.
HHDGTNGTIMQYFEWNVPNDGQHWNRLHNNAQNLKNAGITAIWIPPAWKGTSVNDVGYGAYDLYDLGEFNQKGTVRTKYGTKAELERAIRSLKANGIQVYGDVVMNHKGGADFTERVQAVEVNPQNRNQEVSGTYQIEAWTGFNFPGRGNQHSSFKWRWYHFDGTDWDQSRQLANRIYKFRGDGKAWDWEVDTENGNYDYLMYADVDMDHPEVINELNRWGVWYANTLNLDGFRLDAVKHIKFSFMRDWLGHVRGQTGKNLFAVAEYWKNDLGALENYLSKTNWTMSAFDVPLHYNLYQASNSSGNYDMRNLLNGTLVQRHPSHAVTFVDNHDTQPGEALESFVQGWFKPLAYATILTREQGYPQVFYGDYYGIPSDGVPSYRQQIDPLLKARQQYAYGRQHDYFDHWDVIGWTREGNASHPNSGLATIMSDGPGGSKWMYVGRQKAGEVWHDMTGNRSGTVTINQDGWGHFFVNGGSVSVWVKR

SEQ ID NO: 32238 - protein, 485 aa, Bacillus sp.
HHDGTNGTIMQYFEWNVPNDGQHWNRLHNNAQNLKNAGITAIWIPPAWKGTSQNDVGYGAYDLYDLGEFNQKGTVRTKYGTKAELERAIRSLKANGIQVYGDVVMNHKGGADFTERVQAVEVNPQNRNQEVSGTYQIEAWTGFNFPGRGNQHSSFKWRWYHFDGTDWDQWRQLANRIYKFRGDGKAWDWEVDTENGNYDYLMYADVDMDHPEVINELNRWGVWYANTLNLDGFRLDAVKHIKFSFMRDWLGHVRGQTGKNLFAVAEYWKNDLGALENYLSKTNWTMSAFDVPLHYNLYQASNSSGNYDMRNLLNGTLVQRHPSHAVTFVDNHDTQPGEALESFVQGWFKPLAYATILTREQGYPQVFYGDYYGIPSDGVPSYRQQIDPLLKARQQYAYGRQHDYFDHWDVIGWTREGNASHPNSGLATIMSDGPGGSKWMYVGRQKAGEVWHDMTGNRSGTVTINQDGWGHFFVNGGSVSVWVKR

SEQ ID NO: 32239 - protein, 485 aa, Bacillus sp.
HHDGTNGTIMQYFEWNVPNDGQHWNRLHNNAQNLKNAGITAIWIPPAWKGTSQNDVGYGAYDLYDLGEFNQKGTVRTKYGTKAELERAIRSLKANGIQVYGDVVMNHKGGADFTERVQAVEVNPQNRNQEVSGTYQIEAWTGFNFPGRGNQHSSFKWRWYHFDGTDWDQSRQLANRIYKFRGDGKAWDWEVDTENGNYDYLMYADVDMDHPEVINELNRWGVWYANTLNLDGFRLDAVKHIKFSFMRDWLGHVRGQTGKNLFAVAEYWKNDLGALENYLSKTNWTMSAFDVPLHYNLYQASNSSGNYDMRNLLNGTLVQRHPSHAVTFVDNHDTQPGEALESFVQGWFKPLAYATILTREQGYPQVFYGDYYGIPSDGVPSYRQQIDPLLKARQQYAYGRQHDYFDHWDVIGWTREGNASHPNSGLATIMSDGPGGSKWMYVGRQKAGEVWHDMTGNRSGTVHINQDGWGHFFVNGGSVSVWVKR

SEQ ID NO: 32240 - protein, 483 aa, Bacillus sp. (in: firmicutes)
HHDGTNGTIMQYFEWNVPNDGQHWNRLHNNAQNLKNAGITAIWIPPAWKGTSQNDVGYGAYDLYDLGEFNQKGTVRTKYGTKAELERAIRSLKANGIQVYGDVVMNHKGGADFTERVQAVEVNPQNRNQEVSGTYQIEAWTGFNFPGRGNQHSSFKWRWYHFDGTDWDQSRQLANRIYKFRGKAWDWEVDTENGNYDYLMYADVDMDHPEVINELNRWGVWYANTLNLDGFRLDAVKHIKFSFMRDWLGHVRGQTGKNLFAIAEFWKNDLGALENYLSKTNWTMSAFDVPLHYNLYQASNSSGNYDMRNLLNGTLVQRHPSHAVTLVDNHDTQPGEALESFVQGWFKPLAYATILTREQGYPCVFYGDYYGIPSDGVPSYRQQIDPLLKARQQYAYGRQHDYFDHWDVIGWTREGNASHPNSGLATIMSDGPGGSKWMYVGRQKAGEVWHDMTGNRSGTVTINQDGWGHFFVNGGSVSVWVKR

SEQ ID NO: 32241 - protein, 485 aa, Bacillus sp.
HHDGTNGTIMQYFEWNVPNDGQHWNRLHNNAQNLKNAGITAIWIPPAWKGTSQNDVGYGAYDLYDLGEFNQKGTVRTKYGTKAELERAIRSLKANGIQVYGDVVMNHKGGADFTERVQAVEVNPQNRNQEVSGTYQIEAWTGFNFPGRGNQHSSFKWRWYHFDGTDWDQSRQLANRIYKFRGDGKAWDWEVDTENGNYDYLMYADVDMDDPEVINELNRWGVWYANTLNLDGFRLDAVKHIKFSFMRDWLGHVRGQTGKNLFAVAEYWKNDLGALENYLSKTNWTMSAFDVPLHYNLYQASNSSGNYDMRNLLNGTLVQRHPSHAVTFVDNHDTQPGEALESFVQGWFKPLAYATILTREQGYPQVFYGDYYGIPSDGVPSYRQQIDPLLKARQQYAYGRQHDYFDHWDVIGWTREGNASHPNSGLATIMSDGPGGSKWMYVGRQKAGEVWHDMTGNRSGTVTINQDGWGHFFVNGGSVSVWVKR

SEQ ID NO: 32242 - protein, 485 aa, Bacillus sp.
HHDGTNGTIMQYFEWNVPNDGQHHNRLHNNAQNLKNAGITAIWIPPAWKGTSQNDVGYGAYDLYDLGEFNQKGTVRTKYGTKAELERAIRSLKANGIQVYGDVVMNHKGGADFTERVQAVEVNPQNRNQEVSGTYQIEAWTGFNFPGRGNQHSSFKWRWYHFDGTDWDQSRQLANRIYKFRGDGKAWDWEVDTENGNYDYLMYADVDMDHPEVINELNRWGVWYANTLNLDGFRLDAVKHIKFSFMRDWLGHVRGQTGKNLFAVAEYWKNDLGALENYLSKTNWTMSAFDVPLHYNLYQASNSSGNYDMRNLLNGTLVQRHPSHAVTFVDNHDTQPGEALESFVQGWFKPLAYATILTREQGYPQVFYGDYYGIPSDGVPSYRQQIDPLLKARQQYAYGRQHDYFDHWDVIGWTREGNASHPNSGLATIMSDGPGGSKWMYVGRQKAGEVWHDMTGNRSGTVTINQDGWGHFFVNGGSVSVWVKR

SEQ ID NO: 32243 - protein, 485 aa, Bacillus sp.
HHDGTNGTIMQYFEWNVPNDGQHWNRLHNNAQNLKNAGITAIWIPPAHKGTSQNDVGYGAYDLYDLGEFNQKGTVRTKYGTKAELERAIRSLKANGIQVYGDVVMNHKGGADFTERVQAVEVNPQNRNQEVSGTYQIEAWTGFNFPGRGNQHSSFKWRWYHFDGTDWDQSRQLANRIYKFRGDGKAWDWEVDTENGNYDYLMYADVDMDHPEVINELNRWGVWYANTLNLDGFRLDAVKHIKFSFMRDWLGHVRGQTGKNLFAVAEYWKNDLGALENYLSKTNWTMSAFDVPLHYNLYQASNSSGNYDMRNLLNGTLVQRHPSHAVTFVDNHDTQPGEALESFVQGWFKPLAYATILTREQGYPQVFYGDYYGIPSDGVPSYRQQIDPLLKARQQYAYGRQHDYFDHWDVIGWTREGNASHPNSGLATIMSDGPGGSKWMYVGRQKAGEVWHDMTGNRSGTVTINQDGWGHFFVNGGSVSVWVKR

SEQ ID NO: 32244 - protein, 485 aa, Bacillus sp.
HHDGTNGTIMQYFEWNVPNDGQHWNRLHNNAQNLKNAGITAIWIPPAWKGTSQNDVGYGAYDLYDLGEFNQKGTVRTKYGTKAELERAIRSLKANGIQVYGDVVMNHKGGADFTERVQAVEPNPQNRNQEVSGTYQIEAWTGFNFPGRGNQHSSFKWRWYHFDGTDWDQSRQLANRIYKFRGDGKAWDWEVDTENGNYDYLMYADVDMDHPEVINELNRWGVWYANTLNLDGFRLDAVKHIKFSFMRDWLGHVRGQTGKNLFAVAEYWKNDLGALENYLSKTNWTMSAFDVPLHYNLYQASNSSGNYDMRNLLNGTLVQRHPSHAVTFVDNHDTQPGEALESFVQGWFKPLAYATILTREQGYPQVFYGDYYGIPSDGVPSYRQQIDPLLKARQQYAYGRQHDYFDHWDVIGWTREGNASHPNSGLATIMSDGPGGSKWMYVGRQKAGEVWHDMTGNRSGTVTINQDGWGHFFVNGGSVSVWVKR

SEQ ID NO: 32245 - protein, 485 aa, Bacillus sp.
HHDGTNGTIMQYFEWNVPNDGQHWNRLHNNAQNLKNAGITAIWIPPAWKGTSQNDVGYGAYDLYDLGEFNQKGTVRTKYGTKAELERAIRSLKANGIQVYGDVVMNHKGGADFTERVQAVEVNPQNRNQEVSGTYQIEAWTGFNFPGRGNQHSSFKWRWYHFDGTDWDQSRQLANRIYKFRGDGDAWDWEVDTENGNYDYLMYADVDMDHPEVINELNRWGVWYANTLNLDGFRLDAVKHIKFSFMRDWLGHVRGQTGKNLFAVAEYWKNDLGALENYLSKTNWTMSAFDVPLHYNLYQASNSSGNYDMRNLLNGTLVQRHPSHAVTFVDNHDTQPGEALESFVQGWFKPLAYATILTREQGYPQVFYGDYYGIPSDGVPSYRQQIDPLLKARQQYAYGRQHDYFDHWDVIGWTREGNASHPNSGLATIMSDGPGGSKWMYVGRQKAGEVWHDMTGNRSGTVTINQDGWGHFFVNGGSVSVWVKR

SEQ ID NO: 32246 - protein, 485 aa, Bacillus sp.
HHDGTNGTIMQYFEWNVPNDGQHWNRLHNNAQNLKNAGITAIWIPPAWKGTSQNDVGYGAYDLYDLGEFNQKGTVRTKYGTKAELERAIRSLKANGIQVYGDVVMNHKGGADFTERVQAVEVNPQNRNQEVSGTYQIEAWTGFNFPGRGNQHSSFKWRWYHFDGTDWDQSRQLANRIYKFRGDGKAWDWEVDTENGNYDYLMYADVDMDHPEVINELNRWGVWYANTLNLDGFRLDAVKHIKFSFMRDWLGHVSGQTGKNLFAVAEYWKNDLGALENYLSKTNWTMSAFDVPLHYNLYQASNSSGNYDMRNLLNGTLVQRHPSHAVTFVDNHDTQPGEALESFVQGWFKPLAYATILTREQGYPQVFYGDYYGIPSDGVPSYRQQIDPLLKARQQYAYGRQHDYFDHWDVIGWTREGNASHPNSGLATIMSDGPGGSKWMYVGRQKAGEVWHDMTGNRSGTVTINQDGWGHFFVNGGSVSVWVKR

SEQ ID NO: 32247 - protein, 485 aa, Bacillus sp.
HHDGTNGTIMQYFEWNVPNDGQHWNRLHNNAQNLKNAGITAIWIPPAWKGTSQNDVGYGAYDLIDLGEFNQKGTVRTKYGTKAELERAIRSLKANGIQVYGDVVMNHKGGADFTERVQAVEVNPQNRNQEVSGTYQIEAWTGFNFPGRGNQHSSFKWRWYHFDGTDWDQSRQLANRIYKFRGDGKAWDWEVDTENGNYDYLMYADVDMDHPEVINELNRWGVWYANTLNLDGFRLDAVKHIKFSFMRDWLGHVRGQTGKNLFAVAEYWKNDLGALENYLSKTNWTMSAFDVPLHYNLYQASNSSGNYDMRNLLNGTLVQRHPSHAVTFVDNHDTQPGEALESFVQGWFKPLAYATILTREQGYPQVFYGDYYGIPSDGVPSYRQQIDPLLKARQQYAYGRQHDYFDHWDVIGWTREGNASHPNSGLATIMSDGPGGSKWMYVGRQKAGEVWHDMTGNRSGTVTINQDGWGHFFVNGGSVSVWVKR

SEQ ID NO: 32248 - protein, 485 aa, Bacillus sp.
HHDGTNGTIMQYFEWNVPNDGQHWNRLHNNAQNLKNAGITAIWIPPAWKGTSQNDVGYGAYDLYDLGEFNQKGTVRTKYGTKAELERSIRSLKANGIQVYGDVVMNHKGGADFTERVQAVEVNPQNRNQEVSGTYQIEAWTGFNFPGRGNQHSSFKWRWYHFDGTDWDQSRQLANRIYKFRGDGKAWDWEVDTENGNYDYLMYADVDMDHPEVINELNRWGVWYANTLNLDGFRLDAVKHIKFSFMRDWLGHVRGQTGKNLFAVAEYWKNDLGALENYLSKTNWTMSAFDVPLHYNLYQASNSSGNYDMRNLLNGTLVQRHPSHAVTFVDNHDTQPGEALESFVQGWFKPLAYATILTREQGYPQVFYGDYYGIPSDGVPSYRQQIDPLLKARQQYAYGRQHDYFDHWDVIGWTREGNASHPNSGLATIMSDGPGGSKWMYVGRQKAGEVWHDMTGNRSGTVTINQDGWGHFFVNGGSVSVWVKR

SEQ ID NO: 32249 - protein, 485 aa, Bacillus sp.
HHDGTNGTIMQYFEWNVPNDGQHWNRLHNNAQNLKNAGITAIWIPPAWKGTSQNDVGYGAYDLYDLGEFNQKGTVRTKYGTKAELERAIRSLKANGIQVYGDVVMNHKGGADFTERVQAVEVNPQNRNQEVSGTYQIEAWTGFNFPGRGNQHSSFKWRWYHFDGTDWDQSRQLANRIYKFRGDGKAWDWEVDTENGNYDYLMYADVDMDHPEVINELNRWGVWYANTLNLDGFRLDAVKHIKFSFMRDWLGHVRGQTGKNLFAVAEYWKNDLGALENYLSKTNWTMSAFDVPLHYNLYQASNSSGNYDMRNLLNGTLVQRHPSHAVTFVDNHDTQPGEALESFVQGWFKPQAYATILTREQGYPQVFYGDYYGIPSDGVPSYRQQIDPLLKARQQYAYGRQHDYFDHWDVIGWTREGNASHPNSGLATIMSDGPGGSKWMYVGRQKAGEVWHDMTGNRSGTVTINQDGWGHFFVNGGSVSVWVKR

SEQ ID NO: 32250 - protein, 485 aa, Bacillus sp.
HHDGTNGTIMQYFEWNVPNDGQHWNRLHNNAQNLKNAGITAIWIPPAWKGTSQGDVGYGAYDLYDLGEFNQKGTVRTKYGTKAELERAIRSLKANGIQVYGDVVMNHKGGADFTERVQAVEVNPQNRNQEVSGTYQIEAWTGFNFPGRGNQHSSFKWRWYHFDGTDWDQSRQLANRIYKFRGDGKAWDWEVDTENGNYDYLMYADVDMDHPEVINELNRWGVWYANTLNLDGFRLDAVKHIKFSFMRDWLGHVRGQTGKNLFAVAEYWKNDLGALENYLSKTNWTMSAFDVPLHYNLYQASNSSGNYDMRNLLNGTLVQRHPSHAVTFVDNHDTQPGEALESFVQGWFKPLAYATILTREQGYPQVFYGDYYGIPSDGVPSYRQQIDPLLKARQQYAYGRQHDYFDHWDVIGWTREGNASHPNSGLATIMSDGPGGSKWMYVGRQKAGEVWHDMTGNRSGTVTINQDGWGHFFVNGGSVSVWVKR

SEQ ID NO: 32251 - protein, 485 aa, Bacillus sp.
HHDGTNGTIMQYFEWNVPNDGQHWNRLHNNAQNLKNAGITAIWIPPAWKGTSQNDVGYGAYDLYDLGEFNQKGTVRTKYGTKAELERAIRSLKANGIQVYGDVVMNHKGGADFTERVQAVEVNPQNRNQEVSGTYQIEAWTGFNFPGRGNQHSSFKWRWYHFDGTDWDQSRQLANRIYKFRGDGKAWDWEVDTENGNYDYLMYADVDMDHPEVINELNRWGVWYANTLNLDGFRLDAVKHIKFSFMRDWLGHVRGQTGKNLFAVAEYWKNDLGALENYLSKTNWTMSAFDVPLHYNLYQASNSSGNWDMRNLLNGTLVQRHPSHAVTFVDNHDTQPGEALESFVQGWFKPLAYATILTREQGYPQVFYGDYYGIPSDGVPSYRQQIDPLLKARQQYAYGRQHDYFDHWDVIGWTREGNASHPNSGLATIMSDGPGGSKWMYVGRQKAGEVWHDMTGNRSGTVTINQDGWGHFFVNGGSVSVWVKR

SEQ ID NO: 32252 - protein, 485 aa, Bacillus sp.
HHDGTNGTIMQYFEWNVPNDGQHWNRLHNNAQNLKNAGITAIWIPPAWKGTSQNDVGYGAYDLYDLGEFNQKGTVRTKYGTKAELERAIRSLKANGIQVYGDVVMNHKGGADFTERVQAVEVNPQNRNQEVSGTYQIEAWTGFNFPGRGNQHSSFKWRWYHFDGTDWDQSRQLANRIYKFRGDGKAWDWEVDTENGNYDYLMYADVDMDHPEVINELNRWGVWYANTLNLDGFRLDAVKHIKFSFMRDWLGHVRGQTGKNLFAVAEYWKNDLGALENYLSKTNWTMSAFDVPLHYNLYQASNSSGLYDMRNLLNGTLVQRHPSHAVTFVDNHDTQPGEALESFVQGWFKPLAYATILTREQGYPQVFYGDYYGIPSDGVPSYRQQIDPLLKARQQYAYGRQHDYFDHWDVIGWTREGNASHPNSGLATIMSDGPGGSKWMYVGRQKAGEVWHDMTGNRSGTVTINQDGWGHFFVNGGSVSVWVKR

SEQ ID NO: 32253 - protein, 485 aa, Bacillus sp.
HHDGTNGTIMQYFEWNVPNDGQHWNRLHNNAQNLKNAGITAIWIPPAWKGTSQNDMGYGAYDLYDLGEFNQKGTVRTKYGTKAELERAIRSLKANGIQVYGDVVMNHKGGADFTERVQAVEVNPQNRNQEVSGTYQIEAWTGFNFPGRGNQHSSFKWRWYHFDGTDWDQSRQLANRIYKFRGDGKAWDWEVDTENGNYDYLMYADVDMDHPEVINELNRWGVWYANTLNLDGFRLDAVKHIKFSFMRDWLGHVRGQTGKNLFAVAEYWKNDLGALENYLSKTNWTMSAFDVPLHYNLYQASNSSGNYDMRNLLNGTLVQRHPSHAVTFVDNHDTQPGEALESFVQGWFKPLAYATILTREQGYPQVFYGDYYGIPSDGVPSYRQQIDPLLKARQQYAYGRQHDYFDHWDVIGWTREGNASHPNSGLATIMSDGPGGSKWMYVGRQKAGEVWHDMTGNRSGTVTINQDGWGHFFVNGGSVSVWVKR

SEQ ID NO: 32254 - protein, 485 aa, Bacillus sp.
HHDGTNGTIMQYFEWNVPNDGQHWNRLHNNAQNLKNAGITAIWIPPAWKGTSQNDVGYGAYDLYDLGEFNQKGTVRTKYGTKAELDRAIRSLKANGIQVYGDVVMNHKGGADFTERVQAVEVNPQNRNQEVSGTYQIEAWTGFNFPGRGNQHSSFKWRWYHFDGTDWDQSRQLANRIYKFRGDGKAWDWEVDTENGNYDYLMYADVDMDHPEVINELNRWGVWYANTLNLDGFRLDAVKHIKFSFMRDWLGHVRGQTGKNLFAVAEYWKNDLGALENYLSKTNWTMSAFDVPLHYNLYQASNSSGNYDMRNLLNGTLVQRHPSHAVTFVDNHDTQPGEALESFVQGWFKPLAYATILTREQGYPQVFYGDYYGIPSDGVPSYRQQIDPLLKARQQYAYGRQHDYFDHWDVIGWTREGNASHPNSGLATIMSDGPGGSKWMYVGRQKAGEVWHDMTGNRSGTVTINQDGWGHFFVNGGSVSVWVKR

SEQ ID NO: 32255 - protein, 485 aa, Bacillus sp.
HHDGTNGTIMQYFEWNVPNDGQHWNRLHNNAQNLKNAGITAIWIPPAWKGTSQNDVGYGAYDLYDLGEFNQKGTVRTKYGTKAELERAIRSLKANGIQVYGDVVMNHKGGADFTERVQAVEVNPQNRNQEVSGTYQIEPWTGFNFPGRGNQHSSFKWRWYHFDGTDWDQSRQLANRIYKFRGDGKAWDWEVDTENGNYDYLMYADVDMDHPEVINELNRWGVWYANTLNLDGFRLDAVKHIKFSFMRDWLGHVRGQTGKNLFAVAEYWKNDLGALENYLSKTNWTMSAFDVPLHYNLYQASNSSGNYDMRNLLNGTLVQRHPSHAVTFVDNHDTQPGEALESFVQGWFKPLAYATILTREQGYPQVFYGDYYGIPSDGVPSYRQQIDPLLKARQQYAYGRQHDYFDHWDVIGWTREGNASHPNSGLATIMSDGPGGSKWMYVGRQKAGEVWHDMTGNRSGTVTINQDGWGHFFVNGGSVSVWVKR

SEQ ID NO: 32256 - protein, 485 aa, Bacillus sp.
HHDGTNGTIMQYFEWNVPNDGQHWNRLHNNAQNLKNAGITAIWIPPAWKGTSQNDVGYGAYDLYDLGEFNQKGTVRTKYGTKAELERAIRSLKANGIQVYGDVVMNHKGGADFTERVQAVEVNPQNRNQEVSGTYQIEAWTGFNFPGRGDQHSSFKWRWYHFDGTDWDQSRQLANRIYKFRGDGKAWDWEVDTENGNYDYLMYADVDMDHPEVINELNRWGVWYANTLNLDGFRLDAVKHIKFSFMRDWLGHVRGQTGKNLFAVAEYWKNDLGALENYLSKTNWTMSAFDVPLHYNLYQASNSSGNYDMRNLLNGTLVQRHPSHAVTFVDNHDTQPGEALESFVQGWFKPLAYATILTREQGYPQVFYGDYYGIPSDGVPSYRQQIDPLLKARQQYAYGRQHDYFDHWDVIGWTREGNASHPNSGLATIMSDGPGGSKWMYVGRQKAGEVWHDMTGNRSGTVTINQDGWGHFFVNGGSVSVWVKR

SEQ ID NO: 32257 - protein, 485 aa, Bacillus sp.
HHDGTNGTIMQYFEWNVPNDGQHWNRLHNNAQNLKNAGITAIWIPPAWKGTSQNDVGYGAYDLYDLGEFNQKGTVRTKYGTKAELERAIRSLKANGIQVYGDVVMNHKGGADFTERVQAVEVNPQNRNQEVSGTYQIEAWTGFNFPGRGNQHSSFKWRWYHFDGTDWDQSRQLANRIYKFRGDGKAWDWEVDTENGNYDYLMYADVDMDHPEVINELNRWGVWYANTLNLDGFRLDAVKHIKFSFMRDWLGHVRGQTGKNLFAVAEYWKNDLGALENYLSKTNWTMSAFDVPLHYNLYQASNSSGNYDMRNLLNGTLVQRHPSHAVTFVDNHDTQPGEALESFVQGWFKPLAYATILTREQGYPQVFYGDYYGIPSDGVPSYRQQIDPLLKARQQYAYGRQHDYFDHWDVIGWTREGNASHPNSGLATIMSDGPGGSKWMYVGRQKAGEVWHDMSGNRSGTVTINQDGWGHFFVNGGSVSVWVKR

SEQ ID NO: 32258 - protein, 485 aa, Bacillus sp.
HHDGTNGTIMQYFEWNVPNDGQHWNRLHNNAQNLKNAGITAIWIPPAWKGTSQNDVGYGAYDLYDLGEFNQKGTVRTKYGTKAELERAIRSLKANGIQVYGDVVMNHKGGADFTERVQAVEVNPQNRNQEVSGTYQIEAWTGFNFPGRGNQHSSFKWRWYHFDGTDWDQSRQLANRIYKFRGDGKAWDWEVDTENGNYDYLMYADHDMDHPEVINELNRWGVWYANTLNLDGFRLDAVKHIKFSFMRDWLGHVRGQTGKNLFAVAEYWKNDLGALENYLSKTNWTMSAFDVPLHYNLYQASNSSGNYDMRNLLNGTLVQRHPSHAVTFVDNHDTQPGEALESFVQGWFKPLAYATILTREQGYPQVFYGDYYGIPSDGVPSYRQQIDPLLKARQQYAYGRQHDYFDHWDVIGWTREGNASHPNSGLATIMSDGPGGSKWMYVGRQKAGEVWHDMTGNRSGTVTINQDGWGHFFVNGGSVSVWVKR

SEQ ID NO: 32259 - protein, 485 aa, Bacillus sp.
HHDGTNGTIMQYFEWNVPNDGQHWNRLHNNAQNLKNAGITAIWIPPAWKGTSQNDVGYGAYDLYDLGEFNQKGTVRTKYGTKAELERAIRSLKANGIQVYGDVVMNHKGGADFTERVQAVEVNPQNRNQEVSGTYQIEAWTGFNFPGRGNQHSSFKWWWYHFDGTDWDQSRQLANRIYKFRGDGKAWDWEVDTENGNYDYLMYADVDMDHPEVINELNRWGVWYANTLNLDGFRLDAVKHIKFSFMRDWLGHVRGQTGKNLFAVAEYWKNDLGALENYLSKTNWTMSAFDVPLHYNLYQASNSSGNYDMRNLLNGTLVQRHPSHAVTFVDNHDTQPGEALESFVQGWFKPLAYATILTREQGYPQVFYGDYYGIPSDGVPSYRQQIDPLLKARQQYAYGRQHDYFDHWDVIGWTREGNASHPNSGLATIMSDGPGGSKWMYVGRQKAGEVWHDMTGNRSGTVTINQDGWGHFFVNGGSVSVWVKR

SEQ ID NO: 32260 - protein, 485 aa, Bacillus sp.
HHDGTNGTIMQYFEWNVPNDGQHWNRLHNNAQNLKNAGITAIWIPPAWKGTSQNDVGYGAYDLYDLGEFNQKGTVRTKYGTKAELERAIRSLKANGIQVYGDVVMNHKGGADFTERVQAVEVNPQNRNQEVSGTYQIEAWTGFNFPGRGNQHSSFKWRWYHFDGTDWDQSRQLANRIYKFRGDGKAWDWEVDTENGNYDYLMYADVDMDHPIVINELNRWGVWYANTLNLDGFRLDAVKHIKFSFMRDWLGHVRGQTGKNLFAVAEYWKNDLGALENYLSKTNWTMSAFDVPLHYNLYQASNSSGNYDMRNLLNGTLVQRHPSHAVTFVDNHDTQPGEALESFVQGWFKPLAYATILTREQGYPQVFYGDYYGIPSDGVPSYRQQIDPLLKARQQYAYGRQHDYFDHWDVIGWTREGNASHPNSGLATIMSDGPGGSKWMYVGRQKAGEVWHDMTGNRSGTVTINQDGWGHFFVNGGSVSVWVKR

SEQ ID NO: 32261 - protein, 485 aa, Bacillus sp.
HHDGTNGTIMQYFEWNVPNDGQHWNRLHNNAQNLKNAGITAIWIPPAWKGTSQNDVGYGAYDLYDLGEFNQKGTVRTKYGTKAELERAIRSLKANGIQVYGDVVMNHKGGADFTERVQAVEVNPQNRNQEVSGTYQIEAWTGFNFPGRGNQHSSFKWREYHFDGTDWDQSRQLANRIYKFRGDGKAWDWEVDTENGNYDYLMYADVDMDHPEVINELNRWGVWYANTLNLDGFRLDAVKHIKFSFMRDWLGHVRGQTGKNLFAVAEYWKNDLGALENYLSKTNWTMSAFDVPLHYNLYQASNSSGNYDMRNLLNGTLVQRHPSHAVTFVDNHDTQPGEALESFVQGWFKPLAYATILTREQGYPQVFYGDYYGIPSDGVPSYRQQIDPLLKARQQYAYGRQHDYFDHWDVIGWTREGNASHPNSGLATIMSDGPGGSKWMYVGRQKAGEVWHDMTGNRSGTVTINQDGWGHFFVNGGSVSVWVKR

SEQ ID NO: 32262 - protein, 485 aa, Bacillus sp.
HHDGTNGTIMQYFEWNVPNDGQHWNRLHNNAQNLKNAGITAIWIPPAWKGTSQNDVGYGAYDLYDLGEFNQKGTVRTKYGTKAELERAIRSLKANGIQVYGDVVMNHKGGADFTERVQAVEVNPQNRNQEVSGTYQIEAWTGFNFPGRGNQHSSFKWRWYHFDGTDWDQSRQLANRIYKFRGDGKAWDWEVDTENGNYDYLMYADVDMDHPEVINELNRWGVWYANTLNLDGFRLDAVKHIKFSFMRDWLGHVRGQTGKNLFAVAEYWKNDLGALENYLSKTNWTMSAFDVPLHYNLYQASNSSGNYDMRNLLNGTLVQRHPSHAVTFVDNHDTQPGEALESFVQGWFKPLAYATILTREQGYPQVFYGDYYGIPSDGVPSYRQQIDPLGKARQQYAYGRQHDYFDHWDVIGWTREGNASHPNSGLATIMSDGPGGSKWMYVGRQKAGEVWHDMTGNRSGTVTINQDGWGHFFVNGGSVSVWVKR

SEQ ID NO: 32263 - protein, 485 aa, Bacillus sp.
HHDGTNGTIMQYFEWNVPNDGQHWNRLHNNAQNLKNAGITAIWIPPAWKGTSQNDVGYGAYDLYDLGEFNQKGLVRTKYGTKAELERAIRSLKANGIQVYGDVVMNHKGGADFTERVQAVEVNPQNRNQEVSGTYQIEAWTGFNFPGRGNQHSSFKWRWYHFDGTDWDQSRQLANRIYKFRGDGKAWDWEVDTENGNYDYLMYADVDMDHPEVINELNRWGVWYANTLNLDGFRLDAVKHIKFSFMRDWLGHVRGQTGKNLFAVAEYWKNDLGALENYLSKTNWTMSAFDVPLHYNLYQASNSSGNYDMRNLLNGTLVQRHPSHAVTFVDNHDTQPGEALESFVQGWFKPLAYATILTREQGYPQVFYGDYYGIPSDGVPSYRQQIDPLLKARQQYAYGRQHDYFDHWDVIGWTREGNASHPNSGLATIMSDGPGGSKWMYVGRQKAGEVWHDMTGNRSGTVTINQDGWGHFFVNGGSVSVWVKR

SEQ ID NO: 32264 - protein, 485 aa, Bacillus sp.
HHDGTNGTIMQYFEWNVPNDGQHWNRLHNNAQNLKNAGITAIWIPPAWKGTSQNDVGYGAYDLYDLGEFNQKGTVRTKYGTKAELERAIRSLKANGIQVYGDVVMNHKGGADFTERVQAVEVNPQNRNQEVSGTYQIEAWTGFNFPGRGNQHSSFKWRWYHFDGTDWDQSRQLANRIYGFRGDGKAWDWEVDTENGNYDYLMYADVDMDHPEVINELNRWGVWYANTLNLDGFRLDAVKHIKFSFMRDWLGHVRGQTGKNLFAVAEYWKNDLGALENYLSKTNWTMSAFDVPLHYNLYQASNSSGNYDMRNLLNGTLVQRHPSHAVTFVDNHDTQPGEALESFVQGWFKPLAYATILTREQGYPQVFYGDYYGIPSDGVPSYRQQIDPLLKARQQYAYGRQHDYFDHWDVIGWTREGNASHPNSGLATIMSDGPGGSKWMYVGRQKAGEVWHDMTGNRSGTVTINQDGWGHFFVNGGSVSVWVKR

SEQ ID NO: 32265 - protein, 485 aa, Bacillus sp.
HHDGTNGTIMQYFEWNVPNDGQHWNRLHNNAQNLKNAGITAIWIPPAWKGTSQNDVGYGAYDLYDLGEFNQKGTVRTKYGTKAELERAIRSLKANGIQVYGDVVMNHKGGADFTERVQAVEVNPQNRNQEVSGTYQIEAWTGFNFPGRGNQHSSFKWRWYHFDGTDWDQSRQLANRIYKFRGDGKAWDWEVDTENGNYDYLMYADVDMDHPEVINELNRWGVWYANTLNLDGFRLDAVKHIKFSFMGDWLGHVRGQTGKNLFAVAEYWKNDLGALENYLSKTNWTMSAFDVPLHYNLYQASNSSGNYDMRNLLNGTLVQRHPSHAVTFVDNHDTQPGEALESFVQGWFKPLAYATILTREQGYPQVFYGDYYGIPSDGVPSYRQQIDPLLKARQQYAYGRQHDYFDHWDVIGWTREGNASHPNSGLATIMSDGPGGSKWMYVGRQKAGEVWHDMTGNRSGTVTINQDGWGHFFVNGGSVSVWVKR

SEQ ID NO: 32266 - protein, 485 aa, Bacillus sp.
HHDGTNGTIMQYFEWNVPNDGQHWNRLHNNAQNLKNAGITAIWIPPAWKGTSQNDVGYGAYDLYDLGEFNQKGTVRTKYGTKAELERAIRSLKANGIQVYGDVVMNHKGGADFTERVQAVEVNPQNRNQEVSGTYQIEAWTGFNFPGRGNQHSSFKWRWYHFDGTDWDQSRQLANRIYKFRGDGKAWDAEVDTENGNYDYLMYADVDMDHPEVINELNRWGVWYANTLNLDGFRLDAVKHIKFSFMRDWLGHVRGQTGKNLFAVAEYWKNDLGALENYLSKTNWTMSAFDVPLHYNLYQASNSSGNYDMRNLLNGTLVQRHPSHAVTFVDNHDTQPGEALESFVQGWFKPLAYATILTREQGYPQVFYGDYYGIPSDGVPSYRQQIDPLLKARQQYAYGRQHDYFDHWDVIGWTREGNASHPNSGLATIMSDGPGGSKWMYVGRQKAGEVWHDMTGNRSGTVTINQDGWGHFFVNGGSVSVWVKR

SEQ ID NO: 32267 - protein, 485 aa, Bacillus sp.
HHDGTNGTIMQYFEWNVPNDGQHWNRLHNNAQNLKNAGITAIWIPPAWKGTSQNDVGYGAYDLYDLGEFNQKGTVRTKYGTKAELERAIRSLKANGIQVYGDVVMNHKGGADFTERVQAVEVNPQNRNQEVSGTYQIEAWTGFNFPGRGNQHSSFKWRWYHFDGTDWDQSRQLANRIYKFRGDGKAWDWEVDTENGNYDYLMYADVDMDHPEVINELNRWGVWYANTMNLDGFRLDAVKHIKFSFMRDWLGHVRGQTGKNLFAVAEYWKNDLGALENYLSKTNWTMSAFDVPLHYNLYQASNSSGNYDMRNLLNGTLVQRHPSHAVTFVDNHDTQPGEALESFVQGWFKPLAYATILTREQGYPQVFYGDYYGIPSDGVPSYRQQIDPLLKARQQYAYGRQHDYFDHWDVIGWTREGNASHPNSGLATIMSDGPGGSKWMYVGRQKAGEVWHDMTGNRSGTVTINQDGWGHFFVNGGSVSVWVKR

SEQ ID NO: 32268 - protein, 485 aa, Bacillus sp.
HHDGTNGTIMQYFEWNVPNDGQHWNRLHNNAQNLKNAGITAIWIPPAWKGTSQNDVGYGAYDLYDLGEFNQKGTVRTKYGTKAELERAIRSLKANGIQVYGDVVMNHKGGADFTERVQAVEVNPQNRNQEVSGTYQIEAWTGFNFPGRGNQHSSFKWRWYHFDGTDWDQSRQLANRIYKFRGDGKAWDWEVDTENGNYDYLMYADVDMDHPEVINESNRWGVWYANTLNLDGFRLDAVKHIKFSFMRDWLGHVRGQTGKNLFAVAEYWKNDLGALENYLSKTNWTMSAFDVPLHYNLYQASNSSGNYDMRNLLNGTLVQRHPSHAVTFVDNHDTQPGEALESFVQGWFKPLAYATILTREQGYPQVFYGDYYGIPSDGVPSYRQQIDPLLKARQQYAYGRQHDYFDHWDVIGWTREGNASHPNSGLATIMSDGPGGSKWMYVGRQKAGEVWHDMTGNRSGTVTINQDGWGHFFVNGGSVSVWVKR

SEQ ID NO: 32269 - protein, 485 aa, Bacillus sp.
HHDGTNGTIMQYFEWNVPNDGQHWNRLHNNAQNLKNAGITAIWIPPAWKGTSQNDVGYGAYDLYDLGEFNQKGTVRTKYGTKAELERAIRSLKANGIQVYGDVVMNHKGGADFTERVQAVEVNPQNRNQEVSGTYQIEAWTGFNFPGRGNQHSSFKWRWYHFDGTDWDQSRQLANRIYKFRGDGKAWDWEVDTENGNYDYLMYADVDMDHPEVINELNRWGVWYANTLNLDGFRLDAVKHIKFSFMRDWLGHVRGQTGKNLFAVAEYWKNDLGALENYLSKTNWTMSAFDVPLHYNLYQASNSSGNYDMRNLLNGTLVQRHPSHAVTFVDNHDTQPGEALESFVQGWFKPLAYATILTRESGYPQVFYGDYYGIPSDGVPSYRQQIDPLLKARQQYAYGRQHDYFDHWDVIGWTREGNASHPNSGLATIMSDGPGGSKWMYVGRQKAGEVWHDMTGNRSGTVTINQDGWGHFFVNGGSVSVWVKR

SEQ ID NO: 32270 - protein, 485 aa, Bacillus sp.
HHDGTNGTIMQYFEWNVPNDGQHWNRLHNNAQNLKNAGITAIWIPPAWKGTSQNDVGYGAYDLYDLGEFNQKGTVRTKYGTKAELERAIRSLKANGIQVYGDVVMNHKGGADFTERVQAVEVNPQNRNQEVSGTYQIEAWTGFNFPSRGNQHSSFKWRWYHFDGTDWDQSRQLANRIYKFRGDGKAWDWEVDTENGNYDYLMYADVDMDHPEVINELNRWGVWYANTLNLDGFRLDAVKHIKFSFMRDWLGHVRGQTGKNLFAVAEYWKNDLGALENYLSKTNWTMSAFDVPLHYNLYQASNSSGNYDMRNLLNGTLVQRHPSHAVTFVDNHDTQPGEALESFVQGWFKPLAYATILTREQGYPQVFYGDYYGIPSDGVPSYRQQIDPLLKARQQYAYGRQHDYFDHWDVIGWTREGNASHPNSGLATIMSDGPGGSKWMYVGRQKAGEVWHDMTGNRSGTVTINQDGWGHFFVNGGSVSVWVKR

SEQ ID NO: 32271 - protein, 485 aa, Bacillus sp.
HHDGTNGTIMQYFEWNVPNDGQHWNRLHNNAQNLKNAGITAIWIPPAWKGTSQNDVGYGAYDLYDLGEFNQKGTVRTKYGTKAELERAIRSLKANGIQVYGDVVMNHKGGADFTERVQAVEVNPQNRNQEVHGTYQIEAWTGFNFPGRGNQHSSFKWRWYHFDGTDWDQSRQLANRIYKFRGDGKAWDWEVDTENGNYDYLMYADVDMDHPEVINELNRWGVWYANTLNLDGFRLDAVKHIKFSFMRDWLGHVRGQTGKNLFAVAEYWKNDLGALENYLSKTNWTMSAFDVPLHYNLYQASNSSGNYDMRNLLNGTLVQRHPSHAVTFVDNHDTQPGEALESFVQGWFKPLAYATILTREQGYPQVFYGDYYGIPSDGVPSYRQQIDPLLKARQQYAYGRQHDYFDHWDVIGWTREGNASHPNSGLATIMSDGPGGSKWMYVGRQKAGEVWHDMTGNRSGTVTINQDGWGHFFVNGGSVSVWVKR

SEQ ID NO: 32272 - protein, 485 aa, Bacillus sp.
HHDGTNGTIMQYFEWNVPNDGQHWNRLHNNAQNLKNAGITAIWIPPAWKGTSQNDVGYGAYDLYDLGEFNQKGTVRTKYGTKAELERAIRSLKANGIQVYGDVVMNHKGGADFTERVQAVEVNPQNRNQEVSGTYQIEAWTGFNFPGRGNQHSSFKWRWYHFDGTDWDESRQLANRIYKFRGDGKAWDWEVDTENGNYDYLMYADVDMDHPEVINELNRWGVWYANTLNLDGFRLDAVKHIKFSFMRDWLGHVRGQTGKNLFAVAEYWKNDLGALENYLSKTNWTMSAFDVPLHYNLYQASNSSGNYDMRNLLNGTLVQRHPSHAVTFVDNHDTQPGEALESFVQGWFKPLAYATILTREQGYPQVFYGDYYGIPSDGVPSYRQQIDPLLKARQQYAYGRQHDYFDHWDVIGWTREGNASHPNSGLATIMSDGPGGSKWMYVGRQKAGEVWHDMTGNRSGTVTINQDGWGHFFVNGGSVSVWVKR

SEQ ID NO: 32273 - protein, 485 aa, Bacillus sp.
HHDGTNGTIMQYFEWNVPNDGQHWNRLHNNAQNLKNAGITAIWIPPAWKGTSQNDVGYGAYDLYDLGEFNQKGTVRTKYGTKAELERAIRSLKANGIQVYGDVVMNHKGGADFTERVQAVEVNPQNRNQEVSGTYQIEAWTGFNFPGRGNQHSSFKWRWYHFDGTDWDQSRQLANRIYKFRGDGKAWDWEVDTENGNYDYLMYADVDMDHPEVINELNRWGVWYANTLNLDGFRLDAVKHIKFSFMRDWLGHVRGQTGKNLEAVAEYWKNDLGALENYLSKTNWTMSAFDVPLHYNLYQASNSSGNYDMRNLLNGTLVQRHPSHAVTFVDNHDTQPGEALESFVQGWFKPLAYATILTREQGYPQVFYGDYYGIPSDGVPSYRQQIDPLLKARQQYAYGRQHDYFDHWDVIGWTREGNASHPNSGLATIMSDGPGGSKWMYVGRQKAGEVWHDMTGNRSGTVTINQDGWGHFFVNGGSVSVWVKR

SEQ ID NO: 32274 - protein, 485 aa, Bacillus sp.
HHDGTNGTIMQYFEWNVPNDGQHWNRLHNNAQNLKNAGITAIWIPPAWKGTSQNDVGYGAYDLYDLGEFNQKGTVRTKYGTKAELERAIRSLKANGIQVYGDVVMNHKGGADFTERVQAVEVNPQNRNQEVSGTYQIEAWTGFNFPGRGNQHSSFKWRWYHFDGTDWDQSRQLANRIYKFRGDGKAWDWEVDTENGNYDYLMYADVDMDHPEVINELNRWGVWYANTLNLDGFRLDAVKHIKFSFMRDWLGHVRGQTGKNLFAVAEYWKNDLGALENYLSKTNWTMSAFDVPLHYNLYQASNSSGNYDMRNLLNGTLVQRHPSHAVTFVDVHDTQPGEALESFVQGWFKPLAYATILTREQGYPQVFYGDYYGIPSDGVPSYRQQIDPLLKARQQYAYGRQHDYFDHWDVIGWTREGNASHPNSGLATIMSDGPGGSKWMYVGRQKAGEVWHDMTGNRSGTVTINQDGWGHFFVNGGSVSVWVKR

SEQ ID NO: 32275 - protein, 485 aa, Bacillus sp.
HHDGTNGTIMQYFEWNVPNDGQHWNRLHNNAQNLKNAGITAIWIPPAWKGTSQNDVGYGAYDLYDLGEFNQKGTVRTKYGTKAELERAIRSLKANGIQVYGDVVMNHKGGADFTERVQAVEVNPQNRNQEVSGTYQIEAWTGFNFPGRGNQHSSFKWVWYHFDGTDWDQSRQLANRIYKFRGDGKAWDWEVDTENGNYDYLMYADVDMDHPEVINELNRWGVWYANTLNLDGFRLDAVKHIKFSFMRDWLGHVRGQTGKNLFAVAEYWKNDLGALENYLSKTNWTMSAFDVPLHYNLYQASNSSGNYDMRNLLNGTLVQRHPSHAVTFVDNHDTQPGEALESFVQGWFKPLAYATILTREQGYPQVFYGDYYGIPSDGVPSYRQQIDPLLKARQQYAYGRQHDYFDHWDVIGWTREGNASHPNSGLATIMSDGPGGSKWMYVGRQKAGEVWHDMTGNRSGTVTINQDGWGHFFVNGGSVSVWVKR

SEQ ID NO: 32276 - protein, 485 aa, Bacillus sp.
HHDGTNGTIMQYFEWNVPNDGQHWNRLHNNAQNLKNAGITAIWIPPAWKGTSQNDVGYGAYDLYDLGEFNQKGTVRTKYGTKAELERAIRSLKANQIQVYGDVVMNHKGGADFTERVQAVEVNPQNRNQEVSGTYQIEAWTGFNFPGRGNQHSSFKWRWYHFDGTDWDQSRQLANRIYKFRGDGKAWDWEVDTENGNYDYLMYADVDMDHPEVINELNRWGVWYANTLNLDGFRLDAVKHIKFSFMRDWLGHVRGQTGKNLFAVAEYWKNDLGALENYLSKTNWTMSAFDVPLHYNLYQASNSSGNYDMRNLLNGTLVQRHPSHAVTFVDNHDTQPGEALESFVQGWFKPLAYATILTREQGYPQVFYGDYYGIPSDGVPSYRQQIDPLLKARQQYAYGRQHDYFDHWDVIGWTREGNASHPNSGLATIMSDGPGGSKWMYVGRQKAGEVWHDMTGNRSGTVTINQDGWGHFFVNGGSVSVWVKR

SEQ ID NO: 32277 - protein, 485 aa, Bacillus sp.
HHDGTNGTIMQYFEWNVPNDGQHWNRLHNNAQNLKNAGITAIWIPPAWKGTSQNDVGYGAYDLYDLGEFNQKGTVRTKYGTKAELERAIRSLKANGIQVYGDVVMNHKGGADFTERVQAVEVNPQNRNQEVSGTYQIEAWTGFNFPGRGNQHSSFKWRWYHFDGTDWDQSRQLANRIYKFRGDGKAWDWEVDTENGNYDYLMYADVDMDHPEVINELNRWGVWYARTLNLDGFRLDAVKHIKFSFMRDWLGHVRGQTGKNLFAVAEYWKNDLGALENYLSKTNWTMSAFDVPLHYNLYQASNSSGNYDMRNLLNGTLVQRHPSHAVTFVDNHDTQPGEALESFVQGWFKPLAYATILTREQGYPQVFYGDYYGIPSDGVPSYRQQIDPLLKARQQYAYGRQHDYFDHWDVIGWTREGNASHPNSGLATIMSDGPGGSKWMYVGRQKAGEVWHDMTGNRSGTVTINQDGWGHFFVNGGSVSVWVKR

SEQ ID NO: 32278 - protein, 485 aa, Bacillus sp.
HHDGTNGTIMQYFEWNVPNDGQHWNRLHNNAQNLKNAGITAIWIPPAWKGTSQNDVGYGAYDLYDLGEFNQKGTVRTKYGTKAELERAIRSLKANGIQVYGDVVMNHKGGADFTERVQAVEVNPQNRNQEVSGTYQIEAWTGFNFPGRGNQHSSFKWRWYHFDGTDWDQSRQLANRIYKFRGDGKAWDWEVDTENGNYDYLMYADVDMDHPEVINELNRWGVWYANTLNLDGFRLDAVKHIKFSFMRDWLGHVRGQVGKNLFAVAEYWKNDLGALENYLSKTNWTMSAFDVPLHYNLYQASNSSGNYDMRNLLNGTLVQRHPSHAVTFVDNHDTQPGEALESFVQGWFKPLAYATILTREQGYPQVFYGDYYGIPSDGVPSYRQQIDPLLKARQQYAYGRQHDYFDHWDVIGWTREGNASHPNSGLATIMSDGPGGSKWMYVGRQKAGEVWHDMTGNRSGTVTINQDGWGHFFVNGGSVSVWVKR

SEQ ID NO: 32279 - protein, 485 aa, Bacillus sp.
HHDGTNGTIMQYFEWNVPNDGQHWNRLHNNAQNLKNAGITAIWIPPAWKGTSQNDVGYGAYDLYDLGEFNQKGTVRTKYGTKAELERAIRSLKANGIQVYGDVVMNHKGGADFTERVQAVEVNPQNRNQEVSGTYQIEAWTGFNFPGRGNQHSSFKWRWYHFDGTDWDQSRQLANRIYKFRGDGKAWDWEVDTENGNYDYLMYADVDMDHPEVINELNRWGVWYANTLNLDGFRLDAVKHIKFSFMRDWLGHVRGQTGKNLFAVAEYWKNDLGALENYLSKTNWTMSAFDVPLHYNLYQASNSSGNYDMRNLLNGTLCQRHPSHAVTFVDNHDTQPGEALESFVQGWFKPLAYATILTREQGYPQVFYGDYYGIPSDGVPSYRQQIDPLLKARQQYAYGRQHDYFDHWDVIGWTREGNASHPNSGLATIMSDGPGGSKWMYVGRQKAGEVWHDMTGNRSGTVTINQDGWGHFFVNGGSVSVWVKR

SEQ ID NO: 32280 - protein, 483 aa, Bacillus sp.
HHDGTNGTIMQYFEWNVPNDGQHWNRLHNNAQNLKNAGITAIWIPPAWKGTSQNDVGYGAYDLYDLGEFNQKGTVRTKYGTKAELERAIRSLKANGIQVYGDVVMNHKGGADFTERVQAVEVNPQNRNQEVSGTYQIEAWTGFNFPGRGNQHSSFKWRWYHFDGTDWDQSRQLANRIYKFXGKAWDWEVDTENGNYDYLMYADVDMDHPEVINELNRWGVWYANTLNLDGFRLDAVKHIKFSFMRDWLGHVRGQTGKNLFAVAEYWKNDLGALENYLSKTNWTMSAFDVPLHYNLYQASNSSGNYDMRNLLNGTLVQRHPSHAVTFVDNHDTQPGEALESFVQGWFKPLAYATILTREQGYPQVFYGDYYGIPSDGVPSYRQQIDPLLKARQQYAYGRQHDYFDHWDVIGWTREGNASHPNSGLATIMSDGPGGSKWMYVGRQKAGEVWHDMTGNRSGTVTINQDGWGHFFVNGGSVSVWVKR

SEQ ID NO: 32281 - protein, 485 aa, Bacillus sp.
HHDGTNGTIMQYFEWNVPNDGQHWNRLHNNAQNLKNAGITAIWIPPAWKGTSQNDVGYGAYDLYDLGEFNQKGTVRTKYGGKAELERAIRSLKANGIQVYGDVVMNHKGGADFTERVQAVEVNPQNRNQEVSGTYQIEAWTGFNFPGRGNQHSSFKWRWYHFDGTDWDQSRQLANRIYKFRGDGKAWDWEVDTENGNYDYLMYADVDMDHPEVINELNRWGVWYANTLNLDGFRLDAVKHIKFSFMRDWLGHVRGQTGKNLFAVAEYWKNDLGALENYLSKTNWTMSAFDVPLHYNLYQASNSSGNYDMRNLLNGTLVQRHPSHAVTFVDNHDTQPGEALESFVQGWFKPLAYATILTREQGYPQVFYGDYYGIPSDGVPSYRQQIDPLLKARQQYAYGRQHDYFDHWDVIGWTREGNASHPNSGLATIMSDGPGGSKWMYVGRQKAGEVWHDMTGNRSGTVTINQDGWGHFFVNGGSVSVWVKR

SEQ ID NO: 32282 - protein, 485 aa, Bacillus sp.
HHDGTNGTIMQYFEWNVPNDGQHWNRLHNNAQNLKNAGITAIWIPPAWKGTSQNDVGYGAYDLYDLGEFNQKGTVRTKYGTKAELERAIRSLKANGIVVYGDVVMNHKGGADFTERVQAVEVNPQNRNQEVSGTYQIEAWTGFNFPGRGNQHSSFKWRWYHFDGTDWDQSRQLANRIYKFRGDGKAWDWEVDTENGNYDYLMYADVDMDHPEVINELNRWGVWYANTLNLDGFRLDAVKHIKFSFMRDWLGHVRGQTGKNLFAVAEYWKNDLGALENYLSKTNWTMSAFDVPLHYNLYQASNSSGNYDMRNLLNGTLVQRHPSHAVTFVDNHDTQPGEALESFVQGWFKPLAYATILTREQGYPQVFYGDYYGIPSDGVPSYRQQIDPLLKARQQYAYGRQHDYFDHWDVIGWTREGNASHPNSGLATIMSDGPGGSKWMYVGRQKAGEVWHDMTGNRSGTVTINQDGWGHFFVNGGSVSVWVKR

SEQ ID NO: 32283 - protein, 485 aa, Bacillus sp.
HHDGTNGTIMQYFEWNVPNDGQHWNRLHNNAQNLKNAGITAIWIPPAWKGTSQNDVGYGAYDLYDLGEFNQKGTVRTKYGTKAELERAIRSLKANGIQVYGDVVMNHKGGADFTERVQAVEVNPQNRNQEVSGTYQIEAWTGFNFPGRGNQHSSFKWRWYHFDGTDWDQSRQLANRIYKFRGDGKAWDWEVDTENGNYDYLMYADVDMDHPEVINELNRWGVWLANTLNLDGFRLDAVKHIKFSFMRDWLGHVRGQTGKNLFAVAEYWKNDLGALENYLSKTNWTMSAFDVPLHYNLYQASNSSGNYDMRNLLNGTLVQRHPSHAVTFVDNHDTQPGEALESFVQGWFKPLAYATILTREQGYPQVFYGDYYGIPSDGVPSYRQQIDPLLKARQQYAYGRQHDYFDHWDVIGWTREGNASHPNSGLATIMSDGPGGSKWMYVGRQKAGEVWHDMTGNRSGTVTINQDGWGHFFVNGGSVSVWVKR

SEQ ID NO: 32284 - protein, 485 aa, Bacillus sp.
HHDGTNGTIMQYFEWNVPNDGQHWNRLHNNAQNLKNAGITAIWIPPAWKGTSQNDVGYGAYDLYDLGEFNQKGTVRTKYGTKAELERAIRSLKANGIQVYGDVVMNHKGGADFTERVQAVEVNPQNRNQEVSITYQIEAWTGFNFPGRGNQHSSFKWRWYHFDGTDWDQSRQLANRIYKFRGDGKAWDWEVDTENGNYDYLMYADVDMDHPEVINELNRWGVWYANTLNLDGFRLDAVKHIKFSFMRDWLGHVRGQTGKNLFAVAEYWKNDLGALENYLSKTNWTMSAFDVPLHYNLYQASNSSGNYDMRNLLNGTLVQRHPSHAVTFVDNHDTQPGEALESFVQGWFKPLAYATILTREQGYPQVFYGDYYGIPSDGVPSYRQQIDPLLKARQQYAYGRQHDYFDHWDVIGWTREGNASHPNSGLATIMSDGPGGSKWMYVGRQKAGEVWHDMTGNRSGTVTINQDGWGHFFVNGGSVSVWVKR

SEQ ID NO: 32285 - protein, 485 aa, Bacillus sp.
HHDGTNGTIMQYFEWNVPNDGQHWNRLHNNAQNLKNAGITAIWIPPAWKGTSQNDVGYGAYDLYDLGEFNQKGTVRTKYGTKAELERAIRSLKANGIQVYGDVVMNHKGGADFTERVQAVEVNPQNRNQEVSGTYQIEAWTGFNFPGRGNQHSSFKWRWYHFDGTDWDQSRQLANRIYKFRGDGKAWDWEVDTENGNYDYLMYADVDMDHPEVINELNRWGVWYANTLNLDGFRLDAVKHIKFSFMRDWLGHVRGQTGKNLFAVAEYWKNDLGALENYLSKTNWTMSAFDVPLHYNLYQASNSSGNYDMRNLLNGTLVQRHPSHAVTFVDNHDTQPGEALESFVQGWFKPLAYATILTREQGYPQVFYGDYYGIPSDGVPSYRQQIDPLLKARQQYAYGRQHDYFDHWDVIGWTREGNASHYNSGLATIMSDGPGGSKWMYVGRQKAGEVWHDMTGNRSGTVTINQDGWGHFFVNGGSVSVWVKR

SEQ ID NO: 32286 - protein, 485 aa, Bacillus sp.
HHDGTNGTIMQYFEWNVPNDGQHWNRLHNNAQNLKNAGITAIWIPPAWKGTSQNDVGYGAYDLYDLGEFNQKGTVRTKYGTKAELERAIRSLKANGIQVYGDVVMNHKGGADFTERVQAVEVNPQNRNQEVSGTYQIEAWTGFNFPGRGNQHSSFKWRWYHFDGTDWDQSRQLANRIYKFRGDGKAWDWEVDTENGNYDYLMYADVDMDHPEVINELNRWGVWYANTLNLDGFRLDAVKHIKFSFMRDWLGHVRGQTGKNLFAVAEYWKNDLGALENYLSKTNWTMSAFDVPLGYNLYQASNSSGNYDMRNLLNGTLVQRHPSHAVTFVDNHDTQPGEALESFVQGWFKPLAYATILTREQGYPQVFYGDYYGIPSDGVPSYRQQIDPLLKARQQYAYGRQHDYFDHWDVIGWTREGNASHPNSGLATIMSDGPGGSKWMYVGRQKAGEVWHDMTGNRSGTVTINQDGWGHFFVNGGSVSVWVKR

SEQ ID NO: 32287 - protein, 485 aa, Bacillus sp.
HHDGTNGTIMQYFEWNVPNDGQHWNRLHNNAQNLKNAGITAIWIPPAWKGTSQNDVGYGAYDLYDLGEFNQKGTVRTKYGTKAELERAIRSLKANGIQVYGDVVMNHKGGADFTERVQAVEVNPQNRNQEVSGTYQIEAWTGFNFPGRGNQHSSFKWRWYHFDGTDWDQSRQLANRIYKFRGDGKAWDWEVDTENGNYDYLMYADVDMDHPEVINELNRWGVWYANTLNLDGFRLDAVKHIKFSFMRDWLGHVRGQTGKNLFAVAEYWKNDLGALENYLSKTNWTMSAFDVPLHYNLYQASNSSGNYDMRNLLNGTLVQRHPSHAVTFVDNHDTQPGEALESFVQGWFKPLAYATILTREQGYPQVFYGDYYGIPSDGVPSYRQQIDPLLKARQQYAYGRQHDYFDHWDVIGWTREGNASHPNSGLATIMSDGPGGSKWMYVGRQKAGEVWHDMTGNRSGTVTINQDGWGHFFVNGGSVSVFVKR

SEQ ID NO: 32288 - protein, 485 aa, Bacillus sp.
HHDGTNGTIMQYFEWNVPNDGQHWNRLHNNAQNLKNAGITAIWIPPAWKGTSQNDVGYGAYDLYDLGEFNQKGTVRTKYGTKAELERAIRSLKANGIQVYGDVVMNHKGGADFTERVQAVEVNPQNRNQEVSGTYQIEAWTGFNFPGRGNQHSSFKWRWYHFDGTDWDQSRQLANRIYKFRGDGKAWDWEVDTENGNYDYLMYADVDMDHPEVINELNRWGVWYANTLNLDGFRLDAVKHIKFSFMRDWLGHVRGQTGKNLFAVAEYWKNDLGALENYLSKTNWTMSAFDVPLHYNLYQASNSSGNYDMRNLLNGTLVQRHPSHAVTFVDNHDTQPGEALESFVQGWPKPLAYATILTREQGYPQVFYGDYYGIPSDGVPSYRQQIDPLLKARQQYAYGRQHDYFDHWDVIGWTREGNASHPNSGLATIMSDGPGGSKWMYVGRQKAGEVWHDMTGNRSGTVTINQDGWGHFFVNGGSVSVWVKR

SEQ ID NO: 32289 - protein, 485 aa, Bacillus sp.
HHDGTNGTIMQYFEWNVPNDGQHWNRLHNNAQNLKNAGITAIWIPPAWKGTSQNDVGYGAYDLYDLGEFNQKGTVRTKYGTKAELERAIRSLKANGIQVYGDVVMNHKGGADFTERVQAVEVNPQNRNQEVSGTYQIEAWTGFNFPGRGNQHSSFSWRWYHFDGTDWDQSRQLANRIYKFRGDGKAWDWEVDTENGNYDYLMYADVDMDHPEVINELNRWGVWYANTLNLDGFRLDAVKHIKFSFMRDWLGHVRGQTGKNLFAVAEYWKNDLGALENYLSKTNWTMSAFDVPLHYNLYQASNSSGNYDMRNLLNGTLVQRHPSHAVTFVDNHDTQPGEALESFVQGWFKPLAYATILTREQGYPQVFYGDYYGIPSDGVPSYRQQIDPLLKARQQYAYGRQHDYFDHWDVIGWTREGNASHPNSGLATIMSDGPGGSKWMYVGRQKAGEVWHDMTGNRSGTVTINQDGWGHFFVNGGSVSVWVKR

SEQ ID NO: 32290 - protein, 485 aa, Bacillus sp.
HHDGTNGTIMQYFEWNVPNDGQHWNRLHNNAQNLKNAGITAIWIPPAWKGCSQNDVGYGAYDLYDLGEFNQKGTVRTKYGTKAELERAIRSLKANGIQVYGDVVMNHKGGADFTERVQAVEVNPQNRNQEVSGTYQIEAWTGFNFPGRGNQHSSFKWRWYHFDGTDWDQSRQLANRIYKFRGDGKAWDWEVDTENGNYDYLMYADVDMDHPEVINELNRWGVWYANTLNLDGFRLDAVKHIKFSFMRDWLGHVRGQTGKNLFAVAEYWKNDLGALENYLSKTNWTMSAFDVPLHYNLYQASNSSGNYDMRNLLNGTLVQRHPSHAVTFVDNHDTQPGEALESFVQGWFKPLAYATILTREQGYPQVFYGDYYGIPSDGVPSYRQQIDPLLKARQQYAYGRQHDYFDHWDVIGWTREGNASHPNSGLATIMSDGPGGSKWMYVGRQKAGEVWHDMTGNRSGTVTINQDGWGHFFVNGGSVSVWVKR

SEQ ID NO: 32291 - protein, 485 aa, Bacillus sp.
HHDGTNGTIMQYFEWNVPNDGQHWNRLHNNAQNLKNAGITAIWIPPAWKGTSQNDVGYGAYDLYDLGEFNQKGTVRTKYGTKAELERAIRSLKANGIQVYGDVVMNHKGGADFTERVQAVEVNPQNRNQEVSGTYQIEAWTGFNFPGRGNQHSSFKWRWYHFDGTDWDQSRQLANRIYKFRGDGKAWDWEVDTENGNYDYLMYADLDMDHPEVINELNRWGVWYANTLNLDGFRLDAVKHIKFSFMRDWLGHVRGQTGKNLFAVAEYWKNDLGALENYLSKTNWTMSAFDVPLHYNLYQASNSSGNYDMRNLLNGTLVQRHPSHAVTFVDNHDTQPGEALESFVQGWFKPLAYATILTREQGYPQVFYGDYYGIPSDGVPSYRQQIDPLLKARQQYAYGRQHDYFDHWDVIGWTREGNASHPNSGLATIMSDGPGGSKWMYVGRQKAGEVWHDMTGNRSGTVTINQDGWGHFFVNGGSVSVWVKR

SEQ ID NO: 32292 - protein, 485 aa, Bacillus sp.
HHDGTNGTIMQYFEWNVPNDGQHWNRLHNNAQNLKNAGITAIWIPPAWKGTSQNDVGYGAYDLYDLGEFNQKGTVRTKYGTKAELERAIRSLKANGIQVYGDVVMNHKGGADFTERVQAVEVNPQNRNQEVSGTYQIEAWTGFNFPGRGNQHSSFKWRWYHFDGTDWDQSRQLANRIYKFRGDGKAWDWEVDTENGNYDYLMYADVDMQHPEVINELNRWGVWYANTLNLDGFRLDAVKHIKFSFMRDWLGHVRGQTGKNLFAVAEYWKNDLGALENYLSKTNWTMSAFDVPLHYNLYQASNSSGNYDMRNLLNGTLVQRHPSHAVTFVDNHDTQPGEALESFVQGWFKPLAYATILTREQGYPQVFYGDYYGIPSDGVPSYRQQIDPLLKARQQYAYGRQHDYFDHWDVIGWTREGNASHPNSGLATIMSDGPGGSKWMYVGRQKAGEVWHDMTGNRSGTVTINQDGWGHFFVNGGSVSVWVKR

SEQ ID NO: 32293 - protein, 485 aa, Bacillus sp.
HHDGTNGTIMQYFEWNVPNDGQHWNRLHNNAQNLKNAGITAIWIPPAWKGTSQNDVGYGAYDLYDLGEFNQKGTVRTKYGTKAELERAIRSLKANGIQVYGDVVMNHKGGADFTERVQAVEVNPQNRNQEVSGTYQIEAWTGFNFPGRGNQHSSFKWRWYHFDGTDWDQSRQLANRIYKFRGDGKAWDWEVDTENGNYDYLMYADVDMDHPEVINELNRWGVWYANTLNLDGFRLDAVKHIKFSFMRDWLGHVRGQTGKNLFAVAEYWKNDLGALENYLSKTNWTMSAFDVPLHYNLYQASNSSGNYDMRNLLNGTLVQRHPSHAVTFVDNHDTQPGEALESFVQGWFKPLAYATILTREQGYPQVFYGDYYGIPSDGVPSYRQQIDPLLKARQQYAYGRQHDYFDHWDVIGWTREGFASHPNSGLATIMSDGPGGSKWMYVGRQKAGEVWHDMTGNRSGTVTINQDGWGHFFVNGGSVSVWVKR

SEQ ID NO: 32294 - protein, 485 aa, Bacillus sp.
HHDGTNGTIMQYFEWNVPNDGQHWNRLHNNAQNLKNAGITAIWIPPAWKGTSQNDVGYGAYDLYDLGEFNQKGTVRTKYGTKAELERAIRSLKANGIQVYGDVVMNHKGGADFTERVQAVEVNPQNRNQEVSGTYQIEAWTGFNFPGRGNQHSSFKWRWYHFDGTDWDQSRQLANRIYKFRGDGKAWDWEVDTENGNYDYLMYADVDMDHPEVINELNRWGVWYANTLNLDGFRLDAVKHIKFSFMRDWLGHVRGQTGKNLFAVAEYWKNDLGALENYLSKTNWTMSAFDVPLHYNLYQASISSGNYDMRNLLNGTLVQRHPSHAVTFVDNHDTQPGEALESFVQGWFKPLAYATILTREQGYPQVFYGDYYGIPSDGVPSYRQQIDPLLKARQQYAYGRQHDYFDHWDVIGWTREGNASHPNSGLATIMSDGPGGSKWMYVGRQKAGEVWHDMTGNRSGTVTINQDGWGHFFVNGGSVSVWVKR

SEQ ID NO: 32295 - protein, 485 aa, Bacillus sp.
HHDGTNGTIMQYFEWNVPNDGQHWNRLHNNAQNLKNAGITAIWIPPAWKGTSQNDVGYGAYDLYDLGEFNQKGTVRTKYGTKAELERAIRSLKANGIQVYGDVVMNHKGGADFTERVQAVEVNPQNRNQEVSGTYQIEAWTGFNFPGRGNQHSSFKWRWYHFDGTDWDQSRQLANRIYKFRGDGKAWDWEVDTENGNYDYLMYADVDMDHPEVINELNRWGVWYANTLNLDGFRLDAVKHIKFSFMRDWLGHVRGQTGKNLFAVAEYWKNDLGALENYLSKTNWTMSAFDVPLHYNLYQASNSSGNYDMRNLLNGTLVQRHPSHAVTFVDNHDTQPGEALESFVQGWFKPLAYATILTREQGYPQVFYGDYYGIPSDGVPSYRQQIDPLLKARQQYAYGRQHDYFDHWDVIGWTREGNASHPNSGLATIMSDGPGGSKWMYVGRQKAGEVWCDMTGNRSGTVTINQDGWGHFFVNGGSVSVWVKR

SEQ ID NO: 32296 - protein, 485 aa, Bacillus sp.
HHDGTNGTIMQYFEWNVPNDGQHWNRLHNNAQNLKNAGITAIWIPPAWKGTSQNDVGYGAYDLYDLGEFNQKGTVRTKYGTKAELERAIRSLKANGIQVYGDVVMNHKGGADFTERVQAVEVNPQNRNQEVSGTYQIEAWTGFNFPGRGNQHSSFKWRWYHFDGTDWDQSRQLANRIYKFRGDGKAWDWEVDTENGNYDYLMYADVDMDHPEVINELNRWGVWYANTLNLDGFRLDAVKHIKFSFMRDWLGHVRGQTGKNLFAVAEYWKNDLGALENYLSKTNWTMSAFDVPLHYNLYQASNSSGNYDMRNLLNGTLVQRHPSHAVTFVDNHDTQPGEALESFVQGWFKPLAYATILTREQGYPQVFYGDYYGIPSDGVPSYRQQIDPLLKARQQYAYGRQHDYFDHWDVIGWTREGNASHPNSGLATIMSDGPGGSKWMYVGRQKAGEQWHDMTGNRSGTVTINQDGWGHFFVNGGSVSVWVKR

SEQ ID NO: 32297 - protein, 485 aa, Bacillus sp.
HHDGTNGTIMQYFEWNVPNDGQHWNRLHNNAQNLKNAGITAIWIPPAWKGTSQNDVGYGAYDLYDLGEFNQKGTVRTKYGTKAELERAIRSLKANGIQVYGDVVMNHKGGADFTERVQAVEVNPQNRNQEVSGTYQIEAWTGFNFPGRGNQHSSFKWRWYHFDGTDWDQVRQLANRIYKFRGDGKAWDWEVDTENGNYDYLMYADVDMDHPEVINELNRWGVWYANTLNLDGFRLDAVKHIKFSFMRDWLGHVRGQTGKNLFAVAEYWKNDLGALENYLSKTNWTMSAFDVPLHYNLYQASNSSGNYDMRNLLNGTLVQRHPSHAVTFVDNHDTQPGEALESFVQGWFKPLAYATILTREQGYPQVFYGDYYGIPSDGVPSYRQQIDPLLKARQQYAYGRQHDYFDHWDVIGWTREGNASHPNSGLATIMSDGPGGSKWMYVGRQKAGEVWHDMTGNRSGTVTINQDGWGHFFVNGGSVSVWVKR

SEQ ID NO: 32298 - protein, 485 aa, Bacillus sp.
HHDGTNGTIMQYFEWNVPNDGQHWNRLHNNAQNLKNAGITAIWIPPAWKGTSQNDVGYGAYDLYDLGEFNQKGTVRTKYGTKAELERAIRSLKANGIQVYGDVVMNHKGGADFTERVQAVEVNPQNRNQEVSGTYQIEAWTGFNFPGRGNQHSSFKWRWYHFDGTDWDQSRQLANRIYKFRGDGKAWDWEVDTENGNYDYLMYADVDMDHPEVINELNRWGVWYANTLNLDGFRLDAVKHIKFSFMRDWLGHVRGQTGKNLFAVAEYWKNDLGALENYLSKTNWTMSAFDVPLHYNLYQASNSSGNYDMRNLLNGTLVQRHPSHAVTFVDNHDTQPGEALESFVQGWFKPLAYATILTREQGYPQVFYGDYYGIPSDGVPSYRQQIDPLLKARQQYAYGRQHDYFDHWDVIGWTRVGNASHPNSGLATIMSDGPGGSKWMYVGRQKAGEVWHDMTGNRSGTVTINQDGWGHFFVNGGSVSVWVKR

SEQ ID NO: 32299 - protein, 483 aa, Bacillus sp. (in: firmicutes)
HHDGTNGTIMQYFEWNVPNDGQHWNRLHNNAQNLKNAGITAIWIPPAWKGTSQNDVGYGAYDLYDLGEFNQKGTVRTKYGTKAELERAIRSLKANGIQVYGDVVMNHKGGADFTERVQAVEVNPQNRNQEVSGTYQIEAWTGFNFPGRGNQHSSFKWRWYHFDGTDWDQSHQLANRIYKFRGKAWDWEVDTENGNYDYLMYADVDMDHPEVINELNRWGVWYANTLNLDGFRLDAVKHIKFSFMRDWLGHVRGQTGKNLFAVAEYWKNDLGALENYLSKTNWTMSAFDVPLHYNLYQASNSSGNYDMRNLLNGTLVQRHPSHAVTFVDNHDTQPGEALESFVQGWFKPLAYATILTREQGYPCVFYGDYYGIPSDGVPSYRQQIDPLLKARQQYAYGRQHDYFDHWDVIGWTREGNASHPNSGLATIMSDGPGGSKWMYVGRQKAGEVWHDMTGNRSGTVTINQDGWGHFFVNGGSVSVWVKR

SEQ ID NO: 32300 - protein, 485 aa, Bacillus sp.
HHDGTNGTIMQYFEWNVPNDGQHWNRLHNNAQNLKNAGITAIWIPPAWKGTSQNDVGYGAYDLYDLGEFNQKGTVRTKYGTKAELERAIRSLKANGIQVYGDVVMNHKGGADFTERVQAVEVNPQNRNQEVSGTYQIEAWTGFNFPGRGNQHSSFKWRWYHFDGTDWDQSRQLANRIYKFRGDGKAWDWEVDTENGNYDYLMYADVDMDHPEVINELNRWGVWYANTLNLDGFRLDAVKHIKFSFMRDWLGHVRGQTGKNLFAVAEYWKNDLGALENYLSKTNWTMSAFDVPLHYNLYQASNSSGNYDMRNLLNGTLVQRHPSHAVTFVDNHDTQPGTALESFVQGWFKPLAYATILTREQGYPQVFYGDYYGIPSDGVPSYRQQIDPLLKARQQYAYGRQHDYFDHWDVIGWTREGNASHPNSGLATIMSDGPGGSKWMYVGRQKAGEVWHDMTGNRSGTVTINQDGWGHFFVNGGSVSVWVKR

SEQ ID NO: 32301 - protein, 485 aa, Bacillus sp.
HHDGTNGTIMQYFEWNVPNDGQHWNRLHNNAQNLKNAGITAIWIPPAWKGTSQNDVGYGAYDLYDLGEFNQKGTVRTKYGTKAELERAIRSLKANGIQVYGDVVMNHKGGADFTERSQAVEVNPQNRNQEVSGTYQIEAWTGFNFPGRGNQHSSFKWRWYHFDGTDWDQSRQLANRIYKFRGDGKAWDWEVDTENGNYDYLMYADVDMDHPEVINELNRWGVWYANTLNLDGFRLDAVKHIKFSFMRDWLGHVRGQTGKNLFAVAEYWKNDLGALENYLSKTNWTMSAFDVPLHYNLYQASNSSGNYDMRNLLNGTLVQRHPSHAVTFVDNHDTQPGEALESFVQGWFKPLAYATILTREQGYPQVFYGDYYGIPSDGVPSYRQQIDPLLKARQQYAYGRQHDYFDHWDVIGWTREGNASHPNSGLATIMSDGPGGSKWMYVGRQKAGEVWHDMTGNRSGTVTINQDGWGHFFVNGGSVSVWVKR

SEQ ID NO: 32302 - protein, 485 aa, Bacillus sp.
HHDGTNGTIMQYFEWNVPNDGQHWNRLHNNAQNLKNAGITAIWIPPAWKGTTQNDVGYGAYDLYDLGEFNQKGTVRTKYGTKAELERAIRSLKANGIQVYGDVVMNHKGGADFTERVQAVEVNPQNRNQEVSGTYQIEAWTGFNFPGRGNQHSSFKWRWYHFDGTDWDQSRQLANRIYKFRGDGKAWDWEVDTENGNYDYLMYADVDMDHPEVINELNRWGVWYANTLNLDGFRLDAVKHIKFSFMRDWLGHVRGQTGKNLFAVAEYWKNDLGALENYLSKTNWTMSAFDVPLHYNLYQASNSSGNYDMRNLLNGTLVQRHPSHAVTFVDNHDTQPGEALESFVQGWFKPLAYATILTREQGYPQVFYGDYYGIPSDGVPSYRQQIDPLLKARQQYAYGRQHDYFDHWDVIGWTREGNASHPNSGLATIMSDGPGGSKWMYVGRQKAGEVWHDMTGNRSGTVTINQDGWGHFFVNGGSVSVWVKR

SEQ ID NO: 32303 - protein, 485 aa, Bacillus sp.
HHDGTNGTIMQYFEWNVPNDGQHWNRLHNNAQNLKNAGITAIWIPPAWKGTSQNDVGYGAYDLYDLGEFNQKGTVRTKYGTKAELERAIRSLKANGIQVYGDVVMNHKGGADFTERVQAVEVNPQNRNQEVSGTYQIEAWTGFNFPGRGNQHSSFKWRWYHFDGTDWDQSRRLANRIYKFRGDGKAWDWEVDTENGNYDYLMYADVDMDHPEVINELNRWGVWYANTLNLDGFRLDAVKHIKFSFMRDWLGHVRGQTGKNLFAVAEYWKNDLGALENYLSKTNWTMSAFDVPLHYNLYQASNSSGNYDMRNLLNGTLVQRHPSHAVTFVDNHDTQPGEALESFVQGWFKPLAYATILTREQGYPQVFYGDYYGIPSDGVPSYRQQIDPLLKARQQYAYGRQHDYFDHWDVIGWTREGNASHPNSGLATIMSDGPGGSKWMYVGRQKAGEVWHDMTGNRSGTVTINQDGWGHFFVNGGSVSVWVKR

SEQ ID NO: 32304 - protein, 485 aa, Bacillus sp.
HHDGTNGTIMQYFEWNVPNDGQHWNRLHNNAQNLKNAGITAIWIPPAWKGTSQNDVGYGAYDLYDLGEFNQKGTVRTKYGTKAELERAIRSLKANGIQVYGDVVMNHKGGADFTERVQAVEVNPQNRNQEVSGTYQIEAWTGFNFPGRGNQHSSFKWRWYHFDGTDWDQSRQLANRIYKFRGDGKAWDWEVDTENGNYDYLMYADVDMDHPEVINELNRWGVWYANTLNLDGFRLDAVKHIEFSFMRDWLGHVRGQTGKNLFAVAEYWKNDLGALENYLSKTNWTMSAFDVPLHYNLYQASNSSGNYDMRNLLNGTLVQRHPSHAVTFVDNHDTQPGEALESFVQGWFKPLAYATILTREQGYPQVFYGDYYGIPSDGVPSYRQQIDPLLKARQQYAYGRQHDYFDHWDVIGWTREGNASHPNSGLATIMSDGPGGSKWMYVGRQKAGEVWHDMTGNRSGTVTINQDGWGHFFVNGGSVSVWVKR

SEQ ID NO: 32305 - protein, 485 aa, Bacillus sp.
HHDGTNGTIMQYFEWNVPNDGQHWNRLHNNAQNLKNAGITAIWIPPAWKGTSQNDVGYGAYDLYDLGEFNQKGTVRTKYGTKAELERAIRSLKANGIQVYGDVVMNHKGGADFTERVQAVEVNPQNRNQEVSGTYQIEAWTGFNFPGRGNQHSSFKWRWYHFDGTDWDQSRQLANRIYKFRGDGKAWDWEVDTENGNYDYLMYADVDMDHPEVINELNRWGVWYANTLNLDGFRLDAVKHIKFSFMRDWLGHVRGQTGKNLFAVAEYWKNDLGALENYLSKTNWTMSAFDVPLHYNLYQASNSSGNYDMRNLLNGTLVQRHPSHAVTFVDNHDTQSGEALESFVQGWFKPLAYATILTREQGYPQVFYGDYYGIPSDGVPSYRQQIDPLLKARQQYAYGRQHDYFDHWDVIGWTREGNASHPNSGLATIMSDGPGGSKWMYVGRQKAGEVWHDMTGNRSGTVTINQDGWGHFFVNGGSVSVWVKR

SEQ ID NO: 32306 - protein, 485 aa, Bacillus sp.
HHDGTNGTIMQYFEWNVPNDGQHWNRLHNNAQNLKNAGITAIWIPPAWKGTSQNDVGYGAYDLYDLGEFNQKGTVRTKYGTKAELERAIRSLKANGIQVYGDVVMNHKGGADFTERVQAVEVNPQNRNQEVSGTYQIEAWTGFNFPGRGNQHSSFKWRWYHFDGTDWDQSRQLANRIYKFRGDGKAWDWEVDTENGNYDYLMYADVDMDHPEVINELNRWGVWYANTLNLDGFRLDAVKHIKFSFMRDWLGHVRGQTGKNLFAVAEYWKNDLGALENYLSKTNWTMSAFDVPLHYNLYQASNSSGNYDMRNLLNGTLVQRHPSHAVTFVDNHDTQPGEALESFVQGWFKPLAYATILTREQGYPQVFYGDYYGSPSDGVPSYRQQIDPLLKARQQYAYGRQHDYFDHWDVIGWTREGNASHPNSGLATIMSDGPGGSKWMYVGRQKAGEVWHDMTGNRSGTVTINQDGWGHFFVNGGSVSVWVKR

SEQ ID NO: 32307 - protein, 485 aa, Bacillus sp.
HHDGTNGTIMQYFEWNVPNDGQHWNRLHNNAQNLKNAGITAIWIPPAWKGTSQNDVGYGAYDLYDLGEFNQKGTVRTKYGTKAELERAIRSLKANGIQVYGDVVMNHKGGADFTERVQAVEVNPQNRNQEVSGTYQIEAWTGFNFLGRGNQHSSFKWRWYHFDGTDWDQSRQLANRIYKFRGDGKAWDWEVDTENGNYDYLMYADVDMDHPEVINELNRWGVWYANTLNLDGFRLDAVKHIKFSFMRDWLGHVRGQTGKNLFAVAEYWKNDLGALENYLSKTNWTMSAFDVPLHYNLYQASNSSGNYDMRNLLNGTLVQRHPSHAVTFVDNHDTQPGEALESFVQGWFKPLAYATILTREQGYPQVFYGDYYGIPSDGVPSYRQQIDPLLKARQQYAYGRQHDYFDHWDVIGWTREGNASHPNSGLATIMSDGPGGSKWMYVGRQKAGEVWHDMTGNRSGTVTINQDGWGHFFVNGGSVSVWVKR

SEQ ID NO: 32308 - protein, 483 aa, Bacillus sp. (in: firmicutes)
HHDGTNGTIMQYFEWNVPNDGQHWNRLHNNAQNLKNAGITAIWIPPAWKGTSQNDVGYGAYDLYDLGEFNQKGTVRTKYGTKAELERAIRSLKANGIQVYGDVVMNHKGGADFTERVQAVEVNPQNRNQEVSGTYQIEAWTGFNFPGRGNQHSSFKWRWYHFDGTDWDQSRQLANRIYKFRGKAWDWEVDTENGNYDYLMYADVDMDHPEVINELNRWGVWYANTLNLDGFRLDAVKHIKFSFMRDWLGHVRGQTGKNLFAIAEFWKNDLGALENYLSKTNWTMSAFDAPLHYNLYQASNSSGNYDMRNLLNGTLVQRHPSHAVTLVDNHDTQPGEALESFVQGWFKPLAYATILTREQGYPSVFYGDYYGIPSDGVPSYRQQIDPLLKARQQYAYGRQHDYFDHWDVIGWTREGNASHPNSGLATIMSDGPGGSKWMYVGRQKAGEVWHDMTGNRSGTVTINQDGWGHFFVNGGSVSVWVKR

SEQ ID NO: 32309 - protein, 485 aa, Bacillus sp. (in: firmicutes)
HHDGTNGTIMQYFEWNVPNDGQHWNRLHNNAQNLKNAGITAIWIPPAWKGTSQNDVGYGAYDLYDLGEFNQKGTVRTKYGTKAELERAIRSLKANGIQVYGDVVMNHKGGADFTERVQAVEVNPQNRNQEVSGTYQIEAWTGFNFPGRGNQHSSFKWRWYHFDGTDWDQSRQLANRIYKFRGDGKAWDWEVDTENGNYDYLMYADVDMDHPEVINELNRWGVWYANTLNLDGFRLDAVKHIKFFFMRDWLGHVRGQTGKNLFAVAEYWKNDLGALENYLSKTNWTMSAFDVPLHYNLYQASNSSGNYDMRNLLNGTLVQRHPSHAVTFVDNHDTQPGEALESFVQGWFKPLAYATILTREQGYPQVFYGDYYGIPSDGVPSYRQQIDPLLKARQQYAYGRQHDYFDHWDVIGWTREGNASHPNSGLATIMSDGPGGSKWMYVGRQKAGEVWHDMTGNRSGTVTINQDGWGHFFVNGGSVSVWVKR

SEQ ID NO: 32310 - protein, 485 aa, Bacillus sp.
HHDGTNGTIMQYFEWNVPNDGQHWNRLHNNAQNLKNAGITAIWIPPAWKGTSQNDVGYGAYDLYDLGEFNQKGTVRTKYGTKAELERAIRSLKANGIQVYGDVVMNHKGGADFTERVQAVEVNPQNRNQEVSGTYQIEAWTGFNFPGRGNQHSSFKWRWYHFDGTDWDQSRQLANGIYKFRGDGKAWDWEVDTENGNYDYLMYADVDMDHPEVINELNRWGVWYANTLNLDGFRLDAVKHIKFSFMRDWLGHVRGQTGKNLFAVAEYWKNDLGALENYLSKTNWTMSAFDVPLHYNLYQASNSSGNYDMRNLLNGTLVQRHPSHAVTFVDNHDTQPGEALESFVQGWFKPLAYATILTREQGYPQVFYGDYYGIPSDGVPSYRQQIDPLLKARQQYAYGRQHDYFDHWDVIGWTREGNASHPNSGLATIMSDGPGGSKWMYVGRQKAGEVWHDMTGNRSGTVTINQDGWGHFFVNGGSVSVWVKR

SEQ ID NO: 32311 - protein, 485 aa, Bacillus sp.
HHDGTNGTIMQYFEWNVPNDGQHWNRLHNNAQNLKNAGITAIWIPPAWKGTSQNDVGYGAYDLYDLGEFNQKGTVRTKYGTKAELERAIRSLKANGIQVYGDVVMNHKGGADFTERVQAVEVNPQNRNQEVSGTYQIEAWTGFNFPGRGNQHSSFKWRWYHFDGTDWDQSRQLANRIYKFRGDGKAWDWEVDTENGNYDYLMYADVDMDHPEVINELNRWGVWYANTLNLDGFRLDAVKHIKFSFMRDWLGHVRGQTGKNLFAVAEYWKNDLGALENYLSKTNWTMSAFDVPLHYNLYQASNSSGNYDMRNLLNGTLVQRHPSHAVTFVDNHDTQPGEALESFVQGWFKPLAYATILTREQGYPQVFYGDYYGIRSDGVPSYRQQIDPLLKARQQYAYGRQHDYFDHWDVIGWTREGNASHPNSGLATIMSDGPGGSKWMYVGRQKAGEVWHDMTGNRSGTVTINQDGWGHFFVNGGSVSVWVKR

SEQ ID NO: 32312 - protein, 485 aa, Bacillus sp.
HHDGTNGTIMQYFEWNVPNDGQHWNRLHNNAQNLKNAGITAIWIPPAWKGTSQNDVGYGAYDLYDLGEFNQKGTVRTKYGTKAELERAIRSLKANGIQVYGDVVMNHKGGADFTERVQAVEVNPQNRNQEVSGTYQIEAWTGFNFPGRGNQHSSFKWRWYHFDGTDWDQSRQLANRIYKFRGDGKAWDWEVDTENGNYDYLMYADVDMDHPEVINELNRWGVWYANTLNLDGFRLDAVKHIKFSFMRDWLGHVRGQTGKNLFAVAEYWKNDLGALENYLSKTNWTMSAFDVPLHYNLYQASNSSGNYDMRNLLNGTLVQRHPSHAVTFVDNHDTQPGEALESFVQGWFKPLAYATILTREQGYPQVFYGDYYGIPSDGVPSYRQQIDPLLKARQQYAYGRQHDYFDHWDVIGWTREGNASHPNSVLATIMSDGPGGSKWMYVGRQKAGEVWHDMTGNRSGTVTINQDGWGHFFVNGGSVSVWVKR

SEQ ID NO: 32313 - protein, 485 aa, Bacillus sp.
HHDGTNGTIMQYFEWNVPNDGQHWNRLHNNAQNLKNAGITAIWIPPAWKGTSQNDVGYGAYDLYDLGEFNQKGTVRTKYGTKAELERAIRSLKANGIQVYGDVVMNHKGGADFTERVQAVEVNPQNRNQEVSGTYQIEAWTGFNFPGRGNQHSSFQWRWYHFDGTDWDQSRQLANRIYKFRGDGKAWDWEVDTENGNYDYLMYADVDMDHPEVINELNRWGVWYANTLNLDGFRLDAVKHIKFSFMRDWLGHVRGQTGKNLFAVAEYWKNDLGALENYLSKTNWTMSAFDVPLHYNLYQASNSSGNYDMRNLLNGTLVQRHPSHAVTFVDNHDTQPGEALESFVQGWFKPLAYATILTREQGYPQVFYGDYYGIPSDGVPSYRQQIDPLLKARQQYAYGRQHDYFDHWDVIGWTREGNASHPNSGLATIMSDGPGGSKWMYVGRQKAGEVWHDMTGNRSGTVTINQDGWGHFFVNGGSVSVWVKR

SEQ ID NO: 32314 - protein, 485 aa, Bacillus sp.
HHDGTNGTIMQYFEWNVPNDGQHWNRLHNNAQNLKNAGITAIWIPPAWKGTSQNDVGYGAYDLYDLGEFNQKGTVRTKYGTKAELERAIRSLKANGIQVYGDVVMNHKGGADFTERVQAVEVNPQNRNQEVSTTYQIEAWTGFNFPGRGNQHSSFKWRWYHFDGTDWDQSRQLANRIYKFRGDGKAWDWEVDTENGNYDYLMYADVDMDHPEVINELNRWGVWYANTLNLDGFRLDAVKHIKFSFMRDWLGHVRGQTGKNLFAVAEYWKNDLGALENYLSKTNWTMSAFDVPLHYNLYQASNSSGNYDMRNLLNGTLVQRHPSHAVTFVDNHDTQPGEALESFVQGWFKPLAYATILTREQGYPQVFYGDYYGIPSDGVPSYRQQIDPLLKARQQYAYGRQHDYFDHWDVIGWTREGNASHPNSGLATIMSDGPGGSKWMYVGRQKAGEVWHDMTGNRSGTVTINQDGWGHFFVNGGSVSVWVKR

SEQ ID NO: 32315 - protein, 485 aa, Bacillus sp.
HHDGTNGTIMQYFEWNVPNDGQHWNRLHNNAQNLKNAGITAIWIPPAWKGTSQNDVGYGAYDLYDLGEFNQKGTVRTKYGTKAELERAIRSLKANGIQVYGDVVMNHKGGADFTERVQAVEVNPQNRNQEVSGTYQIEAWTGFNFPGRGNQHSSFKWRWYHFDGTDWDQSRQLANRIYKFRGDGKAWDWEVDTENGNYDYLMYADVDMDHPEVINELNRWGVWYANTLNLDGFRLDAVKHIKFSFMRDWLGHVRGQTGKNLFAVAEYWKNDLGALENYLSKTNWTMSAFDVPLHYNLYQASNSSGNYDMRNLLNGTLVQRHPSHAVTFVDNHDTQPGAALESFVQGWFKPLAYATILTREQGYPQVFYGDYYGIPSDGVPSYRQQIDPLLKARQQYAYGRQHDYFDHWDVIGWTREGNASHPNSGLATIMSDGPGGSKWMYVGRQKAGEVWHDMTGNRSGTVTINQDGWGHFFVNGGSVSVWVKR

SEQ ID NO: 32316 - protein, 485 aa, Bacillus sp.
HHDGTNGTIMQYFEWNVPNDGQHWNRLHNNAQNLKNAGITAIWIPPAWKGTSQNDVGYGAYDLYDLGEFNQKGTVRTKYGTKAELERAIRSLKANGIQVYGDVVMNHKGGADFTERVQAVEVNPQNRNQEVSGTYQIEAWTGFNFPGRGNQHSSFKWRWYHFDGTDWDQSRQLANRIYKFRGDGKAWDWEVDTENGNYDYLMYADVDMDHPEVINELNRWGVWYANTLNLDGFRLDAVKHIKFSFMRDWLGHVRGQTGKNLFAVAEYWKNDLGALENYLSKTNWTMSAFDVPLHYNLYQASNSSGNYDMRNLLNGTLVQRHPSHAVTFVDNHDTQPGEALESFVQGWFKPLAYATILTREQGYPQVFYGDYYGIPSDGVPSYRQQIDSLLKARQQYAYGRQHDYFDHWDVIGWTREGNASHPNSGLATIMSDGPGGSKWMYVGRQKAGEVWHDMTGNRSGTVTINQDGWGHFFVNGGSVSVWVKR

SEQ ID NO: 32317 - protein, 485 aa, Bacillus sp.
HHDGTNGTIMQYFEWNVPNDGQHWNRLHNNAQNLKNAGITAIWIPPAWKGTSQNDVGYGAYDLYDLGEFNQKGTVRTKYGTKAELERAIRSLKANGIQVYGDVVMNHKGGADFTERVQAVEVNPQNRNQEVSGTYQIEAWTGFNFPGRGNQHSSFKWRWYHFDGTDWDQSRQLANRIYKFRGDGKAWDWEVDTENGNYDYLMYADVDMDHPEVINELNRWGVWYANTLNLDGFRLDAVKHIKFSFMRDWLGHVRGQTGKNLFAVAEYWKNDLGALENYLSKTNWTMSAFDVPLHYNLYQASNSSGNYDMRNLLNGTLVLRHPSHAVTFVDNHDTQPGEALESFVQGWFKPLAYATILTREQGYPQVFYGDYYGIPSDGVPSYRQQIDPLLKARQQYAYGRQHDYFDHWDVIGWTREGNASHPNSGLATIMSDGPGGSKWMYVGRQKAGEVWHDMTGNRSGTVTINQDGWGHFFVNGGSVSVWVKR

SEQ ID NO: 32318 - protein, 483 aa, Bacillus sp. (in: firmicutes)
HHDGTNGTIMQYFEWNVPNDGQHWNRLHNNAQNLKNAGITAIWIPPAWKGTSQNDVGYGAYDLYDLGEFNQKGTVRTKYGTKAELERAIRSLKANGIQVYGDVVMNHKGGADFTERVQAVEVNPQNLNQEVSGTYQIEAWTGFNFPGRGNQHSSFKWRWYHFDGTDWDQSRQLANRIYKFRGKAWDWEVDTENGNYDYLMYADVDMDHPEVINELNRWGVWYANTLNLDGFRLDAVKHIKFSFMRDWLGHVRGQTGKNLFAVAEYWKNDLGALENYLSKTNWTMSAFDVPLHYNLYQASNSSGNYDMRNLLNGTLVQRHPSHAVTFVDNHDTQPGEALESFVQGWFKPLAYATILTREQGYPQVFYGDYYGIPSDGVPSYRQQIDPLLKARQQYAYGRQHDYFDHWDVIGWTREGNASHPNSGLATIMSDGPGGSKWMYVGRQKAGEVWHDMTGNRSGTVTINQDGWGHFFVNGGSVSVWVKR

SEQ ID NO: 32319 - protein, 485 aa, Bacillus sp.
HHDGTNGTIMQYFEWNVPNDGQHWNRLHNNAQRLKNAGITAIWIPPAWKGTSQNDVGYGAYDLYDLGEFNQKGTVRTKYGTKAELERAIRSLKANGIQVYGDVVMNHKGGADFTERVQAVEVNPQNRNQEVSGTYQIEAWTGFNFPGRGNQHSSFKWRWYHFDGTDWDQSRQLANRIYKFRGDGKAWDWEVDTENGNYDYLMYADVDMDHPEVINELNRWGVWYANTLNLDGFRLDAVKHIKFSFMRDWLGHVRGQTGKNLFAVAEYWKNDLGALENYLSKTNWTMSAFDVPLHYNLYQASNSSGNYDMRNLLNGTLVQRHPSHAVTFVDNHDTQPGEALESFVQGWFKPLAYATILTREQGYPQVFYGDYYGIPSDGVPSYRQQIDPLLKARQQYAYGRQHDYFDHWDVIGWTREGNASHPNSGLATIMSDGPGGSKWMYVGRQKAGEVWHDMTGNRSGTVTINQDGWGHFFVNGGSVSVWVKR

SEQ ID NO: 32320 - protein, 485 aa, Bacillus sp.
HHDGTNGTIMQYFEWNVPNDGQHWNRLHNNAQNLKNAGITAIWIPPAWKGTSQNDVGYGAYDLYDLGEFNQKGTVRTKYGTKAELERAIRSLKANGIQVYGDVVMNHKGGADFTERVQAVEVNPQNRNQEVSGTYQIEAWTGFNFPGRGNQHSSFKWRWYHFDGTDWDQSRQLANRIYKFRGDGKAWDWEVDTENGNYDYLMYADVDMDHPEVINELNRWGVWYANTLNLDGFRLDAVKHIKFSFMRDWLGHVRGQTGKNLFAVAEYWKNDLGALENYLSKTNWTMSAFDVPLHYNLYQASNSSGNYDMRNLLNGTLVQRHPSHAVTFVDNHDTQPGEALESFVQGWFKPLAYATILVREQGYPQVFYGDYYGIPSDGVPSYRQQIDPLLKARQQYAYGRQHDYFDHWDVIGWTREGNASHPNSGLATIMSDGPGGSKWMYVGRQKAGEVWHDMTGNRSGTVTINQDGWGHFFVNGGSVSVWVKR

SEQ ID NO: 32321 - protein, 485 aa, Bacillus sp.
HHDGTNGTIMQYFEWNVPNDGQHWNRLHNNAQNLKNAGITAIWIPPAWKGTSQNDVGYGAYDLYDLGEFNQKGTVRTKYGTKAELERAIRSLKANGIQVYGDVVMNHKGGADFTERVQAVEVNPQNRNQEVSGTYQIEAWTGFNFPGRGNQHSSFKWRWYHFDGTDWDQSRQLANRIYAFRGDGKAWDWEVDTENGNYDYLMYADVDMDHPEVINELNRWGVWYANTLNLDGFRLDAVKHIKFSFMRDWLGHVRGQTGKNLFAVAEYWKNDLGALENYLSKTNWTMSAFDVPLHYNLYQASNSSGNYDMRNLLNGTLVQRHPSHAVTFVDNHDTQPGEALESFVQGWFKPLAYATILTREQGYPQVFYGDYYGIPSDGVPSYRQQIDPLLKARQQYAYGRQHDYFDHWDVIGWTREGNASHPNSGLATIMSDGPGGSKWMYVGRQKAGEVWHDMTGNRSGTVTINQDGWGHFFVNGGSVSVWVKR

SEQ ID NO: 32322 - protein, 483 aa, Bacillus sp.
HHNGTNGTMMQYFEWYLPNDGNHWNRLNSDASNLKSKGIKAVWIPPAWKGASQNDVGYGAYDLYDLGEFNQRGTVRTKYGTRSQLQAAVTSLKNNGIQVYGDVVMNHKGGADATEMVPAVEVNPNNRNQEVTGEYTIEAWTRFDFPGRGNTHSSFKWRWYHFDGVDFDQSRRLNNRIYKFRSKAWDWEVDTEFGNYDYLMYADYDYDHPESTNEMRNWGVWYTNTLGLDGFRIDAVKHIKYSFTRDWINHVRSATGKNMFAVAEFWKNDLGAIENYLQKTNWNHSVFDVPLHYNLYNASKSGGNYDMRNIFNGTVVQRHPSHAVTFVDNHDSQPEEALESFVEEWFKPLAYALTLTREQGYPSVFYGDYYGIPTHGVPAMRSKIDPILEARQKYAYGPQHDYLDHPDVIGWTREGDSSHPKSGLATLITDGPGGSKRMYAGLKNAGETWYDITGNRSDTVKIGSDGWGEFHVNDGSVSIYVQK

SEQ ID NO: 32323 - protein, 485 aa, Bacillus sp.
HHDGTNGTIMQYFEWNVPNDGQHWNRLHNNAQNLKNAGITAIWIPPAWKGTSQNDVGYGAYDLYDLGEFNQKGTVRTKYGTKAELERAIRSLKANGIQVYGDVVMNHKGGADFTERVQAVEVNPQNRNQEVSGTYQIEAYTGFNFPGRGNQHSSFKWRWYHFDGTDWDQSRQLANRIYKFRGDGKAWDWEVDTENGNYDYLMYADVDMDHPEVINELNRWGVWYANTLNLDGFRLDAVKHIKFSFMRDWLGHVRGQTGKNLFAVAEYWKNDLGALENYLSKTNWTMSAFDVPLHYNLYQASNSRGNYDMRNLLNGTLVQRHPSHAVTFVDNHDTQPGEALESFVQGWFKPLAYATILTREQGYPQVFYGDYYGIPSDGVPSYRQQIDPLLKARQQYAYGRQHDYFDHWDVIGWTREGNASHPNSGLATIMSDGPGGSKWMYVGRQKAGEVWHDMTGNRSGTVTINQDGWGHFFVNGGSVSVWVKR

SEQ ID NO: 32324 - protein, 485 aa, Bacillus sp.
HHDGTNGTIMQYFEWNVPNDGQHWNRLHNNAQNLKNAGITAIWIPPAWKGTSQNDVGYGAYDLYDLGEFNQKGTVRTKYGTKAELERAIRSLKANGIQVYGDVVMNHKGGADFTERVQAVEVNPQNRNQEVSGTYQIEAWTGFNFPGRGNQHSSFKWRWYHFDGTDWDQSRQLANRIYKFRGDGKAWDWEVDTENGNYDYLMYADVDMDHPEVINELNRWGVWYANTLNLDGFRLDAVKHIKFSFMRDWLGHVRGQTGKNLFAVAEYWKNDLGALENYLSKTNWTMSAFDVPLHYNLYQVSNSSGNYDMRNLLNGTLVQRHPSHAVTFVDNHDTQPGEALESFVQGWFKPLAYATILTREQGYPQVFYGDYYGIPSDGVPSYRQQIDPLLKARQQYAYGRQHDYFDHWDVIGWTREGNASHPNSGLATIMSDGPGGSKWMYVGRQKAGEVWHDMTGNRSGTVTINQDGWGHFFVNGGSVSVWVKR

SEQ ID NO: 32325 - protein, 485 aa, Bacillus sp.
HHDGTNGTIMQYFEWNVPNDGQHWNRLHNNAQNLKNAGITAIWIPPAWKGTSQNDVGYGAYDLYDLGEFNQKGNVRTKYGTKAELERAIRSLKANGIQVYGDVVMNHKGGADFTERVQAVEVNPQNRNQEVSGTYQIEAWTGFNFPGRGNQHSSFKWRWYHFDGTDWDQSRQLANRIYKFRGDGKAWDWEVDTENGNYDYLMYADVDMDHPEVINELNRWGVWYANTLNLDGFRLDAVKHIKFSFMRDWLGHVRGQTGKNLFAVAEYWKNDLGALENYLSKTNWTMSAFDVPLHYNLYQASNSSGNYDMRNLLNGTLVQRHPSHAVTFVDNHDTQPGEALESFVQGWFKPLAYATILTREQGYPQVFYGDYYGIPSDGVPSYRQQIDPLLKARQQYAYGRQHDYFDHWDVIGWTREGNASHPNSGLATIMSDGPGGSKWMYVGRQKAGEVWHDMTGNRSGTVTINQDGWGHFFVNGGSVSVWVKR

SEQ ID NO: 32326 - protein, 485 aa, Bacillus sp.
HHDGTNGTIMQYFEWNVPNDGQHWNRLHNNAQNLKNAGITAIWIPPAWKGTSQNDVGYGAYDLYDLGEFNQKGTVRTKYGTKAELERAIRSLKANGIQVYGDVVMNHKGGADFTERVQAVEVNPQNRNQEVSGTYQIEAWTGFNFPGRGNQHSSFKWRWYHFDGTDWDQSRQLANRIYKFRGDGKAWDWEVDTENGNYDYLMYADVDMDHPEVINELNRWGVWYANTLNLDGFRLDAVKHIKFSFMRDWLGHVRGQTGKNLFAVAEYWKNDLGALENYLSKTNWTMSAFDVPLHYNLYQASNSSGNYDMRNLLNGTLVQRHPSHAVTFVDNHDTQPFEALESFVQGWFKPLAYATILTREQGYPQVFYGDYYGIPSDGVPSYRQQIDPLLKARQQYAYGRQHDYFDHWDVIGWTREGNASHPNSGLATIMSDGPGGSKWMYVGRQKAGEVWHDMTGNRSGTVTINQDGWGHFFVNGGSVSVWVKR

SEQ ID NO: 32327 - protein, 485 aa, Bacillus sp.
HHDGTNGTIMQYFEWNVPNDGQHWNRLHNNAQNLKNAGITAIWIPPAWKGTSQNDVGYGAYDLYDLGEFNQKGTVRTKYGTKAELERAIRSLKANGIQVYGDVVMNHKGGADFTERVQAVEVNPQNRNQEVSGTYQIEAWTGFNFPGRGNQHSSFKWRWYHFDGTDWDQSRQLANRIYKFRGDGKAWDWEVDTENGNYDYLMYADVDMDHPEVINELNRWGVWYANTLNLDGFRLDAVKHIKFSFMRDWLGHVRGQTGKNLFAVAEYWKNDLGALENYLSKTNWTMSAFDVPLHYNLYQASNSSGNYDMRNLLNGTLVQRHPSHAVTFVDNHDTQPGEALESFVQGWFKPLAYATILTREQGYPQVFYGDYYGIPSDGVGSYRQQIDPLLKARQQYAYGRQHDYFDHWDVIGWTREGNASHPNSGLATIMSDGPGGSKWMYVGRQKAGEVWHDMTGNRSGTVTINQDGWGHFFVNGGSVSVWVKR

SEQ ID NO: 32328 - protein, 485 aa, Bacillus sp.
HHDGTNGTIMQYFEWNVPNDGQHWNRLHNNAQNLKNAGITAIWIPPAWKGTSQNDVGYGAYDLYDLGEFNQKGTVRTKYGTKAELERAIRSLKANGIQVYGDVVMNHKGGADFTERVQAVEVNPQNRNQEVSGTYQIEAWTGFNFPGRGNQHSSFKWRWYHFDGTDWDQSRQLANRIYKFRGDGKAWDWEVDTENGNYDYLMYADVDMDHPEVINELNRWGVWYANTLNLDGFRLDAVKHIKFSFMRDWLGHVRGQTGKNLFAVAEYWKNDLGALENYLSKTNWTMSAFDVPLHYNLYQASNSSGNYDMRNLLNGTLVQRHPSHAVTFVDNHDTQPGEALESFVQGWFKPWAYATILTREQGYPQVFYGDYYGIPSDGVPSYRQQIDPLLKARQQYAYGRQHDYFDHWDVIGWTREGNASHPNSGLATIMSDGPGGSKWMYVGRQKAGEVWHDMTGNRSGTVTINQDGWGHFFVNGGSVSVWVKR

SEQ ID NO: 32329 - protein, 485 aa, Bacillus sp.
HHDGTNGTIMQYFEWNVPNDGQHWNRLHNNAQNLKNAGITAIWIPPAWKGTSQNDVGYGAYDLYDLGEFNQKGTVRTKYGTKAELERAIRSLKANGIQVYGDVVMNHKGGADFTERVQAVEVNPQNRNQEVSGTYQIEAWTGFNFPGRGNQHSSFKWRWYHFDGTDWDQSRQLANRIYKFRGDGKAWDWEVDTENGNYDYLMYADVDMDHPEVINELNRWGVWYANTLNLDGFRLDAVKHIKFSFMRDWLGHVRGQTGKNLFAVAEYWKNDLGALENYLSKTNWTMSAFDVPLHYNLYQASNSSGNYDMRNLLNGTLVQRHPSHAVTFVDNHDTQPGEALESFVQGWFKPLAYATILTREQGYPQVFYGDYYGIPSDGVPSYRQQVDPLLKARQQYAYGRQHDYFDHWDVIGWTREGNASHPNSGLATIMSDGPGGSKWMYVGRQKAGEVWHDMTGNRSGTVTINQDGWGHFFVNGGSVSVWVKR

SEQ ID NO: 32330 - protein, 485 aa, Bacillus sp.
HHDGTNGTIMQYFEWNVPNDGQHWNRLHNNAQNLKNAGITAIWIPPALKGTSQNDVGYGAYDLYDLGEFNQKGTVRTKYGTKAELERAIRSLKANGIQVYGDVVMNHKGGADFTERVQAVEVNPQNRNQEVSGTYQIEAWTGFNFPGRGNQHSSFKWRWYHFDGTDWDQSRQLANRIYKFRGDGKAWDWEVDTENGNYDYLMYADVDMDHPEVINELNRWGVWYANTLNLDGFRLDAVKHIKFSFMRDWLGHVRGQTGKNLFAVAEYWKNDLGALENYLSKTNWTMSAFDVPLHYNLYQASNSSGNYDMRNLLNGTLVQRHPSHAVTFVDNHDTQPGEALESFVQGWFKPLAYATILTREQGYPQVFYGDYYGIPSDGVPSYRQQIDPLLKARQQYAYGRQHDYFDHWDVIGWTREGNASHPNSGLATIMSDGPGGSKWMYVGRQKAGEVWHDMTGNRSGTVTINQDGWGHFFVNGGSVSVWVKR

SEQ ID NO: 32331 - protein, 485 aa, Bacillus sp.
HHDGTNGTIMQYFEWNVPNDGQHWNRLHNNAQNLKNAGITAIWIPPAWKGTSQNDVGYGAYDLYDLGEFNQKGTVRTKYGTKAELERAIRSLKANGIQVYGDVVMNHKGGADFTERVQAVEVNPQNRNQEVSGTYQIEAWTGFNFPGRGNQHSSFKWRWYHFDGTDWDQSRQLANRIYKFRGDGKAWDWEVDTENGNYDYLMYADVDMDHPKVINELNRWGVWYANTLNLDGFRLDAVKHIKFSFMRDWLGHVRGQTGKNLFAVAEYWKNDLGALENYLSKTNWTMSAFDVPLHYNLYQASNSSGNYDMRNLLNGTLVQRHPSHAVTFVDNHDTQPGEALESFVQGWFKPLAYATILTREQGYPQVFYGDYYGIPSDGVPSYRQQIDPLLKARQQYAYGRQHDYFDHWDVIGWTREGNASHPNSGLATIMSDGPGGSKWMYVGRQKAGEVWHDMTGNRSGTVTINQDGWGHFFVNGGSVSVWVKR

SEQ ID NO: 32332 - protein, 485 aa, Bacillus sp.
HHDGTNGTIMQYFEWNVPNDGQHWNRLHNNAQNLKNAGITAIWIPPAWKGTSQNDVGYGAYDLYDLGEFNQKGTVRTKYGTKAELERAIRSLKANGIQVYGDVVMNHKGGADFTERVQAVEVNPQNRNQEVSGTYQIEAWTGFNFPGRGNQHSSFKWRWMHFDGTDWDQSRQLANRIYKFRGDGKAWDWEVDTENGNYDYLMYADVDMDHPEVINELNRWGVWYANTLNLDGFRLDAVKHIKFSFMRDWLGHVRGQTGKNLFAVAEYWKNDLGALENYLSKTNWTMSAFDVPLHYNLYQASNSSGNYDMRNLLNGTLVQRHPSHAVTFVDNHDTQPGEALESFVQGWFKPLAYATILTREQGYPQVFYGDYYGIPSDGVPSYRQQIDPLLKARQQYAYGRQHDYFDHWDVIGWTREGNASHPNSGLATIMSDGPGGSKWMYVGRQKAGEVWHDMTGNRSGTVTINQDGWGHFFVNGGSVSVWVKR

SEQ ID NO: 32333 - protein, 485 aa, Bacillus sp.
HHDGTNGTIMQYFEWNVPNDGQHWNRLHNNAQNLKNAGITAIWIPPAWKGTSQNDVGYGAYDLYDLGEFNQKGTVRTKYGTKAELERAIRSLKANGIQVYGDVVMNHKGGADFTERVQAVEVNPQNRNQEVSGTYQIEAWTGFNFPGRGNQHSSFKWRWYHFDGTDWDQSRQLANRIYKFRGDGKAWDWEVDTENGNYDYLMYADVDMDHPEVINELNRWGVWYANTLNLDGFRLDAVKHIKFSFMRDWLGHVRGQTGKNLFAVAEYWKNDLGALENYLSKTNWTMSAFDVPLHYNLYQASNSSGNYDMRNLLNGTLVQRHPSHAVTFVDNHDTQPGEALESFVQGWFKPLAYATILLREQGYPQVFYGDYYGIPSDGVPSYRQQIDPLLKARQQYAYGRQHDYFDHWDVIGWTREGNASHPNSGLATIMSDGPGGSKWMYVGRQKAGEVWHDMTGNRSGTVTINQDGWGHFFVNGGSVSVWVKR

SEQ ID NO: 32334 - protein, 485 aa, Bacillus sp.
HHDGTNGTIMQYFEWNVPNDGQHWERLHNNAQNLKNAGITAIWIPPAWKGTSQNDVGYGAYDLYDLGEFNQKGTVRTKYGTKAELERAIRSLKANGIQVYGDVVMNHKGGADFTERVQAVEVNPQNRNQEVSGTYQIEAWTGFNFPGRGNQHSSFKWRWYHFDGTDWDQSRQLANRIYKFRGDGKAWDWEVDTENGNYDYLMYADVDMDHPEVINELNRWGVWYANTLNLDGFRLDAVKHIKFSFMRDWLGHVRGQTGKNLFAVAEYWKNDLGALENYLSKTNWTMSAFDVPLHYNLYQASNSSGNYDMRNLLNGTLVQRHPSHAVTFVDNHDTQPGEALESFVQGWFKPLAYATILTREQGYPQVFYGDYYGIPSDGVPSYRQQIDPLLKARQQYAYGRQHDYFDHWDVIGWTREGNASHPNSGLATIMSDGPGGSKWMYVGRQKAGEVWHDMTGNRSGTVTINQDGWGHFFVNGGSVSVWVKR

SEQ ID NO: 32335 - protein, 485 aa, Bacillus sp.
HHDGTNGTIMQYFEWNVPNDGQHWNRLHNNAQNLKNAGITAIWIPPAWKGTSQIDVGYGAYDLYDLGEFNQKGTVRTKYGTKAELERAIRSLKANGIQVYGDVVMNHKGGADFTERVQAVEVNPQNRNQEVSGTYQIEAWTGFNFPGRGNQHSSFKWRWYHFDGTDWDQSRQLANRIYKFRGDGKAWDWEVDTENGNYDYLMYADVDMDHPEVINELNRWGVWYANTLNLDGFRLDAVKHIKFSFMRDWLGHVRGQTGKNLFAVAEYWKNDLGALENYLSKTNWTMSAFDVPLHYNLYQASNSSGNYDMRNLLNGTLVQRHPSHAVTFVDNHDTQPGEALESFVQGWFKPLAYATILTREQGYPQVFYGDYYGIPSDGVPSYRQQIDPLLKARQQYAYGRQHDYFDHWDVIGWTREGNASHPNSGLATIMSDGPGGSKWMYVGRQKAGEVWHDMTGNRSGTVTINQDGWGHFFVNGGSVSVWVKR

SEQ ID NO: 32336 - protein, 485 aa, Bacillus sp.
HHDGTNGTIMQYFEWNVPNDGQHWNRLHNNAQNLKNAGITAIWIPPAWKGTSQNDVGYGAYDLYDLGEFNQKGTVRTKYGTKAELERAIRSLKANGIQVYGDVVMNHKGGADFTERVQAVEVNPQNRNQEVSGTYQIEAWTGFNFPGRGNQHSSFKWRWYHFDGTDWDQSRQLANRIYKFRGDGKAWDWEVDTENGNYDYLMYADVDMDHPEVINELNRWGVWYANTLNLDGFRLDAVKHIKFSFMRDWLGHVRGQTGKNLFAVAEYWKNDLGALENYLSKTNWTMSAFDVPLHYNLYQASNSSGNYDMRNLLNGTLVQRHPSHAVTFVDNHDTQPGEALESFVQGWFKPLSYATILTREQGYPQVFYGDYYGIPSDGVPSYRQQIDPLLKARQQYAYGRQHDYFDHWDVIGWTREGNASHPNSGLATIMSDGPGGSKWMYVGRQKAGEVWHDMTGNRSGTVTINQDGWGHFFVNGGSVSVWVKR

SEQ ID NO: 32337 - protein, 485 aa, Bacillus sp.
HHDGTNGTIMQYFEWNVPNDGQHWNRLHNNAQNLKNAGITAIWIPPAWKGTSQNDVGYGAYDLYDLGEFNQKGTVRTKYGTKAELERAIRSLKANGIQVYGDVVMNHKGGADFTERVQAVEVNPQNRNQEVSGTYQIEAWTGFNFPGRGNQHSSFKWRWYHFDGTDWDQSRQLANRIYKFRGDGKAWDWEVDTENGNYDYLMYADVDMDHPEVINELNRWGVWYANTLNLDGFRLDAVKHIKFSFMRDWLGHVRGQTGKNLFAVAEYWKNDLGALENYLSKTNWTMSAFDVPLHYNLYQASNSSGNYDMRNLLNGTLVQRHPSHAVLFVDNHDTQPGEALESFVQGWFKPLAYATILTREQGYPQVFYGDYYGIPSDGVPSYRQQIDPLLKARQQYAYGRQHDYFDHWDVIGWTREGNASHPNSGLATIMSDGPGGSKWMYVGRQKAGEVWHDMTGNRSGTVTINQDGWGHFFVNGGSVSVWVKR

SEQ ID NO: 32338 - protein, 485 aa, Bacillus sp.
HHDGTNGTIMQYFEWNVPNDGQHWNRLHNNAQNLKNAGITAIWIPPAWKGTSQNDVGYGAYDLYDLGEFNQKGTVRTKYGTKAELERAIRSLKANGIQVYGDVVMNHKGGADFTERVQAVEVNPQNRNQEVSGTYQIEAWTGFNFPGRGNQHSSFKWRWYHFDGTDWDQSRQLANRIYKFRGDGKAWDWEVDTENGNYDYLMYADVDMDHPEVINELNRWGVWYANTLNLDGFRLDAVKHIKFSFMRDWLGHVRGQTGKNLFAVAEYWKNDLGALENYLSKTNWTMSAFDVPLHYNLYQASNSSGNYDMRNLLNGTLVQRHPSHAVTFVDNHDTQPGEALESFVQGWFKPLAYATILTREQGYPQVFYGDYYGIPSDGVPSYRQQIDPLLKARQQYAYGRQHDWFDHWDVIGWTREGNASHPNSGLATIMSDGPGGSKWMYVGRQKAGEVWHDMTGNRSGTVTINQDGWGHFFVNGGSVSVWVKR

SEQ ID NO: 32339 - protein, 485 aa, Bacillus sp.
HHDGTNGTIMQYFEWNVPNDGQHWNRLHNNAQNLKNAGITAIWIPPAWKGTSQNDVGYGAYDLWDLGEFNQKGTVRTKYGTKAELERAIRSLKANGIQVYGDVVMNHKGGADFTERVQAVEVNPQNRNQEVSGTYQIEAWTGFNFPGRGNQHSSFKWRWYHFDGTDWDQSRQLANRIYKFRGDGKAWDWEVDTENGNYDYLMYADVDMDHPEVINELNRWGVWYANTLNLDGFRLDAVKHIKFSFMRDWLGHVRGQTGKNLFAVAEYWKNDLGALENYLSKTNWTMSAFDVPLHYNLYQASNSSGNYDMRNLLNGTLVQRHPSHAVTFVDNHDTQPGEALESFVQGWFKPLAYATILTREQGYPQVFYGDYYGIPSDGVPSYRQQIDPLLKARQQYAYGRQHDYFDHWDVIGWTREGNASHPNSGLATIMSDGPGGSKWMYVGRQKAGEVWHDMTGNRSGTVTINQDGWGHFFVNGGSVSVWVKR

SEQ ID NO: 32340 - protein, 485 aa, Bacillus sp.
HHDGTNGTIMQYFEWNVPNDGQHWNRLHNNAQNLKNAGITAIWIPPAWKGTSQNDVGYGAYDPYDLGEFNQKGTVRTKYGTKAELERAIRSLKANGIQVYGDVVMNHKGGADFTERVQAVEVNPQNRNQEVSGTYQIEAWTGFNFPGRGNQHSSFKWRWYHFDGTDWDQSRQLANRIYKFRGDGKAWDWEVDTENGNYDYLMYADVDMDHPEVINELNRWGVWYANTLNLDGFRLDAVKHIKFSFMRDWLGHVRGQTGKNLFAVAEYWKNDLGALENYLSKTNWTMSAFDVPLHYNLYQASNSSGNYDMRNLLNGTLVQRHPSHAVTFVDNHDTQPGEALESFVQGWFKPLAYATILTREQGYPQVFYGDYYGIPSDGVPSYRQQIDPLLKARQQYAYGRQHDYFDHWDVIGWTREGNASHPNSGLATIMSDGPGGSKWMYVGRQKAGEVWHDMTGNRSGTVTINQDGWGHFFVNGGSVSVWVKR

SEQ ID NO: 32341 - protein, 485 aa, Bacillus sp.
HHDGTNGTIMQYFEWNVPNDGQHWNRLHNNAQNLKNAGITAIWIPPAWKGTSQNDVGYGAYDLYDLGEFNQKGTVRTKYGTKAELERAIRSLKANGIQVYGDVVMNHKGGADFTERVQAVEVNPQNRNQEVSGTYQIEAYTGFNFPGRGNQHSSFKWRWYHFDGTDWDQSRQLANRIYKFRGDGKAWDWEVDTENGNYDYLMYADVDMDHPEVINELNRWGVWYANTLNLDGFRLDAVKHIKFSFMRDWLGHVRGQTGKNLFAVAEYWKNDLGALENYLSKTNWTMSAFDVPLHYNLYQASNSKGNYDMRNLLNGTLVQRHPSHAVTFVDNHDTQPGEALESFVQGWFKPLAYATILTREQGYPQVFYGDYYGIPSDGVPSYRQQIDPLLKARQQYAYGRQHDYFDHWDVIGWTREGNASHPNSGLATIMSDGPGGSKWMYVGRQKAGEVWHDMTGNRSGTVTINQDGWGHFFVNGGSVSVWVKR

SEQ ID NO: 32342 - protein, 485 aa, Bacillus sp.
HHDGTNGTIMQYFEWNVPNDGQHWNRLHNNAQNLKNAGITAIWIPPAWKGTSQNDVGYGAYDLYDLGEFNQKGTVRTKYGTKAELERAIRSLKANGIQVYGDVVMNHKGGADFTERVQAVEVNPQNRNQEVSGTYQIEAWTGFNFPGRGNQHSSFKWRWYHFDGTDWDQSRQLANRIYKFRGDGKAWDWEVDTENGNYDYLMYADVDMDHPEVINELNRWGVWYANTLNLDGFRLDAVKHIKFSFMRDWLGHVQGQTGKNLFAVAEYWKNDLGALENYLSKTNWTMSAFDVPLHYNLYQASNSSGNYDMRNLLNGTLVQRHPSHAVTFVDNHDTQPGEALESFVQGWFKPLAYATILTREQGYPQVFYGDYYGIPSDGVPSYRQQIDPLLKARQQYAYGRQHDYFDHWDVIGWTREGNASHPNSGLATIMSDGPGGSKWMYVGRQKAGEVWHDMTGNRSGTVTINQDGWGHFFVNGGSVSVWVKR

SEQ ID NO: 32343 - protein, 485 aa, Bacillus sp.
HHDGTNGTIMQYFEWNVPNDGQHWNRLHNNAQNLKNAGITAIWIPPAWKGTSQNDVGYGAYDLYDLGEFNQKGTVRTKYGTKAELERAIRSLKANGIQVYGDVVMNHKGGADFTERVQAVEVNPQNRNQEVSGTYQIEAWTGFNFPGRGNQHSSFKWRWYHFDGTDWDQSRQLANRIYKFRGDGKAWDWEVDTENGNYDYLMYADVDMDHPEVINELNRWGVWYANTLNLDGFRLDAVKHIKFSFMRDWLGHVRGQTGKNLFAVAEYWKNDLGALENYLSKTNWTMSAFDVPLHYNLYQASNSSGNYDMRNLLNGTLVQRHPSHAVTFVDNHDTQPGEALESFVQGWFKPLAYATILTREQGYPQVFYGDYYGIPSDGVPSYRQQIDPLIKARQQYAYGRQHDYFDHWDVIGWTREGNASHPNSGLATIMSDGPGGSKWMYVGRQKAGEVWHDMTGNRSGTVTINQDGWGHFFVNGGSVSVWVKR

SEQ ID NO: 32344 - protein, 485 aa, Bacillus sp.
HHDGTNGTIMQYFEWNVPNDGQHWNRLHNNAQNLKNAGITAIWIPPGWKGTSQNDVGYGAYDLYDLGEFNQKGTVRTKYGTKAELERAIRSLKANGIQVYGDVVMNHKGGADFTERVQAVEVNPQNRNQEVSGTYQIEAWTGFNFPGRGNQHSSFKWRWYHFDGTDWDQSRQLANRIYKFRGDGKAWDWEVDTENGNYDYLMYADVDMDHPEVINELNRWGVWYANTLNLDGFRLDAVKHIKFSFMRDWLGHVRGQTGKNLFAVAEYWKNDLGALENYLSKTNWTMSAFDVPLHYNLYQASNSSGNYDMRNLLNGTLVQRHPSHAVTFVDNHDTQPGEALESFVQGWFKPLAYATILTREQGYPQVFYGDYYGIPSDGVPSYRQQIDPLLKARQQYAYGRQHDYFDHWDVIGWTREGNASHPNSGLATIMSDGPGGSKWMYVGRQKAGEVWHDMTGNRSGTVTINQDGWGHFFVNGGSVSVWVKR

SEQ ID NO: 32345 - protein, 485 aa, Bacillus sp.
HHDGTNFTIMQYFEWNVPNDGQHWNRLHNNAQNLKNAGITAIWIPPAWKGTSQNDVGYGAYDLYDLGEFNQKGTVRTKYGTKAELERAIRSLKANGIQVYGDVVMNHKGGADFTERVQAVEVNPQNRNQEVSGTYQIEAWTGFNFPGRGNQHSSFKWRWYHFDGTDWDQSRQLANRIYKFRGDGKAWDWEVDTENGNYDYLMYADVDMDHPEVINELNRWGVWYANTLNLDGFRLDAVKHIKFSFMRDWLGHVRGQTGKNLFAVAEYWKNDLGALENYLSKTNWTMSAFDVPLHYNLYQASNSSGNYDMRNLLNGTLVQRHPSHAVTFVDNHDTQPGEALESFVQGWFKPLAYATILTREQGYPQVFYGDYYGIPSDGVPSYRQQIDPLLKARQQYAYGRQHDYFDHWDVIGWTREGNASHPNSGLATIMSDGPGGSKWMYVGRQKAGEVWHDMTGNRSGTVTINQDGWGHFFVNGGSVSVWVKR

SEQ ID NO: 32346 - protein, 485 aa, Bacillus sp.
HHDGTNGTIMQYFEWNVPNDGQHWNRLHNNAQNLKNAGITAIWIPPAWKGTSQNDVGYGAYDLYDLGEFNQKGTVRTKYGTKAELERAIRSLKANGIQVYGDVVMNHKGGADFTERVQAVEVNPQNRNQEVSGTYQIEAWTGFNFPGRGNQHSSFKWRWYHLDGTDWDQSRQLANRIYKFRGDGKAWDWEVDTENGNYDYLMYADVDMDHPEVINELNRWGVWYANTLNLDGFRLDAVKHIKFSFMRDWLGHVRGQTGKNLFAVAEYWKNDLGALENYLSKTNWTMSAFDVPLHYNLYQASNSSGNYDMRNLLNGTLVQRHPSHAVTFVDNHDTQPGEALESFVQGWFKPLAYATILTREQGYPQVFYGDYYGIPSDGVPSYRQQIDPLLKARQQYAYGRQHDYFDHWDVIGWTREGNASHPNSGLATIMSDGPGGSKWMYVGRQKAGEVWHDMTGNRSGTVTINQDGWGHFFVNGGSVSVWVKR

SEQ ID NO: 32347 - protein, 485 aa, Bacillus sp.
HHDGTNGTIMQYFEWNVPNDGQHWNRLHNNAQNLKNAGITAIWIPPAWKGTSQNDVGYGAYDLYDLGTFNQKGTVRTKYGTKAELERAIRSLKANGIQVYGDVVMNHKGGADFTERVQAVEVNPQNRNQEVSGTYQIEAWTGFNFPGRGNQHSSFKWRWYHFDGTDWDQSRQLANRIYKFRGDGKAWDWEVDTENGNYDYLMYADVDMDHPEVINELNRWGVWYANTLNLDGFRLDAVKHIKFSFMRDWLGHVRGQTGKNLFAVAEYWKNDLGALENYLSKTNWTMSAFDVPLHYNLYQASNSSGNYDMRNLLNGTLVQRHPSHAVTFVDNHDTQPGEALESFVQGWFKPLAYATILTREQGYPQVFYGDYYGIPSDGVPSYRQQIDPLLKARQQYAYGRQHDYFDHWDVIGWTREGNASHPNSGLATIMSDGPGGSKWMYVGRQKAGEVWHDMTGNRSGTVTINQDGWGHFFVNGGSVSVWVKR

SEQ ID NO: 32348 - protein, 485 aa, Bacillus sp.
HLDGTNGTIMQYFEWNVPNDGQHWNRLHNNAQNLKNAGITAIWIPPAWKGTSQNDVGYGAYDLYDLGEFNQKGTVRTKYGTKAELERAIRSLKANGIQVYGDVVMNHKGGADFTERVQAVEVNPQNRNQEVSGTYQIEAWTGFNFPGRGNQHSSFKWRWYHFDGTDWDQSRQLANRIYKFRGDGKAWDWEVDTENGNYDYLMYADVDMDHPEVINELNRWGVWYANTLNLDGFRLDAVKHIKFSFMRDWLGHVRGQTGKNLFAVAEYWKNDLGALENYLSKTNWTMSAFDVPLHYNLYQASNSSGNYDMRNLLNGTLVQRHPSHAVTFVDNHDTQPGEALESFVQGWFKPLAYATILTREQGYPQVFYGDYYGIPSDGVPSYRQQIDPLLKARQQYAYGRQHDYFDHWDVIGWTREGNASHPNSGLATIMSDGPGGSKWMYVGRQKAGEVWHDMTGNRSGTVTINQDGWGHFFVNGGSVSVWVKR

SEQ ID NO: 32349 - protein, 485 aa, Bacillus sp.
HHDGTNGTIMQYFEWNVPNDGQHWNRLHNNAQNLKNAGITAIWIPPAWKGTSQNDVGYGAYDLYDLGEFNQKGTVRTKYGTKAELERAIRSLKANGIQVYGDVVMNHKGGADFTERVQAVEVNPQNRNQEVSGTYQIEAWTGFNFPGRGNQHSSFKWRWYHFDGTDWDQSRQLANRIYKFRGDGKAWDWEVDTENGNYDYLMYADVDMDHPEVINELNRWGVWYANTLNLDGFRLDAVKHIKFSFMRDWLGHVRGQTCKNLFAVAEYWKNDLGALENYLSKTNWTMSAFDVPLHYNLYQASNSSGNYDMRNLLNGTLVQRHPSHAVTFVDNHDTQPGEALESFVQGWFKPLAYATILTREQGYPQVFYGDYYGIPSDGVPSYRQQIDPLLKARQQYAYGRQHDYFDHWDVIGWTREGNASHPNSGLATIMSDGPGGSKWMYVGRQKAGEVWHDMTGNRSGTVTINQDGWGHFFVNGGSVSVWVKR

SEQ ID NO: 32350 - protein, 485 aa, Bacillus sp.
HHDGTNGTIMQYFEWNVPNDGQHWNRLHNNAQNLKNAGITAIWIPPAWKGTSQNDVGYGAYDLYDLGEFNQKGTVRTKYGTKAELERAIRSLKANGIQVYGDVVMNHKGGADFTERVQAVEVNPQNRNQEVSGTYQIEAWTGFNFPGRGNQHSSFKWRWYHFDGTDWDQSRQLANRIYKFRGDGKAWDWEVDTENGNYDYLMYADVDMDHPEVINELNRWGVWYANTLNLDGFRLDAVKHIKFSFMRDWLGHVRGQTGKNLFAVAEYWKNDLGALENYLSKTNWTMSAFDVPLHYNLYQASNSSGNYDMRNLLNGTLVQRHPSHAVTFVDNHDTQPGEALESFVQGWFKPLAYATILTREQGYPQVFYGDYYGIPSDGVPSYRQQIDPLLKARQQYAYGRQHDYFDHWDVIGWTREGNASHPNSGLATIMSDGPGGSKWMYVGRQKAGEVWHDMTGNRSGTVTILQDGWGHFFVNGGSVSVWVKR

SEQ ID NO: 32351 - protein, 485 aa, Bacillus sp.
HHDGTNGTIMQYFEWNVPNDGQHWNRLHNNAQNLKNAGITAIWIPPAWKGTSQNDVGYGAYDLYDLGEFNQKGTVRTKYGTKAELERAIRSLKANGIQVYGDVVMNHKGGADFTERVQAVEVNPQNRNQEVSGTYQIEAWTGFNFPGRGNQHSSFKWRWYHFDGTDWDQSRQLANRIYKFRGDGKAWDWEVDTENGNYDYLMYADVDMDHPEVINELNRWGVWYANTLNLDGFRLDAVKHIKFSFMRDWLGHVRGQTGKNLFAVAEYWKNDLGALENYLSKTNWTMSAFDVPLHYNLYQASNSSGNYDMRNLLNGTLVQRHPSHAVTFVDNHDTQPGEALESFVQGWFKPLAYATILTREQGVPQVFYGDYYGIPSDGVPSYRQQIDPLLKARQQYAYGRQHDYFDHWDVIGWTREGNASHPNSGLATIMSDGPGGSKWMYVGRQKAGEVWHDMTGNRSGTVTINQDGWGHFFVNGGSVSVWVKR

SEQ ID NO: 32352 - protein, 485 aa, Bacillus sp.
HHDGTNGTIMQYFEWNVPNDGQHWNRLHNNAQNLKNAGITAIWIPPAWKGTSQNDVGYGAYDLYDLGEFNQKGTVRTKYGTKAELERAIRSLKANGIQVYGDVVMNHKGGADFTERVQAVEVNPQNRNQEVSGTYQIEAWTGFNFPGRGNQHSSFKWRWYHFDGTDWDQSRQLANRIYKFRGDGKAWDWEVDTENGNYDYLMYADVDMDHPEVINELNRWGVWYANTLNLDGFRLDAVKHIKFSFMRDWLGHVRGQTGKNLFAVAEYWKNDLGALENYLSKTNWTMSAFDVPLHYNLYQASNSSGNYDMRNLLNGTLVQRHPSHAVTFVDNHDTQPGEALESFVQGWFKPLAYATILTREQGYPQVFYGDYYGIPSDGVPSYRQQIDKLLKARQQYAYGRQHDYFDHWDVIGWTREGNASHPNSGLATIMSDGPGGSKWMYVGRQKAGEVWHDMTGNRSGTVTINQDGWGHFFVNGGSVSVWVKR

SEQ ID NO: 32353 - protein, 485 aa, Bacillus sp.
HHDGTNGTIMQYFEWNVPNDGQHWNRLHNNAQNLKNAGITAIWIPPAWKGTSQNDVGYGAYDLYDLGEFNQKGTVRTKYGTKAELERAIRSLKANGIQVYGDVVMNHKGGADFTERVQAVEVNPQNRNQEVSGTYQIEAWTGFNFPGRGNQHSSFKWRWYHFDGTDWDQSRQLANRIYKFRGDGKAWDWEVDTENGNYDYLMYADVDMDHPEVINELNRWGVWYANTLNLDGFRLDAVKHIKFSFMRDWLGHVRGQTGKNLFAVAEYWKNDLGALENYLSKTNWTMSAFDVPLHYNLYQASNSSGNYDMRNLLNGTLVQRHPSHSVTFVDNHDTQPGEALESFVQGWFKPLAYATILTREQGYPQVFYGDYYGIPSDGVPSYRQQIDPLLKARQQYAYGRQHDYFDHWDVIGWTREGNASHPNSGLATIMSDGPGGSKWMYVGRQKAGEVWHDMTGNRSGTVTINQDGWGHFFVNGGSVSVWVKR

SEQ ID NO: 32354 - protein, 485 aa, Bacillus sp.
HHDGTNGTIMQYFEWNVPNDGQHWNRLHNNAQNLKNAGITAIWIPPAWKGTSQNDVGYGAYDLYDLGEFNQKGTVRTKYGTKAELERAIRSLKANGIQVYGDVVMNHKGGADFTERVQAVEVNPQNRNQEVSGTYQIEAWTGFNFPGRGNQHSSFKWRWYHFDGTDWDQSRQLANRIYKFRGDGKAWDWEVDTENGNYDYLMYADVDMDHPEVINELNRWGVWYANTLNLDGFRLDAVKHIKFSFMRDWLGHVRGQTGKNLFAVAEYWKNDLGALENYLSKTNWTMSAFDVPLHYNLYQAANSSGNYDMRNLLNGTLVQRHPSHAVTFVDNHDTQPGEALESFVQGWFKPLAYATILTREQGYPQVFYGDYYGIPSDGVPSYRQQIDPLLKARQQYAYGRQHDYFDHWDVIGWTREGNASHPNSGLATIMSDGPGGSKWMYVGRQKAGEVWHDMTGNRSGTVTINQDGWGHFFVNGGSVSVWVKR

SEQ ID NO: 32355 - protein, 485 aa, Bacillus sp.
HHDGTNGTIMQYFEWNVPNDGQHWNRLHNNAQNLKNAGITAIWIPPAWKGTSQNDVGYGAYDLYDLGEFNQKGTVRTKYGTKAELERAIRSLKANGIQVYGDVVMNHKGGADFTERVQAVEVNPQNRNQEVSGTYQIEAWTGFNFPGRGNQHSSFKWRWYHFDGTDWDQSRQLANRIYKFRGDGAAWDWEVDTENGNYDYLMYADVDMDHPEVINELNRWGVWYANTLNLDGFRLDAVKHIKFSFMRDWLGHVRGQTGKNLFAVAEYWKNDLGALENYLSKTNWTMSAFDVPLHYNLYQASNSSGNYDMRNLLNGTLVQRHPSHAVTFVDNHDTQPGEALESFVQGWFKPLAYATILTREQGYPQVFYGDYYGIPSDGVPSYRQQIDPLLKARQQYAYGRQHDYFDHWDVIGWTREGNASHPNSGLATIMSDGPGGSKWMYVGRQKAGEVWHDMTGNRSGTVTINQDGWGHFFVNGGSVSVWVKR

SEQ ID NO: 32356 - protein, 485 aa, Bacillus sp.
HHDGTNSTIMQYFEWNVPNDGQHWNRLHNNAQNLKNAGITAIWIPPAWKGTSQNDVGYGAYDLYDLGEFNQKGTVRTKYGTKAELERAIRSLKANGIQVYGDVVMNHKGGADFTERVQAVEVNPQNRNQEVSGTYQIEAWTGFNFPGRGNQHSSFKWRWYHFDGTDWDQSRQLANRIYKFRGDGKAWDWEVDTENGNYDYLMYADVDMDHPEVINELNRWGVWYANTLNLDGFRLDAVKHIKFSFMRDWLGHVRGQTGKNLFAVAEYWKNDLGALENYLSKTNWTMSAFDVPLHYNLYQASNSSGNYDMRNLLNGTLVQRHPSHAVTFVDNHDTQPGEALESFVQGWFKPLAYATILTREQGYPQVFYGDYYGIPSDGVPSYRQQIDPLLKARQQYAYGRQHDYFDHWDVIGWTREGNASHPNSGLATIMSDGPGGSKWMYVGRQKAGEVWHDMTGNRSGTVTINQDGWGHFFVNGGSVSVWVKR

SEQ ID NO: 32357 - protein, 485 aa, Bacillus sp.
HHDGTNGTIMQYFEWNVPNDGQHWNRLHNNAQNLKNAGITAIWIPPAWKGTSQNDVGYGAYDLYDLGEFNQKGTVRTKYGTKAELERAIRSLKANGIQVYGDVVMNHKGGADFTERVQAVEVNPQNRNQEVSGTYQIEAWTGFNFPGRGNQHSSFKWRWYHFDGTDWDQSRQLANRIYKFRGDGKAWQWEVDTENGNYDYLMYADVDMDHPEVINELNRWGVWYANTLNLDGFRLDAVKHIKFSFMRDWLGHVRGQTGKNLFAVAEYWKNDLGALENYLSKTNWTMSAFDVPLHYNLYQASNSSGNYDMRNLLNGTLVQRHPSHAVTFVDNHDTQPGEALESFVQGWFKPLAYATILTREQGYPQVFYGDYYGIPSDGVPSYRQQIDPLLKARQQYAYGRQHDYFDHWDVIGWTREGNASHPNSGLATIMSDGPGGSKWMYVGRQKAGEVWHDMTGNRSGTVTINQDGWGHFFVNGGSVSVWVKR

SEQ ID NO: 32358 - protein, 485 aa, Bacillus sp.
HHDGTNGTIMQYFEWNVPNDGQHWNRLHNNAQNLKNAGITAIWIPPAWKGTSQNDVGYGAYDLYDLGEFNQKGTVRTKYGTKAELERAIRSLKANGIQVYGDVVMNHKGGADFTERVQAVEVNPQNRNQEVSGTYQIEAWTGFNFPGRGNQHSSFKWRWYHFDGTDWDQSRQLANRIYKFRGDGKAWDWEVDTENGNYDYLMYADVDMDHPEVINELNRWGVWYANTLNLDGFRLDAVKHIKFSFMRDWLGHVRGQTGKNLFAVAEYWKNDLGALENYLSKTNWTMSAFDVQLHYNLYQASNSSGNYDMRNLLNGTLVQRHPSHAVTFVDNHDTQPGEALESFVQGWFKPLAYATILTREQGYPQVFYGDYYGIPSDGVPSYRQQIDPLLKARQQYAYGRQHDYFDHWDVIGWTREGNASHPNSGLATIMSDGPGGSKWMYVGRQKAGEVWHDMTGNRSGTVTINQDGWGHFFVNGGSVSVWVKR

SEQ ID NO: 32359 - protein, 485 aa, Bacillus sp.
HHDGTNGTIMQYFEWNVPNDGQHWNRLHNNAQNLKNAGITAIWIPPAWKGTSQNDVGYGAYDLYDLGEFNQKGTVRTKYGTKAELERAIRSLKANGIQVYGDVVMNHKGGADFTERVQAVEVAPQNRNQEVSGTYQIEAWTGFNFPGRGNQHSSFKWRWYHFDGTDWDQSRQLANRIYKFRGDGKAWDWEVDTENGNYDYLMYADVDMDHPEVINELNRWGVWYANTLNLDGFRLDAVKHIKFSFMRDWLGHVRGQTGKNLFAVAEYWKNDLGALENYLSKTNWTMSAFDVPLHYNLYQASNSSGNYDMRNLLNGTLVQRHPSHAVTFVDNHDTQPGEALESFVQGWFKPLAYATILTREQGYPQVFYGDYYGIPSDGVPSYRQQIDPLLKARQQYAYGRQHDYFDHWDVIGWTREGNASHPNSGLATIMSDGPGGSKWMYVGRQKAGEVWHDMTGNRSGTVTINQDGWGHFFVNGGSVSVWVKR

SEQ ID NO: 32360 - protein, 485 aa, Bacillus sp.
HHDGTNGTIMQYFEWNVPNDGQHWNRLHNNAQNLKNAGITAIWIPPAWKGTSQNDVGYGAYDLYDLGEFNQKGTVRTKYGTKAELERAIRSLKANGIQVYGDVVMNHKGGADFTERVQAVEVNPQNRNQEVSGTYQIEAWTGFNFPGRGNQHSSFKWRWYHFDGTDWDQSRQLANRIYKFRGDGKAWDWEVDTENGNYDYLMYADVDMDHPEVINELNRWGVWYANTLNLDGFRLDAVKHIKFSFMRDWLGHVRGQTGKNLFAVAEYWKNDLGALENYLSKTNWTMSAFDVPLHYNLYQASNSSGNYDMRNLLNGTLVQRHPSHAVTFVDNHDTQPGEALESFVQGWFKLLAYATILTREQGYPQVFYGDYYGIPSDGVPSYRQQIDPLLKARQQYAYGRQHDYFDHWDVIGWTREGNASHPNSGLATIMSDGPGGSKWMYVGRQKAGEVWHDMTGNRSGTVTINQDGWGHFFVNGGSVSVWVKR

SEQ ID NO: 32361 - protein, 485 aa, Bacillus sp.
HHDGTNGTIMQYFEWNVPNDGQHWNRLHNNAQNLKNAGITAIWIPPAWKGTSQNDVGYGAYDLYDLGEFNQKGTVRTKYGTKAELERAIRSLKANGIQVYGDVVMNHKGGADFTERVQAVEVNPQNRNQEVSGTYQIEAWTGFNFPGRGNQHCSFKWRWYHFDGTDWDQSRQLANRIYKFRGDGKAWDWEVDTENGNYDYLMYADVDMDHPEVINELNRWGVWYANTLNLDGFRLDAVKHIKFSFMRDWLGHVRGQTGKNLFAVAEYWKNDLGALENYLSKTNWTMSAFDVPLHYNLYQASNSSGNYDMRNLLNGTLVQRHPSHAVTFVDNHDTQPGEALESFVQGWFKPLAYATILTREQGYPQVFYGDYYGIPSDGVPSYRQQIDPLLKARQQYAYGRQHDYFDHWDVIGWTREGNASHPNSGLATIMSDGPGGSKWMYVGRQKAGEVWHDMTGNRSGTVTINQDGWGHFFVNGGSVSVWVKR

SEQ ID NO: 32362 - protein, 485 aa, Bacillus sp.
HHDGTNGTIMQYFEWNVPNDGQHWNRLHNNAQNLKNAGITAIWIPPAWKGTSQNDVGYGAYDLYDLGEFNQKGTVRTKYGTKAELERAIRSLKANGIQVYGDVVMNHKGGADFTERVQAVEVNPQNREQEVSGTYQIEAWTGFNFPGRGNQHSSFKWRWYHFDGTDWDQSRQLANRIYKFRGDGKAWDWEVDTENGNYDYLMYADVDMDHPEVINELNRWGVWYANTLNLDGFRLDAVKHIKFSFMRDWLGHVRGQTGKNLFAVAEYWKNDLGALENYLSKTNWTMSAFDVPLHYNLYQASNSSGNYDMRNLLNGTLVQRHPSHAVTFVDNHDTQPGEALESFVQGWFKPLAYATILTREQGYPQVFYGDYYGIPSDGVPSYRQQIDPLLKARQQYAYGRQHDYFDHWDVIGWTREGNASHPNSGLATIMSDGPGGSKWMYVGRQKAGEVWHDMTGNRSGTVTINQDGWGHFFVNGGSVSVWVKR

SEQ ID NO: 32363 - protein, 485 aa, Bacillus sp.
HHDGTNGTIMQYFEWNVPNDGQHWNRLHNNAQNLKNAGITAIWIPPAWKGTSQNDVGYGAYDLYDLGEFNQKGTVRTKYGTKAELERAIRSLKANGIQVYGDVVMNHKGGADFTERVQAVEVNPQNRNQEVSGTYQIEAWTGFNFPGRGNQHSSFKWRWYHFDGTDWDQSRQLANRIYKFRGDGKAWDWEVDTENGNYDYLMYADVDMDHPEVINELNRWGVWYANTANLDGFRLDAVKHIKFSFMRDWLGHVRGQTGKNLFAVAEYWKNDLGALENYLSKTNWTMSAFDVPLHYNLYQASNSSGNYDMRNLLNGTLVQRHPSHAVTFVDNHDTQPGEALESFVQGWFKPLAYATILTREQGYPQVFYGDYYGIPSDGVPSYRQQIDPLLKARQQYAYGRQHDYFDHWDVIGWTREGNASHPNSGLATIMSDGPGGSKWMYVGRQKAGEVWHDMTGNRSGTVTINQDGWGHFFVNGGSVSVWVKR

SEQ ID NO: 32364 - protein, 485 aa, Bacillus sp.
HHDGTNGTIMQYFEWNVPNDGQHWNRLHNNAQNLKNAGITAIWIPPAWKGTSQNDVGYGAYDLYDLGEFNQKGTVRTKYGTKAELERAIRSLKANGIQVYGDVVMNHKGGADFTERVQAVGVNPQNRNQEVSGTYQIEAWTGFNFPGRGNQHSSFKWRWYHFDGTDWDQSRQLANRIYKFRGDGKAWDWEVDTENGNYDYLMYADVDMDHPEVINELNRWGVWYANTLNLDGFRLDAVKHIKFSFMRDWLGHVRGQTGKNLFAVAEYWKNDLGALENYLSKTNWTMSAFDVPLHYNLYQASNSSGNYDMRNLLNGTLVQRHPSHAVTFVDNHDTQPGEALESFVQGWFKPLAYATILTREQGYPQVFYGDYYGIPSDGVPSYRQQIDPLLKARQQYAYGRQHDYFDHWDVIGWTREGNASHPNSGLATIMSDGPGGSKWMYVGRQKAGEVWHDMTGNRSGTVTINQDGWGHFFVNGGSVSVWVKR

SEQ ID NO: 32365 - protein, 485 aa, Bacillus sp.
HHDGTNGTIMQYFEWNVPNDGQHWNRLHNNAQNLKNAGITAIWIPPAWKGTKQNDVGYGAYDLYDLGEFNQKGTVRTKYGTKAELERAIRSLKANGIQVYGDVVMNHKGGADFTERVQAVEVNPQNRNQEVSGTYQIEAWTGFNFPGRGNQHSSFKWRWYHFDGTDWDQSRQLANRIYKFRGDGKAWDWEVDTENGNYDYLMYADVDMDHPEVINELNRWGVWYANTLNLDGFRLDAVKHIKFSFMRDWLGHVRGQTGKNLFAVAEYWKNDLGALENYLSKTNWTMSAFDVPLHYNLYQASNSSGNYDMRNLLNGTLVQRHPSHAVTFVDNHDTQPGEALESFVQGWFKPLAYATILTREQGYPQVFYGDYYGIPSDGVPSYRQQIDPLLKARQQYAYGRQHDYFDHWDVIGWTREGNASHPNSGLATIMSDGPGGSKWMYVGRQKAGEVWHDMTGNRSGTVTINQDGWGHFFVNGGSVSVWVKR

SEQ ID NO: 32366 - protein, 485 aa, Bacillus sp.
HHDGTNGTIMQYFEWNVPNDGQHWNRLHNNAQNLKNAGITAIWIPPAWKGTSQNDVGYGAYDLYDLGEFNQKGTVRTKYGTKAELERAIRSLKANGIQVYGDVVMNHKGGADFTERVQAVEVNPQNRNQEVSGTYQIEAWTGFNFPGRGNQHSSFKWRWYHFDGTDWDQSRQLANRIYKFRGDGKAWDWEVDTENGNYDYLMYADVDMDHPEVINELNRWGVWYANTLNLDGFRLDAVKHIKFSFMRDWLGHVRGQTGKNLFAVAEYWKNDLGALENYLSKTNWTMSAFDVPLHYNLYQASNSSGNYDMRNLLNGTLVQRHPSHAVTFVDNHDTQPGEALESFVQGWFKPLAYATILTREQGYPQVFYGDYYGIPSDGVPSYRQQIDPLLKARQQYAYGRQHDYFDHWDVIGWTREGNASHPNSGLATIMSDGPNGSKWMYVGRQKAGEVWHDMTGNRSGTVTINQDGWGHFFVNGGSVSVWVKR

SEQ ID NO: 32367 - protein, 485 aa, Bacillus sp.
HHDGTNGTIMQYFEWNVPNDGQHWNRLHNNAQNLKNAGITAIWIPPAWKGTSQNDVGYGAYDLYDLGEFNQKGTVRTKYGTKAELERAIRSLKANGIQVYGDVVMNHKGGADFTERVQAVEVNPQNRNQEVSGTYQIEAWTGFNFPGRGNQHSSFKWRWYHFDGTDWDQSRQLANRIYKFRGDGKAWDWEVDTENGNYDYLMYADVDMDHPEVINELNRWGVWYANTLNLDGFRLDAVKHIKFSFMRDWLGHVRGQTGKNLFAVAEYWKNDLGALENYLSKTNWTMSAFDVPLHYNLYQASNSSGNYDMRNLLNGTLVQRHPSHAATFVDNHDTQPGEALESFVQGWFKPLAYATILTREQGYPQVFYGDYYGIPSDGVPSYRQQIDPLLKARQQYAYGRQHDYFDHWDVIGWTREGNASHPNSGLATIMSDGPGGSKWMYVGRQKAGEVWHDMTGNRSGTVTINQDGWGHFFVNGGSVSVWVKR

SEQ ID NO: 32368 - protein, 485 aa, Bacillus sp.
HHDGTNGTIMQYFEWNVPNDGQHWNRLHNNAQNLKNAGITAIWIPPAWKGTDQNDVGYGAYDLYDLGEFNQKGTVRTKYGTKAELERAIRSLKANGIQVYGDVVMNHKGGADFTERVQAVEVNPQNRNQEVSGTYQIEAWTGFNFPGRGNQHSSFKWRWYHFDGTDWDQSRQLANRIYKFRGDGKAWDWEVDTENGNYDYLMYADVDMDHPEVINELNRWGVWYANTLNLDGFRLDAVKHIKFSFMRDWLGHVRGQTGKNLFAVAEYWKNDLGALENYLSKTNWTMSAFDVPLHYNLYQASNSSGNYDMRNLLNGTLVQRHPSHAVTFVDNHDTQPGEALESFVQGWFKPLAYATILTREQGYPQVFYGDYYGIPSDGVPSYRQQIDPLLKARQQYAYGRQHDYFDHWDVIGWTREGNASHPNSGLATIMSDGPGGSKWMYVGRQKAGEVWHDMTGNRSGTVTINQDGWGHFFVNGGSVSVWVKR

SEQ ID NO: 32369 - protein, 485 aa, Bacillus sp.
HHDGTNGTIMQYFEWNVPNDGQHWNRLHNNAQNLKNAGITAIWIPPAWKGTSQNDVGYGAYDLYDLGEFNQKGTVRTKYGTKAELERAIRSLKANGIQVYGDVVMNHKGGADFTERVQAVEVNPQNRNQEVSGTYQIEAWTGFNFPGRGNQHSSFKWRWYHFDGTDWDQSRQLANRIYKFRGDGKAWDWEVDTENGNYDYLMYADVDMDHPEVINELNWWGVWYANTLNLDGFRLDAVKHIKFSFMRDWLGHVRGQTGKNLFAVAEYWKNDLGALENYLSKTNWTMSAFDVPLHYNLYQASNSSGNYDMRNLLNGTLVQRHPSHAVTFVDNHDTQPGEALESFVQGWFKPLAYATILTREQGYPQVFYGDYYGIPSDGVPSYRQQIDPLLKARQQYAYGRQHDYFDHWDVIGWTREGNASHPNSGLATIMSDGPGGSKWMYVGRQKAGEVWHDMTGNRSGTVTINQDGWGHFFVNGGSVSVWVKR

SEQ ID NO: 32370 - protein, 485 aa, Bacillus sp.
HHDGTNGTIMQYFEWNVPNDGQHWNRLHNNAQNLKNAGITAIWIPPAWKGTSQNDVGYGAYDLYDLGEFNQKGTVRTKYGTKAELERAIRSLKANGIQVYGDVVMNHKGGADFTERVQAVEVNPQNRNQEVSGTYQIEAWTGFNFPGRGNQHSSFKWRWYHFDGTDWDQSRQLANRIYKFRGDGKAWDWEVDTENGNYDYLMYADVDMDHPEVINELNRWGVWYANTLNLDGFRLDAVKHIKFSFMRDWLGHVRGQTGKNLFAVAEYWKNVLGALENYLSKTNWTMSAFDVPLHYNLYQASNSSGNYDMRNLLNGTLVQRHPSHAVTFVDNHDTQPGEALESFVQGWFKPLAYATILTREQGYPQVFYGDYYGIPSDGVPSYRQQIDPLLKARQQYAYGRQHDYFDHWDVIGWTREGNASHPNSGLATIMSDGPGGSKWMYVGRQKAGEVWHDMTGNRSGTVTINQDGWGHFFVNGGSVSVWVKR

SEQ ID NO: 32371 - protein, 485 aa, Bacillus sp.
HHDGTNGTIMQYFEHNVPNDGQHWNRLHNNAQNLKNAGITAIWIPPAWKGTSQNDVGYGAYDLYDLGEFNQKGTVRTKYGTKAELERAIRSLKANGIQVYGDVVMNHKGGADFTERVQAVEVNPQNRNQEVSGTYQIEAWTGFNFPGRGNQHSSFKWRWYHFDGTDWDQSRQLANRIYKFRGDGKAWDWEVDTENGNYDYLMYADVDMDHPEVINELNRWGVWYANTLNLDGFRLDAVKHIKFSFMRDWLGHVRGQTGKNLFAVAEYWKNDLGALENYLSKTNWTMSAFDVPLHYNLYQASNSSGNYDMRNLLNGTLVQRHPSHAVTFVDNHDTQPGEALESFVQGWFKPLAYATILTREQGYPQVFYGDYYGIPSDGVPSYRQQIDPLLKARQQYAYGRQHDYFDHWDVIGWTREGNASHPNSGLATIMSDGPGGSKWMYVGRQKAGEVWHDMTGNRSGTVTINQDGWGHFFVNGGSVSVWVKR

SEQ ID NO: 32372 - protein, 485 aa, Bacillus sp.
HHDGTNGTIMQYFEWNVPNDGQHWNRLHNNAQNLKNAGITAIWIPPAWKGTSQNDVGYGAYDLYDLGEFNQKGTVRTKYGTKAELERAIRSLKANGIQVYGDVVMNHKGGADFTERVQAVEVNPQNRNQEVSGTYQIEAWTGFNFPGRGNQHSSFKWRWYHFDGTDWDQSRQLANRIYKFRGDGKAWDWEVDTENGNYDYLMYADVDMDHPEVINELNRWGVWYANTLNLDGFRLDAVKHIKFSFMRDWLGHVRGQTGKNLFAVAEYWKNDLGAGENYLSKTNWTMSAFDVPLHYNLYQASNSSGNYDMRNLLNGTLVQRHPSHAVTFVDNHDTQPGEALESFVQGWFKPLAYATILTREQGYPQVFYGDYYGIPSDGVPSYRQQIDPLLKARQQYAYGRQHDYFDHWDVIGWTREGNASHPNSGLATIMSDGPGGSKWMYVGRQKAGEVWHDMTGNRSGTVTINQDGWGHFFVNGGSVSVWVKR

SEQ ID NO: 32373 - protein, 485 aa, Bacillus sp.
HHDGTNGTIMQYFEWNVPNDGQHWNRLHNNAQNLKNAGITAIWIPPAWKGTSQNDVGYGAYDLYDLGEFNQKGTVRTKYGTKAELERAIRSLKANGIQVYGDVVMNHKGGADFTERVQAVEVNPQNRNQEVSGTYQIEAWTGFNFPGRGNQHSSFPWRWYHFDGTDWDQSRQLANRIYKFRGDGKAWDWEVDTENGNYDYLMYADVDMDHPEVINELNRWGVWYANTLNLDGFRLDAVKHIKFSFMRDWLGHVRGQTGKNLFAVAEYWKNDLGALENYLSKTNWTMSAFDVPLHYNLYQASNSSGNYDMRNLLNGTLVQRHPSHAVTFVDNHDTQPGEALESFVQGWFKPLAYATILTREQGYPQVFYGDYYGIPSDGVPSYRQQIDPLLKARQQYAYGRQHDYFDHWDVIGWTREGNASHPNSGLATIMSDGPGGSKWMYVGRQKAGEVWHDMTGNRSGTVTINQDGWGHFFVNGGSVSVWVKR

SEQ ID NO: 32374 - protein, 485 aa, Bacillus sp.
HHDGTNGTIMQYFEWNVPNDGQHWNRLHNNAQNLKNAGITAIWIPPAWKGTSQNDVGYGAYDLYDLGEFNQKGTVRTKYGTKAELERAIRSLKANGIQVYGDVVMNHKGGADFTERVQAVEVNPQNRNQEVSGTYQIEAWTGFNFPGRGNQHSSFKWRWYHFDGTDWDQSRQLANRIYKFRGDGKAWDWEVDTENGNYDYLMYADVDMDHPEVINELNRWGVWYANTLNLDGFRLDAVKHIKFSFMRDWLGHVRGQTGKNLFAVAEYWKNDLGALENYLSKTNWTMSAFDVPLHYNLYQASNSSGNYDMRNLLNGTLVQRHPSHAVTFVDNHDTQPGEALESFVQGWFYPLAYATILTREQGYPQVFYGDYYGIPSDGVPSYRQQIDPLLKARQQYAYGRQHDYFDHWDVIGWTREGNASHPNSGLATIMSDGPGGSKWMYVGRQKAGEVWHDMTGNRSGTVTINQDGWGHFFVNGGSVSVWVKR

SEQ ID NO: 32375 - protein, 485 aa, Bacillus sp.
HHDGTNGTIMQYFEWNVPNDGQHWLRLHNNAQNLKNAGITAIWIPPAWKGTSQNDVGYGAYDLYDLGEFNQKGTVRTKYGTKAELERAIRSLKANGIQVYGDVVMNHKGGADFTERVQAVEVNPQNRNQEVSGTYQIEAWTGFNFPGRGNQHSSFKWRWYHFDGTDWDQSRQLANRIYKFRGDGKAWDWEVDTENGNYDYLMYADVDMDHPEVINELNRWGVWYANTLNLDGFRLDAVKHIKFSFMRDWLGHVRGQTGKNLFAVAEYWKNDLGALENYLSKTNWTMSAFDVPLHYNLYQASNSSGNYDMRNLLNGTLVQRHPSHAVTFVDNHDTQPGEALESFVQGWFKPLAYATILTREQGYPQVFYGDYYGIPSDGVPSYRQQIDPLLKARQQYAYGRQHDYFDHWDVIGWTREGNASHPNSGLATIMSDGPGGSKWMYVGRQKAGEVWHDMTGNRSGTVTINQDGWGHFFVNGGSVSVWVKR

SEQ ID NO: 32376 - protein, 485 aa, Bacillus sp.
HHDGTNGTIMQYFEWNVPNDGQHWNRLHNNAQNLKNAGITAIWIPPAWKGTSQNDVGYGAYDLYDLGEFNQKGTVRTKYGTKAELERAIRSLKANGIQVYGDVVMNHKGGADFTERVQAVEVNPQNRNQEVSGTYQIEAWTGFNFPGRGNQHSSFKWRWYHFDGTDWDQLRQLANRIYKFRGDGKAWDWEVDTENGNYDYLMYADVDMDHPEVINELNRWGVWYANTLNLDGFRLDAVKHIKFSFMRDWLGHVRGQTGKNLFAVAEYWKNDLGALENYLSKTNWTMSAFDVPLHYNLYQASNSSGNYDMRNLLNGTLVQRHPSHAVTFVDNHDTQPGEALESFVQGWFKPLAYATILTREQGYPQVFYGDYYGIPSDGVPSYRQQIDPLLKARQQYAYGRQHDYFDHWDVIGWTREGNASHPNSGLATIMSDGPGGSKWMYVGRQKAGEVWHDMTGNRSGTVTINQDGWGHFFVNGGSVSVWVKR

SEQ ID NO: 32377 - protein, 485 aa, Bacillus sp.
HHDGTNGTIMQYFEWNVPNDGQHWNRLHNNAQNLKNAGITAIWIPPAWKGTSQNDVGYGAYDLYDLGEFNQKGTVRTKYGTKAELERAIRSLKANGIQVYGDVVMNHKGGADFTERVQAVEVNPQNRNQEVSGTYQIEAWTGFNFPGRGNQHSSFKWRWYHFDGTDWDQSRQLANRIYKFRGDGKAWDWEVDTENGNYDYLMYADVDMDHPEVINELNRWGVWYANTLNLDGFRLDAVKHIKFSFMRDWLGHVRGQTGKNLFAVAEYWKNDLGALENYLSKTNWTMSAFDVPLHYNLYQASNSSGNYDMRNLLNGTLVQRHPSHAVTFVDNHDTQPGEALESFVQGWFKPLAYATILTREQGYPQVFYGDYYGIPSDGVPSYRQQIDPLLKARQQYAYGRQHDYFDHWDVIGWTREGNASHPNSGLATIMSDGPGGSKWMYVGRQKGGEVWHDMTGNRSGTVTINQDGWGHFFVNGGSVSVWVKR

SEQ ID NO: 32378 - protein, 485 aa, Bacillus sp.
HHDGTNGTIMQYFEWNVPNDGQHWNRLHNNAQNLKNAGITAIWIPPAWKGTSQNDVGYGAYDLYDLGEFNQKGTVRTKYGTKAELERAIRSLKANGIQVYGDVVMNHKGGADFTERVQAVEVNPQNRNQEVSGTYQIEAWTGFNFPGRGNQHSSFKWRWYHFDGTDWDQSRQLANRIYKFRGDGKAWDWEVDTENGNYDYLMYADVDMDHPEVINELNRWGVWYANTLNLDGFRLDAVKHIKFSFMRDWLGHVRGQTGKNLFAVAEYWKNDLGALENYLSKTNWTMSAFDVPLHYNLYQASNSSGNYDMRNLLNGTLVQRHPSHAVTFVDNHDTQPGEALESFVQGWFKPLAYATILTREQGYPQVFYGDYYGIPSDGVPSYRQQIDPLLKARQQYAYGRQADYFDHWDVIGWTREGNASHPNSGLATIMSDGPGGSKWMYVGRQKAGEVWHDMTGNRSGTVTINQDGWGHFFVNGGSVSVWVKR

SEQ ID NO: 32379 - protein, 485 aa, Bacillus sp.
HHDGTNLTIMQYFEWNVPNDGQHWNRLHNNAQNLKNAGITAIWIPPAWKGTSQNDVGYGAYDLYDLGEFNQKGTVRTKYGTKAELERAIRSLKANGIQVYGDVVMNHKGGADFTERVQAVEVNPQNRNQEVSGTYQIEAWTGFNFPGRGNQHSSFKWRWYHFDGTDWDQSRQLANRIYKFRGDGKAWDWEVDTENGNYDYLMYADVDMDHPEVINELNRWGVWYANTLNLDGFRLDAVKHIKFSFMRDWLGHVRGQTGKNLFAVAEYWKNDLGALENYLSKTNWTMSAFDVPLHYNLYQASNSSGNYDMRNLLNGTLVQRHPSHAVTFVDNHDTQPGEALESFVQGWFKPLAYATILTREQGYPQVFYGDYYGIPSDGVPSYRQQIDPLLKARQQYAYGRQHDYFDHWDVIGWTREGNASHPNSGLATIMSDGPGGSKWMYVGRQKAGEVWHDMTGNRSGTVTINQDGWGHFFVNGGSVSVWVKR

SEQ ID NO: 32380 - protein, 485 aa, Bacillus sp.
HHDGTNGTIMQYFEWNVPNDGQHWNRLHNNAQNLKNAGITAIWIPPAWKGTSQNDVGYGAYDLYDLGEFNQKGTVRTKYGTKAELERAIRSLKANGIQVYGDVVMNHKGGADFTERVQAVEVNPQNRNQEVSGTYQIEAWTGFNFPGRGNQHSSFKWRWYHFDGTDWDQSRQLANRIYKFRGDGKAWDWEVDTENGNYDYLMYADVDMDHPEVINELNRWGVWYANTLNLDGFRLDAVKHIKFSFMRDWLGHVRGQTGKNLFAVAEYWKNDLGALENYLSKTNWTMSAFDVPLHYNLYQASNSSFNYDMRNLLNGTLVQRHPSHAVTFVDNHDTQPGEALESFVQGWFKPLAYATILTREQGYPQVFYGDYYGIPSDGVPSYRQQIDPLLKARQQYAYGRQHDYFDHWDVIGWTREGNASHPNSGLATIMSDGPGGSKWMYVGRQKAGEVWHDMTGNRSGTVTINQDGWGHFFVNGGSVSVWVKR

SEQ ID NO: 32381 - protein, 485 aa, Bacillus sp.
HHDGTNRTIMQYFEWNVPNDGQHWNRLHNNAQNLKNAGITAIWIPPAWKGTSQNDVGYGAYDLYDLGEFNQKGTVRTKYGTKAELERAIRSLKANGIQVYGDVVMNHKGGADFTERVQAVEVNPQNRNQEVSGTYQIEAWTGFNFPGRGNQHSSFKWRWYHFDGTDWDQSRQLANRIYKFRGDGKAWDWEVDTENGNYDYLMYADVDMDHPEVINELNRWGVWYANTLNLDGFRLDAVKHIKFSFMRDWLGHVRGQTGKNLFAVAEYWKNDLGALENYLSKTNWTMSAFDVPLHYNLYQASNSSGNYDMRNLLNGTLVQRHPSHAVTFVDNHDTQPGEALESFVQGWFKPLAYATILTREQGYPQVFYGDYYGIPSDGVPSYRQQIDPLLKARQQYAYGRQHDYFDHWDVIGWTREGNASHPNSGLATIMSDGPGGSKWMYVGRQKAGEVWHDMTGNRSGTVTINQDGWGHFFVNGGSVSVWVKR

SEQ ID NO: 32382 - protein, 485 aa, Bacillus sp.
HHDGTNGTIMQYFEWNVPNDGQHWNRLHNNAQNLKNAGITAIWIPPAWKGTSQNDVGYGAYDLYDLGEFNQKGTVRTKYGTKAELERAIRSLKANGIQVYGDVVMNHKGGADFTERVQAVEVNPQNRNQEVSGTYQIEAWTGFNFPGRGNQHSSFKWRWYHFDGTDWDQSRQLANRIYKFRGDGKAWDWEVDTENGNYDYLMYADVDMDHPXVINELNRWGVWYANTLNLDGFRLDAVKHIKFSFMRDWLGHVRGQTGKNLFAVAEYWKNDLGALENYLSKTNWTMSAFDVPLHYNLYQASNSSGNYDMRNLLNGTLVQRHPSHAVTFVDNHDTQPGEALESFVQGWFKPLAYATILTREQGYPQVFYGDYYGIPSDGVPSYRQQIDPLLKARQQYAYGRQHDYFDHWDVIGWTREGNASHPNSGLATIMSDGPGGSKWMYVGRQKAGEVWHDMTGNRSGTVTINQDGWGHFFVNGGSVSVWVKR

SEQ ID NO: 32383 - protein, 485 aa, Bacillus sp.
HHDGTNGTIMQYFEWNVPNDGQHWNRLHNNAQNLKNAGITAIWIPPAWKGTSQNDVGYGAYDLYDLGEFNQKGTVRTKYGTKAELERAIRSLKANGIQVYGDVVMNHKGGADFTERVQAVEVNPQNRNQEVSGTYQIEAWTGFNFPGRGNQHSSFKWRWYHFDGTDWDQSRQLANRIYKFRGDGKAWDWEVDTENGNYDYLMYADVDMDHPEVINELNRWGVWYANTLNLDGFRLDAVKHIKFSFMRDWLGHVRGQTGKNLFAVAEYWKNDLGALENYLSKTNWTMSAFDVPLHYNLYQASNSSGNYDMRNLLYGTLVQRHPSHAVTFVDNHDTQPGEALESFVQGWFKPLAYATILTREQGYPQVFYGDYYGIPSDGVPSYRQQIDPLLKARQQYAYGRQHDYFDHWDVIGWTREGNASHPNSGLATIMSDGPGGSKWMYVGRQKAGEVWHDMTGNRSGTVTINQDGWGHFFVNGGSVSVWVKR

SEQ ID NO: 32384 - protein, 485 aa, Bacillus sp.
HHDGTNGTIMQYFEWNVPNDGQHWNRLHNNAQNLKNAGITAIWIPPAWKGTSQNDVGYGAYDLYDLGEFNQKGTVRTKYGTKAELERAIRSLKANGIQVYGDVVMNHKGGADFTERVQAVEVNPQNRNQEVSGTYQIEAWTGFNFPGRGNQHSSFKWRWYHFDGTDWDQSRQLANRIYKFRGDGKAWDWEVDTENGNYDYLMYADVDMDHPEVINELNRWGVWYANTLNLDGFRLDAVKHIKFSFMRDWLGHVRGQTGKNLFAVAEYWKNDLGALENYLSKTNWTMSAFDVPLHANLYQASNSSGNYDMRNLLNGTLVQRHPSHAVTFVDNHDTQPGEALESFVQGWFKPLAYATILTREQGYPQVFYGDYYGIPSDGVPSYRQQIDPLLKARQQYAYGRQHDYFDHWDVIGWTREGNASHPNSGLATIMSDGPGGSKWMYVGRQKAGEVWHDMTGNRSGTVTINQDGWGHFFVNGGSVSVWVKR

SEQ ID NO: 32385 - protein, 485 aa, Bacillus sp.
HHDGTNGTIMQYFEWNVPNDGQHWNRLHNNAQNLKNAGITAIWIPPAWKGTSQNDVGYGAYDLYDLGEFNQKGTVRTKYGTKAELERAIRSLKANGIQVYGDVVMNHKGGADFTERVQAVEVNPQNRNQEVSGTYQIEAWTGFNFPGRGNQHSSFKWRWYHFDGTDWDQSRQLANRIYKFRGDGKAWDWEVDTENGNYDYLMYADVDMDHPEVINELNRWGVWYANTLNLDGFRLDAVKHIKFSFMRDWLGHVRGQTGKNLFAVAEYWKNDLGALENYLSKTNWTMSAFDVPLHYNLYQASNSSGNYDMRNLLNGTLVQRHPSHAVTFVDNHDTQPGEALESFVQGWFKPLAYATILTREQGYPQVFYGDYYGIPSDGVPSYRQQIDPLLKARQQYAYGRQPDYFDHWDVIGWTREGNASHPNSGLATIMSDGPGGSKWMYVGRQKAGEVWHDMTGNRSGTVTINQDGWGHFFVNGGSVSVWVKR

SEQ ID NO: 32386 - protein, 485 aa, Bacillus sp.
HHDGTNGTIMQYFEWNVPNDGQHWNRLHNNAQNLKNAGITAIWIPPAWKGTSQNDVGYGAYDLYDLGEFNQKGTVRTKYGTKAELERAIRSLKANGIQVYGDVVMNHKGGADFTERVQAVEVNPQNRNQEVSGTYQIEAWTGFNFPGRGNQHSSFKWRWYHFDGTDWDQSRQLANRIYKFRGDGKAWDWEVDTENGNYDYLMYADVDMDHPEVINELNRWGVWYANTLNLDGFRLDAVKHIKFSFMRDWLGHVRGQTGKNLFAVAEYWKNDLGALENYLSKTNWTMSAFDVPLHYNLYQASNSSGNYDMRNLLNGTLVQRHPSHAVTFVDNHDTQPGEALESFVQGWFKPLAYATILTREQGYPQVFYGDYYGIPSDGLPSYRQQIDPLLKARQQYAYGRQHDYFDHWDVIGWTREGNASHPNSGLATIMSDGPGGSKWMYVGRQKAGEVWHDMTGNRSGTVTINQDGWGHFFVNGGSVSVWVKR

SEQ ID NO: 32387 - protein, 485 aa, Bacillus sp.
HHDGTNGTIMQYFEWNVPNDGQHWNRLHNNAQNLKNAGITAIWIPPAWKGTSQNDVGYGAYDLYDLGEFNQKGTVRTKYGTKAELERAIRSLKANGIQVYGDVVMNHKGGADFTERVQAVEVNPQNRNQEVSGTYQIEAWTGFNFPGRGNQHSSFKWRWYHFDGTDWDQSRQLANRIYKFRGDGKAWDWEVDTENGNYDYLMYADVDMDHPEVINELNRWGVWYAKTLNLDGFRLDAVKHIKFSFMRDWLGHVRGQTGKNLFAVAEYWKNDLGALENYLSKTNWTMSAFDVPLHYNLYQASNSSGNYDMRNLLNGTLVQRHPSHAVTFVDNHDTQPGEALESFVQGWFKPLAYATILTREQGYPQVFYGDYYGIPSDGVPSYRQQIDPLLKARQQYAYGRQHDYFDHWDVIGWTREGNASHPNSGLATIMSDGPGGSKWMYVGRQKAGEVWHDMTGNRSGTVTINQDGWGHFFVNGGSVSVWVKR

SEQ ID NO: 32388 - protein, 485 aa, Bacillus sp.
HHDGTNGTIMQYFEWNVPNDGQHWNRLHNNAQNLKNAGITAIWIPPAWKGTSQNDVGYGAYDLYDLGEFNQKGTVRTKYGTKAELERAIRSLKANGIQVYGDVVMNHKGGADFTERVQAVEVNPQNRNQEVSGTYQIEAWTGFNFPGRGNQHSSFKWRWYHFDGTDWDQSRQLANRIYSFRGDGKAWDWEVDTENGNYDYLMYADVDMDHPEVINELNRWGVWYANTLNLDGFRLDAVKHIKFSFMRDWLGHVRGQTGKNLFAVAEYWKNDLGALENYLSKTNWTMSAFDVPLHYNLYQASNSSGNYDMRNLLNGTLVQRHPSHAVTFVDNHDTQPGEALESFVQGWFKPLAYATILTREQGYPQVFYGDYYGIPSDGVPSYRQQIDPLLKARQQYAYGRQHDYFDHWDVIGWTREGNASHPNSGLATIMSDGPGGSKWMYVGRQKAGEVWHDMTGNRSGTVTINQDGWGHFFVNGGSVSVWVKR

SEQ ID NO: 32389 - protein, 485 aa, Bacillus sp.
HHDGTNGTIMQYFEWNVPNDGQHWNRLHNNAQNLKNAGITAIWIPPAWKGTSQNDVGYGAYDLYDLGEFNQKGTVRTKYGTKAELERAIRSFKANGIQVYGDVVMNHKGGADFTERVQAVEVNPQNRNQEVSGTYQIEAWTGFNFPGRGNQHSSFKWRWYHFDGTDWDQSRQLANRIYKFRGDGKAWDWEVDTENGNYDYLMYADVDMDHPEVINELNRWGVWYANTLNLDGFRLDAVKHIKFSFMRDWLGHVRGQTGKNLFAVAEYWKNDLGALENYLSKTNWTMSAFDVPLHYNLYQASNSSGNYDMRNLLNGTLVQRHPSHAVTFVDNHDTQPGEALESFVQGWFKPLAYATILTREQGYPQVFYGDYYGIPSDGVPSYRQQIDPLLKARQQYAYGRQHDYFDHWDVIGWTREGNASHPNSGLATIMSDGPGGSKWMYVGRQKAGEVWHDMTGNRSGTVTINQDGWGHFFVNGGSVSVWVKR

SEQ ID NO: 32390 - protein, 485 aa, Bacillus sp.
HHDGTNGTIMQYFEWNVPNDGQHWNRLHNNAQNLKNAGITAIWIPPAWKGTSQNDVGYGAYDLYDLGEFNQKGTVRTKYGTKAELERAIRSLKANGIQVYGDVVMNHKGGADFTERVQAVEVNPQNRNQEVSGTYQIEAWTGFNFPGRGNQHSSFKWRWYHFDGTDWDQSRQLANRIYKFRGDGKAWDWEVDTENGNYDYLMYADVDMDHPEVINELNRWGVWYANTLNLDGFRLDAVKHIKFSFMRDWLGHVRGQTGKNLFAVAEYWKNDLGALENYLSKTNWTMSAFDVPLHYNLYQASNSSGNYDMRNLLNGTLVQRHPSHAVTFVDNHDTQPGEALESFVQGWFKPLAYATILTREQGYPQVFYGDYYGIPSDGVPSYRQQIDPLLKARQQYAYGRQHDYIDHWDVIGWTREGNASHPNSGLATIMSDGPGGSKWMYVGRQKAGEVWHDMTGNRSGTVTINQDGWGHFFVNGGSVSVWVKR

SEQ ID NO: 32391 - protein, 485 aa, Bacillus sp.
HHDGTNGTIMQYFEWNVPNDGQHWNRLHNNAQNLKNAGITAIWIPPAWKGTSQNDVGYGAYDLYDLGEFNQKGTVRTKYGTKAELERAIRSLKANGIQVYGDVVMNHKGGADFTERVQADEVNPQNRNQEVSGTYQIEAWTGFNFPGRGNQHSSFKWRWYHFDGTDWDQSRQLANRIYKFRGDGKAWDWEVDTENGNYDYLMYADVDMDHPEVINELNRWGVWYANTLNLDGFRLDAVKHIKFSFMRDWLGHVRGQTGKNLFAVAEYWKNDLGALENYLSKTNWTMSAFDVPLHYNLYQASNSSGNYDMRNLLNGTLVQRHPSHAVTFVDNHDTQPGEALESFVQGWFKPLAYATILTREQGYPQVFYGDYYGIPSDGVPSYRQQIDPLLKARQQYAYGRQHDYFDHWDVIGWTREGNASHPNSGLATIMSDGPGGSKWMYVGRQKAGEVWHDMTGNRSGTVTINQDGWGHFFVNGGSVSVWVKR

SEQ ID NO: 32392 - protein, 485 aa, Bacillus sp.
HHDGTNGTIMQYFEWNVPNDGQHWNRLHNNAQNLKNAGITAIWIPPAWKGTSQNDVGYGAYDLYDLGEFNQKGTVRTKYGTKAELERAIRSLKANGIQVYGDVVMNHKGGADFTERVQAVEVNPQNRNQEVSGTYQIEAWTGFNFPGRGNQHSSFKWRWYHFDGTDWDQSMQLANRIYKFRGDGKAWDWEVDTENGNYDYLMYADVDMDHPEVINELNRWGVWYANTLNLDGFRLDAVKHIKFSFMRDWLGHVRGQTGKNLFAVAEYWKNDLGALENYLSKTNWTMSAFDVPLHYNLYQASNSSGNYDMRNLLNGTLVQRHPSHAVTFVDNHDTQPGEALESFVQGWFKPLAYATILTREQGYPQVFYGDYYGIPSDGVPSYRQQIDPLLKARQQYAYGRQHDYFDHWDVIGWTREGNASHPNSGLATIMSDGPGGSKWMYVGRQKAGEVWHDMTGNRSGTVTINQDGWGHFFVNGGSVSVWVKR

SEQ ID NO: 32393 - protein, 483 aa, Bacillus sp. (in: firmicutes)
HHDGTNGTIMQYFEWNVPNDGQHWNRLHNNAQNLKNAGITAIWIPPAWKGTSQNDVGYGAYDLYDLGEFNQKGTVRTKYGTKAELERAIRSLKANGIQVYGDVVMNHKGGADFTERVQAVEVNPQNRNQEVSGTYQIEAWTGFNFPGRGNQHSSFKWRWYHFDGTDWDQSHQLANRIYKFRGKAWDWEVDTENGNYDYLMYADVDMDHPEVINELNRWGVWYANTLNLDGFRLDAVKHIKFSFMRDWLGHVRGQTGKNLFAVAEYWKNDLGALENYLSKTNWTMSAFDVPLHYNLYQASNSSGNYDMRNLLNGTLVQRHPSHAVTFVDNHDTQPGEALESFVQGWFKPLAYATILTREQGYPQVFYGDYYGIPSDGVPSYRQQIDPLLKARQQYAYGRQHDYFDHWDVIGWTREGNASHPNSGLATIMSDGPGGSKWMYVGRQKAGEVWHDMTGNRSGTVTINQDGWGHFFVNGGSVSVWVKR

SEQ ID NO: 32394 - protein, 485 aa, Bacillus sp.
HHDGTNGTIMQYFEWNVPNDGQHWNGLHNNAQNLKNAGITAIWIPPAWKGTSQNDVGYGAYDLYDLGEFNQKGTVRTKYGTKAELERAIRSLKANGIQVYGDVVMNHKGGADFTERVQAVEVNPQNRNQEVSGTYQIEAWTGFNFPGRGNQHSSFKWRWYHFDGTDWDQSRQLANRIYKFRGDGKAWDWEVDTENGNYDYLMYADVDMDHPEVINELNRWGVWYANTLNLDGFRLDAVKHIKFSFMRDWLGHVRGQTGKNLFAVAEYWKNDLGALENYLSKTNWTMSAFDVPLHYNLYQASNSSGNYDMRNLLNGTLVQRHPSHAVTFVDNHDTQPGEALESFVQGWFKPLAYATILTREQGYPQVFYGDYYGIPSDGVPSYRQQIDPLLKARQQYAYGRQHDYFDHWDVIGWTREGNASHPNSGLATIMSDGPGGSKWMYVGRQKAGEVWHDMTGNRSGTVTINQDGWGHFFVNGGSVSVWVKR

SEQ ID NO: 32395 - protein, 485 aa, Bacillus sp.
HHDGTNGTIMQYFEWNVPNDGQHWNRLHNNAQNLKNAGITAIWIPPAWKGTIQNDVGYGAYDLYDLGEFNQKGTVRTKYGTKAELERAIRSLKANGIQVYGDVVMNHKGGADFTERVQAVEVNPQNRNQEVSGTYQIEAWTGFNFPGRGNQHSSFKWRWYHFDGTDWDQSRQLANRIYKFRGDGKAWDWEVDTENGNYDYLMYADVDMDHPEVINELNRWGVWYANTLNLDGFRLDAVKHIKFSFMRDWLGHVRGQTGKNLFAVAEYWKNDLGALENYLSKTNWTMSAFDVPLHYNLYQASNSSGNYDMRNLLNGTLVQRHPSHAVTFVDNHDTQPGEALESFVQGWFKPLAYATILTREQGYPQVFYGDYYGIPSDGVPSYRQQIDPLLKARQQYAYGRQHDYFDHWDVIGWTREGNASHPNSGLATIMSDGPGGSKWMYVGRQKAGEVWHDMTGNRSGTVTINQDGWGHFFVNGGSVSVWVKR

SEQ ID NO: 32396 - protein, 485 aa, Bacillus sp.
HHDGTNGTIMQYFEWNVPNDGQHWNRLHNNAQNLKNAGITAIWIPPAWKGTSQNDVGYGAYDLYDLGEFNQKGTVRTKYGTKAELERAIRSLKANGIQVYGDVVMNHKGGADFTERVQAVEVNPQNRNQEVSGTYQIEAWTGFNFPGRGNQHSSFKWRWYHFDGTDWDQSRQLANRIYKFRGDGKAWDWEVDTENGNYDYLMYADVDMDHPEVINELNRWGVWYANTLNLDGFRLDAVKHIKFSFMRDWLGHVRGQTGKNLFAVAEYWKNDLGALENYLSKTNWTMSAFDVPLHYNLYQASNSSGNYDMRNLLNGTLVQRHPSHAVTFVDNHDTQPGEALESFVQGWFKPLAYATILTREQGYPQVFYGDYYGIPSDGVPSYRQQIDPLLKARQQYAYGRQHDYFDHWDVIGWTRQGNASHPNSGLATIMSDGPGGSKWMYVGRQKAGEVWHDMTGNRSGTVTINQDGWGHFFVNGGSVSVWVKR

SEQ ID NO: 32397 - protein, 485 aa, Bacillus sp.
HHDGTNGTIMQYFEWNVPNDGQHWNRLHNNAQNLKNAGITAIWIPPAWKGTSQNDVGYGAYDLYDLGEFNQKGTVRTKYGTKAELERAIRSLKANGIQVYGDVVMNHKGGADFTERVQAVEVNPQNRNQEVSGTYQIEAWTGFNFPGRGNQHSSFKWRWYHFDGTDWDQSRQLANRIYKFRGDGKAWDWEVDTENGNYDYLMYADVDMDHPEVINELNRWGVWYANTLNLDGFRLDAVKHIKFSFMRDWLGHVRGQTGKNLFAVAEYWKNDLGALENYLSKTNWTMSAFDVPLHYNLYQASNSSGNYDMRNLLNGTLVQRHPSHAVTFVDNHDTQPGEALESFVQGWFKPLAYATILTREQGYPQVFYGDYYGIPSDGVPSYRQQIDPLLKARQQYAYGRQHDYFDHWDVIGWTREGNASHPNSGLATIMSDGPGGSKWMYVGRQKAGEVWHDMTGNRSGTVTINQDGEGHFFVNGGSVSVWVKR

SEQ ID NO: 32398 - protein, 483 aa, Bacillus sp. (in: firmicutes)
HHDGTNGTIMQYFEWNVPNDGQHWNRLHNNAQNLKNAGITAIWIPPAWKGTSQNDVGYGAYDLYDLGEFNQKGTVRTKYGTKAELERAIRSLKANGIQVYGDVVMNHKGGADFTERVQAVEVNPQNRNQEVSGTYQIEAWTGFNFPGRGNQHSSFKWRWYHFDGTDWDQSRQLANRIYKFRGKAWDWEVDTENGNYDYLLYADVDMDHPEVINELNRWGVWYANTLNLDGFRLDAVKHIKFSFMRDWLGHVRGQTGKNLFAVAEYWKNDLGALENYLSKTNWTMSAFDVPLHYNLYQASNSSGNYDMRNLLNGTLVQRHPSHAVTFVDNHDTQPGEALESFVQGWFKPLAYATILTREQGYPQVFYGDYYGIPSDGVPSYRQQIDPLLKARQQYAYGRQHDYFDHWDVIGWTREGNASHPNSGLATIMSDGPGGSKWMYVGRQKAGEVWHDMTGNRSGTVTINQDGWGHFFVNGGSVSVWVKR

SEQ ID NO: 32399 - protein, 485 aa, Bacillus sp.
HHDGTNGTIMQYFEWNVPNDGQHWNRLHNNAQNLKNAGITAIWIPPAWKGTSQNDVGYGAYDLYDLGEFNQKGTVRTKYGTKAELERAIRSLKANGIQVYGDVVMNHKGGADFTERVQAVEVNPQNRNQEVSGTYQIEAWTGFNFPGRGNQHSSFKWRWYHFSGTDWDQSRQLANRIYKFRGDGKAWDWEVDTENGNYDYLMYADVDMDHPEVINELNRWGVWYANTLNLDGFRLDAVKHIKFSFMRDWLGHVRGQTGKNLFAVAEYWKNDLGALENYLSKTNWTMSAFDVPLHYNLYQASNSSGNYDMRNLLNGTLVQRHPSHAVTFVDNHDTQPGEALESFVQGWFKPLAYATILTREQGYPQVFYGDYYGIPSDGVPSYRQQIDPLLKARQQYAYGRQHDYFDHWDVIGWTREGNASHPNSGLATIMSDGPGGSKWMYVGRQKAGEVWHDMTGNRSGTVTINQDGWGHFFVNGGSVSVWVKR

SEQ ID NO: 32400 - protein, 485 aa, Bacillus sp.
HHDGTNGTIMQYFEWNVPNDGQHWNRLHNNAQNLKNAGITAIWIPPAWKGTSQNDVGYGAYDLYDLGEFNQKGTVRTKYGTKAELERAIRSLKANGIQVYGDVVMNHKGGADFTERVQAVEENPQNRNQEVSGTYQIEAWTGFNFPGRGNQHSSFKWRWYHFDGTDWDQSRQLANRIYKFRGDGKAWDWEVDTENGNYDYLMYADVDMDHPEVINELNRWGVWYANTLNLDGFRLDAVKHIKFSFMRDWLGHVRGQTGKNLFAVAEYWKNDLGALENYLSKTNWTMSAFDVPLHYNLYQASNSSGNYDMRNLLNGTLVQRHPSHAVTFVDNHDTQPGEALESFVQGWFKPLAYATILTREQGYPQVFYGDYYGIPSDGVPSYRQQIDPLLKARQQYAYGRQHDYFDHWDVIGWTREGNASHPNSGLATIMSDGPGGSKWMYVGRQKAGEVWHDMTGNRSGTVTINQDGWGHFFVNGGSVSVWVKR

SEQ ID NO: 32401 - protein, 485 aa, Bacillus sp.
HHDGTNGTIMQYFEWNVPNDGQHFNRLHNNAQNLKNAGITAIWIPPAWKGTSQNDVGYGAYDLYDLGEFNQKGTVRTKYGTKAELERAIRSLKANGIQVYGDVVMNHKGGADFTERVQAVEVNPQNRNQEVSGTYQIEAWTGFNFPGRGNQHSSFKWRWYHFDGTDWDQSRQLANRIYKFRGDGKAWDWEVDTENGNYDYLMYADVDMDHPEVINELNRWGVWYANTLNLDGFRLDAVKHIKFSFMRDWLGHVRGQTGKNLFAVAEYWKNDLGALENYLSKTNWTMSAFDVPLHYNLYQASNSSGNYDMRNLLNGTLVQRHPSHAVTFVDNHDTQPGEALESFVQGWFKPLAYATILTREQGYPQVFYGDYYGIPSDGVPSYRQQIDPLLKARQQYAYGRQHDYFDHWDVIGWTREGNASHPNSGLATIMSDGPGGSKWMYVGRQKAGEVWHDMTGNRSGTVTINQDGWGHFFVNGGSVSVWVKR

SEQ ID NO: 32402 - protein, 485 aa, Bacillus sp.
HHDGTNGTIMQYFEWNVPNDGQHWNRLHNNAQNLKNAGITAIWIPPAWKGTSQSDVGYGAYDLYDLGEFNQKGTVRTKYGTKAELERAIRSLKANGIQVYGDVVMNHKGGADFTERVQAVEVNPQNRNQEVSGTYQIEAWTGFNFPGRGNQHSSFKWRWYHFDGTDWDQSRQLANRIYKFRGDGKAWDWEVDTENGNYDYLMYADVDMDHPEVINELNRWGVWYANTLNLDGFRLDAVKHIKFSFMRDWLGHVRGQTGKNLFAVAEYWKNDLGALENYLSKTNWTMSAFDVPLHYNLYQASNSSGNYDMRNLLNGTLVQRHPSHAVTFVDNHDTQPGEALESFVQGWFKPLAYATILTREQGYPQVFYGDYYGIPSDGVPSYRQQIDPLLKARQQYAYGRQHDYFDHWDVIGWTREGNASHPNSGLATIMSDGPGGSKWMYVGRQKAGEVWHDMTGNRSGTVTINQDGWGHFFVNGGSVSVWVKR

SEQ ID NO: 32403 - protein, 485 aa, Bacillus sp.
HHDGTNGTIMQYFEWNVPNDGQHWNRLHNNAQNLKNAGITAIWIPPAWKGTSQNDVGYGAYDLYDLGEFNQKGTVRTKYGTKAELERAIRSLKANGIQVYGDVVMNHKGGADFTERVQAVEVNPQNRNQEVSGTYEIEAWTGFNFPGRGNQHSSFKWRWYHFDGTDWDQSRQLSNRIYKFRGDGKAWDWEVDTENGNYDYLMYADVDMNHPEVINELNRWGVWYANTLNLDGFRLDAVKHIQFSFMRNWLGHVRGQTGKNLFAVAEYWKNDLGALENYLSKTNWTMSAFDVPLHYNLYQASNSGGNYDMRNLLNGTLVQRHPSHAVTFVDNHDTQPGEALESFVQGWFKPLAYATILTREQGYPQVFYGDYYGIPSDGVPSYRQQIDPLLKARQQYAYGRQHDYFDHWDVIGWTREGNASHPNSGLATIMSDGPGGSKWMYVGRQKAGEVWHDITGNRSGTVTINQDGWGQFFVNGGSVSVWVKR

SEQ ID NO: 32404 - protein, 485 aa, Bacillus sp.
HHDGTNGTIMQYFEWNVPNDGQHWNRLHNNAQNLKNAGITAIWIPPAWKGTSQNDVGYGAYDLYDLGEFNQKGTVRTKYGTKAELERAIRSLKANGIQVYGDVVMNHKGGADFTERVQAVEVNPQNRNQEVSGTYQIEAWTGFNFPGRGNQHSSFKWRWYHFDGTDWDQSRQLANRIYKFRGDGKAWDWEVDTENGNYDYLMYADVDMIHPEVINELNRWGVWYANTLNLDGFRLDAVKHIKFSFMRDWLGHVRGQTGKNLFAVAEYWKNDLGALENYLSKTNWTMSAFDVPLHYNLYQASNSSGNYDMRNLLNGTLVQRHPSHAVTFVDNHDTQPGEALESFVQGWFKPLAYATILTREQGYPQVFYGDYYGIPSDGVPSYRQQIDPLLKARQQYAYGRQHDYFDHWDVIGWTREGNASHPNSGLATIMSDGPGGSKWMYVGRQKAGEVWHDMTGNRSGTVTINQDGWGHFFVNGGSVSVWVKR

SEQ ID NO: 32405 - protein, 485 aa, Bacillus sp.
HHDGTNGTIMQYFEWNVPNDGQHWNRLHNNAQNLKNAGITAIWIPPAWKGTSQNDVGYGAYDLYDLGEFNQKGTVRTKYGTKAELERAIRSLKANGIQVYGDVVMNHKGGADFTERVQAVEVNPQNRNQEVSGTYQIEAWTGFNFPGRGNQHSSFKWRWYHFDGTDWDQSRQLANRIYKFRGDGKAWDWEVDTENGNYDYLMYADVDMDNPEVINELNRWGVWYANTLNLDGFRLDAVKHIKFSFMRDWLGHVRGQTGKNLFAVAEYWKNDLGALENYLSKTNWTMSAFDVPLHYNLYQASNSSGNYDMRNLLNGTLVQRHPSHAVTFVDNHDTQPGEALESFVQGWFKPLAYATILTREQGYPQVFYGDYYGIPSDGVPSYRQQIDPLLKARQQYAYGRQHDYFDHWDVIGWTREGNASHPNSGLATIMSDGPGGSKWMYVGRQKAGEVWHDMTGNRSGTVTINQDGWGHFFVNGGSVSVWVKR

SEQ ID NO: 32406 - protein, 485 aa, Bacillus sp.
HHDGTNGTIMQYFEWNVPNDGQHWNRLHNNAQNLKNAGITAIWIPPAWKGTSQNDVGYGAYDLYDLGEFNQKGTVRTKYGTKAELERAIRSLKANGIQVYGDVVMNHKGGADFTERVQAVEVNPQNRNQEVSGTYQIEAWTGFNFPGRGNQHSSFKWRWYHFDGTDWDQSRQLANRIYKFRGDGKAWDWEVDTENGNYDYLMYADVDMDHPEVINELNRWGVWYANTLNLDGFRLDAVKHIKFSFMRDWLGHVRGQTVKNLFAVAEYWKNDLGALENYLSKTNWTMSAFDVPLHYNLYQASNSSGNYDMRNLLNGTLVQRHPSHAVTFVDNHDTQPGEALESFVQGWFKPLAYATILTREQGYPQVFYGDYYGIPSDGVPSYRQQIDPLLKARQQYAYGRQHDYFDHWDVIGWTREGNASHPNSGLATIMSDGPGGSKWMYVGRQKAGEVWHDMTGNRSGTVTINQDGWGHFFVNGGSVSVWVKR

SEQ ID NO: 32407 - protein, 485 aa, Bacillus sp.
HHDGTNGTIMQYFEWNVPNDGQHWNRLHNNAQNLKNAGITAIWIPPAWKGTSQNDVGYGAYDLYDLGEFNQKGTVRTKYGTKAELERAIRSLKANGIQVYGDVVMNHKGGADFTERVQAVEVNPQNRNQEVSGTYQIEAWTGFNFPGRGNQHSSFKWRWYHFDGTDWDQSRQLANRIYKFRGDGKAWDWEVDTENGNYDYLMYADVDMDHPEVINELNRWGVWYANTLNLDGFRLDAVKHIKFSFMRDWLGHVRGQTGKNLFAVAEYYKNDLGALENYLSKTNWTMSAFDVPLHYNLYQASNSSGNYDMRNLLNGTLVQRHPSHAVTFVDNHDTQPGEALESFVQGWFKPLAYATILTREQGYPQVFYGDYYGIPSDGVPSYRQQIDPLLKARQQYAYGRQHDYFDHWDVIGWTREGNASHPNSGLATIMSDGPGGSKWMYVGRQKAGEVWHDMTGNRSGTVTINQDGWGHFFVNGGSVSVWVKR

SEQ ID NO: 32408 - protein, 485 aa, Bacillus sp.
HHDGTNGTIMQYFEWNVPNDGQHWNRLHNNAQNLKNAGITAIWIPPAWKGTSQNDVGYGAYDLYDLGEFNQKGTVRTKYGTKAELERAIRSLKANGIQVYGDVVMNHKGGADFTERVQAVEVNPQNRNQEVSGTYQIEAWTGFNFPGRGNQHSSFKWRWYHFDGTDWDQSRQLANRIYKFRGDGKAWDWEVDTENGNYDYLMYADVDMDHPEVINEVNRWGVWYANTLNLDGFRLDAVKHIKFSFMRDWLGHVRGQTGKNLFAVAEYWKNDLGALENYLSKTNWTMSAFDVPLHYNLYQASNSSGNYDMRNLLNGTLVQRHPSHAVTFVDNHDTQPGEALESFVQGWFKPLAYATILTREQGYPQVFYGDYYGIPSDGVPSYRQQIDPLLKARQQYAYGRQHDYFDHWDVIGWTREGNASHPNSGLATIMSDGPGGSKWMYVGRQKAGEVWHDMTGNRSGTVTINQDGWGHFFVNGGSVSVWVKR

SEQ ID NO: 32409 - protein, 485 aa, Bacillus sp.
HHDGTNGTIMQYFEWNVPNDGQHWNRLHNNAQNLKNAGITAIWIPPAWKGTSQNDVGYGAYDLYDLGEFNQKGTVRTKYGTKAELERAIRSLKANGIQVYGDVVMNHKGGADFTERVQAVEVNPQNRNQEVSGTYQIEAWTGFNFPGRGNQHSSFKWRWYHFDGTDWDQSRQLANRIYKFRGDGKAWDWEVDTENGNYDYLMYADVDMDHPEVINELNRWGVWYANTLNLDGFRLDAVKHIKFSFMRDWLGHVRGQTGKNLFAVAEYWKNDLGALENYLSKTNWTMSAFDVPLHYNLYQASNSSGNYDMRNLLNGTLVQRHPSHAVTFVDNHDTQPGEALESFVQGWFKPLAYATILTREQGYPQVFYGDYYGIPSDGVPSYRQQIDPLLKARQQYAYGRQHDYFDHWDVIGWTREGNASHPNSGLATIMSDGPGGSKWMYVGRQKAGEVWHDMTGNRSGTVTINQCGWGHFFVNGGSVSVWVKR

SEQ ID NO: 32410 - protein, 485 aa, Bacillus sp.
HHDGTNGTIMQYFEWNVPNDGQHWNRLHNNAQNLKNAGITAIWIPPAWKGTSQNDVGYGAYDLYDLGEFNQKGTVRTKYGTKAELERAIRSLKANGIQVYGDVVMNHKGGADFTERVQAVEVNPQNRNQEVSGTYQIEAHTGFNFPGRGNQHSSFKWRWYHFDGTDWDQSRQLANRIYKFRGDGKAWDWEVDTENGNYDYLMYADVDMDHPEVINELNRWGVWYANTLNLDGFRLDAVKHIKFSFMRDWLGHVRGQTGKNLFAVAEYWKNDLGALENYLSKTNWTMSAFDVPLHYNLYQASNSSGNYDMRNLLNGTLVQRHPSHAVTFVDNHDTQPGEALESFVQGWFKPLAYATILTREQGYPQVFYGDYYGIPSDGVPSYRQQIDPLLKARQQYAYGRQHDYFDHWDVIGWTREGNASHPNSGLATIMSDGPGGSKWMYVGRQKAGEVWHDMTGNRSGTVTINQDGWGHFFVNGGSVSVWVKR

SEQ ID NO: 32411 - protein, 485 aa, Bacillus sp.
HHDGTNGTIMLYFEWNVPNDGQHWNRLHNNAQNLKNAGITAIWIPPAWKGTSQNDVGYGAYDLYDLGEFNQKGTVRTKYGTKAELERAIRSLKANGIQVYGDVVMNHKGGADFTERVQAVEVNPQNRNQEVSGTYQIEAWTGFNFPGRGNQHSSFKWRWYHFDGTDWDQSRQLANRIYKFRGDGKAWDWEVDTENGNYDYLMYADVDMDHPEVINELNRWGVWYANTLNLDGFRLDAVKHIKFSFMRDWLGHVRGQTGKNLFAVAEYWKNDLGALENYLSKTNWTMSAFDVPLHYNLYQASNSSGNYDMRNLLNGTLVQRHPSHAVTFVDNHDTQPGEALESFVQGWFKPLAYATILTREQGYPQVFYGDYYGIPSDGVPSYRQQIDPLLKARQQYAYGRQHDYFDHWDVIGWTREGNASHPNSGLATIMSDGPGGSKWMYVGRQKAGEVWHDMTGNRSGTVTINQDGWGHFFVNGGSVSVWVKR

SEQ ID NO: 32412 - protein, 485 aa, Bacillus sp.
HHDGTNGTIMQYFEWNVPNDGQHWNRLHNNAQNLKNAGITAIWIPPAWKGTSQNDVGYGAYDLYDLGEFNQKGTVRTKYGTKAELERAIRSLKANGIQVYGDVVMNHKGGADFTERVQAVEVNPQNRNQEVSGTYQIEAWTGFNFPGRGNQHSSFKWRWYHFDGTDWDQSRQLANRIYKFRGDGKAWDWEVDTENGNYDYLMYADVDMHHPEVINELNRWGVWYANTLNLDGFRLDAVKHIKFSFMRDWLGHVRGQTGKNLFAVAEYWKNDLGALENYLSKTNWTMSAFDVPLHYNLYQASNSSGNYDMRNLLNGTLVQRHPSHAVTFVDNHDTQPGEALESFVQGWFKPLAYATILTREQGYPQVFYGDYYGIPSDGVPSYRQQIDPLLKARQQYAYGRQHDYFDHWDVIGWTREGNASHPNSGLATIMSDGPGGSKWMYVGRQKAGEVWHDMTGNRSGTVTINQDGWGHFFVNGGSVSVWVKR

SEQ ID NO: 32413 - protein, 485 aa, Bacillus sp.
HHDGTNGTIMQYFEWNVPNDGQHWNRLHNNAQNLKNAGITAIWIPPAWKGTSQNDVGYGAYDLYDLGEFNQKGTVRTKYGTKAELERAIRSLKANGIQVYGDVVMNHKGGADFTERVQAVEVNPQNRNQEVSGTYQIEAWTGFNFPGRGNQHSSFKWRWYHFDGTDWDQSRQLANRIYKFRGDGKAWDWEVDTENGNYDYLMYADVDMDHPEVINELNRWGVWYANTLNLDGFRLDAVKHIKFSFMRDWLGHVRGQTGKNLFAVAEYWKNDLGALENYLSKTNWTMSAFDVPLHYNLYQASNSSGNYDMRNLLNGTLVQRHPSHAVTFVDNHDTQPGEALESFVQGWFKPLAYATILTREQGYPQVFYGDYYSIPSDGVPSYRQQIDPLLKARQQYAYGRQHDYFDHWDVIGWTREGNASHPNSGLATIMSDGPGGSKWMYVGRQKAGEVWHDMTGNRSGTVTINQDGWGHFFVNGGSVSVWVKR

SEQ ID NO: 32414 - protein, 485 aa, Bacillus sp.
HHDGTNGTIMQYFEWNVPNDGQHWNRLHNNAQNLKNAGITAIWIPPAWKGTSQNDVGYGAYDLYDLGEFNQKGTVRTKYGTKAELERAIRSLKANGIQVYGDVVMNHKGGADFTERVQAVEVNPQNRNQEVSGTYQIEAWTGFNFPGRGNQHSSFKWRWYHFDGTDWDQSRQLANRIYKFRGDGKAWDWEVDTENGNYDYLMYADVDMDHPEVINELNRWGVWYANTLNLPGFRLDAVKHIKFSFMRDWLGHVRGQTGKNLFAVAEYWKNDLGALENYLSKTNWTMSAFDVPLHYNLYQASNSSGNYDMRNLLNGTLVQRHPSHAVTFVDNHDTQPGEALESFVQGWFKPLAYATILTREQGYPQVFYGDYYGIPSDGVPSYRQQIDPLLKARQQYAYGRQHDYFDHWDVIGWTREGNASHPNSGLATIMSDGPGGSKWMYVGRQKAGEVWHDMTGNRSGTVTINQDGWGHFFVNGGSVSVWVKR

SEQ ID NO: 32415 - protein, 485 aa, Bacillus sp.
HHDGTNGTIMQYFEWNVPNDGQHWNRLHNNAQNLKNAGITAIWIPPAWKGTSQNDVGYGAYDLYDLGEFNQKGTVRTKYGTKAELERAIRSLKANGIQVYGDVVMNHKGGADFTERVQAVEVNPQNRNQEVSGTYQIEAWTGFNFPGRGNQHSSFKWRWYHFDGTDWDQSRQLANRIYKFRGDGKAWDWEVDTENGNYDYLMYCDVDMDHPEVINELNRWGVWYANTLNLDGFRLDAVKHIKFSFMRDWLGHVRGQTGKNLFAVAEYWKNDLGALENYLSKTNWTMSAFDVPLHYNLYQASNSSGNYDMRNLLNGTLVQRHPSHAVTFVDNHDTQPGEALESFVQGWFKPLAYATILTREQGYPQVFYGDYYGIPSDGVPSYRQQIDPLLKARQQYAYGRQHDYFDHWDVIGWTREGNASHPNSGLATIMSDGPGGSKWMYVGRQKAGEVWHDMTGNRSGTVTINQDGWGHFFVNGGSVSVWVKR

SEQ ID NO: 32416 - protein, 485 aa, Bacillus sp.
HHDGTNGTIMQYFEWNVPNDGQHWNRLHNNAQNLKNAGITAIWIPPAWKGTSQNDVGYGAYDLYDLGEFNQKGTVRTKYGTKAELERAIRSLKANGIQVYGDVVMNHKGGADFTERVQAVEVNPQNRNQEVSGTYQIEAWTGFNFPGRGNQHSSFKWRWYHFDGTDWDQSRQLANRIYKFRGDGKAWDWEVDTENGNYDYLMYADVDMDHPEVINELNRWGVWYANTLNLDGFRLDAVKHIKFSFMRDWLGHVRGQTGKNLFAVAEYWKNDLGALENYLSKTNWTMSAFDVPLHYNLYQASNSSGNYDMRNLLNGTLVQRHPSHAVTFVDNHDTQPGEALESFVQGWFKPLAYATILTREQGYPQVFYGDYYGIPSDGVPSYRQQIDPLLKARQQYAYGRQHDYFDHWDVIGWTREGNASHPNSGLATIMSDGPGGSKWMYVGRQKAGEVWHDMTGNRSGTVVINQDGWGHFFVNGGSVSVWVKR

SEQ ID NO: 32417 - protein, 485 aa, Bacillus sp.
HHDGTNGTIMCYFEWNVPNDGQHWNRLHNNAQNLKNAGITAIWIPPAWKGTSQNDVGYGAYDLYDLGEFNQKGTVRTKYGTKAELERAIRSLKANGIQVYGDVVMNHKGGADFTERVQAVEVNPQNRNQEVSGTYQIEAWTGFNFPGRGNQHSSFKWRWYHFDGTDWDQSRQLANRIYKFRGDGKAWDWEVDTENGNYDYLMYADVDMDHPEVINELNRWGVWYANTLNLDGFRLDAVKHIKFSFMRDWLGHVRGQTGKNLFAVAEYWKNDLGALENYLSKTNWTMSAFDVPLHYNLYQASNSSGNYDMRNLLNGTLVQRHPSHAVTFVDNHDTQPGEALESFVQGWFKPLAYATILTREQGYPQVFYGDYYGIPSDGVPSYRQQIDPLLKARQQYAYGRQHDYFDHWDVIGWTREGNASHPNSGLATIMSDGPGGSKWMYVGRQKAGEVWHDMTGNRSGTVTINQDGWGHFFVNGGSVSVWVKR

SEQ ID NO: 32418 - protein, 485 aa, Bacillus sp.
HHDGTNGTIMQYFEWNVPNDGQHWNRLHNNAQNLKNAGITAIWIPPAWKGTSQNDVGYAAYDLYDLGEFNQKGTVRTKYGTKAELERAIRSLKANGIQVYGDVVMNHKGGADFTERVQAVEVNPQNRNQEVSGTYQIEAWTGFNFPGRGNQHSSFKWRWYHFDGTDWDQSRQLANRIYKFRGDGKAWDWEVDTENGNYDYLMYADVDMDHPEVINELNRWGVWYANTLNLDGFRLDAVKHIKFSFMRDWLGHVRGQTGKNLFAVAEYWKNDLGALENYLSKTNWTMSAFDVPLHYNLYQASNSSGNYDMRNLLNGTLVQRHPSHAVTFVDNHDTQPGEALESFVQGWFKPLAYATILTREQGYPQVFYGDYYGIPSDGVPSYRQQIDPLLKARQQYAYGRQHDYFDHWDVIGWTREGNASHPNSGLATIMSDGPGGSKWMYVGRQKAGEVWHDMTGNRSGTVTINQDGWGHFFVNGGSVSVWVKR

SEQ ID NO: 32419 - protein, 485 aa, Bacillus sp.
HHDGTNGTIMQYFEWNVPNDGQHWNRLHNNAQNLKNAGITAIWIPPAWKGTSQNDVGYGAYDLYDLGEFNQKGTVRTKYGTKAELERAIRSLKANGIQVYGDVVMNHKGGADFTERVQAVEVNPQNRNQEVSGTYQIEASTGFNFPGRGNQHSSFKWRWYHFDGTDWDQSRQLANRIYKFRGDGKAWDWEVDTENGNYDYLMYADVDMDHPEVINELNRWGVWYANTLNLDGFRLDAVKHIKFSFMRDWLGHVRGQTGKNLFAVAEYWKNDLGALENYLSKTNWTMSAFDVPLHYNLYQASNSSGNYDMRNLLNGTLVQRHPSHAVTFVDNHDTQPGEALESFVQGWFKPLAYATILTREQGYPQVFYGDYYGIPSDGVPSYRQQIDPLLKARQQYAYGRQHDYFDHWDVIGWTREGNASHPNSGLATIMSDGPGGSKWMYVGRQKAGEVWHDMTGNRSGTVTINQDGWGHFFVNGGSVSVWVKR

SEQ ID NO: 32420 - protein, 485 aa, Bacillus sp.
HHDGTNGTIMQYFEWNVPNDGQHWNRLHNNAQNLKNAGITAIWIPPAWKGTSQNDVGYGAYDLYDLGEFNQKGTVRTKYGTKAELERAIRSLKANGIQVYGDVVMNHKGGADFTERVQAVEVNPQNRNQEVSGTYQIEAWTGFNFPGRGNQHSSFKWRWYHFDGTDWDQSRQLANRIYKFRGDGKAWGWEVDTENGNYDYLMYADVDMDHPEVINELNRWGVWYANTLNLDGFRLDAVKHIKFSFMRDWLGHVRGQTGKNLFAVAEYWKNDLGALENYLSKTNWTMSAFDVPLHYNLYQASNSSGNYDMRNLLNGTLVQRHPSHAVTFVDNHDTQPGEALESFVQGWFKPLAYATILTREQGYPQVFYGDYYGIPSDGVPSYRQQIDPLLKARQQYAYGRQHDYFDHWDVIGWTREGNASHPNSGLATIMSDGPGGSKWMYVGRQKAGEVWHDMTGNRSGTVTINQDGWGHFFVNGGSVSVWVKR

SEQ ID NO: 32421 - protein, 485 aa, Bacillus sp.
HHDGTNGTIMQYFEWNVPNDGQHWNRLHNNAQNLKNAGITAIWIPPAWKGTSQNDVGYGAYDLYDLGEFNQKGTVRTKYGTKAELERAIRSLKANGIQVYGDVVMNHKGGADFTERVQAVEVNPQNRNQEVSGTYQIEAWTGFNFPGRGNQHSSFKWRWYHFDGTDWDQSRQLANRIYKFRGDGKAWDWEVDTENGNYDYLMYADVDMDHPEVINELNRWGVWYANTLNLDGFRLDAVKHIKFSFMRDWLGHVRGQTGKNLFAVAEYWKNDLGALENYLSKTNWTMSAFDVPLHYNLYQASNSSGNYDMRNLLNGTLVQRHPSHAVTFVDNHDTQPGEALESFVQGWFKPLAYATILTREQGYPQVFYGDYYGIPSDGVPSYRQQIDPLLKARQQYAYGRQHDYFMHWDVIGWTREGNASHPNSGLATIMSDGPGGSKWMYVGRQKAGEVWHDMTGNRSGTVTINQDGWGHFFVNGGSVSVWVKR

SEQ ID NO: 32422 - protein, 485 aa, Bacillus sp.
HHDGTNGTIMQYFEWNVPNDGQHWNRLHNNAQNLKNAGITAIWIPPAWKGTSQNDVGYGAYDLYDLGEFNQKGTVRTKYGTKAELERAIRSLKANGIQVYGDVVMNHKGGADFTERVQAVEVNPQNRNQEVSGTYQIEAWTGFNFPGRGNQHSSFKWRWYHFDGTDWDQSRQLANRIYKFRGDGKAWDWEVDTENGNYDYLMYADVDMDHPEVINELNRWGVWYANTLNLDGFRLDAVKHIKFSFMRDWLGHVRGQTGKNLFAVAEYWKNDLGALENYLSKTNWTMSAFDVPLHYNLYQASNSSGNYDMRNLLNGTLVQRHPSHAVTFVDNHDTQDGEALESFVQGWFKPLAYATILTREQGYPQVFYGDYYGIPSDGVPSYRQQIDPLLKARQQYAYGRQHDYFDHWDVIGWTREGNASHPNSGLATIMSDGPGGSKWMYVGRQKAGEVWHDMTGNRSGTVTINQDGWGHFFVNGGSVSVWVKR

SEQ ID NO: 32423 - protein, 485 aa, Bacillus sp.
HHNGTNGTMMQYFEWYLPNDGNHWNRLNSDASNLKSKGIKAVWIPPAWKGASQNDVGYGAYDLYDLGEFNQRGTVRTKYGTRSQLQAAVTSLKNNGINVYGDVVMNHKGGADATEMVRAVEVNPNNRNQEVTGEYTIEAWTRFDFPGRGNTHSSFKWRWYHFDGVDFDQSRRLNNRIYKFRGHGKAWDWEVDTEFGNYDYLMYVDYDYDHPETTNEMRNWGVWYTNTLGLDGFRIDAVKHIKYSFTRDWINHVRIATGKNMFAVAEFWKNDLGAIENYLQKTNWNHSVFDVPLHYNLYNASKSGGNYDMRNIFNGTVVQAHPMHAVTFVDNHDSQPEEALESFVEEWFKPLAYALTLTREQGYPSVFYGDYYGIPTHGVPAMRSKIDPILEARQKYAYGPQHDYLDHPDVIGWTREGDSSHPKSGLATLITDGPGGSKRMYAGLKNAGETWYDITGNRSDTVKIGSDGWGEFHVNDGSVSIYVQK

SEQ ID NO: 32424 - protein, 485 aa, Bacillus sp.
HHDGTNGTIMQYFEWNVPNDGQHWNRLHNNAQNLKNAGITAIWIPPAWKGTSQNDVGYGAYDLADLGEFNQKGTVRTKYGTKAELERAIRSLKANGIQVYGDVVMNHKGGADFTERVQAVEVNPQNRNQEVSGTYQIEAWTGFNFPGRGNQHSSFKWRWYHFDGTDWDQSRQLANRIYKFRGDGKAWDWEVDTENGNYDYLMYADVDMDHPEVINELNRWGVWYANTLNLDGFRLDAVKHIKFSFMRDWLGHVRGQTGKNLFAVAEYWKNDLGALENYLSKTNWTMSAFDVPLHYNLYQASNSSGNYDMRNLLNGTLVQRHPSHAVTFVDNHDTQPGEALESFVQGWFKPLAYATILTREQGYPQVFYGDYYGIPSDGVPSYRQQIDPLLKARQQYAYGRQHDYFDHWDVIGWTREGNASHPNSGLATIMSDGPGGSKWMYVGRQKAGEVWHDMTGNRSGTVTINQDGWGHFFVNGGSVSVWVKR

SEQ ID NO: 32425 - protein, 485 aa, Bacillus sp.
HHDGTNETIMQYFEWNVPNDGQHWNRLHNNAQNLKNAGITAIWIPPAWKGTSQNDVGYGAYDLYDLGEFNQKGTVRTKYGTKAELERAIRSLKANGIQVYGDVVMNHKGGADFTERVQAVEVNPQNRNQEVSGTYQIEAWTGFNFPGRGNQHSSFKWRWYHFDGTDWDQSRQLANRIYKFRGDGKAWDWEVDTENGNYDYLMYADVDMDHPEVINELNRWGVWYANTLNLDGFRLDAVKHIKFSFMRDWLGHVRGQTGKNLFAVAEYWKNDLGALENYLSKTNWTMSAFDVPLHYNLYQASNSSGNYDMRNLLNGTLVQRHPSHAVTFVDNHDTQPGEALESFVQGWFKPLAYATILTREQGYPQVFYGDYYGIPSDGVPSYRQQIDPLLKARQQYAYGRQHDYFDHWDVIGWTREGNASHPNSGLATIMSDGPGGSKWMYVGRQKAGEVWHDMTGNRSGTVTINQDGWGHFFVNGGSVSVWVKR

SEQ ID NO: 32426 - protein, 485 aa, Bacillus sp.
HHDGTNGTIMQYFEWNVPNDGQHWNRLHNNAQNLKNAGITAIWIPPAWKGTSQNDVGYGAYDLYDLGEFNQKGTVRTKYGTKAELERAIRSLKANGIQVYGDVVMNHKGGADFTERVQAVEVNPQNRNQEVSGTYQIEAWTGFNFPGRGNQHSSFKWRWYHFDGTDWDQSRQLANRIYKFRGDGKAWDWEVDTENGNYDYLMYADVDMDHPEVINELNRWGVWYANTLNLDGFRLDAVKHIKFSFMRDWLGHVRGQTGKNLFAVAEYWKNDLGALENYLSKTNWTMSAFDTPLHYNLYQASNSSGNYDMRNLLNGTLVQRHPSHAVTFVDNHDTQPGEALESFVQGWFKPLAYATILTREQGYPQVFYGDYYGIPSDGVPSYRQQIDPLLKARQQYAYGRQHDYFDHWDVIGWTREGNASHPNSGLATIMSDGPGGSKWMYVGRQKAGEVWHDMTGNRSGTVTINQDGWGHFFVNGGSVSVWVKR

SEQ ID NO: 32427 - protein, 485 aa, Bacillus sp.
HHDGTNGTIMQYFEWNVPNDGQHWNRLHNNAQNLKNAGITAIWIPPAWKGTSQNDVGYGAYDLYDLGEFNQKGTVRTKYGTKAELERAIRSLKANGIQVYGDVVMNHKGGADFTERVQAVEVNPQNRNQEVSGTYQIEAWTGFNFPGRGNQHSSFKWRWYHFDGTDWDQSRQLANRIYTFRGDGKAWDWEVDTENGNYDYLMYADVDMDHPEVINELNRWGVWYANTLNLDGFRLDAVKHIKFSFMRDWLGHVRGQTGKNLFAVAEYWKNDLGALENYLSKTNWTMSAFDVPLHYNLYQASNSSGNYDMRNLLNGTLVQRHPSHAVTFVDNHDTQPGEALESFVQGWFKPLAYATILTREQGYPQVFYGDYYGIPSDGVPSYRQQIDPLLKARQQYAYGRQHDYFDHWDVIGWTREGNASHPNSGLATIMSDGPGGSKWMYVGRQKAGEVWHDMTGNRSGTVTINQDGWGHFFVNGGSVSVWVKR

SEQ ID NO: 32428 - protein, 485 aa, Bacillus sp. (in: firmicutes)
HHDGTNGTIMQYFEWNVPNDGQHWNRLHNNAQNLKNAGITAIWIPPAWKGTSQNDVGYGAYDLYDLGEFNQKGTVRTKYGTKAELERAIRSLKANGIQVYGDVVMNHKGGADFTERVQAVEVNPQNRNQEVSGTYQIEAWTGFNFPGRGNQHSSFKWRWYHFDGTDWDQSRQLANRIYKFRGDGKAWDWEVDTENGNYDYLMYADVDMDHPEVINELNRWGVWYANTLNLDGFRLDAVKHIKFHFMRDWLGHVRGQTGKNLFAVAEYWKNDLGALENYLSKTNWTMSAFDVPLHYNLYQASNSSGNYDMRNLLNGTLVQRHPSHAVTFVDNHDTQPGEALESFVQGWFKPLAYATILTREQGYPQVFYGDYYGIPSDGVPSYRQQIDPLLKARQQYAYGRQHDYFDHWDVIGWTREGNASHPNSGLATIMSDGPGGSKWMYVGRQKAGEVWHDMTGNRSGTVTINQDGWGHFFVNGGSVSVWVKR

SEQ ID NO: 32429 - protein, 485 aa, Bacillus sp.
HHDGTNGTIMQYFEWNVPNDGQHWNRLHNNAQNLKNAGITAIWIPPAWKGTSQNDVGYGAYDLYDLGEFNQKGTVRTKYGTKAELERAIRSLKANGIQVYGDVVMNHKGGADFTERVQAVEVNPQNRNQEVSGTYQIEAWTGFNFPGRGNQHSSFKWRWYHFDGTDWDQSRQLANRIYKFRGDGKAWDWEVDTENGNYDYLMYADVDMDHPDVINELNRWGVWYANTLNLDGFRLDAVKHIKFSFMRDWLGHVRGQTGKNLFAVAEYWKNDLGALENYLSKTNWTMSAFDVPLHYNLYQASNSSGNYDMRNLLNGTLVQRHPSHAVTFVDNHDTQPGEALESFVQGWFKPLAYATILTREQGYPQVFYGDYYGIPSDGVPSYRQQIDPLLKARQQYAYGRQHDYFDHWDVIGWTREGNASHPNSGLATIMSDGPGGSKWMYVGRQKAGEVWHDMTGNRSGTVTINQDGWGHFFVNGGSVSVWVKR

SEQ ID NO: 32430 - protein, 485 aa, Bacillus sp.
HHDGTNGTIMQYFEWNVPNDGQHWNRLHNNAQNLKNAGITAIWIPPAWKGTEQNDVGYGAYDLYDLGEFNQKGTVRTKYGTKAELERAIRSLKANGIQVYGDVVMNHKGGADFTERVQAVEVNPQNRNQEVSGTYQIEAWTGFNFPGRGNQHSSFKWRWYHFDGTDWDQSRQLANRIYKFRGDGKAWDWEVDTENGNYDYLMYADVDMDHPEVINELNRWGVWYANTLNLDGFRLDAVKHIKFSFMRDWLGHVRGQTGKNLFAVAEYWKNDLGALENYLSKTNWTMSAFDVPLHYNLYQASNSSGNYDMRNLLNGTLVQRHPSHAVTFVDNHDTQPGEALESFVQGWFKPLAYATILTREQGYPQVFYGDYYGIPSDGVPSYRQQIDPLLKARQQYAYGRQHDYFDHWDVIGWTREGNASHPNSGLATIMSDGPGGSKWMYVGRQKAGEVWHDMTGNRSGTVTINQDGWGHFFVNGGSVSVWVKR

SEQ ID NO: 32431 - protein, 485 aa, Bacillus sp.
HHDGTNGTIMQYFEWNVPNDGQHWNRLHNNAQNLKNAGITAIWIPPAWKGTSQNDVGYGAYDLYDLGEFNQKGTVRTKYGTKAELERAIRSLKANGIQVYGDVVMNHKGGADFTERVQAVEVNPQNRNQEVSGTYQIEAWTGFNFPGRGNQHSSFKWRWYHFDGTDWDQSRQLANRIYKFAGDGKAWDWEVDTENGNYDYLMYADVDMDHPEVINELNRWGVWYANTLNLDGFRLDAVKHIKFSFMRDWLGHVRGQTGKNLFAVAEYWKNDLGALENYLSKTNWTMSAFDVPLHYNLYQASNSSGNYDMRNLLNGTLVQRHPSHAVTFVDNHDTQPGEALESFVQGWFKPLAYATILTREQGYPQVFYGDYYGIPSDGVPSYRQQIDPLLKARQQYAYGRQHDYFDHWDVIGWTREGNASHPNSGLATIMSDGPGGSKWMYVGRQKAGEVWHDMTGNRSGTVTINQDGWGHFFVNGGSVSVWVKR

SEQ ID NO: 32432 - protein, 485 aa, Bacillus sp.
HHDGTNGTIMQYFEWNVPNDGQHWNRLHNNAQNLKNAGITAIWIPPAWKGTSQNDVGYGAYDLYDLGEFNQKGTVRTKYGTKAELERAIRSLKANGIQVYGDVVMNHKGGADFTERVQAVEVNPQNRNQEVSGTYQIEAWTGFNFPGRGNQHSSFKWRWGHFDGTDWDQSRQLANRIYKFRGDGKAWDWEVDTENGNYDYLMYADVDMDHPEVINELNRWGVWYANTLNLDGFRLDAVKHIKFSFMRDWLGHVRGQTGKNLFAVAEYWKNDLGALENYLSKTNWTMSAFDVPLHYNLYQASNSSGNYDMRNLLNGTLVQRHPSHAVTFVDNHDTQPGEALESFVQGWFKPLAYATILTREQGYPQVFYGDYYGIPSDGVPSYRQQIDPLLKARQQYAYGRQHDYFDHWDVIGWTREGNASHPNSGLATIMSDGPGGSKWMYVGRQKAGEVWHDMTGNRSGTVTINQDGWGHFFVNGGSVSVWVKR

SEQ ID NO: 32433 - protein, 485 aa, Bacillus sp.
HHDGTNGTIMQYFEWNVPNDGQHWNRLHNNAQNLKNAGITAIWIPPAWKGTSQNDVGYGAYDLYDLGEFNQKGTVRTKYGTKAELERAIRSLKANGIQVYGDVVMNHKGGADFTERVQAVEVNPQNRNQEVSGTYQIEAWTGFNFPGRGNQHSSFKWRWYHFDGTDWDQSRQLANRIYKFRGDGKAWDWEVDTENGNYDYLMYADVDMDHPEVINELNRWGVWYANTLNLDGFRLDAVKHIKFSFMRDWLGHVRGQTGKNLFAVAEYWKNDLGALENYLSKTNWTMSAFDVPLHYNLYQASNSSGNYDMRNLLNGTLVQRHPSHAVTFVDNHDTQPGEALESFVQGWFKPLAYATILTREQGYPQVFYGDYYGIPSDGVPSYRQQIDPLLKARQQYAYGRQHDYFDHWDVIGWTREGNASVPNSGLATIMSDGPGGSKWMYVGRQKAGEVWHDMTGNRSGTVTINQDGWGHFFVNGGSVSVWVKR

SEQ ID NO: 32434 - protein, 485 aa, Bacillus sp.
HHDGTNGTIMQYFEWNVPNDGQHWNRLHNNAQNLKNAGITAIWIPPAWKGTSQNDVGYGAYDLYDLGEFNQKGTVRTKYGTKAELERAIRSLKANGIQVYGDVVMNHKGGADFTERVQAVEVNPQNRNQEVSGTYQIEAWTGFNFPGRGNQHSSFKWRWYHFDGTDWDQSRQLANRIYKFRGDGKAWDWEVDTENGNYDYLMYADVDMDHPEVINELNRWGVWYANTLNLDGFRLDAVKHIKFSFMRDWLGHVRGQTGKNLFAVAEYWKNDLGALENYLSKTNWTMSAFDVPLHYNLYQASNSSGNYDMRNLLNGTLVQRHPSHAVTFVDNHDTQPGEALESFVQGWFKPLAYATILTREQGYPQVFYGDYYGIPSDGVPSYRQQIDVLLKARQQYAYGRQHDYFDHWDVIGWTREGNASHPNSGLATIMSDGPGGSKWMYVGRQKAGEVWHDMTGNRSGTVTINQDGWGHFFVNGGSVSVWVKR

SEQ ID NO: 32435 - protein, 485 aa, Bacillus sp.
HHDGTNGTIMQYFEWNVPNDGQHWNRLHNNAQNLKNAGITAIWIPPAWKGTSQNDVGYGAYDLYDLGEFNQKGTVRTKYGTKAELERAIRSLKANGIQVYGDVVMNHKGGADFTERVQAVEVNPQNRNQEVSGTYQIEAWTGFNFPGRGNQHSSFKWRWYHFDGTDWDQSRQLANRIYKFRGDGKAWDWEVDTENGNYDYLMYADVDMDHPEVINELNRWGVWYANTLNLDGFRLDAVKHIKFSFMRDWLGHVRGQTGKNLFAVAEYWKNDLGALENYLSKTNWTMSAFDVPLHYNLYQASNSSGNYDMRNLLNGTLVQREPSHAVTFVDNHDTQPGEALESFVQGWFKPLAYATILTREQGYPQVFYGDYYGIPSDGVPSYRQQIDPLLKARQQYAYGRQHDYFDHWDVIGWTREGNASHPNSGLATIMSDGPGGSKWMYVGRQKAGEVWHDMTGNRSGTVTINQDGWGHFFVNGGSVSVWVKR

SEQ ID NO: 32436 - protein, 485 aa, Bacillus sp.
HHDGTNGTIMQYFEWNVPNDGQHWNRLHNNAQNLKNAGITAIWIPPAWKGTSQNDVGYGAYDLYDLGEFNQKGTVRTKYGTKAELERAIRSLKANGIQVYGDVVMNHKGGADFTERVQAVEVNPQNRNQEVSGTYQIEAWTGFNFPGRGNQHSSFKWRWYHFDGTDWDQSFQLANRIYKFRGDGKAWDWEVDTENGNYDYLMYADVDMDHPEVINELNRWGVWYANTLNLDGFRLDAVKHIKFSFMRDWLGHVRGQTGKNLFAVAEYWKNDLGALENYLSKTNWTMSAFDVPLHYNLYQASNSSGNYDMRNLLNGTLVQRHPSHAVTFVDNHDTQPGEALESFVQGWFKPLAYATILTREQGYPQVFYGDYYGIPSDGVPSYRQQIDPLLKARQQYAYGRQHDYFDHWDVIGWTREGNASHPNSGLATIMSDGPGGSKWMYVGRQKAGEVWHDMTGNRSGTVTINQDGWGHFFVNGGSVSVWVKR

SEQ ID NO: 32437 - protein, 483 aa, Bacillus sp. (in: firmicutes)
HHDGTNGTIMQYFEWNVPNDGQHWNRLHNNAQNLKNAGITAIWIPPAWKGTSQNDVGYGAYDLYDLGEFNQKGTVRTKYGTKAELERAIRSLKANGIQVYGDVVMNHKGGADFTERVQAVEVNPQNNNQEVSGTYQIEAWTGFNFPGRGNQHSSFKWRWYHFDGTDWDQSRQLANRIYKFRGKAWDWEVDTENGNYDYLMYADVDMDHPEVINELNRWGVWYANTLNLDGFRLDAVKHIKFSFIRDWLGHVRGQTGKNLFAVGEHWKNDLGALENYLSKTNWTMSAFDVPLHYNLYQASNSSGNYDMRNLLNGTLVQRHPSHAVTFVDNHDTQPGEALESFVQGWFKPLAYATILTREQGYPSVFYGDYYGIPSDGVPSYRQQIDPLLKARQQYAYGRQHDYFDHWDVIGWTREGNASHPNSGLATIMSDGPGGSKWMYVGRQKAGEVWHDMTGNRSGTVTINQDGWGHFFVNGGSVSVWVKR

SEQ ID NO: 32438 - protein, 485 aa, Bacillus sp.
HHDGTNGTIMQYFEWNVPNDGQHWNRLHNNAQNLKNAGITAIWIPPAWKGTSQNDVGYGAYDLYDLGEFNQKGTVRTKYGTKAELERAIRSLKANGIQVYGDVVMNHKGGADFTERVQAVEVNPQNRNQEVSGTYQIEAWTGFNFPGRGNQHSSFKWRWYHMDGTDWDQSRQLANRIYKFRGDGKAWDWEVDTENGNYDYLMYADVDMDHPEVINELNRWGVWYANTLNLDGFRLDAVKHIKFSFMRDWLGHVRGQTGKNLFAVAEYWKNDLGALENYLSKTNWTMSAFDVPLHYNLYQASNSSGNYDMRNLLNGTLVQRHPSHAVTFVDNHDTQPGEALESFVQGWFKPLAYATILTREQGYPQVFYGDYYGIPSDGVPSYRQQIDPLLKARQQYAYGRQHDYFDHWDVIGWTREGNASHPNSGLATIMSDGPGGSKWMYVGRQKAGEVWHDMTGNRSGTVTINQDGWGHFFVNGGSVSVWVKR

SEQ ID NO: 32439 - protein, 485 aa, Bacillus sp.
HHDGTNGTIMQYFEWNVPNDGQHWNRLHNNAQNLKNAGITAIWIPPAWKGTSQNDVGYGAYDLYDLGEFNQKGTVRTKYGTKAELERAIRSLKANGIQVYGDVVMNHKGGADFTERVQAVEVNPQNRNQEVSGTYQIEAWTGFNFPGRGNQHSSFKWRWYHFDGTDWDQSRQLANRIYKFRGDGKAWDWEVDTENGNYDYLMYADVDMDHPEVINELNRWGVWYANTLNLDGFRLDAVKHIKFQFMRDWLGHVRGQTGKNLFAVAEYWKNDLGALENYLSKTNWTMSAFDVPLHYNLYQASNSSGNYDMRNLLNGTLVQRHPSHAVTFVDNHDTQPGEALESFVQGWFKPLAYATILTREQGYPQVFYGDYYGIPSDGVPSYRQQIDPLLKARQQYAYGRQHDYFDHWDVIGWTREGNASHPNSGLATIMSDGPGGSKWMYVGRQKAGEVWHDMTGNRSGTVTINQDGWGHFFVNGGSVSVWVKR

SEQ ID NO: 32440 - protein, 483 aa, Bacillus sp.
HHDGTNGTIMQYFEWNVPNDGQHWNRLHNNAQNLKNAGITAIWIPPAWKGTSQNDVGYGAYDLYDLGEFNQKGTVRTKYGTKAELERAIRSLKANGIQVYGDVVMNHKGGADFTERVQAVEVNPQNRNQEVSGTYQIEAWTGFNFPGRGNQHSSFKWRWYHFDGTDWDQSRQLANRIYKFRGKAWDWEVDTEFGNYDYLMYADVDMDHPEVINELNRWGVWYANTLNLDGFRLDAVKHIKFSFMRDWLGHVRGQTGKNLFAVAEYWKNDLGALENYLSKTNWTMSAFDVPLHYNLYQASNSSGNYDMRNLLNGTLVQRHPSHAVTFVDNHDTQPGEALESFVQGWFKPLAYATILTREQGYPQVFYGDYYGIPSDGVPSYRQQIDPLLKARQQYAYGRQHDYFDHWDVIGWTREGNASHPNSGLATIMSDGPGGSKWMYVGRQKAGEVWHDMTGNRSGTVTINQDGWGHFFVNGGSVSVWVKR

SEQ ID NO: 32441 - protein, 485 aa, Bacillus sp.
HHDGTNGTIMQYFEWNVPNDGQHWNRLHNNAQNLKNAGITAIWIPPAWKGTSQNDVGYGAYDLYDLGEFNQKGTVRTKYGTKAELERAIRSLKANGIQVYGDVVMNHKGGADFTERVQAVEVNPQNRNQEVSGTYQIEAWTGFNFPGRGNQHSSFKWRWYHFDGTDWDQSRQLANRIYKFRGDGKAWDWEVDTENGNYDYLMYADVDMDHPEVINELNRWGVWYANTLNLDGFRLDAVKHIKFSFMRDWLGHVRGQTGKNLFAVAEYWKNDLGALENYLSKTNWTMSAFDVPLHYNLYQASNSSGNYDMRNLLNGTLVQRHPSHAVQFVDNHDTQPGEALESFVQGWFKPLAYATILTREQGYPQVFYGDYYGIPSDGVPSYRQQIDPLLKARQQYAYGRQHDYFDHWDVIGWTREGNASHPNSGLATIMSDGPGGSKWMYVGRQKAGEVWHDMTGNRSGTVTINQDGWGHFFVNGGSVSVWVKR

SEQ ID NO: 32442 - protein, 485 aa, Bacillus sp.
HHDGTNGTIMQYFEWNVPNDGQHWNRLHNNAQNLKNAGITAIWIPPAWKGTSQNDVGYGAYDLYDLGEFNQKGTVRTKYGTKAELERAIRSLKANGIQVYGDVVMNHKGGADFTERVQAVEVNPQNRNQEVSGTYQIEAWTGFNFPGRGNQHSSFKWRWYHFDGTDWDQSRQLANRIYKFRGDGKAWDWEVDTENGNYDYLMYADVDMDHPEVINELNRWGVWYANTLNLDGFRLDAVKHIKFSFMRDWLGHVRGQTGKNLFAVAEYWKNDLGALENYLSKTNWTMSAFDVPLHYNLYQASNSSGNYDMRNLLNGTLVQRHPSHAVTFVDNHDTQPGEALESFVQGWFKPLAYATILTREQGYPQVFYGDYYGIPSDGVPSYRQQIDPLLKARRQYAYGRQHDYFDHWDVIGWTREGNASHPNSGLATIMSDGPGGSKWMYVGRQKAGEVWHDMTGNRSGTVTINQDGWGHFFVNGGSVSVWVKR

SEQ ID NO: 32443 - protein, 485 aa, Bacillus sp.
HHDGTNGTIMQYFEWNVPNDGQHWNRLHNNAQNFKNAGITAIWIPPAWKGTSQNDVGYGAYDLYDLGEFNQKGTVRTKYGTKAELERAIRSLKANGIQVYGDVVMNHKGGADFTERVQAVEVNPQNRNQEVSGTYQIEAWTGFNFPGRGNQHSSFKWRWYHFDGTDWDQSRQLANRIYKFRGDGKAWDWEVDTENGNYDYLMYADVDMDHPEVINELNRWGVWYANTLNLDGFRLDAVKHIKFSFMRDWLGHVRGQTGKNLFAVAEYWKNDLGALENYLSKTNWTMSAFDVPLHYNLYQASNSSGNYDMRNLLNGTLVQRHPSHAVTFVDNHDTQPGEALESFVQGWFKPLAYATILTREQGYPQVFYGDYYGIPSDGVPSYRQQIDPLLKARQQYAYGRQHDYFDHWDVIGWTREGNASHPNSGLATIMSDGPGGSKWMYVGRQKAGEVWHDMTGNRSGTVTINQDGWGHFFVNGGSVSVWVKR

SEQ ID NO: 32444 - protein, 485 aa, Bacillus sp. (in: firmicutes)
HHDGTNGTIMQYFEWNVPNDGQHWNRLHNNAQNLKNAGITAIWIPPAWKGTSQNDVGYGAYDLYDLGEFNQKGTVRTKYGTKAELERAIRSLKANGIQVYGDVVMNHKGGADFTERVQAVEVNPQNRNQEVSGTYQIEAWTGFNFPGRGNQHSSFKWRWYHFDGTDWDQSRQLANRIYKFRGDGKAWDWEVDTENGNYDYLMYADVDMDHPEVINELNRWGVWYANTLNLDGFRLDAVKHIKFSFMRDWLGHVRGQTGKNLFAVAEYWKNDLGALENYLSFTNWTMSAFDVPLHYNLYQASNSSGNYDMRNLLNGTLVQRHPSHAVTFVDNHDTQPGEALESFVQGWFKPLAYATILTREQGYPQVFYGDYYGIPSDGVPSYRQQIDPLLKARQQYAYGRQHDYFDHWDVIGWTREGNASHPNSGLATIMSDGPGGSKWMYVGRQKAGEVWHDMTGNRSGTVTINQDGWGHFFVNGGSVSVWVKR

SEQ ID NO: 32445 - protein, 485 aa, Bacillus sp.
HHDGTNGTIMQYFEWNVPNDGQHWNRLHNNAQNLKNAGITAIWIPPAWKGTSQNDVGYGAYDLYDLGEFNQKGTVRTKYGTKAELERAIRSLKANGIQVYGDVVMNHKGGADFTERVQAVEVNPQNRNQEVSGTYQIEAWTGFNFPGRGNQHSSFKWRWYHFDGTDWDQSRQLANRIYKFRGDGKAWDWEVDTENGNYDYLMYADVDMDHPEVINELNRWGVWYANTLNLDGFRLDAVKHIKFSFMRDWWGHVRGQTGKNLFAVAEYWKNDLGALENYLSKTNWTMSAFDVPLHYNLYQASNSSGNYDMRNLLNGTLVQRHPSHAVTFVDNHDTQPGEALESFVQGWFKPLAYATILTREQGYPQVFYGDYYGIPSDGVPSYRQQIDPLLKARQQYAYGRQHDYFDHWDVIGWTREGNASHPNSGLATIMSDGPGGSKWMYVGRQKAGEVWHDMTGNRSGTVTINQDGWGHFFVNGGSVSVWVKR

SEQ ID NO: 32446 - protein, 485 aa, Bacillus sp.
HHDGTNGTIMQYFEWNVPNDGQHWNRLHNNAQNLKNAGITAIWIPPAWKGTSQNDVGYGAYDLYDLGEFNQKGTVRTKYGTKAELERAIRSLKANGIQVYGDVVMNHKGGADFTERVQAVEVNPQNRNQEVSGTYQIEAWTGFNFPGRGNQHSSFKWRWYHFDGTDWDQSRQLANRIYKFRGDGKAWDWEVDTENGNYDYLMYADQDMDHPEVINELNRWGVWYANTLNLDGFRLDAVKHIKFSFMRDWLGHVRGQTGKNLFAVAEYWKNDLGALENYLSKTNWTMSAFDVPLHYNLYQASNSSGNYDMRNLLNGTLVQRHPSHAVTFVDNHDTQPGEALESFVQGWFKPLAYATILTREQGYPQVFYGDYYGIPSDGVPSYRQQIDPLLKARQQYAYGRQHDYFDHWDVIGWTREGNASHPNSGLATIMSDGPGGSKWMYVGRQKAGEVWHDMTGNRSGTVTINQDGWGHFFVNGGSVSVWVKR

SEQ ID NO: 32447 - protein, 485 aa, Bacillus sp.
HHDGTNGTIMQYFEWNVPNDGQHWNRLHNNAQNLKNAGLTAIWIPPAWKGTSQNDVGYGAYDLYDLGEFNQKGTVRTKYGTKAELERAIRSLKANGIQVYGDVVMNHKGGADFTERVQAVEVNPQNRNQEVSGTYQIEAWTGFNFPGRGNQHSSFKWRWYHFDGTDWDQSRQLANRIYKFRGDGKAWDWEVDTENGNYDYLMYADVDMDHPEVINELNRWGVWYANTLNLDGFRLDAVKHIKFSFMRDWLGHVRGQTGKNLFAVAEYWKNDLGALENYLSKTNWTMSAFDVPLHYNLYQASNSSGNYDMRNLLNGTLVQRHPSHAVTFVDNHDTQPGEALESFVQGWFKPLAYATILTREQGYPQVFYGDYYGIPSDGVPSYRQQIDPLLKARQQYAYGRQHDYFDHWDVIGWTREGNASHPNSGLATIMSDGPGGSKWMYVGRQKAGEVWHDMTGNRSGTVTINQDGWGHFFVNGGSVSVWVKR

SEQ ID NO: 32448 - protein, 485 aa, Bacillus sp.
HHDGTNGTIMQYFEWNVPNDGQHWNRLHNNAQNLKNAGITAIWIPPAWKGTSQNDVGYGAYDLYDLGEFNQKGTVRTKYGTKAELERAIRSLKANGIQVYGDVVMNHKGGADFTERVQAVEVNPQNRNQEVSGTYQIEAWTGFNFPGRGNQHSSFKWRWYHFDGTDWDQSRQLANRIYKFRGDGKAWDWEVDTENGNYDYLMYADVDMDHPEVINELNRWGVWYANTLNLDGFRLDAVKHIKFSFMRDWLGHVRGQTGKNLFAVAEYWKNDLGALENYLSKTNWTMSAFDVPLHYNLYQASNSSGNYDMRNLLNGTLVQRHPSHAVTFVDNHDTQPGEALESFVQGWFKPLAYATILTREQGYPQVFYGDYYGIPSDGVPSYRQQIDPLLKARQQYAYGRQHDYFDHWDVIGWTREGNASHPNSGLATIMSDGPGGSKWMYVGRQKAGEVWHDMTGNRSGTVTINQDGWGHFFVNGFSVSVWVKR

SEQ ID NO: 32449 - protein, 485 aa, Bacillus sp.
HMDGTNGTIMQYFEWNVPNDGQHWNRLHNNAQNLKNAGITAIWIPPAWKGTSQNDVGYGAYDLYDLGEFNQKGTVRTKYGTKAELERAIRSLKANGIQVYGDVVMNHKGGADFTERVQAVEVNPQNRNQEVSGTYQIEAWTGFNFPGRGNQHSSFKWRWYHFDGTDWDQSRQLANRIYKFRGDGKAWDWEVDTENGNYDYLMYADVDMDHPEVINELNRWGVWYANTLNLDGFRLDAVKHIKFSFMRDWLGHVRGQTGKNLFAVAEYWKNDLGALENYLSKTNWTMSAFDVPLHYNLYQASNSSGNYDMRNLLNGTLVQRHPSHAVTFVDNHDTQPGEALESFVQGWFKPLAYATILTREQGYPQVFYGDYYGIPSDGVPSYRQQIDPLLKARQQYAYGRQHDYFDHWDVIGWTREGNASHPNSGLATIMSDGPGGSKWMYVGRQKAGEVWHDMTGNRSGTVTINQDGWGHFFVNGGSVSVWVKR

SEQ ID NO: 32450 - protein, 485 aa, Bacillus sp.
HHDGTNGTIMQYFEWNVPNDGQHWNRLHNNAQNLKNAGITAIWIPPAWKGTSQNDVGYGAYDLYDLGEFNQKGTVRTKYGTKAELERAIRSLKANGIQVYGDVVMNHKGGADFTERVQAVEVNPQNRNQEVSGTYQIEAWTGFNFPGRGNQHSSFKWRWYHFDGTDWDQSRQLANRIYKFGGDGKAWDWEVDTENGNYDYLMYADVDMDHPEVINELNRWGVWYANTLNLDGFRLDAVKHIKFSFMRDWLGHVRGQTGKNLFAVAEYWKNDLGALENYLSKTNWTMSAFDVPLHYNLYQASNSSGNYDMRNLLNGTLVQRHPSHAVTFVDNHDTQPGEALESFVQGWFKPLAYATILTREQGYPQVFYGDYYGIPSDGVPSYRQQIDPLLKARQQYAYGRQHDYFDHWDVIGWTREGNASHPNSGLATIMSDGPGGSKWMYVGRQKAGEVWHDMTGNRSGTVTINQDGWGHFFVNGGSVSVWVKR

SEQ ID NO: 32451 - protein, 485 aa, Bacillus sp.
HHDGTNGTIMQYFEWNVPNDGQHWNRLHNNAQNLKNAGITAIWIPPAWKGTSQNDVGYGAYDLYDLGEFNQKGTVRTKYGTKAELERAIRSLKANGIQVYGDVVMNHKGGADFTERVQAVEVNPQNVNQEVSGTYQIEAWTGFNFPGRGNQHSSFKWRWYHFDGTDWDQSRQLANRIYKFRGDGKAWDWEVDTENGNYDYLMYADVDMDHPEVINELNRWGVWYANTLNLDGFRLDAVKHIKFSFMRDWLGHVRGQTGKNLFAVAEYWKNDLGALENYLSKTNWTMSAFDVPLHYNLYQASNSSGNYDMRNLLNGTLVQRHPSHAVTFVDNHDTQPGEALESFVQGWFKPLAYATILTREQGYPQVFYGDYYGIPSDGVPSYRQQIDPLLKARQQYAYGRQHDYFDHWDVIGWTREGNASHPNSGLATIMSDGPGGSKWMYVGRQKAGEVWHDMTGNRSGTVTINQDGWGHFFVNGGSVSVWVKR

SEQ ID NO: 32452 - protein, 485 aa, Bacillus sp.
HHDGTNGTIMQYFEWNVPNDGQHWNRLHNNAQNLKNAGITAIWIPPAWKGTSQNDVGYGAYDLYDLGEFNQKGTVRTKYGTKAELERAIRSLKANGIQVYGDTVMNHKGGADFTERVQAVEVNPQNRNQEVSGTYQIEAWTGFNFPGRGNQHSSFKWRWYHFDGTDWDQSRQLANRIYKFRGDGKAWDWEVDTENGNYDYLMYADVDMDHPEVINELNRWGVWYANTLNLDGFRLDAVKHIKFSFMRDWLGHVRGQTGKNLFAVAEYWKNDLGALENYLSKTNWTMSAFDVPLHYNLYQASNSSGNYDMRNLLNGTLVQRHPSHAVTFVDNHDTQPGEALESFVQGWFKPLAYATILTREQGYPQVFYGDYYGIPSDGVPSYRQQIDPLLKARQQYAYGRQHDYFDHWDVIGWTREGNASHPNSGLATIMSDGPGGSKWMYVGRQKAGEVWHDMTGNRSGTVTINQDGWGHFFVNGGSVSVWVKR

SEQ ID NO: 32453 - protein, 485 aa, Bacillus sp.
HHDGTNGTIMQYFEWNVPNDGQHWNRLHNNAQNLKNAGITAIWIPPAWKGTSQNDVGYGAYDLYDLGEFNQKGTVRTKYGTKAELERAIRSLKANGIQVYGDVVMNHKGGADFTERVQAVEVNPQNRNQEVSGTYQIEAWTGFNFPGRGNQHSSFKWRWYHFDGTDWDQSRQLANRIYKFRGDGKAWDWEVDTENGNYDYLMYADVDMDHPEVINELNRWGVWYANTLNLDGFRLDAVKHIKFSFMRDWLGHVRGQTGKNLFAVAEYWKNDLGALENYLSKTNWTMSAFDVPLHYNLYQASNSSGNYDMRNLLNGTLVQRHPSHAVTFVDNHDTQPGEALESFVQGWFKPLAYATILTREQGIPQVFYGDYYGIPSDGVPSYRQQIDPLLKARQQYAYGRQHDYFDHWDVIGWTREGNASHPNSGLATIMSDGPGGSKWMYVGRQKAGEVWHDMTGNRSGTVTINQDGWGHFFVNGGSVSVWVKR

SEQ ID NO: 32454 - protein, 485 aa, Bacillus sp.
HHDGTNGTIMQYFEWNVPNDGQHWNRLHNNAQNLKNAGITAIWIPPAWKGTSQNDVGYGAYDLYDLGEFNQKGTVRTKYGTKAELERAIRSLKANGIQVYGDVVMNHKGGADFTERVQAVEVNPQNRNQEVSGTYQIEAWTGFNFPGRGNQHSSFKWRWYHFDGTDWDQSRQLANRIYKFRGDGKAWDWEVDTENGNYDYLMYADVDMDHPEVINELNRWGVWYANTLNLDGFRLDAVKHIKFSFMRDWLGHVRGQTGKNLFAVAEYWKNDLGALENYLSKTNWTMSAFDVPLHYNLYQASNSSGNYDMRNLLNGTLVQRHPSHAVTFVDNHDTQPGEALESFVQGWFKPLAYATILTREQGYPQVFYRDYYGIPSDGVPSYRQQIDPLLKARQQYAYGRQHDYFDHWDVIGWTREGNASHPNSGLATIMSDGPGGSKWMYVGRQKAGEVWHDMTGNRSGTVTINQDGWGHFFVNGGSVSVWVKR

SEQ ID NO: 32455 - protein, 485 aa, Bacillus sp.
HHDGTNGTIMQYFEWNVPNDGQHWNRLHNNAQNLKNAGITAIWIPPAWKGTSQNDVGYGAYDLYDLGEFNQKGTVRTKYGTKAELERAIRSLKANGIQVYGDVVMNHKGGADFTERVQAVEVNPQNRNQEVSGTYQIEAWTGFNFPGRGNQHSSFKWRWYHFDGTDWDQSRQLANRIYKFRGDGKAWDWEVDTENGNYDYLMYADVDMDHPEVINELNRWGVWYANTLNLDGFRLDAVKHIKFSFMRDWLGHVRGQTGKNLFAVAEYWKNDLGALENYLSKTNWTMSAFDVPLHYNLYQASNSSGNYDMRNLLNGTLVQRHPSHAVTFVDNHDTQPGEALESFVQGWFKPLAYATILTREQGYPQVFYGDYYGIPSDGVPSYRQQIDPLLKARQQYAYGRQHDYFDHWDVIGWTREGNASAPNSGLATIMSDGPGGSKWMYVGRQKAGEVWHDMTGNRSGTVTINQDGWGHFFVNGGSVSVWVKR

SEQ ID NO: 32456 - protein, 485 aa, Bacillus sp.
HHDGTNGTIMQYFEWNVPNDGQHWNRLHNNAQNLKNAGITAIWIPPAWKGTSQNDVGYGAYDLYDLGEFNQKGTVRTKYGTKAELERAIRSLKANGIQVYGDVVMNHKGGADFTERVQAVEVNPQNRNQEVSGTYQIEAWTGFNFPGRGNQHSSFKWRWYHFDGTDWDQSRQLANRIYKFRGDGKAWDWEVDTENGNYDYLMYADVDMDHPEVINELNRWGVWYANTLNLDGFRLDAVKHIKFSFMRDWLGHVRGQTGKNLFAVAEYWKNDLGALENYLSKTNWTMQAFDVPLHYNLYQASNSSGNYDMRNLLNGTLVQRHPSHAVTFVDNHDTQPGEALESFVQGWFKPLAYATILTREQGYPQVFYGDYYGIPSDGVPSYRQQIDPLLKARQQYAYGRQHDYFDHWDVIGWTREGNASHPNSGLATIMSDGPGGSKWMYVGRQKAGEVWHDMTGNRSGTVTINQDGWGHFFVNGGSVSVWVKR

SEQ ID NO: 32457 - protein, 485 aa, Bacillus sp.
HHDGTNGTIMQYFEWNVPNDGQHWNRLHNNAQNLKNAGITAIWIPPAWKGTSQNDVGYGAYDLYDLGEFNQKGTVRTKYGTKAELERAIRSLKANGIQVYGDVVMNHKGGADFTERVQAVEVNPQNRNQEVSGTYQIEAWTGFNFPGRGNQHSSFKWRWYHFDGTDWDQSRQLANRIYKFRGDGKAWDWEVDTENGNYDYLMYADVDMDHPEVINELNRWGVWYANTLNLDGFRLDAVKHIKFSFMRDWLGHVRGQTGKNLFAVAEYWKNDLGALENYLSKTNWTMSAFDVPLHYNLYQASNSSGNYDMRNLLNGTLVQRHPSHAVTFVDNHDTQPGEALESFVQGWFKPLAYATILTREQGYPQVFYGDYYGIPSDGVPSYRQQIDPLLKARQQYAYGRQHEYFDHWDVIGWTREGNASHPNSGLATIMSDGPGGSKWMYVGRQKAGEVWHDMTGNRSGTVTINQDGWGHFFVNGGSVSVWVKR

SEQ ID NO: 32458 - protein, 485 aa, Bacillus sp.
HHDGTNGTIMQYFEWNVPNDGQHWNRLHNNAQNLKNAGITAIWIPPAWKGTSQNDVGYGAYDLYDLGEFNQKGTVRTKYGTKAELERAIRSLKANGIQVYGDVVMNHKGGADFTERVQAVEVNPQNRNQEVSGTYQIEAWTGFNFPGRGNQHSSFKWRWYHFDGTDWDQSRQLANRIYKFRGDGKAWDWEVDTENGNYDYLMYADVDCDHPEVINELNRWGVWYANTLNLDGFRLDAVKHIKFSFMRDWLGHVRGQTGKNLFAVAEYWKNDLGALENYLSKTNWTMSAFDVPLHYNLYQASNSSGNYDMRNLLNGTLVQRHPSHAVTFVDNHDTQPGEALESFVQGWFKPLAYATILTREQGYPQVFYGDYYGIPSDGVPSYRQQIDPLLKARQQYAYGRQHDYFDHWDVIGWTREGNASHPNSGLATIMSDGPGGSKWMYVGRQKAGEVWHDMTGNRSGTVTINQDGWGHFFVNGGSVSVWVKR

SEQ ID NO: 32459 - protein, 485 aa, Bacillus sp.
HHDGTNGTIMQYFEWNVPNDGQHWNRLHNNAQNLKNAGITAIWIPPAWKGTSQNDVGYGAYDLYDLGEFNQKGTVRTKYGTKAELERAIRSLKANGIQVYGDVVMNHKGGADFTERVQAVEVNPQNRNQEVSGTYQIEAWTGFNFPGRGNQHSSFKWRWYHFDGTDWDQSRQLANRIYKFRGDGKAWDWEVDTENGNYDYLMYADVDMDHPEVINELNRWGVWYANTLNLDGFRLDAVKHIKFSFMRDWLGHVRGQTGKNLFAVAEYWKNDLGALENYLSGTNWTMSAFDVPLHYNLYQASNSSGNYDMRNLLNGTLVQRHPSHAVTFVDNHDTQPGEALESFVQGWFKPLAYATILTREQGYPQVFYGDYYGIPSDGVPSYRQQIDPLLKARQQYAYGRQHDYFDHWDVIGWTREGNASHPNSGLATIMSDGPGGSKWMYVGRQKAGEVWHDMTGNRSGTVTINQDGWGHFFVNGGSVSVWVKR

SEQ ID NO: 32460 - protein, 485 aa, Bacillus sp.
HHDGTNGTIMQYFEWNVPNDGQHWNRLHNNAQNLKNAGIEAIWIPPAWKGTSQNDVGYGAYDLYDLGEFNQKGTVRTKYGTKAELERAIRSLKANGIQVYGDVVMNHKGGADFTERVQAVEVNPQNRNQEVSGTYQIEAWTGFNFPGRGNQHSSFKWRWYHFDGTDWDQSRQLANRIYKFRGDGKAWDWEVDTENGNYDYLMYADVDMDHPEVINELNRWGVWYANTLNLDGFRLDAVKHIKFSFMRDWLGHVRGQTGKNLFAVAEYWKNDLGALENYLSKTNWTMSAFDVPLHYNLYQASNSSGNYDMRNLLNGTLVQRHPSHAVTFVDNHDTQPGEALESFVQGWFKPLAYATILTREQGYPQVFYGDYYGIPSDGVPSYRQQIDPLLKARQQYAYGRQHDYFDHWDVIGWTREGNASHPNSGLATIMSDGPGGSKWMYVGRQKAGEVWHDMTGNRSGTVTINQDGWGHFFVNGGSVSVWVKR

SEQ ID NO: 32461 - protein, 485 aa, Bacillus sp.
HHDGTNGTIMQYFEWNVPNDGQHWNRLHNNAQNLKNAGITAIWIPPAWKGTSQNDVGYGAYDLYDLGEFNQKGTVRTKYGTKAELERAIRSLKANGIQVYGDVVMNHKGGADFTERVQAVEVNPQNRNQEVSGTYQIEAWTGFNFPGRGNQHSSFKWRWYHFDGTDWDQSRQLANRIYKFRGDGKAWDWEVDTENGNYDYLMYADVDMDHPEVINELNRWGVWYANTLNLDGFRLDAVKHIKFSFMRRWLGHVRGQTGKNLFAVAEYWKNDLGALENYLSKTNWTMSAFDVPLHYNLYQASNSSGNYDMRNLLNGTLVQRHPSHAVTFVDNHDTQPGEALESFVQGWFKPLAYATILTREQGYPQVFYGDYYGIPSDGVPSYRQQIDPLLKARQQYAYGRQHDYFDHWDVIGWTREGNASHPNSGLATIMSDGPGGSKWMYVGRQKAGEVWHDMTGNRSGTVTINQDGWGHFFVNGGSVSVWVKR

SEQ ID NO: 32462 - protein, 485 aa, Bacillus sp.
HHDGTNGTIMQYFEWNVPNDGQHWNRLHNNAQNLKNAGITAIWIPPAWKGTSQNDVGYGAYDLYDLGEFNQKGTVRTKYGTKAELERAIRSLKANGIQVYGDVVMNHKGGADFTERVQAVEVNPQNRNQEVSGTYQIEAWTGFNFPGRGNQHSSFKWRWYHFDGTDWDQSRQLANRIYKFRGDGKAWDWEVDTENGNYDYLMYADVDMDHPEVINELNRWGVWYANTLNLDGFRLDAVKHIKFSFMRDWLGHVRGQTGKNLFAVAEYWKNDLGALENYLSKTNWTMSAFDVPLHYNLYQASNSSGNYDMRNLLNGTLVQRHPSHAVTFVDNHDTQRGEALESFVQGWFKPLAYATILTREQGYPQVFYGDYYGIPSDGVPSYRQQIDPLLKARQQYAYGRQHDYFDHWDVIGWTREGNASHPNSGLATIMSDGPGGSKWMYVGRQKAGEVWHDMTGNRSGTVTINQDGWGHFFVNGGSVSVWVKR

SEQ ID NO: 32463 - protein, 485 aa, Bacillus sp.
HHNGTNGTMMQYFEWYLPNDGNHWNRLNSDASNLKSKGIKAVWIPPAWKGASQNDVGYGAYDLYDLGEFNQRGTVRTKYGTRSQLQAAVTSLKNNGIQVYGDVVMNHKGGADATEMVRAVEVNPNNRNQEVTGEYTIEAWTRFDFPGRGNTHSSFKWRWYHFDGVDFDQSRRLNNRIYKFRGHGKAWDWEVDTEFGNYDYLMYADYDYDHPETTNEMRNWGVWYTNTLGLDGFRIDAVKHIKYSFTRDWINHVRSATGKNMFAVAEFWKNDLGAIENYLQKTNWNHSVFDVPLHYNLYNASKSGGNYDMRNIFNGTVVQAHPSQAVTFVDNHDSQPEEALESFVEEWFKPLAYALTLTREQGYPSVFYGDYYGIPTHGVPAMRSKIDPILEARQKYAYGPQHDYLDHPDVIGWTREGDSSHPKSGLATLITDGPGGSKRMYAGLKNAGETWYDITGNRSDTVKIGSDGWGEFHVNDGSVSIYVQK

SEQ ID NO: 32464 - protein, 485 aa, Bacillus sp.
HHDGTNGTIMQYFEWNVPNDGQHWNRLHNNAQNLKNAGITAIWIPPAWKGTSQNDVGYGAYDLYDLGEFNQKGTVRTKYGTKAELERAIRSLKANGIQVYGDVVMNHKGGADFTERVQAVEVNPQNRNQEVSGTYQIEAWTGFNFPGRGNQHSSFKWRWYHFDGTDWDQSRQLANRIYKFRGDGKAWDWEVDTENGNYDYLMYADVDMDHPYVINELNRWGVWYANTLNLDGFRLDAVKHIKFSFMRDWLGHVRGQTGKNLFAVAEYWKNDLGALENYLSKTNWTMSAFDVPLHYNLYQASNSSGNYDMRNLLNGTLVQRHPSHAVTFVDNHDTQPGEALESFVQGWFKPLAYATILTREQGYPQVFYGDYYGIPSDGVPSYRQQIDPLLKARQQYAYGRQHDYFDHWDVIGWTREGNASHPNSGLATIMSDGPGGSKWMYVGRQKAGEVWHDMTGNRSGTVTINQDGWGHFFVNGGSVSVWVKR

SEQ ID NO: 32465 - protein, 485 aa, Bacillus sp.
HHDGTNGTIMQYFEWNVPNDGQHWNRLHNNAQNLKNAGITAIWIPPAWKGTSQNDVGYGAYDLYDLGEFNQKGTVRTKYGTKAELERAIRSLKANGIQVYGDVVMNHKGGADFTERVQAVEVNPQNRNQEVSGTYQIEAWTGFNFPGRGNQHSSFKWRWYHFDGTDWDQSRQLANRIYKFRGDGKAWDWEVDTENGNYDYLMYADVDMDHPEVINELNRWGVWYANTLNLDGFRLDAVKHIKFSFMRDWLGHVRGQTGKNLFAVAEYWKNDLGALENYLSKTNWTMSAFDVALHYNLYQASNSSGNYDMRNLLNGTLVQRHPSHAVTFVDNHDTQPGEALESFVQGWFKPLAYATILTREQGYPQVFYGDYYGIPSDGVPSYRQQIDPLLKARQQYAYGRQHDYFDHWDVIGWTREGNASHPNSGLATIMSDGPGGSKWMYVGRQKAGEVWHDMTGNRSGTVTINQDGWGHFFVNGGSVSVWVKR

SEQ ID NO: 32466 - protein, 485 aa, Bacillus sp.
HHDGTNGTIMQYFEWNVPNDGQHWNRLHNNAQNLKNAGITAIWIPPAWKGTSQNDVGYGAYDLVDLGEFNQKGTVRTKYGTKAELERAIRSLKANGIQVYGDVVMNHKGGADFTERVQAVEVNPQNRNQEVSGTYQIEAWTGFNFPGRGNQHSSFKWRWYHFDGTDWDQSRQLANRIYKFRGDGKAWDWEVDTENGNYDYLMYADVDMDHPEVINELNRWGVWYANTLNLDGFRLDAVKHIKFSFMRDWLGHVRGQTGKNLFAVAEYWKNDLGALENYLSKTNWTMSAFDVPLHYNLYQASNSSGNYDMRNLLNGTLVQRHPSHAVTFVDNHDTQPGEALESFVQGWFKPLAYATILTREQGYPQVFYGDYYGIPSDGVPSYRQQIDPLLKARQQYAYGRQHDYFDHWDVIGWTREGNASHPNSGLATIMSDGPGGSKWMYVGRQKAGEVWHDMTGNRSGTVTINQDGWGHFFVNGGSVSVWVKR

SEQ ID NO: 32467 - protein, 485 aa, Bacillus sp.
HHDGTNGTIMQYFEWNVPNDGQHWNRLHNNAQNLKNAGITAIWIPPAWKGTSQNDVGYGAYDLYDLGEFNQKGTVRTKYGTKAELERAIRSLKANGIQVYGDVVMNHKGGADFTERVQAIEVNPQNRNQEVSGTYQIEAWTGFNFPGRGNQHSSFKWRWYHFDGTDWDQSRQLANRIYKFRGDGKAWDWEVDTENGNYDYLMYADVDMDHPEVINELNRWGVWYANTLNLDGFRLDAVKHIKFSFMRDWLGHVRGQTGKNLFAVAEYWKNDLGALENYLSKTNWTMSAFDVPLHYNLYQASNSSGNYDMRNLLNGTLVQRHPSHAVTFVDNHDTQPGEALESFVQGWFKPLAYATILTREQGYPQVFYGDYYGIPSDGVPSYRQQIDPLLKARQQYAYGRQHDYFDHWDVIGWTREGNASHPNSGLATIMSDGPGGSKWMYVGRQKAGEVWHDMTGNRSGTVTINQDGWGHFFVNGGSVSVWVKR

SEQ ID NO: 32468 - protein, 485 aa, Bacillus sp.
HHDGTNGTIMQYFEWNVPNDGQHWNRLHNNAQNLKNAGITALWIPPAWKGTSQNDVGYGAYDLYDLGEFNQKGTVRTKYGTKAELERAIRSLKANGIQVYGDVVMNHKGGADFTERVQAVEVNPQNRNQEVSGTYQIEAWTGFNFPGRGNQHSSFKWRWYHFDGTDWDQSRQLANRIYKFRGDGKAWDWEVDTENGNYDYLMYADVDMDHPEVINELNRWGVWYANTLNLDGFRLDAVKHIKFSFMRDWLGHVRGQTGKNLFAVAEYWKNDLGALENYLSKTNWTMSAFDVPLHYNLYQASNSSGNYDMRNLLNGTLVQRHPSHAVTFVDNHDTQPGEALESFVQGWFKPLAYATILTREQGYPQVFYGDYYGIPSDGVPSYRQQIDPLLKARQQYAYGRQHDYFDHWDVIGWTREGNASHPNSGLATIMSDGPGGSKWMYVGRQKAGEVWHDMTGNRSGTVTINQDGWGHFFVNGGSVSVWVKR

SEQ ID NO: 32469 - protein, 485 aa, Bacillus sp.
HHDGTNGTIMQYFEWNVPNDGQHWNRLHNNAQNLKNAGITAIWIPPAWKGTSQNDVGYGAYDLYDLGEFNQKGTVRTKYGTKAELERAIRSLKANGIQTYGDVVMNHKGGADFTERVQAVEVNPQNRNQEVSGTYQIEAWTGFNFPGRGNQHSSFKWRWYHFDGTDWDQSRQLANRIYKFRGDGKAWDWEVDTENGNYDYLMYADVDMDHPEVINELNRWGVWYANTLNLDGFRLDAVKHIKFSFMRDWLGHVRGQTGKNLFAVAEYWKNDLGALENYLSKTNWTMSAFDVPLHYNLYQASNSSGNYDMRNLLNGTLVQRHPSHAVTFVDNHDTQPGEALESFVQGWFKPLAYATILTREQGYPQVFYGDYYGIPSDGVPSYRQQIDPLLKARQQYAYGRQHDYFDHWDVIGWTREGNASHPNSGLATIMSDGPGGSKWMYVGRQKAGEVWHDMTGNRSGTVTINQDGWGHFFVNGGSVSVWVKR

SEQ ID NO: 32470 - protein, 485 aa, Bacillus sp.
HHDGTNGTIMQYFEWNVPNDGQHWNRLHNNAQNLKNAGITAIWIPPAWKGTSQNDVGYGAYDLYDLGEFNQKGTVRTKYGTKAELERAIRSLKANGIQVYGDVVMNHKGGADFTERVQAVEVNPQNRNQEVSGTYQIEAWTGFNFPGRGNQHSSFKWRWYHFDGTTWDQSRQLANRIYKFRGDGKAWDWEVDTENGNYDYLMYADVDMDHPEVINELNRWGVWYANTLNLDGFRLDAVKHIKFSFMRDWLGHVRGQTGKNLFAVAEYWKNDLGALENYLSKTNWTMSAFDVPLHYNLYQASNSSGNYDMRNLLNGTLVQRHPSHAVTFVDNHDTQPGEALESFVQGWFKPLAYATILTREQGYPQVFYGDYYGIPSDGVPSYRQQIDPLLKARQQYAYGRQHDYFDHWDVIGWTREGNASHPNSGLATIMSDGPGGSKWMYVGRQKAGEVWHDMTGNRSGTVTINQDGWGHFFVNGGSVSVWVKR

SEQ ID NO: 32471 - protein, 485 aa, Bacillus sp.
HHDGTNGTIMQYFEWNVPNDGQHWNRLHNNAQNLKNAGITAIWIPPAWKGTSQNDVGYGAYDLYDLGEFNQKGTVRTKYGTKAELERAIRSLKANGIQVYGDVVMNHKGGADFTERVQAVEVNPQNRNQEVSGTYQIEAWTGFNFPGRGNQHSSFKWRWYHFDGTDWDQSRQLANRIYKFRGDGKAWDWEVDTENGNYDYLMYADVDMDHPEVINELNRWGVYYANTLNLDGFRLDAVKHIKFSFMRDWLGHVRGQTGKNLFAVAEYWKNDLGALENYLSKTNWTMSAFDVPLHYNLYQASNSSGNYDMRNLLNGTLVQRHPSHAVTFVDNHDTQPGEALESFVQGWFKPLAYATILTREQGYPQVFYGDYYGIPSDGVPSYRQQIDPLLKARQQYAYGRQHDYFDHWDVIGWTREGNASHPNSGLATIMSDGPGGSKWMYVGRQKAGEVWHDMTGNRSGTVTINQDGWGHFFVNGGSVSVWVKR

SEQ ID NO: 32472 - protein, 485 aa, Bacillus sp.
HHDGTNGTIMQYFEWNVPNDGQHWNRLHNNAQNLKNAGITAIWIPPAWKGTSQNDVGYGAYDLYDLGEFNQKGTVRTKYGTKAELERAIRSLKANGIQVYGDVVMNHKGGADFTERVQAVEVNPQNRNQEVSGTYQIEAWTGFNFPGRGNQHSSFKWRWYHFDGTDWDQSRQLANRIYKFRGDGKAWDWEVDTENGNYDYLMYADVDMDHPEVINELNRWGVWYANTLNLDGFRLDAVKHIKFSFMRDWLGHVRGQTGKNLFAVAEYWKNDLGALENYLSKTNWTMSAFDVPLHYNLYQASNSSGNYDMRNLLNGTLVQRHPSHAVTFVDNHDTQPGEALESFVQGWFKPLAYATILTREQGYPQVFYGDYYGIPSDGVPSYRQQIDPLLKARQQYAYGRQHDYFDHWDVIGWTREGNASHPNSGLATIMSDGPGGSKWMYVGRQKAGEVWHDMTGNRSGTVDINQDGWGHFFVNGGSVSVWVKR

SEQ ID NO: 32473 - protein, 485 aa, Bacillus sp.
HHDGTNGTIMQYFEWNVPNDGQHWNRLHNNAQNLKNAGITAIWIPPAWKGTSQNDVGYGAYDLYDLGEFNQKGTVRTKYGTKAELERAIRSLKANGIQVYGDVVMNHKGGADFTERMQAVEVNPQNRNQEVSGTYQIEAWTGFNFPGRGNQHSSFKWRWYHFDGTDWDQSRQLANRIYKFRGDGKAWDWEVDTENGNYDYLMYADVDMDHPEVINELNRWGVWYANTLNLDGFRLDAVKHIKFSFMRDWLGHVRGQTGKNLFAVAEYWKNDLGALENYLSKTNWTMSAFDVPLHYNLYQASNSSGNYDMRNLLNGTLVQRHPSHAVTFVDNHDTQPGEALESFVQGWFKPLAYATILTREQGYPQVFYGDYYGIPSDGVPSYRQQIDPLLKARQQYAYGRQHDYFDHWDVIGWTREGNASHPNSGLATIMSDGPGGSKWMYVGRQKAGEVWHDMTGNRSGTVTINQDGWGHFFVNGGSVSVWVKR

SEQ ID NO: 32474 - protein, 485 aa, Bacillus sp.
HHDGTNGTIMQYFEWNVPNDGQHWNRLHNNAQNLKNAGITAIWIPPAWKGTSQNDVGYGAYDLYDLGEFNQKGTVRTKYGTKAELERAIRSLKANGIQVYGDVVMNHKGGADFTERVQAVEVNPQNRNQEVSGTYQIEAWTGFNFPGRGNQHSSFKWRWYHFDGTDWDQSRQLANRIYKFRGDGKAWDWEVDTENGNYDYLMYADVDMDHPEVINELNRWGVWYANTLNLDGFRLDAVKHIKFSFMRDWLGHVRGQTGKNLFAVAEYWKNDLGALENYLSKTNWTMSAFDVPLHYNLYQASNSSGNYDMRNFLNGTLVQRHPSHAVTFVDNHDTQPGEALESFVQGWFKPLAYATILTREQGYPQVFYGDYYGIPSDGVPSYRQQIDPLLKARQQYAYGRQHDYFDHWDVIGWTREGNASHPNSGLATIMSDGPGGSKWMYVGRQKAGEVWHDMTGNRSGTVTINQDGWGHFFVNGGSVSVWVKR

SEQ ID NO: 32475 - protein, 485 aa, Bacillus sp.
HHDGTNGTIMQYFEWNVPNDGQHWNRLHNNAQNLKNAGITAIWIPPAWKGTSQNDVGYGAYDLYDLGEFNQKGTVRTKYGTKAELERAIRSLKANGIQVYGDVVMNHKGGADFTERVQAVEVNPQNRNQEVSGTYQIEAWTGFNFPGRGNQHSSFKWRWYHFDGTDWDQSRQLANRIYKFRGDGKSWDWEVDTENGNYDYLMYADVDMDHPEVINELNRWGVWYANTLNLDGFRLDAVKHIKFSFMRDWLGHVRGQTGKNLFAVAEYWKNDLGALENYLSKTNWTMSAFDVPLHYNLYQASNSSGNYDMRNLLNGTLVQRHPSHAVTFVDNHDTQPGEALESFVQGWFKPLAYATILTREQGYPQVFYGDYYGIPSDGVPSYRQQIDPLLKARQQYAYGRQHDYFDHWDVIGWTREGNASHPNSGLATIMSDGPGGSKWMYVGRQKAGEVWHDMTGNRSGTVTINQDGWGHFFVNGGSVSVWVKR

SEQ ID NO: 32476 - protein, 485 aa, Bacillus sp.
HHDGTNGTIMQYFEWNVPNDGQHWNRLHNNAQNLKNAGITAIWIPPAWKGTSQNDVGYGAYDLYDLGEFNQKGTVRTKYGTKAELERAIRSLKANGIQVYGDVVMNHKGGADFTERVQAVEVNPQNRNQEVSGTYQIEAWTGFNFPGRGNQHSSFKWRWYHFDGTDWDQSRQLANRIYKFRGDGKAWDWEVDTENGNYDYLMYADVDMDHPEVINELNRWGVWYANTLNLDGFRLDAVKHIKFSFMRDWLGHVRGQTGKNLFAVAEYWKNDLGALENYLSKTNWTMSAFDVPLHYNLYQASNSSGNYDMRNLLNGTLVQRHPSHAVTFVDNHDTQPGEALESFVQGWFKPLAYATILTREQGYPQVFYGDYYGIPSDGVPSYRQQTDPLLKARQQYAYGRQHDYFDHWDVIGWTREGNASHPNSGLATIMSDGPGGSKWMYVGRQKAGEVWHDMTGNRSGTVTINQDGWGHFFVNGGSVSVWVKR

SEQ ID NO: 32477 - protein, 485 aa, Bacillus sp.
HHDGTNGTIMQYFEWNVPNDGQHWNRLHNNAQNLKNAGITAIWIPPAWKGTSQNDVGYGAYDLYDLGEFNQKGTVRTKYGTKAELERAIRSLKANGIQVYGDVVMNHKGGADFTERVQAVEVNPQNRNQEVSGTYQIEAWTGFNFPGRGNQHSSFKWRWYHFDGTDWDQSRQLANRIYKFRGDGKAWDWEVDTENGNYDYLMYADVDMDHPEVINELNRWGVWYANTLNLDGFRLDAVKHIKFSFMRDWLGHVRGQTGKNLFAVAEYWKNDLGALENYLSKTNSTMSAFDVPLHYNLYQASNSSGNYDMRNLLNGTLVQRHPSHAVTFVDNHDTQPGEALESFVQGWFKPLAYATILTREQGYPQVFYGDYYGIPSDGVPSYRQQIDPLLKARQQYAYGRQHDYFDHWDVIGWTREGNASHPNSGLATIMSDGPGGSKWMYVGRQKAGEVWHDMTGNRSGTVTINQDGWGHFFVNGGSVSVWVKR

SEQ ID NO: 32478 - protein, 485 aa, Bacillus sp.
HHDGTNGTIMQYFEWNVPNDGQHWNRLHNNAQNLKNAGITAIWIPPAWKGTSQNDVGYGAYDLYDLGEFNQKGTVRTKYGTKAELERAIRSLKANGIQVYGDVVMNHKGGADFTERVQAVEVNPQNRNQEVSGTYQIEAWTGFNFPGRGNQHSSFKWRWYHFDGTDWDQSRQLANRIYKFRGDGKAWDWEVDTENGNYDYLMYADVDMDHPEVINELNRWGVWYANTLNLDGFRLDAVKHIKFSFMRDWLGWVRGQTGKNLFAVAEYWKNDLGALENYLSKTNWTMSAFDVPLHYNLYQASNSSGNYDMRNLLNGTLVQRHPSHAVTFVDNHDTQPGEALESFVQGWFKPLAYATILTREQGYPQVFYGDYYGIPSDGVPSYRQQIDPLLKARQQYAYGRQHDYFDHWDVIGWTREGNASHPNSGLATIMSDGPGGSKWMYVGRQKAGEVWHDMTGNRSGTVTINQDGWGHFFVNGGSVSVWVKR

SEQ ID NO: 32479 - protein, 485 aa, Bacillus sp.
HHDGTNGTIMQYFEWNVPNDGQHWNRLHNNAQNLKNAGITAIWIPPAWKGTSQNDVGYGAYDLYDLGEFNQKGTVRTKYGTKAELERAIRSLKANGIQVYGDVVMNHKGGADFTERVQAVEVNPQNRNQEVSGTYQIEAWTGFNFPGRGNQHSSFKWRWYHFDGTDWDQSRQLANRIYKFRGDGKAWDWEVDTENGNYDYLMCADVDMDHPEVINELNRWGVWYANTLNLDGFRLDAVKHIKFSFMRDWLGHVRGQTGKNLFAVAEYWKNDLGALENYLSKTNWTMSAFDVPLHYNLYQASNSSGNYDMRNLLNGTLVQRHPSHAVTFVDNHDTQPGEALESFVQGWFKPLAYATILTREQGYPQVFYGDYYGIPSDGVPSYRQQIDPLLKARQQYAYGRQHDYFDHWDVIGWTREGNASHPNSGLATIMSDGPGGSKWMYVGRQKAGEVWHDMTGNRSGTVTINQDGWGHFFVNGGSVSVWVKR

SEQ ID NO: 32480 - protein, 485 aa, Bacillus sp.
HHDGTNGTIMQYFEWNVPNDGQHWNRLHNNAQNLKNAGITAIWIPPAWKGTSQNDVGYGAYDLYDLGEFNQKGTVRTKYGTKAELERAIRSLKANGIQVYGDVVMNHKGGADFTERVQAVEVNPQNRNQEVSGTYQIEAWTGFNFPGRGNQHSSFKWLWYHFDGTDWDQSRQLANRIYKFRGDGKAWDWEVDTENGNYDYLMYADVDMDHPEVINELNRWGVWYANTLNLDGFRLDAVKHIKFSFMRDWLGHVRGQTGKNLFAVAEYWKNDLGALENYLSKTNWTMSAFDVPLHYNLYQASNSSGNYDMRNLLNGTLVQRHPSHAVTFVDNHDTQPGEALESFVQGWFKPLAYATILTREQGYPQVFYGDYYGIPSDGVPSYRQQIDPLLKARQQYAYGRQHDYFDHWDVIGWTREGNASHPNSGLATIMSDGPGGSKWMYVGRQKAGEVWHDMTGNRSGTVTINQDGWGHFFVNGGSVSVWVKR

SEQ ID NO: 32481 - protein, 485 aa, Bacillus sp.
HHDGTNGTIMQYFEWNVPNDGQHWNRLHNNAQNLKNAGITAIWIPPAWKGTSQNDVGYGAYDLYDLGEFNQKGTVRTKYGTKAELERAIRSLKANGIQVYGDVVMNHKGGADFTERVQAVEVNPQNRNQEVSGTYQIEAWTGFNFPGRGNQHSSFKWRWYHFDGTDWDQSRQLANRIYKFRGDGKAWDWEVDTERGNYDYLMYADVDMDHPEVINELNRWGVWYANTLNLDGFRLDAVKHIKFSFMRDWLGHVRGQTGKNLFAVAEYWKNDLGALENYLSKTNWTMSAFDVPLHYNLYQASNSSGNYDMRNLLNGTLVQRHPSHAVTFVDNHDTQPGEALESFVQGWFKPLAYATILTREQGYPQVFYGDYYGIPSDGVPSYRQQIDPLLKARQQYAYGRQHDYFDHWDVIGWTREGNASHPNSGLATIMSDGPGGSKWMYVGRQKAGEVWHDMTGNRSGTVTINQDGWGHFFVNGGSVSVWVKR

SEQ ID NO: 32482 - protein, 485 aa, Bacillus sp.
HHDGTNGTIMQYFEWNVPNDGQHWNRLHNNAQNLKNAGITAIWIPPAWKGTSQNDVGYGAYDLYDLGEFNQKGTVRTKYGTKAELERAIRSLKANGIQVYGDVVMNHKGGADFTERVQAVEVNPQNRNQEVSGTYQIEAWTGFNFPGRGNQHSSFKWRWYHFDGTDWDQSRQLANRIYKFRGDGKAWDWEVDTENGNYDYLMYADVDMDHPEVINELNRWGVWYANTLNLDGFRLDAVKHIKFSFMRDWLGHVRGQTGKNLFAVAEYWKNDLGALENYLSKTNWTMSAFDVPLHYNLYQASNSSGNYDMRNLLNGTLVQRHPSHAVTFVDNHDTQPGEALESFVQGWFKPHAYATILTREQGYPQVFYGDYYGIPSDGVPSYRQQIDPLLKARQQYAYGRQHDYFDHWDVIGWTREGNASHPNSGLATIMSDGPGGSKWMYVGRQKAGEVWHDMTGNRSGTVTINQDGWGHFFVNGGSVSVWVKR

SEQ ID NO: 32483 - protein, 485 aa, Bacillus sp.
HHDGTNGTIMQYFEWNVPNDGQHWNRLHNNAQNLKNAGITAIWIPPAWKGTSQNDVGYGAYDLYDLGEFNQKGTVRTKYGTKAELERAIRSLKANGIQVYGDVVMNHKGGADFTERVQAVEVNPQNRNQEVSGTYQIEAWTGFNFPGRGNQHSSFKWRWYHFDGTDWDQSRQLANRIYKFRGDGKAWDWEVDTENGNYDYLMYADVDMDHPEVINELNRWGVWYANTLNLDGFRLDAVKHIKFSFMRDWLGHVRGQTGKNLFAVAEYWKNDLGALENYLSKTNWTMSAFDVPLHYNLYQASNSSGNYDMRNLLNGTLVQRHPSHAVTFVDNHDTQPGEALESFVQGWFKPLAYATILTRGQGYPQVFYGDYYGIPSDGVPSYRQQIDPLLKARQQYAYGRQHDYFDHWDVIGWTREGNASHPNSGLATIMSDGPGGSKWMYVGRQKAGEVWHDMTGNRSGTVTINQDGWGHFFVNGGSVSVWVKR

SEQ ID NO: 32484 - protein, 485 aa, Bacillus sp.
HHDGTNGTIMQYFEWNVPNDGQHWNRLHNNAQNLKNAGITAIWIPPAWKGTSQNDVGYGAYDLYDLGEFNQKGTVRTKYGTKAELERAIRSLKANGIQVYGDVVMNHKGGADFTERVQAVEVNPQNRNQEVSGTYQIEAWTGFNFPGRGNQHSSFKWRWYHFDGTDWDQSRQLANRIYKFRGDGKAWDWEVDTENGNYDYLMYADVDMDHPEVINELNRWGVWYANTLNLDGFRLDAVKHIKFSFMRDWLGHVRGQTGKNLFAVAEYWKNDLGALENYLSKTNWTMSAFDVPLHYNLYQASNSSVNYDMRNLLNGTLVQRHPSHAVTFVDNHDTQPGEALESFVQGWFKPLAYATILTREQGYPQVFYGDYYGIPSDGVPSYRQQIDPLLKARQQYAYGRQHDYFDHWDVIGWTREGNASHPNSGLATIMSDGPGGSKWMYVGRQKAGEVWHDMTGNRSGTVTINQDGWGHFFVNGGSVSVWVKR

SEQ ID NO: 32485 - protein, 485 aa, Bacillus sp.
HHDGTNGTIMQYFEWNVPNDGQHWNRLHNNAQNLKNAGITAIWIPPAWKGTVQNDVGYGAYDLYDLGEFNQKGTVRTKYGTKAELERAIRSLKANGIQVYGDVVMNHKGGADFTERVQAVEVNPQNRNQEVSGTYQIEAWTGFNFPGRGNQHSSFKWRWYHFDGTDWDQSRQLANRIYKFRGDGKAWDWEVDTENGNYDYLMYADVDMDHPEVINELNRWGVWYANTLNLDGFRLDAVKHIKFSFMRDWLGHVRGQTGKNLFAVAEYWKNDLGALENYLSKTNWTMSAFDVPLHYNLYQASNSSGNYDMRNLLNGTLVQRHPSHAVTFVDNHDTQPGEALESFVQGWFKPLAYATILTREQGYPQVFYGDYYGIPSDGVPSYRQQIDPLLKARQQYAYGRQHDYFDHWDVIGWTREGNASHPNSGLATIMSDGPGGSKWMYVGRQKAGEVWHDMTGNRSGTVTINQDGWGHFFVNGGSVSVWVKR

SEQ ID NO: 32486 - protein, 485 aa, Bacillus sp.
HHDGTNGTIMQYFEWNVPNDGQHWNRLHNNAQNLKNAGITAIWIPPAWKGTSQNDVGYGAYDLYDLGEFNQKGTVRTKYGTKAELERAIRSLKANGIQVYGDVVMNHKGGADFTERVQAVEVNPQNRNQEVSGTYQIEAWTGFNFPGRGNQHSSFKWRWYHFDGTDWDQSRQLANTIYKFRGDGKAWDWEVDTENGNYDYLMYADVDMDHPEVINELNRWGVWYANTLNLDGFRLDAVKHIKFSFMRDWLGHVRGQTGKNLFAVAEYWKNDLGALENYLSKTNWTMSAFDVPLHYNLYQASNSSGNYDMRNLLNGTLVQRHPSHAVTFVDNHDTQPGEALESFVQGWFKPLAYATILTREQGYPQVFYGDYYGIPSDGVPSYRQQIDPLLKARQQYAYGRQHDYFDHWDVIGWTREGNASHPNSGLATIMSDGPGGSKWMYVGRQKAGEVWHDMTGNRSGTVTINQDGWGHFFVNGGSVSVWVKR

SEQ ID NO: 32487 - protein, 483 aa, Bacillus sp.
HHDGTNGTIMQYFEWNVPNDGQHWNRLHNNAQNLKNAGITAIWIPPAWKGTSQNDVGYGAYDLYDLGEFNQKGTVRTKYGTKAELERAIRSLKANGIQVYGDVVMNHKGGADFTERVQAVEVNPQNRNQEVSGTYQIEAWTGFNFPGRGNQHSSFKWRWYHFDGTDWDQSRQLANRIYKFRGKAWDWEVDTEFGNYDYLLYADLDMDHPEVINELNRWGVWYANTLNLDGFRLDAVKHIKFSFMRDWLGHVRGQTGKNLFAVAEYWKNDLGALENYLSKTNWTMSAFDVPLHYNLYQASNSSGNYDMRNLLNGTLVQKHPSHAVTFVDNHDTQPGEALESFVQGWFKPLAYATILTREQGYPQVFYGDYYGIPSDGVPSYRQQIDPLLKARQQYAYGRQHDYFDHWDVIGWTREGNASHPNSGLATIMSDGPGGSKWMYVGRQKAGEVWHDMTGNKSGTVTINQDGWGHFFVNGGSVSVWVKR

SEQ ID NO: 32488 - protein, 485 aa, Bacillus sp.
HHDGTNGTIMQYFEWNVPNDGQHWNRLHNNAQNLKNAGITAIWIPPAWKGTSQLDVGYGAYDLYDLGEFNQKGTVRTKYGTKAELERAIRSLKANGIQVYGDVVMNHKGGADFTERVQAVEVNPQNRNQEVSGTYQIEAWTGFNFPGRGNQHSSFKWRWYHFDGTDWDQSRQLANRIYKFRGDGKAWDWEVDTENGNYDYLMYADVDMDHPEVINELNRWGVWYANTLNLDGFRLDAVKHIKFSFMRDWLGHVRGQTGKNLFAVAEYWKNDLGALENYLSKTNWTMSAFDVPLHYNLYQASNSSGNYDMRNLLNGTLVQRHPSHAVTFVDNHDTQPGEALESFVQGWFKPLAYATILTREQGYPQVFYGDYYGIPSDGVPSYRQQIDPLLKARQQYAYGRQHDYFDHWDVIGWTREGNASHPNSGLATIMSDGPGGSKWMYVGRQKAGEVWHDMTGNRSGTVTINQDGWGHFFVNGGSVSVWVKR

SEQ ID NO: 32489 - protein, 485 aa, Bacillus sp.
HHDGTNGTIMQYFEWNVPNDGQHWNRLHNNAQNLKNAGITAIWIPPAWKGTSQNDVGYGAYDLYDLGEFNQKGTVRTKYGTKAELERAIRSLKANGIQVYGDVVMNHKGGADFTERVQAVEVNPQNRNQEVSGTYQIEAWTGFNFPGRGNQHSSFKWRWYHFDGTDWDQSRQLANRIYKFRGDGKAWDWEVDTENGNYDYLMYADVDMDHPEVINELNRWGVWYANTLNLDGFRLDAVKHIKFSFMRDWLGHVRGQTGKPLFAVAEYWKNDLGALENYLSKTNWTMSAFDVPLHYNLYQASNSSGNYDMRNLLNGTLVQRHPSHAVTFVDNHDTQPGEALESFVQGWFKPLAYATILTREQGYPQVFYGDYYGIPSDGVPSYRQQIDPLLKARQQYAYGRQHDYFDHWDVIGWTREGNASHPNSGLATIMSDGPGGSKWMYVGRQKAGEVWHDMTGNRSGTVTINQDGRGHFFVNGGSVSVWVKR

SEQ ID NO: 32490 - protein, 485 aa, Bacillus sp.
HHDGTNGTIMQYFEWNVPNDGQHWNRLHNNAQNLKNAGITAIWIPPAWKGTSQNDVGYGAYDLYDLGEFNQKGTVRTKYGTKAELERAIRSLKANGIQVYGDVVMNHKGGADFTERVQAVEVNPQNRNQEVSGTYQIEAWTGFNFPGRGNQHSSFKWRWYHFDGTDWDQSRQLANRIYKFRGDGKAWDWEVDTENGNYDYLMYADVDMDHPEVINELNRWGVWYANTLNLDGFRLDAVKHIKFSFMRDWLGHVRGQTGKNLFAVAEYWQNDLGALENYLSKTNWTMSAFDVPLHYNLYQASNSSGNYDMRNLLNGTLVQRHPSHAVTFVDNHDTQPGEALESFVQGWFKPLAYATILTREQGYPQVFYGDYYGIPSDGVPSYRQQIDPLLKARQQYAYGRQHDYFDHWDVIGWTREGNASHPNSGLATIMSDGPGGSKWMYVGRQKAGEVWHDMTGNRSGTVTINQDGWGHFFVNGGSVSVWVKR

SEQ ID NO: 32491 - protein, 485 aa, Bacillus sp.
HHDGTNGTIMQYFEWNVPNDGQHWNRLHNNAQNLKNAGITAIWIPPAWKGTSQNDVGYGAYDLYDLGEFNQKGTVRTKYGTKAELERAIRSLKANGIQVYGDVVMNHKGGADFTERVQAVEVNPQNRNQEVSGTYQIEAWTGFNFPGRGNQHSSFKWRWYHFDGTDWDQSRQLANRIYKFRGDGKAWDWEVDTENGNYDYLMYADVDMDHPEVINEANRWGVWYANTLNLDGFRLDAVKHIKFSFMRDWLGHVRGQTGKNLFAVAEYWKNDLGALENYLSKTNWTMSAFDVPLHYNLYQASNSSGNYDMRNLLNGTLVQRHPSHAVTFVDNHDTQPGEALESFVQGWFKPLAYATILTREQGYPQVFYGDYYGIPSDGVPSYRQQIDPLLKARQQYAYGRQHDYFDHWDVIGWTREGNASHPNSGLATIMSDGPGGSKWMYVGRQKAGEVWHDMTGNRSGTVTINQDGWGHFFVNGGSVSVWVKR

SEQ ID NO: 32492 - protein, 485 aa, Bacillus sp.
HHDGTNGTIMQYFEWNVPNDGQHWNRLHNNAQNLKNAGITAIWIPPAWKGTSQNDVGYGAYDLYDLGEFNQKGTVRTKYGTKAELERAIRSLKANGIQVYGDVVMNHKGGADFTERVQAVEVNPQNRNQEVSGTDQIEAWTGFNFPGRGNQHSSFKWRWYHFDGTDWDQSRQLANRIYKFRGDGKAWDWEVDTENGNYDYLMYADVDMDHPEVINELNRWGVWYANTLNLDGFRLDAVKHIKFSFMRDWLGHVRGQTGKNLFAVAEYWKNDLGALENYLSKTNWTMSAFDVPLHYNLYQASNSSGNYDMRNLLNGTLVQRHPSHAVTFVDNHDTQPGEALESFVQGWFKPLAYATILTREQGYPQVFYGDYYGIPSDGVPSYRQQIDPLLKARQQYAYGRQHDYFDHWDVIGWTREGNASHPNSGLATIMSDGPGGSKWMYVGRQKAGEVWHDMTGNRSGTVTINQDGWGHFFVNGGSVSVWVKR

SEQ ID NO: 32493 - protein, 485 aa, Bacillus sp.
HHDGTNGTIMQYFEWNVPNDGQHWNRLHNNAQNLKNAGITAIWIPPAWKGTSQNDVGYGAYDLYDLGEFNQKGTVRTKYGTKAELERAIRSLKANGIQVYGDVVMNHKGGADFTERVQAVEVNPQNRNQEVSGTYQIEAWTGFNFPGRGNQHSSFKWRWYHFDGTDWDQSRQLANRIYKFRGDGKAWDWEVDTENGNYDYLMYADVDMDHPEVINELNRSGVWYANTLNLDGFRLDAVKHIKFSFMRDWLGHVRGQTGKNLFAVAEYWKNDLGALENYLSKTNWTMSAFDVPLHYNLYQASNSSGNYDMRNLLNGTLVQRHPSHAVTFVDNHDTQPGEALESFVQGWFKPLAYATILTREQGYPQVFYGDYYGIPSDGVPSYRQQIDPLLKARQQYAYGRQHDYFDHWDVIGWTREGNASHPNSGLATIMSDGPGGSKWMYVGRQKAGEVWHDMTGNRSGTVTINQDGWGHFFVNGGSVSVWVKR

SEQ ID NO: 32494 - protein, 485 aa, Bacillus sp.
HHDGTNGTIMQYFEWNVPNDGQHWNRLHNNAQNLKNAGITAIWIPPAWKGTSQNDVGYGAYDLYDLGEFNQKGTVRTKYGTKAELERAIRSLKANGIQVYGDVVMNHKGGADFTERVQAVEVNPQNRNQEVSGTYQIEAWTGFNFPGRGNQHSSFKWRWYHFDGTDWDQSRQLANRIYKFRGDGKAWDWEVDTENGNYDYLMYADVDMDHPEVINELNRWGVWYANTLNLDGFRLDAVKHIKFSFMRDWLGHVRGQTGKNLFAVAEYWKNDLGALENYLSKTNWTMSAFDVPLHYNLYQASNSSGNYDMRNLLNGTLVQRHPSHAVTFVDNHDTQPGEALESFVQGWFKPLAYATILTREQGYPQVFYGDYYGIPSDGVPSYRQQIDWLLKARQQYAYGRQHDYFDHWDVIGWTREGNASHPNSGLATIMSDGPGGSKWMYVGRQKAGEVWHDMTGNRSGTVTINQDGWGHFFVNGGSVSVWVKR

SEQ ID NO: 32495 - protein, 485 aa, Bacillus sp.
HHDGTNGTIMQYFEWNVPNDGQHWNRLHNNAQNLKNAGITAIWIPPAWKGTSQNDVGYGAYDLYDLGEFNQKGTVRTKYGTKAELERAIRSLKANGIQVYGDVVMNHKGGADFTERVQAVEVNPQNRNQEVSGTYQIEAWTGFNFPGRGNQHSSFKWRWYHFDGTDWDQSRQLANRIYKFRGDGKAWDWEVDTENGNYDYLMYADVDMDHPETINELNRWGVWYANTLNLDGFRLDAVKHIKFSFMRDWLGHVRGQTGKNLFAVAEYWKNDLGALENYLSKTNWTMSAFDVPLHYNLYQASNSSGNYDMRNLLNGTLVQRHPSHAVTFVDNHDTQPGEALESFVQGWFKPLAYATILTREQGYPQVFYGDYYGIPSDGVPSYRQQIDPLLKARQQYAYGRQHDYFDHWDVIGWTREGNASHPNSGLATIMSDGPGGSKWMYVGRQKAGEVWHDMTGNRSGTVTINQDGWGHFFVNGGSVSVWVKR

SEQ ID NO: 32496 - protein, 485 aa, Bacillus sp. (in: firmicutes)
HHDGTNGTIMQYFEWNVPNDGQHWNRLHNNAQNLKNAGITAIWIPPAWKGTSQNDVGYGAYDLYDLGEFNQKGTVRTKYGTKAELERAIRSLKANGIQVYGDVVMNHKGGADFTERVQAVEVNPQNRNQEVSGTYQIEAWTGFNFPGRGNQHSSFKWRWYHFDGTDWDQSRQLANRIYKFRGDGKAWDWEVDTENGNYDYLMYADVDMDHPEVINELNRWGVWYANTLNLDGFRLDAVKHIKFYFMRDWLGHVRGQTGKNLFAVAEYWKNDLGALENYLSKTNWTMSAFDVPLHYNLYQASNSSGNYDMRNLLNGTLVQRHPSHAVTFVDNHDTQPGEALESFVQGWFKPLAYATILTREQGYPQVFYGDYYGIPSDGVPSYRQQIDPLLKARQQYAYGRQHDYFDHWDVIGWTREGNASHPNSGLATIMSDGPGGSKWMYVGRQKAGEVWHDMTGNRSGTVTINQDGWGHFFVNGGSVSVWVKR

SEQ ID NO: 32497 - protein, 485 aa, Bacillus sp.
HHDGTNGTIMQYFEWNVPNDGQHWNRLHNNAQNLKNAGITAIWIPPAWKGTSQNDVGYGAYDLYDLGEFNQKGTVRTKYGTKAELERAIRSLKANGIQVYGDVVMNHKGGADFTERVQAVEVNPQNRNQEVSGTYQIEAWTGFNFPGRGNQHSSFKWRWYHFDGTDWDQSRQLANRIYKFRGDGKAWDWEVDTENGNYDYLMYADVDMDHPEVINELNRWGVWYANTLNLDGFRLDAVKHIKFSFMRDWLGHVRGQTGKNLFAVAEYWKNDLGALENYLSKTNWTMSAFDVPLHYNLYQASNSSGNYDMRNLLNGTLVQRHPSHAVTFVDNHDTQPGEALESFVQGWFKPLAYATILTREQGYPQVFYGDYYGIPSDGVPSYRQQIDPLLKARQQYAYGRQHDYFDHWDVIGWTREGNASHPNSGLATIMSDGPGGSKRMYVGRQKAGEVWHDMTGNRSGTVTINQDGWGHFFVNGGSVSVWVKR

SEQ ID NO: 32498 - protein, 485 aa, Bacillus sp.
HHDGTNGTIMQYFEWNVPNDGQHWNRLHNNAQNLKNAGITAIWIPPAWKGTSQNDVGYGAYDLYDLGEFNQKGTVRTKYGTKAELERAIRSLKANGIQVYGDVVMNHKGGADFTERVQAVEVNPQNRNQEVSGTYQIEAWTGFNFPGRGNQHSSFKWSWYHFDGTDWDQSRQLANRIYKFRGDGKAWDWEVDTENGNYDYLMYADVDMDHPEVINELNRWGVWYANTLNLDGFRLDAVKHIKFSFMRDWLGHVRGQTGKNLFAVAEYWKNDLGALENYLSKTNWTMSAFDVPLHYNLYQASNSSGNYDMRNLLNGTLVQRHPSHAVTFVDNHDTQPGEALESFVQGWFKPLAYATILTREQGYPQVFYGDYYGIPSDGVPSYRQQIDPLLKARQQYAYGRQHDYFDHWDVIGWTREGNASHPNSGLATIMSDGPGGSKWMYVGRQKAGEVWHDMTGNRSGTVTINQDGWGHFFVNGGSVSVWVKR

SEQ ID NO: 32499 - protein, 485 aa, Bacillus sp.
HHDGTNGTIMQYFEWNVPNDGQHWNRLHNNAQNLKNAGITAIWIPPAWKGTSQNDVGYGAYDLYDLGEFNQKGTVRTKYGTKAELERAIRSLKANGIQVYGDVVMNHKGGADFTERVQAVEVNPQNRNQEVSGTYQIEAWTGFNFPGRGNQHSSFKWRWYHFDGTDWDQSRQLANRIYKFRGDGKAWDWEVDTENGNYDYLMYADVDMDHPEVINELNRWGVWYANTLNLDGFRLDAVKHIKFSFMRDWLGHVRGQTGKNLFAVAEYWKNDLGALENYLSKTNWTMSAFDVPLHYNLYQASNSSGNYDMRNLLNGTLVQRHPSHAVTFVDNHDTQPGEALESFVQGWFKPLAYATILTREQGYPQVFYGDYYGIPSDGVPSYRQQIDPLLKARQQYAYGRQHDYFDHWDVIGWTREGNASHPNSGLATIMSDGPGGSKWMYVGRQKAGEVWYDMTGNRSGTVTINQDGWGHFFVNGGSVSVWVKR

SEQ ID NO: 32500 - protein, 485 aa, Bacillus sp.
HHDGTNGTIMQYFEWNVPNDGQHWNRLHNNAQNLKNAGITAIWIPPAWKGTSQNDVGYGAYDLYDLGEFNQKGTVRTKYGTKAELERAIRSLKANGIQVYGDVVMNHKGGADFTERVQAVEVNPQNRNQEVSGTYQIEAWTGFNFPGRGNQHSSFKWRWYHFDGTDWDQSRQLANRIYKFRGDGKAWDWEVDTENGNYDYLMYADVDMDHPEVINELNRWGVWYANTLNLDGFRLDAVKHIKFSFMRDWLGHVRGQTGKNLFAVAEYWKNDLGALENYLSKTNWTMSAFDVPLHYNLYQASNSSGNYDMRNLLNGTLVQRHPSHAVTFVDNHDTQPGEALESFVQGWFKPLCYATILTREQGYPQVFYGDYYGIPSDGVPSYRQQIDPLLKARQQYAYGRQHDYFDHWDVIGWTREGNASHPNSGLATIMSDGPGGSKWMYVGRQKAGEVWHDMTGNRSGTVTINQDGWGHFFVNGGSVSVWVKR

SEQ ID NO: 32501 - protein, 485 aa, Bacillus sp.
HHDGTNGTIMQYFEWNVPNDGQHWNRLHNNRQNLKNAGITAIWIPPAWKGTSQNDVGYGAYDLYDLGEFNQKGTVRTKYGTKAELERAIRSLKANGIQVYGDVVMNHKGGADFTERVQAVEVNPQNRNQEVSGTYQIEAWTGFNFPGRGNQHSSFKWRWYHFDGTDWDQSRQLANRIYKFRGDGKAWDWEVDTENGNYDYLMYADVDMDHPEVINELNRWGVWYANTLNLDGFRLDAVKHIKFSFMRDWLGHVRGQTGKNLFAVAEYWKNDLGALENYLSKTNWTMSAFDVPLHYNLYQASNSSGNYDMRNLLNGTLVQRHPSHAVTFVDNHDTQPGEALESFVQGWFKPLAYATILTREQGYPQVFYGDYYGIPSDGVPSYRQQIDPLLKARQQYAYGRQHDYFDHWDVIGWTREGNASHPNSGLATIMSDGPGGSKWMYVGRQKAGEVWHDMTGNRSGTVTINQDGWGHFFVNGGSVSVWVKR

SEQ ID NO: 32502 - protein, 485 aa, Bacillus sp.
HHDGTNGTIMQYFEWNVPNDGQHWNRLHNNAQNLKNAGITAIWIPPAWKGTSQNDVGYGAYDLYDLGQFNQKGTVRTKYGTKAELERAIRSLKANGIQVYGDVVMNHKGGADFTERVQAVEVNPQNRNQEVSGTYQIEAWTGFNFPGRGNQHSSFKWRWYHFDGTDWDQSRQLANRIYKFRGDGKAWDWEVDTENGNYDYLMYADVDMDHPEVINELNRWGVWYANTLNLDGFRLDAVKHIKFSFMRDWLGHVRGQTGKNLFAVAEYWKNDLGALENYLSKTNWTMSAFDVPLHYNLYQASNSSGNYDMRNLLNGTLVQRHPSHAVTFVDNHDTQPGEALESFVQGWFKPLAYATILTREQGYPQVFYGDYYGIPSDGVPSYRQQIDPLLKARQQYAYGRQHDYFDHWDVIGWTREGNASHPNSGLATIMSDGPGGSKWMYVGRQKAGEVWHDMTGNRSGTVTINQDGWGHFFVNGGSVSVWVKR

SEQ ID NO: 32503 - protein, 483 aa, Bacillus sp.
HHNGTNGTLMQYFEWYLPNDGNHWNRLNSDASNLKSKGITAVWIPPAWKGASQNDVGYGAYDLYDLGEFNQKGTVRTKYGTRSQLQAAVTSLKNNGIQVYGDVVMNHKGGADATEMVRAVEVNPNNRNQEVTGEYTIEAWTRFDFPGRANTHSSFKWRWYHFDGVDWDQSRRLNNRIYKFRTKAWDWEVDTENGNYDYLLYADIDMDHPEVVNELRNWGVWYTNTLGLDGFRIDAVKHIKYSFTRDWINHVRSAIGKNMFAVAEFWKNDLGAIENYLQKTNWNHSVFDVPLHFNLYYASKSGGNYDMRNIFNGTVVQRHPTHAVTFVDNHDSQPEESLESFVREWFKPLAYALTLTREQGYPSVFYGDYYGIPTHGVPAMRSKIDPILEARQKYAYGPQHDYIDHPDVIGWTREGDSSAAKSGLAALITDGPGGSKRMYAGLKNAGETWYDITGNRSDTVKIGSDGWGEFHVNDGSVSIYVQK

SEQ ID NO: 32504 - protein, 485 aa, Bacillus sp.
HHDGTNGTIMQYFEWNVPNDGQHWNRLHNNAQNLKNAGITAIWIPPAWKGTSQNDVGYGAYDLYDLGEFNQKGTVRTKYGTKAELERAIRSLKANGIQVYGDVVMNHKGGADFTERVQAVEVNPQNRNQEVSGTYQIEAWTGFNFPGRGNQHSSFKWRWYHFDGTDWDQSRQLANRIYKFRGDGKAWDWEVDTENGNYDYLMYADVDMDHPEVINELNRWGVWYANTLNLDGFRLDAVKHIKFSFMRDWLGHVRGQTGKNLFAVAEYWKNDLGALENYLSKTNWTMSAFDVPLHYNLYQASNSKGNYDMRNLLNGTLVQRHPSHAVTFVDNHDTQPGEALESFVQGWFKPLAYATILTREQGYPQVFYGDYYGIPSDGVPSYRQQIDPLLKARQQYAYGRQHDYFDHWDVIGWTREGNASHPNSGLATIMSDGPGGSKWMYVGRQKAGEVWHDMTGNRSGTVTINQDGRGHFFVNGGSVSVWVKR

SEQ ID NO: 32505 - protein, 485 aa, Bacillus sp.
HHDGTNGTIMQYFEWNVPNDGQHWNRLHNNAQNLKNAGITAIWIPPAWKGTSQNDVGYGAYDLYDLGEFNQKGTVRTKYGTKAELERAIRSLKANGIQVYGDVVMNHKGGADFTERVQAVEVNPQNRNQEVSGTYQIEAWTGFNFPGRGNQHSSFKWRWYHFDGTDWDQSRQLANRIYKFRGDGKAWDWEVDTENGNYDYLMYADVDMDHPEVINELNRWGVWYANTLNLDGFRLDAVKHIKFSFMRDWLGHVRGQTGKNLFAVAEYWKNDLGALENYLSKTNWTMSAFDVPLHYNLYQASNSSGNYDMRNLLNGTLVQRHPSHAVTFVDNHDTQPGEALESFVQGWFKPLAYATILTREQGYPQVFYGDYYGIPSDGVPSYRQQIDPLLKARQQYAYGRQHDYFDHWDVIGWTREGNASHPNSGLATIMSDGPMGSKWMYVGRQKAGEVWHDMTGNRSGTVTINQDGWGHFFVNGGSVSVWVKR

SEQ ID NO: 32506 - protein, 485 aa, Bacillus sp.
HHDGTNGTIMQYFEWNVPNDGQHWNRLHNNAQNLKNAGITAIWIPPAWKGTSQNDVGYGAYDLYDLGEFNQKGTVRTKYGTKAELERAIRSLKANGIQVYGDVVMNHKGGADFTERVQAVEVNPQNRNQEVSGTYQIEAWTGFNFPGRGNQHSSFKWRWYHFDGTDWDQSRQLANRIYKFRGDGVAWDWEVDTENGNYDYLMYADVDMDHPEVINELNRWGVWYANTLNLDGFRLDAVKHIKFSFMRDWLGHVRGQTGKNLFAVAEYWKNDLGALENYLSKTNWTMSAFDVPLHYNLYQASNSSGNYDMRNLLNGTLVQRHPSHAVTFVDNHDTQPGEALESFVQGWFKPLAYATILTREQGYPQVFYGDYYGIPSDGVPSYRQQIDPLLKARQQYAYGRQHDYFDHWDVIGWTREGNASHPNSGLATIMSDGPGGSKWMYVGRQKAGEVWHDMTGNRSGTVTINQDGWGHFFVNGGSVSVWVKR

SEQ ID NO: 32507 - protein, 485 aa, Bacillus sp.
HGDGTNGTIMQYFEWNVPNDGQHWNRLHNNAQNLKNAGITAIWIPPAWKGTSQNDVGYGAYDLYDLGEFNQKGTVRTKYGTKAELERAIRSLKANGIQVYGDVVMNHKGGADFTERVQAVEVNPQNRNQEVSGTYQIEAWTGFNFPGRGNQHSSFKWRWYHFDGTDWDQSRQLANRIYKFRGDGKAWDWEVDTENGNYDYLMYADVDMDHPEVINELNRWGVWYANTLNLDGFRLDAVKHIKFSFMRDWLGHVRGQTGKNLFAVAEYWKNDLGALENYLSKTNWTMSAFDVPLHYNLYQASNSSGNYDMRNLLNGTLVQRHPSHAVTFVDNHDTQPGEALESFVQGWFKPLAYATILTREQGYPQVFYGDYYGIPSDGVPSYRQQIDPLLKARQQYAYGRQHDYFDHWDVIGWTREGNASHPNSGLATIMSDGPGGSKWMYVGRQKAGEVWHDMTGNRSGTVTINQDGWGHFFVNGGSVSVWVKR

SEQ ID NO: 32508 - protein, 485 aa, Bacillus sp.
HHDGTNGTIMQYFEWNVPNDGQHWNRLHNNAQNLKNAGITAIWIPPAWKGTSQNDVGYGAYDLYDLGEFNQKGTVRTKYGTKAELERAIRSLKANGIQVYGDVVMNHKGGADFTERVQAVEVNPQNRNQEVSGTYQIEAWTGFNFPGRGNQHSSFKWRWYHFDGTDWDQSRQLANRIYKFRGDGKAWDWEVDTENGNYDYLMYADVDMDHPEVINELNRWGVWYANTLNLDGFRLDAVKHIKFSFMRDWLGHVRGQTGKNLFAVAEYWKNDLGALENYLSKTNWTMSAFDVPLHYNLYQASNSSGNYDMRNLLNGTLVQRHPSHAVTFVDNHDTQPGEALESFVQGWFKPLAYATILTREQGYPQVFYGDYYGIPSDGVPSYRQQIDPLLKARQQYAYGRQHDYFDHWDVIGWTREGNASHRNSGLATIMSDGPGGSKWMYVGRQKAGEVWHDMTGNRSGTVTINQDGWGHFFVNGGSVSVWVKR

SEQ ID NO: 32509 - protein, 485 aa, Bacillus sp.
HHDGTNGTIMQYFEWNVPNDGQHWNRLHNNAQNLKNAGITAIWIPPAWKGTSQNDVGYGAYDLYDLGEFNQKGTVRTKYGTKAELERAIRSLKANGIQVYGDVVMNHKGGADFTERVQAVEVNPQNRNQEVSGTYQIEAWTGFNFPGRGNQHSSFKWRWYHFDGTDWDQSRQLANRIYKFRGDGKAWDWEVDTENGNYDYLMYADVDMDHPEVINELNRWGVWYANTLNLDGFRLDAVKHIKFSFMRDWLGHVRGQTGKNLFAVAEYWKNDLGALENYLSKTNWTMSAFDVPLHYNLYQASNESGNYDMRNLLNGTLVQRHPSHAVTFVDNHDTQPGEALESFVQGWFKPLAYATILTREQGYPQVFYGDYYGIPSDGVPSYRQQIDPLLKARQQYAYGRQHDYFDHWDVIGWTREGNASHPNSGLATIMSDGPGGSKWMYVGRQKAGEVWHDMTGNRSGTVTINQDGWGHFFVNGGSVSVWVKR

SEQ ID NO: 32510 - protein, 485 aa, Bacillus sp.
HHDGTNGTIMQYFEWNVPNDGQHWNRLHNNAQNLKNAGITAIWIPPAWKGTSQNDVGYGAYDLYDLGEFNQKGTVRTKYGTKAELERAIRSLKANGIQVYGDVVMNHKGGADFTERVQAVEVNPQNRNQEVSGTYQIEAWTGFNFPGRGNQHSSFKWRWYHFDGTDWDQSRKLANRIYKFRGDGKAWDWEVDTENGNYDYLMYADVDMDHPEVINELNRWGVWYANTLNLDGFRLDAVKHIKFSFMRDWLGHVRGQTGKNLFAVAEYWKNDLGALENYLSKTNWTMSAFDVPLHYNLYQASNSSGNYDMRNLLNGTLVQRHPSHAVTFVDNHDTQPGEALESFVQGWFKPLAYATILTREQGYPQVFYGDYYGIPSDGVPSYRQQIDPLLKARQQYAYGRQHDYFDHWDVIGWTREGNASHPNSGLATIMSDGPGGSKWMYVGRQKAGEVWHDMTGNRSGTVTINQDGWGHFFVNGGSVSVWVKR

SEQ ID NO: 32511 - protein, 485 aa, Bacillus sp.
HHDGTNGTIMQYFEWNVPNDGQHWNRLHNNAQNLKNAGITAIWIPPAWKGTSQNDVGYGAYDLYDLGEFNQKGTVRTKYGTKAELERAIRSLKANGIQVYGDVVMNHKGGADFTERVQAVEVNPQNRNQEVSGTYQIEAWTGFNFPGRGNQHSSFKWRWYHFDGTDWDQSRQLANRIYKFRGDGKAWDWEVDTENGNYDYLMYADVDMDHPEVINELNRWGVWYANTLNLDGFRLDAVKHIQFSFMRDWLGHVRGQTGKNLFAVAEYWKNDLGALENYLSKTNWTMSAFDVPLHYNLYQASNSSGNYDMRNLLNGTLVQRHPSHAVTFVDNHDTQPGEALESFVQGWFKPLAYATILTREQGYPQVFYGDYYGIPSDGVPSYRQQIDPLLKARQQYAYGRQHDYFDHWDVIGWTREGNASHPNSGLATIMSDGPGGSKWMYVGRQKAGEVWHDMTGNRSGTVTINQDGWGHFFVNGGSVSVWVKR

SEQ ID NO: 32512 - protein, 485 aa, Bacillus sp.
HHDGTNGTIMQYFEWNVPNDGQHWNRLHNNAQNLKNAGITAIWIPPAWKGTSQNDVGYGAYDLYDLGEFNQKGTVRTKYGTKAELERAIRSLKANGIQVYGDVVMNHKGGADFTERVQAVEVNPQNRNQEVSGTYQIEAWTGFNFPGRGNQHSSFKWRWYHFDGTDWDQSRQLANRIYKFRGDGKAWDWEVDTENGNYDYLMYADVDMDHPEVINELNRWGVWYANTLNLDGFRLDAVKHIKFSFMRDWLGHVRGQTGKNLFAVAEYWKNDLGALENYLSKTNWTMSAFDVPLHYNLYQASNSSGNYDMRNLLNVTLVQRHPSHAVTFVDNHDTQPGEALESFVQGWFKPLAYATILTREQGYPQVFYGDYYGIPSDGVPSYRQQIDPLLKARQQYAYGRQHDYFDHWDVIGWTREGNASHPNSGLATIMSDGPGGSKWMYVGRQKAGEVWHDMTGNRSGTVTINQDGWGHFFVNGGSVSVWVKR

SEQ ID NO: 32513 - protein, 485 aa, Bacillus sp.
HHDGTNGTIMQYFEWNVPNDGQHWNRLHNNAQNLKNAGITAIWIPPAWKGTSQNDVGYGAYDLYDLGEFNQKGTVRTKYGTKAELERAIRSLKANGIQVYGDVVMNHKGGADFTERVQAVEVNPQNRNQEVSGTYQIEAWTGFNFPGRGNQHSSFKWRWYHFDGTDWDQSRQLANRIYKFRGDGKAWDWEVDTENGNYDYLMYADVDMVHPEVINELNRWGVWYANTLNLDGFRLDAVKHIKFSFMRDWLGHVRGQTGKNLFAVAEYWKNDLGALENYLSKTNWTMSAFDVPLHYNLYQASNSSGNYDMRNLLNGTLVQRHPSHAVTFVDNHDTQPGEALESFVQGWFKPLAYATILTREQGYPQVFYGDYYGIPSDGVPSYRQQIDPLLKARQQYAYGRQHDYFDHWDVIGWTREGNASHPNSGLATIMSDGPGGSKWMYVGRQKAGEVWHDMTGNRSGTVTINQDGWGHFFVNGGSVSVWVKR

SEQ ID NO: 32514 - protein, 485 aa, Bacillus sp.
HHDGTNGTIMQYFEWNVPNDGQHWNRLHNNAQNLKNAGITAIWIPPAWKGTSQNDVGYGAYDLYDLGEFNQKGTVRTKYGTKAELERAIRSLKANGIQVYGDVVMNHKGGADFTERVQAVEVNPQNRNQEVSGTYQIEAWTGFNFPGRGNQHSSFKWRWYHFDGTDWDQSRQLANRIYKFRGDGKAWDWEVDTENGNYDYLMYADVDMDHPEVINELNRWGVWYANTLNLDGFRLDAVKHIKFSFMRDWLGHVRGQTGKNLFAVAEYWKNDLGALENYLSKTNITMSAFDVPLHYNLYQASNSSGNYDMRNLLNGTLVQRHPSHAVTFVDNHDTQPGEALESFVQGWFKPLAYATILTREQGYPQVFYGDYYGIPSDGVPSYRQQIDPLLKARQQYAYGRQHDYFDHWDVIGWTREGNASHPNSGLATIMSDGPGGSKWMYVGRQKAGEVWHDMTGNRSGTVTINQDGWGHFFVNGGSVSVWVKR

SEQ ID NO: 32515 - protein, 485 aa, Bacillus sp.
HHDGTNGTIMQYFEWNVPNDGQHWNRLHNNAQNLKNAGITAIWIPPAWKGTSQNDVGYGAYDLYDLGEFNQKGTVRTKYGTKAELERAIRSLKANGIQVYGDVVMNHKGGADFTERVQAVEVNPQNRNQEVSGTYQIEAWTGFNFPGRGNQHSSFKWRWYHFDGTDWDQSRQLANRIYKFRGDGKAWDWEVDTENGNYDYLMYADVDMDHPEVINELNRWGVWYAETLNLDGFRLDAVKHIKFSFMRDWLGHVRGQTGKNLFAVAEYWKNDLGALENYLSKTNWTMSAFDVPLHYNLYQASNSSGNYDMRNLLNGTLVQRHPSHAVTFVDNHDTQPGEALESFVQGWFKPLAYATILTREQGYPQVFYGDYYGIPSDGVPSYRQQIDPLLKARQQYAYGRQHDYFDHWDVIGWTREGNASHPNSGLATIMSDGPGGSKWMYVGRQKAGEVWHDMTGNRSGTVTINQDGWGHFFVNGGSVSVWVKR

SEQ ID NO: 32516 - protein, 485 aa, Bacillus sp.
HHDGTNGTIMQYFEWNVPNDGQHWNRLHNNAQNLKNAGITAIWIPPAWKGTSQNDVGYGAYDLYDLGEFNQKGTVRTKYGTKAELERAIRSLKANGIQVYGDVVMNHKGGADFTERVQAVEVNPQNRNQEVSGTYQIEAWTGFNFPGRGNQHSSFKWRWYHFDGTDWDQSRQLANRIYKFRGDGKAWDWEVDTENGNYDYLMYADVDMDHPEVINELNRWGVWYANTLNLDGFRLDAVKHIKFSFMRDWLGHVRGQTGKNLFAVAEYWKNDLGALENYLSKTNWTMSAFDVPLHYNLYQASNSSGNYDMRNLLNGTLVQRHPSHAVEFVDNHDTQPGEALESFVQGWFKPLAYATILTREQGYPQVFYGDYYGIPSDGVPSYRQQIDPLLKARQQYAYGRQHDYFDHWDVIGWTREGNASHPNSGLATIMSDGPGGSKWMYVGRQKAGEVWHDMTGNRSGTVTINQDGWGHFFVNGGSVSVWVKR

SEQ ID NO: 32517 - protein, 485 aa, Bacillus sp.
HHDGTNGTIMQYFEWNVPNDGQHWNRLHNNAQNLKNAGITAIWIPPAWKGGSQNDVGYGAYDLYDLGEFNQKGTVRTKYGTKAELERAIRSLKANGIQVYGDVVMNHKGGADFTERVQAVEVNPQNRNQEVSGTYQIEAWTGFNFPGRGNQHSSFKWRWYHFDGTDWDQSRQLANRIYKFRGDGKAWDWEVDTENGNYDYLMYADVDMDHPEVINELNRWGVWYANTLNLDGFRLDAVKHIKFSFMRDWLGHVRGQTGKNLFAVAEYWKNDLGALENYLSKTNWTMSAFDVPLHYNLYQASNSSGNYDMRNLLNGTLVQRHPSHAVTFVDNHDTQPGEALESFVQGWFKPLAYATILTREQGYPQVFYGDYYGIPSDGVPSYRQQIDPLLKARQQYAYGRQHDYFDHWDVIGWTREGNASHPNSGLATIMSDGPGGSKWMYVGRQKAGEVWHDMTGNRSGTVTINQDGWGHFFVNGGSVSVWVKR

SEQ ID NO: 32518 - protein, 485 aa, Bacillus sp.
HHDGTNGTIMQYFEWNVPNDGQHWNRLHNNAQNLKNAGITAIWIPPAWKGTSQNDVGYGAYDLYDLGEFNQKGTVRTKYGTKAELERAIRSLKANGIQVYGDVVMNHKGGADFTERVQAVEVNPQNRNQEVSGTYQIEAWTGFNFPGRGNQHSSFKWRWYHFDGTDWDQSRQLANRIYKFRGDGKAWDWEVDTENGNYDYLMYADVDMDHPEVINELNRWGVWYANTLNLDGFRLDAVKHIKFSFMRDWLGHVRGQTGKNLFAVAEYWKNDLGALENYLSKTNWTMSAFDVPLHYNLYQASNSSQNYDMRNLLNGTLVQRHPSHAVTFVDNHDTQPGEALESFVQGWFKPLAYATILTREQGYPQVFYGDYYGIPSDGVPSYRQQIDPLLKARQQYAYGRQHDYFDHWDVIGWTREGNASHPNSGLATIMSDGPGGSKWMYVGRQKAGEVWHDMTGNRSGTVTINQDGWGHFFVNGGSVSVWVKR

SEQ ID NO: 32519 - protein, 485 aa, Bacillus sp.
HHDGTNGTIMQYFEWNVPNDGQHWNRLHNNAQNLKNAGITAIWIPPAWKGTSQNDVGYGAYDLYDLGEFNQKGTVRTKYGTKAELERAIRSLKANGIQVYGDVVMNHKGGADFTERVQAVEVNPQNRNQEVSGTYQIEAWTGFNFPGRGNQHSSFKWRWYHFDGTDWDQSRQLANYIYKFRGDGKAWDWEVDTENGNYDYLMYADVDMDHPEVINELNRWGVWYANTLNLDGFRLDAVKHIKFSFMRDWLGHVRGQTGKNLFAVAEYWKNDLGALENYLSKTNWTMSAFDVPLHYNLYQASNSSGNYDMRNLLNGTLVQRHPSHAVTFVDNHDTQPGEALESFVQGWFKPLAYATILTREQGYPQVFYGDYYGIPSDGVPSYRQQIDPLLKARQQYAYGRQHDYFDHWDVIGWTREGNASHPNSGLATIMSDGPGGSKWMYVGRQKAGEVWHDMTGNRSGTVTINQDGWGHFFVNGGSVSVWVKR

SEQ ID NO: 32520 - protein, 485 aa, Bacillus sp.
HHDGTNGTIMQYFEWNVPNDGQHWNRLHNNAQNLKNAGITAIWIPPAWKGTSQNDVGYGAYDLYDLGEFNQKGTVRTKYGTKAELERAIRSLKANGIQVYGDVVMNHKGGADFTERVQAVEVNPQNRNQEVSGTYQIEAWTGFNFPGRGNQHSSFKWRWYHFDGTDWDQSRQLANRIYKFRGDGKAWDWEVDTENGNYDYLMYADVDMDHPEVINELNRWGVWYANTLNLDGFRLDAVKHIKFSFMRDWLGHVRGQTGKNLFAVAEYWKNDLGALENYLSKTNWTMSAFDVPLHYNLYQASNSSGNYDMRNLLNGTLVQRHPSHAVTFVDNHDTQPGEALESFVWGWFKPLAYATILTREQGYPQVFYGDYYGIPSDGVPSYRQQIDPLLKARQQYAYGRQHDYFDHWDVIGWTREGNASHPNSGLATIMSDGPGGSKWMYVGRQKAGEVWHDMTGNRSGTVTINQDGWGHFFVNGGSVSVWVKR

SEQ ID NO: 32521 - protein, 485 aa, Bacillus sp.
HHDGTNGTIMQYFEWNVPNDGQHWNRLHNNAQNLKNAGITAIWIPPAWKGTSQNDVGYGAYDLYDLGEFNQKGTVRTKYGTKAELERAIRSLKANGIQVYGDVVMNHKGGADFTERVQAVEVNPQNRNQEVSGTYQIEAWTGFNFPGRGNQHSSFKWRWYHFDGTDWDQSRQLANRIYKFRGDGKAWDWEVDTENGNYDCLMYADVDMDHPEVINELNRWGVWYANTLNLDGFRLDAVKHIKFSFMRDWLGHVRGQTGKNLFAVAEYWKNDLGALENYLSKTNWTMSAFDVPLHYNLYQASNSSGNYDMRNLLNGTLVQRHPSHAVTFVDNHDTQPGEALESFVQGWFKPLAYATILTREQGYPQVFYGDYYGIPSDGVPSYRQQIDPLLKARQQYAYGRQHDYFDHWDVIGWTREGNASHPNSGLATIMSDGPGGSKWMYVGRQKAGEVWHDMTGNRSGTVTINQDGWGHFFVNGGSVSVWVKR

SEQ ID NO: 32522 - protein, 485 aa, Bacillus sp.
HHDGTNGTIMQYFEWNVPNDGQHWNRLHNNAQNLKNAGITAIWIPPAWKGTSQNDVGYGAYDLYDLGEFNQKGTVRTKYGTKAELERAIRSLKANGIQVYGDVVMNHKGGADFTERVQAVEVNPQNRNQEVSGTYQIEAWTGFNFPGRGNQHSSFKWRWYHFDGTDWDQSRQLANRIYKFRGDGKAWDWEVDTENGNYDYLMVADVDMDHPEVINELNRWGVWYANTLNLDGFRLDAVKHIKFSFMRDWLGHVRGQTGKNLFAVAEYWKNDLGALENYLSKTNWTMSAFDVPLHYNLYQASNSSGNYDMRNLLNGTLVQRHPSHAVTFVDNHDTQPGEALESFVQGWFKPLAYATILTREQGYPQVFYGDYYGIPSDGVPSYRQQIDPLLKARQQYAYGRQHDYFDHWDVIGWTREGNASHPNSGLATIMSDGPGGSKWMYVGRQKAGEVWHDMTGNRSGTVTINQDGWGHFFVNGGSVSVWVKR

SEQ ID NO: 32523 - protein, 485 aa, Bacillus sp.
HHDGTNGTIMQYFEWNVPNDGQHWNRLHNNAQNLKNAGITAIWIPPAWKGTSQNDVGYGAYDLYDLGEFNQKGTVRTKYGTKAELERAIRSLKANGIQVYGDVVMNHKGGADFTERVQAVEVNPQNRNQEVSGTYQIEAWTGFNFPGRGNQHSSFKWRWYHFDGTDWDQSRQLANRIYKFRGDGKAWDWEVDTENGNYDYLMYADVDMDHPEVINELNRWGVWYANTLNLDGFRLDAVKHIKFSFMRDWLGHVRGQTGKNLFAVAEYWKNDLGALENYLSKTNWTMSAFDVPLHYNLYQASNSSGNYDMRNLLNGTLVQRHPSHAVTFVDNHDTQPGEALESFVQGWFKPLAYATILTREQGYPQVFLGDYYGIPSDGVPSYRQQIDPLLKARQQYAYGRQHDYFDHWDVIGWTREGNASHPNSGLATIMSDGPGGSKWMYVGRQKAGEVWHDMTGNRSGTVTINQDGWGHFFVNGGSVSVWVKR

SEQ ID NO: 32524 - protein, 485 aa, Bacillus sp.
HHDGTNGTIMQYFEWNVPNDGQHWNRLHNNAQNLKNAGITAIWIPPAWKGTSQNDVGYGAYDLYDLGEFNQKGTVRTKYGTKAELERAIRSLKANGIQVYGDVVMNHKGGADFTERVQAVEVNPQNRNQEVSGTYQIEAWTGFNFPGRGNQHSSFKWRWYHFDGTDWDQSRQLANRIYKFRGDGKHWDWEVDTENGNYDYLMYADVDMDHPEVINELNRWGVWYANTLNLDGFRLDAVKHIKFSFMRDWLGHVRGQTGKNLFAVAEYWKNDLGALENYLSKTNWTMSAFDVPLHYNLYQASNSSGNYDMRNLLNGTLVQRHPSHAVTFVDNHDTQPGEALESFVQGWFKPLAYATILTREQGYPQVFYGDYYGIPSDGVPSYRQQIDPLLKARQQYAYGRQHDYFDHWDVIGWTREGNASHPNSGLATIMSDGPGGSKWMYVGRQKAGEVWHDMTGNRSGTVTINQDGWGHFFVNGGSVSVWVKR

SEQ ID NO: 32525 - protein, 485 aa, Bacillus sp.
HHDGTNGTIMQYFEWNVPNDGQHWNRLHNNAQNLKNAGITAIWIPPAWKGTSQNDVGYGAYDLYDLGEFNQKGTVRTKYGTKAELERAIRSLKANGIQVYGDVVMNHKGGADFTERVQAVEVNPQNRNQEVSGTYQIEAWTGFNFPGRGNQHSSFKWRWYHFDGTDWDQSRQLANRIYKFRGDGKAWDWEVDTENGNYDYLMYADVDMDHPEVINELNRWGVWYANTLNLDGFRLDAVKHIKFSFMRDWLGHVRGQTGKNLFAVAEYWKNDLGALENYLSKTNWTMSAFDVPLHYNLYQASNSSGNYDMRNLLNGTLVQRHPSHAVTFVDNHDTQPGEALESFVQGWFKPLAYATILTREQGYPQVFYGDYYGIPSDGVPSYRQQIDPLLKARQQYAYGRQHDYFDHWDVIGWTREGNASHPNSGLATIMSDGPGGSKWMYVGRQPAGEVWHDMTGNRSGTVTINQDGWGHFFVNGGSVSVWVKR

SEQ ID NO: 32526 - protein, 485 aa, Bacillus sp.
HHDGTNGTIMQYFEWNVPNDGQHWNRLHNNAQNLKNAGITAIWIPPAWKGTSQNDVGYGAYDLYDLGEFNQKGTVRTKYGTKAELERAIRSLKANGIQVYGDVVMNHKGGADFTERVQAVEVNPQNRNQEVSGTYQIEAWTGFNFPGRGNQHSSFKWRWYHFDGTDWDQSAQLANRIYKFRGDGKAWDWEVDTENGNYDYLMYADVDMDHPEVINELNRWGVWYANTLNLDGFRLDAVKHIKFSFMRDWLGHVRGQTGKNLFAVAEYWKNDLGALENYLSKTNWTMSAFDVPLHYNLYQASNSSGNYDMRNLLNGTLVQRHPSHAVTFVDNHDTQPGEALESFVQGWFKPLAYATILTREQGYPQVFYGDYYGIPSDGVPSYRQQIDPLLKARQQYAYGRQHDYFDHWDVIGWTREGNASHPNSGLATIMSDGPGGSKWMYVGRQKAGEVWHDMTGNRSGTVTINQDGWGHFFVNGGSVSVWVKR

SEQ ID NO: 32527 - protein, 485 aa, Bacillus sp.
HHDGTNGTIMQYFEWNVPNDGQHWNRLHNNAQNLKNAGITAIWIPPAWKGTSQNDVGYGAYDLYDLGEFNQKGTVRTKYGTKAELERAIRSLKANGIQVYGDVVMNHKGGADFTERVQAVEVNPQNRNQEVSGTYQIEAWTGFNFPGRGNQHSSFKWRWYHFDGTDWDQSRQLANRIYKFRGDGKAWDWEVDTENGNYDYLMYADVDMDHPEVINELNRWGVWYANTLNLDGFRLDAVKHIKFSFMRDWLGHVRGQTGKNLFAVAEYWKNDLGALENYLSKTNWTMSAFDVPLHYNLYQASNSSGNYDMRNLLNGTLVQRHPSHAVVFVDNHDTQPGEALESFVQGWFKPLAYATILTREQGYPQVFYGDYYGIPSDGVPSYRQQIDPLLKARQQYAYGRQHDYFDHWDVIGWTREGNASHPNSGLATIMSDGPGGSKWMYVGRQKAGEVWHDMTGNRSGTVTINQDGWGHFFVNGGSVSVWVKR

SEQ ID NO: 32528 - protein, 485 aa, Bacillus sp.
HHDGTNGTIMQYFEWNVPNDGQHWNRLHNNAQNLKNAGITAIWIPPAWKGTSQNDVGYGAYDLYDLGEFNQKGTVRTKYGTKAELERAIRSLKANGIQVYGDVVMNHKGGADFTERVQAVEVNPQNRNQEVSGTYQIEAWTGFNFPGRGNQHSSFKWRWYHFDGTDWDQSRQLANRIYKFRGDGKAWDWEVDTENGNYDYLMYADVDMDHPEVINELNRWGVWYANTLNLDGFRLDAVKHIKFSFMRDWLGHVRGQTGKNLFAVAEYWKNDLGALENYLSKTNWTMSAFDVPLHYNLYQASNSSGNYDMRNLLNGTLVQRHPSHAVTFVDNHDTQPGEALESFVQGWFKPLAYATILTREQGYPQVFYGDYYGIPSDGVPSYRQQIDPLLKARQQYAYGRQHDYFDHWDVIGWTREGNASHPNCGLATIMSDGPGGSKWMYVGRQKAGEVWHDMTGNRSGTVTINQDGWGHFFVNGGSVSVWVKR

SEQ ID NO: 32529 - protein, 485 aa, Bacillus sp.
HHDGTNGTIMQYFEWNVPNDGQHWNRLHNNAQNLKNAGITAIWIPPAWKGTSQNDVGYGAYDLYDLGEFNQKGTVRTKYGTKAELERAIRSLKANGIQVYGDVVMNHKGGADFTERVQAVEVNPQNRNQEVSGTYQIEAWTGFNFPGRGNQHSSFFWRWYHFDGTDWDQSRQLANRIYKFRGDGKAWDWEVDTENGNYDYLMYADVDMDHPEVINELNRWGVWYANTLNLDGFRLDAVKHIKFSFMRDWLGHVRGQTGKNLFAVAEYWKNDLGALENYLSKTNWTMSAFDVPLHYNLYQASNSSGNYDMRNLLNGTLVQRHPSHAVTFVDNHDTQPGEALESFVQGWFKPLAYATILTREQGYPQVFYGDYYGIPSDGVPSYRQQIDPLLKARQQYAYGRQHDYFDHWDVIGWTREGNASHPNSGLATIMSDGPGGSKWMYVGRQKAGEVWHDMTGNRSGTVTINQDGWGHFFVNGGSVSVWVKR

SEQ ID NO: 32530 - protein, 485 aa, Bacillus sp.
HHDGTNGTIMQYFEWNVPNDGQHWNRLHNNAQNLKNAGITAIWIPPAWKGTSQNDVGYGAYDLYDLGEFNQKGTVRTKYGTKAELERAIRSLKANGIQVYGDVVMNHKGGADFTERVQAVEVNPQNRNQEVSGTYQIEAWTGFNFPGRGNQHSSFKWRWYHFDGTDWDQSRQLANRIYKFRGDGKAWDWEVDTENGNYDYLMYADVDMDHPEVINELNRWGVWYANTLNLDGFRLDAVKHIKFSFMRDWLGHVRGQTGKNLFAVAEYWKNDLGALENYLSKTNWTMSAFDVPLHYNLYQASNSSGNYDMRNLLNGTLVQRHPSHAVTFVDNHDTQPGEALESFVQGWFKDLAYATILTREQGYPQVFYGDYYGIPSDGVPSYRQQIDPLLKARQQYAYGRQHDYFDHWDVIGWTREGNASHPNSGLATIMSDGPGGSKWMYVGRQKAGEVWHDMTGNRSGTVTINQDGWGHFFVNGGSVSVWVKR

SEQ ID NO: 32531 - protein, 485 aa, Bacillus sp.
HHDGTNGTIMQYFEWNVPNDGQHWNRLHNNAQNLKNAGITAIWIPPAWKGTSQNDVGYGAYDLYDLGEFNQKGTVRTKYGTKAELERAIRSLKANGIQVYGDVVMNHKGGADFTERVQAVEVNPQNRNQEVSGTYQIEAWTGFNFPGRGNQHSSFKWRWYHFDGTDWDQSRQLANRIYKFRGDGKAWDWEVDTENGNYDYLMYADVDMDHPEVINELNRWGVWYANTLNLDGFRLDAVKHIKFSFMRDWLGHVRGQTGKNLFAVAEYWKNDLGALENYLSKTNWTMSAFDVPLHYNLYQASNSSGNYDMRNLLNGTLVQRHPSHAVTFVDNHDTQPGEALESFVCGWFKPLAYATILTREQGYPQVFYGDYYGIPSDGVPSYRQQIDPLLKARQQYAYGRQHDYFDHWDVIGWTREGNASHPNSGLATIMSDGPGGSKWMYVGRQKAGEVWHDMTGNRSGTVTINQDGWGHFFVNGGSVSVWVKR

SEQ ID NO: 32532 - protein, 485 aa, Bacillus sp.
HHDGTNGTIMQYFEWNVPNDGQHWNRLHNNAQNLKNAGITAIWIPPAWKGTSQNDVGYGAYDLYDLGEFNQKGTVRTKYGTKAELERAIRSLKANGIQVYGDVVMNHKGGADFTERVQAVEVNPQNRNQEVSGTYQIEAWTGFNFPGRGNQHSSFKWRWYHFDGTDWDQSRQLANRGYKFRGDGKAWDWEVDTENGNYDYLMYADVDMDHPEVINELNRWGVWYANTLNLDGFRLDAVKHIKFSFMRDWLGHVRGQTGKNLFAVAEYWKNDLGALENYLSKTNWTMSAFDVPLHYNLYQASNSSGNYDMRNLLNGTLVQRHPSHAVTFVDNHDTQPGEALESFVQGWFKPLAYATILTREQGYPQVFYGDYYGIPSDGVPSYRQQIDPLLKARQQYAYGRQHDYFDHWDVIGWTREGNASHPNSGLATIMSDGPGGSKWMYVGRQKAGEVWHDMTGNRSGTVTINQDGWGHFFVNGGSVSVWVKR

SEQ ID NO: 32533 - protein, 485 aa, Bacillus sp.
HHDGTNGTIMQYFEWNVPNDGQHWNRLHNNAQNLKNAGITAIWIPPAWKGTSQNDVGYGAYDLYDLGEFNQKGTVRTKYGTKAELERAIRSLKANGIQVYGDVVMNHKGGADFTERVQAVEVNPQNRNQEVSGTYQIEAWTGFNFPGRGNQHSSFKWRWYHFDGTDWDQSRQLANRIYKFRGDGKAWDWEVDTENGNYDYLMYADVDMDHPEVINELNRWGVWYANTLNLDGFRLDAVKHIKFSFMRDWLGHVRGQTGKNLFAVAEYWKNDLGALENYLSKTNWTMSAFDVPLHYNLYQASNSSGNYDMRNLLNGTLVQRHPSHAVTFVDNHDTQPGEALESFVQGWFKPLAYATILTREQGYPQVFYGDYYGIPSDGVPSYRQQIDPLLKARQQYAYGRQHDYFDHWDVIGWTREGNASHPNSGLATIMSDGPGGSKWMYVGRQKAGEVWHDMTGIRSGTVTINQDGWGHFFVNGGSVSVWVKR

SEQ ID NO: 32534 - protein, 485 aa, Bacillus sp.
HHDGTNGTIMQYFEWNVPNDGQHWNRLHNNAQNLKNAGITAIWIPPAWKGTSQNDVGYGAYDLYDLGEFNQKGTVRTKYGTKAELERAIRSLKANGIQVYGDVVMNHKGGADFTERVQAVEVNPQNRNQEVSGTYQIEAWTGFNFPGRGNQHSSFKWYWYHFDGTDWDQSRQLANRIYKFRGDGKAWDWEVDTENGNYDYLMYADVDMDHPEVINELNRWGVWYANTLNLDGFRLDAVKHIKFSFMRDWLGHVRGQTGKNLFAVAEYWKNDLGALENYLSKTNWTMSAFDVPLHYNLYQASNSSGNYDMRNLLNGTLVQRHPSHAVTFVDNHDTQPGEALESFVQGWFKPLAYATILTREQGYPQVFYGDYYGIPSDGVPSYRQQIDPLLKARQQYAYGRQHDYFDHWDVIGWTREGNASHPNSGLATIMSDGPGGSKWMYVGRQKAGEVWHDMTGNRSGTVTINQDGWGHFFVNGGSVSVWVKR

SEQ ID NO: 32535 - protein, 483 aa, Bacillus sp. (in: firmicutes)
HHDGTNGTIMQYFEWNVPNDGQHWNRLHNNAQNLKNAGITAIWIPPAWKGTSQNDVGYGAYDLYDLGEFNQKGTVRTKYGTKAELERAIRSLKANGIQVYGDVVMNHKGGADFTERVQAVEVNPQNNNQEVSGTYQIEAWTGFNFPGRGNQHSSFKWRWYHFDGTDWDQSRQLANRIYKFRGKAWDWEVDTENGNYDYLMYADVDMDHPEVINELNRWGVWYANTLNLDGFRLDAVKHIKFSFLRDWLGHVRGQTGKNLFAVAEYWKNDLGAVENYLSKTNWTMSAFDVPLHYNLYQASNSSGNYDMRNLLNGTLVQRHPSHAVTFVDNHDTQPGEALESFVQGWFKPLAYATILTREQGYPSVFYGDYYGIPSDGVPSYRQQIDPLLKARQQYAYGRQHDYFDHWDVIGWTREGNASHPNSGLATIMSDGPGGSKWMYVGRQKAGEVWHDMTGNRSGTVTINQDGWGHFFVNGGSVSVWVKR

SEQ ID NO: 32536 - protein, 492 aa, Bacillus sp.
HHDGTNGTIMQYFEWNVPNDGQHWNRLHNNAQNLKNAGITAIWIPPAWKGTSQNDVGYGAYDLYDLGEFNQKGTVRTKYGTKAELERAIRSLKANGIQVYGDVVMNHKGGADFTERVQAVEVNPQNRNQEVSGTYQIEAWTGFNFPGRGNQHSSFKWRWYHFDGTDWDQSRQLANRIYKFRGDGKAWDWEVDTENGNYDYLMYIMTSRVAGDVDMDHPEVINELNRWGVWYANTLNLDGFRLDAVKHIKFSFMRDWLGHVRGQTGKNLFAVAEYWKNDLGALENYLSKTNWTMSAFDVPLHYNLYQASNSSGNYDMRNLLNGTLVQRHPSHAVTFVDNHDTQPGEALESFVQGWFKPLAYATILTREQGYPQVFYGDYYGIPSDGVPSYRQQIDPLLKARQQYAYGRQHDYFDHWDVIGWTREGNASHPNSGLATIMSDGPGGSKWMYVGRQKAGEVWHDMTGNRSGTVTINQDGWGHFFVNGGSVSVWVKR

SEQ ID NO: 32537 - protein, 485 aa, Bacillus sp.
HHDGTNGTIMQYFEWNVPNDGQHWNRLHNNAQNLKNAGITAIWIPPAWKGTSQNDVGYGAYDLYDLGEFNQKGTVRTKYGTKAELERAIRSLKANGIQVYGDVVMNHKGGADFTERVQAVEVNPQNRNQEVSGTYQIEAWTGFNFPGRGNQHSSFKWRWYHFDGTDWDQSRQLANRIYKFRGDGKAWDWEVDTENGNYDYLMYADVDMDHPEVINELNRWGVWYANTLNLDGFRLDAVKHIKFSFMRDWLGHVRGQTGKNLFAVAEYWKNDLGALENYLSKTNWTMSAFDVPLHYNLYQASNSSGNYDMRNLLNGTLVQRHPSHAVTFVDNHDTQPGEALESFVQGWFKPLAYATILTREQGYPQVFYGDYYGIPSDGVPSYRQQIDPLLKARQQYAYGRQHDYFDHWDVIGWTREGNASHPNSGLATIMSDGPGGSKWMYVGRQKAGEVWVDMTGNRSGTVTINQDGWGHFFVNGGSVSVWVKR

SEQ ID NO: 32538 - protein, 483 aa, Bacillus sp. (in: firmicutes)
HHDGTNGTIMQYFEWNVPNDGQHWNRLHNNAQNLKNAGITAIWIPPAWKGTSQNDVGYGAYDLYDLGEFNQKGTVRTKYGTKAELERAIRSLKANGIQVYGDVVMNHKGGADFTERVQAVEVNPQNNNQEVSGTYQIEAWTGFNFPGRGNQHSSFKWRWYHFDGTDWDQSRQLANRIYKFRGKAWDWEVDTENGNYDYLMYADVDMDHPEVINELNRWGVWYANTLNLDGFRLDAVKHIKFSFTRDWLGHVRGQTGKNLFAVAEYWKNDLGAVENYLSKTNWTMSAFDVPLHYNLYQASNSSGNYDMRNLLNGTLVQRHPSHAVTFVDNHDTQPGEALESFVQGWFKPLAYATILTREQGYPQVFYGDYYGIPSDGVPSYRQQIDPLLKARQQYAYGRQHDYFDHWDVIGWTREGNASHPNSGLATIMSDGPGGSKWMYVGRQKAGEVWHDMTGNRSGTVTINQDGWGHFFVNGGSVSVWVKR

SEQ ID NO: 32539 - protein, 483 aa, Bacillus sp. (in: firmicutes)
HHDGTNGTIMQYFEWNVPNDGQHWNRLHNNAQNLKNAGITAIWIPPAWKGTSQNDVGYGAYDLYDLGEFNQKGTVRTKYGTKAELERAIRSLKANGIQVYGDVVMNHKGGADFTERVQAVEVNPQNRNQEVSGTYQIEAWTGFNFPGRGNQHSSFKWRWYHFDGTDWDQSRQLANRIYKFRGKAWDWEVDTENGNYDYLMYADVDMDHPEVINELNRWGVWYANTLNLDGFRLDAVKHIKFSFMRDWLGHVRGQTGKNLFAIAEYWKNDLGALENYLSKTNWTMSAFDVPLHYNLYQASNSSGNYDMRNLLNGTLVQRHPSHAVTFVDNHDTQPGEALESFVQGWFKPLAYATILTREQGYPCVFYGDYYGIPSDGVPSYRQQIDPLLKARQQYAYGRQHDYFDHWDVIGWTREGNASHPNSGLATIMSDGPGGSKWMYVGRQKAGEVWHDMTGNRSGTVTINQDGWGHFFVNGGSVSVWVKR

SEQ ID NO: 32540 - protein, 485 aa, Bacillus sp.
HHDGTNGTIMQYFEWNVPNDGQHWNRLHNNAQNLKNAGITAIWIPPAWKGTSQNDVGYGAYDLYDLGEFNQKGTVRTKYGTKAELERAIRSLKANGIQVYGDVVMNHKGGADFTERVQAVEVNPQNRNQEVSGTYQIEAWTGFNFPGRGNQHSSFTWRWYHFDGTDWDQSRQLANRIYKFRGDGKAWDWEVDTENGNYDYLMYADVDMDHPEVINELNRWGVWYANTLNLDGFRLDAVKHIKFSFMRDWLGHVRGQTGKNLFAVAEYWKNDLGALENYLSKTNWTMSAFDVPLHYNLYQASNSSGNYDMRNLLNGTLVQRHPSHAVTFVDNHDTQPGEALESFVQGWFKPLAYATILTREQGYPQVFYGDYYGIPSDGVPSYRQQIDPLLKARQQYAYGRQHDYFDHWDVIGWTREGNASHPNSGLATIMSDGPGGSKWMYVGRQKAGEVWHDMTGNRSGTVTINQDGWGHFFVNGGSVSVWVKR

SEQ ID NO: 32541 - protein, 485 aa, Bacillus sp.
HHDGTNGTIMQYFEWNVPNDGQHWNRLHNNAQNLKNAGITAIWIPPAWKGTSQNDVGYGAYDLYDLGEFNQKGTVRTKYGTKAELERAIRSLKANGIQVYGDVVMNHKGGADFTERVQAVEVNPQNRNQEVSGTYQIEAWTGFNFPGRGNQHSSFKWRWYHFDGTDWDQSRQLANRIYKFRGDGKAWDWEVDTENGNYDYLMYADVDMDHPEVINELNRWGVWYANTLNLDGFRLDAVKHIKFSFMMDWLGHVRGQTGKNLFAVAEYWKNDLGALENYLSKTNWTMSAFDVPLHYNLYQASNSSGNYDMRNLLNGTLVQRHPSHAVTFVDNHDTQPGEALESFVQGWFKPLAYATILTREQGYPQVFYGDYYGIPSDGVPSYRQQIDPLLKARQQYAYGRQHDYFDHWDVIGWTREGNASHPNSGLATIMSDGPGGSKWMYVGRQKAGEVWHDMTGNRSGTVTINQDGWGHFFVNGGSVSVWVKR

SEQ ID NO: 32542 - protein, 485 aa, Bacillus sp.
HHDGTNGTIMQYFEWNVPNDGQHWNRLHNNAQNLKNAGITAIWIPPAWKGTSQNDVGYGAYDLYDLGEFNQKGTVRTKYGTKAELERAIRSLKANGIQVYGDVVMNHKGGADFTERVQAVEVNPQNRNQEVSGTYQIEAWTGFNFPGRGNQHSSFKWRWYHFDGTDWDQSRQLANRIYKFRGDGKAWDWEVDTENGNYDYLMYADVDMDHPEVINELNRWGVWYANTLNLDGFRLDAVKHIKFSFMRDWLGHVRGQTGKNLFAVAEYWKNDLGALENYLSKTNWTMSAFDVPLHYKLYQASNSSGNYDMRNLLNGTLVQRHPSHAVTFVDNHDTQPGEALESFVQGWFKPLAYATILTREQGYPQVFYGDYYGIPSDGVPSYRQQIDPLLKARQQYAYGRQHDYFDHWDVIGWTREGNASHPNSGLATIMSDGPGGSKWMYVGRQKAGEVWHDMTGNRSGTVTINQDGWGHFFVNGGSVSVWVKR

SEQ ID NO: 32543 - protein, 485 aa, Bacillus sp.
HHDGTNGTIMQYFEWNVPNDGQHWNRLHNNAQNLKNAGITAIWIPPAWKGTSQNDVGYGAYDLYDLGEFNQKGTVRTKYGTKAELERAIRSLKANGIQVYGDVVMNHKGGADFTERVQAVEVNPQNRNQEVSGTYQIEAWTGFNFPGRGNQHSSFKWRWYHFDGTDWDQSRQLANRIYKFRGDGKAWDWEVDTENGNYDYLMYADVDMDHPEVINELNRWGVWYANTLNLDGFRLDAVKHIKFSFMRDWLGHVRGQTGKNLFAVAEYWKNDLGALENYLSKTNWTMSAFDVPLHYNLYQASNSSGNYDMRNLLNGTLVQRHPSHAVTFVDNHDTQPGEALESFVQGWFKPLAYATILTREQCYPQVFYGDYYGIPSDGVPSYRQQIDPLLKARQQYAYGRQHDYFDHWDVIGWTREGNASHPNSGLATIMSDGPGGSKWMYVGRQKAGEVWHDMTGNRSGTVTINQDGWGHFFVNGGSVSVWVKR

SEQ ID NO: 32544 - protein, 485 aa, Bacillus sp.
HHDGTNGTIMQYFEWNVPNDGQHWNRLHNNAQNLKNAGITAIWIPPAWKGTSQNDVGYGAYDLYDLGEFNQKGTVRTKYGTKAELERAIRSLKANGIQVYGDVVMNHKGGADFTERVQAVEVNPQNRNQEVSGTYQIEAWTGFNFPGRGNQHSSFKWRWYHFDGTDWDQSSQLANRIYKFRGDGKAWDWEVDTENGNYDYLMYADVDMDHPEVINELNRWGVWYANTLNLDGFRLDAVKHIKFSFMRDWLGHVRGQTGKNLFAVAEYWKNDLGALENYLSKTNWTMSAFDVPLHYNLYQASNSSGNYDMRNLLNGTLVQRHPSHAVTFVDNHDTQPGEALESFVQGWFKPLAYATILTREQGYPQVFYGDYYGIPSDGVPSYRQQIDPLLKARQQYAYGRQHDYFDHWDVIGWTREGNASHPNSGLATIMSDGPGGSKWMYVGRQKAGEVWHDMTGNRSGTVTINQDGWGHFFVNGGSVSVWVKR

SEQ ID NO: 32545 - protein, 485 aa, Bacillus sp.
HHDGTNGTIMQYFEWNVPNDGQHWNRLHNNAQNLKNAGITAIWIPPAWKGTSQNDVGYGAYDLYDLGEFNQKGTVRTKYGTKAELERAIRSLKANGIQVYGDVVMNHKGGADFTERVQAVEVNPQNRNQEVSGTYQIEAWTGFNFPGRGNQHSSFKWRWYHFDGTDWDQSRQLANRIYKFRGDGKAWDWEVDTENGNYDYLMYADVDMDHPEVINELNRWGVWYANTLNLDGFRLDAVKHIKFSFMRDWLGHVRGQTGKNLFAVAEYWKNDLGALENYLSKTNWTMSAFDVPLHYNLYQASNSSGNYDMRNLLNGGLVQRHPSHAVTFVDNHDTQPGEALESFVQGWFKPLAYATILTREQGYPQVFYGDYYGIPSDGVPSYRQQIDPLLKARQQYAYGRQHDYFDHWDVIGWTREGNASHPNSGLATIMSDGPGGSKWMYVGRQKAGEVWHDMTGNRSGTVTINQDGWGHFFVNGGSVSVWVKR

SEQ ID NO: 32546 - protein, 485 aa, Bacillus sp.
HHDGTNGTIMQYFEWNVPNDGQHWNRLHNNAQNLKNAGITAIWIPPAWKGTSQNIVGYGAYDLYDLGEFNQKGTVRTKYGTKAELERAIRSLKANGIQVYGDVVMNHKGGADFTERVQAVEVNPQNRNQEVSGTYQIEAWTGFNFPGRGNQHSSFKWRWYHFDGTDWDQSRQLANRIYKFRGDGKAWDWEVDTENGNYDYLMYADVDMDHPEVINELNRWGVWYANTLNLDGFRLDAVKHIKFSFMRDWLGHVRGQTGKNLFAVAEYWKNDLGALENYLSKTNWTMSAFDVPLHYNLYQASNSSGNYDMRNLLNGTLVQRHPSHAVTFVDNHDTQPGEALESFVQGWFKPLAYATILTREQGYPQVFYGDYYGIPSDGVPSYRQQIDPLLKARQQYAYGRQHDYFDHWDVIGWTREGNASHPNSGLATIMSDGPGGSKWMYVGRQKAGEVWHDMTGNRSGTVTINQDGWGHFFVNGGSVSVWVKR

SEQ ID NO: 32547 - protein, 485 aa, Bacillus sp.
HHDGTNGTIMQYFEWNVPNDGQHWNRLHNNAQNLKNAGITAIWIPPAWKGTSQNDVGYGAYDLYDLGEFNQKGTVRTKYGTKAELERAIRSLKANGIQVYGDVVMNHKGGADFTERVQAVEVNPQNRNQEVSGTYQIEAWTGFNFPGRGNQHSSFKWRWYHFDGTDWDQSRQLANRIYKFRGDGKAWDWEVDTENGNYDYLMYADVDMDHPEVINELNRWGVWYANTLNLDGFRLDAVKHIKFSFMRDWLGHVRGQTGKNLFAVAEYWKNDLGALENYLSKTNWTMSAFDVPLHYNLYQASNSSGNYDMRNLLNGTLVQRHPSHAVTFVDNHDTQEGEALESFVQGWFKPLAYATILTREQGYPQVFYGDYYGIPSDGVPSYRQQIDPLLKARQQYAYGRQHDYFDHWDVIGWTREGNASHPNSGLATIMSDGPGGSKWMYVGRQKAGEVWHDMTGNRSGTVTINQDGWGHFFVNGGSVSVWVKR

SEQ ID NO: 32548 - protein, 485 aa, Bacillus sp.
HHDGTNGTIMQYFEWNVPNDGQHWNRLHNNAQNLKNAGITAIWIPPAWKGTSQNDVGYGAYDLYDLGEFNQKGTVRSKYGTKAELERAIRSLKANGIQVYGDVVMNHKGGADFTERVQAVEVNPQNRNQEVSGTYQIEAWTGFNFPGRGNQHSSFKWRWYHFDGTDWDQSRQLANRIYKFRGDGKAWDWEVDTENGNYDYLMYADVDMDHPEVINELNRWGVWYANTLNLDGFRLDAVKHIKFSFMRDWLGHVRGQTGKNLFAVAEYWKNDLGALENYLSKTNWTMSAFDVPLHYNLYQASNSSGNYDMRNLLNGTLVQRHPSHAVTFVDNHDTQPGEALESFVQGWFKPLAYATILTREQGYPQVFYGDYYGIPSDGVPSYRQQIDPLLKARQQYAYGRQHDYFDHWDVIGWTREGNASHPNSGLATIMSDGPGGSKWMYVGRQKAGEVWHDMTGNRSGTVTINQDGWGHFFVNGGSVSVWVKR

SEQ ID NO: 32549 - protein, 485 aa, Bacillus sp.
HHDGTNGTIMQYFEWNVPNDGQHWNRLHNNAQNLKNAGITAIWIPPAWKGTSQNDVGYGAYDLYDLGEFNQKGTVRTKYGTKAELERAIRSLKANGIQVYGDVVMNHKGGADFTERVQAVEVNPQNRNQEVSGTYQIEAWTGFNFPGRGNQHSSFKWRWYHFDGTDWDQSRQLANRIYKFRGDGKAWDWEVDTENGNYDYLMYADVDMDHPEVINELNRWGVWYANTLNLDGFRLDAVKHIKFSFMRDWLGHVRGQTGKNLFAVAEYWKNDLGALENYLSKTNWTMSAFDVPLHYNLYQASNSSGNYDMRNLLNGTLVQRHPSHAVTFVDNHDTQPGEALESFVQGWFKPLAYATILTREQGYPQVFYGDYYGIPSDGVPSYRQQIDPLLKMRQQYAYGRQHDYFDHWDVIGWTREGNASHPNSGLATIMSDGPGGSKWMYVGRQKAGEVWHDMTGNRSGTVTINQDGWGHFFVNGGSVSVWVKR

SEQ ID NO: 32550 - protein, 485 aa, Bacillus sp.
HHDGTNGTIMQYFEWNVPNDGQHWNRLHNNAQNLKNAGITAIWIPPAWKGTSQNDVGYGAYDLYDLGEFNQKGTVRTKYGTKAELERAIRSLKANGIQVYGDVVMNHKGGADFTERVQAVEVNPQNRNQEVSGTYQIEAWTGFNFPGRGNQHSSFKWRWYHFDGTDWDQSRQLANRIYKFRGDGKAWDWEVDTENGNYDYLMYADVDMDHPEVINELNRWGVWYANTLNLDGFRLDAVKHIKFSFMRDWLGHVRGQTGKNLFAVAEYWKNDLGALENYLSKTNWTMSAFDVPLHYNLYQASNSSGNYDMRNLLNGTLVQRHPSHAVTFVDNHDTQPGEALESFVQGWFKPLAYATILTREQGYPQVFYGDYYGIPSDGVPSYRQQIDPLLKARQQYAYGRQHDYFDHWDVIGWAREGNASHPNSGLATIMSDGPGGSKWMYVGRQKAGEVWHDMTGNRSGTVTINQDGWGHFFVNGGSVSVWVKR

SEQ ID NO: 32551 - protein, 485 aa, Bacillus sp.
HHDGTNGTIMQYFEWNVPNDGQHWNRLHNNAQNLKNAGITAIWIPPAWKGTSQNDVGYGAYDLYDLGEFNQKGTVRTKYGTKAELERAIRSLKANGIQVYGDVVMNHKGGADFTERVQAVEVNPQNRNQEVSGTYQIYAWTGFNFPGRGNQHSSFKWRWYHFDGTDWDQSRQLANRIYKFRGDGKAWDWEVDTENGNYDYLMYADVDMDHPEVINELNRWGVWYANTLNLDGFRLDAVKHIKFSFMRDWLGHVRGQTGKNLFAVAEYWKNDLGALENYLSKTNWTMSAFDVPLHYNLYQASNSSGNYDMRNLLNGTLVQRHPSHAVTFVDNHDTQPGEALESFVQGWFKPLAYATILTREQGYPQVFYGDYYGIPSDGVPSYRQQIDPLLKARQQYAYGRQHDYFDHWDVIGWTREGNASHPNSGLATIMSDGPGGSKWMYVGRQKAGEVWHDMTGNRSGTVTINQDGWGHFFVNGGSVSVWVKR

SEQ ID NO: 32552 - protein, 485 aa, Bacillus sp.
HHDGTNGTIMQYFEWNVPNDGQHWNRLHNNAQNLKNAGITAIWIPPAWKGTSQNDVGYGAYDLYDLGEFNQKGTVRTKYGTKAELERAIRSLKANGIQVYGDVVMNHKGGADFTERVQAVEVNPQNRNQEVSGTYQIEAWTGFNFPGRGNQHSSFKWRWYHFDGTDWDQSRQLANRIYKFRGDGKAWDWEVDTENGNYDYLMYADVDMDHPEVINELNRWGVWYANTLNLDGFRLDAVKHIKFSFMRDWLGHVRGQTGKNLFAVAEYWKNDLGALENYLSKTNWTMSAFDVPLHYNLYQASNSSGNYDMRNLLNGTLVQRHPSHAVTFVDNHDTQPGEALESFVQGWFKPLAYATILTREQGYPQVFYGDYYGIPSDGVPSYRQQIQPLLKARQQYAYGRQHDYFDHWDVIGWTREGNASHPNSGLATIMSDGPGGSKWMYVGRQKAGEVWHDMTGNRSGTVTINQDGWGHFFVNGGSVSVWVKR

SEQ ID NO: 32553 - protein, 485 aa, Bacillus sp.
HHDGTNGTIMQYFEWNVPNDGQHWNRLHNNAQNLKNAGITAIWIPPAWKGTSQNDVGYGAYDLYDLGEFNQKGTVRTKYGTKAELERAIRSLKANGIQVYGDVVMNHKGGADFTERVQAVEVNPQNRNQEVSGTYQIEAWTGFNFPGRGNQHSSFKWRWYHFDGTDWDQSRQLANRIYKFRGDGKAWDWEVDTENGNYDYLMYADVDMDHPEVINELNRWGVWYANTLNLDGFRLDAVKHIKFSFMRDWLGHVRGQTGKNLFAVAEYWKNDLGALENYLSKTNWTMSAFDVPLHYNLYQASNSSGNYDMRNLLNGTLVQRHPSHAVTFVDNHDTQPGEALESFVQGWFKPLAYATILTREQRYPQVFYGDYYGIPSDGVPSYRQQIDPLLKARQQYAYGRQHDYFDHWDVIGWTREGNASHPNSGLATIMSDGPGGSKWMYVGRQKAGEVWHDMTGNRSGTVTINQDGWGHFFVNGGSVSVWVKR

SEQ ID NO: 32554 - protein, 485 aa, Bacillus sp.
HHDGTNGTIMQYFEWNVPNDGQHWNRLHNNAQNLKNAGITAIWIPPAWKGTSQNDVGYGAYDLYDLGEFNQKGTVRTKYGTKAELERAIRSLKANGIQVYGDVVMNHKGGADFTERVQAVEVNPQNRNQEVSGTYQIEAWTGFNFPGRGNQHSSFKWRWYHFDGTDWDQSRQLANRIYKFRGDGKAWDWEVDTENGNYDYLMYADVDMDHPEVINELNRWGVWYANTLNLDGFRLDAVKHIKFSFMRDWLGHVRGQTGKNLFAVAEYWKNDLGALENYLSKTNWTMSAFDVPLHYNLYQASNSSGNYDMRNLLNGTLVQRHPSHAVTFVDNHDTQPGEALESFVQGWFKPLAYATILTREQGYPQVFYGDYYGIPSDGVESYRQQIDPLLKARQQYAYGRQHDYFDHWDVIGWTREGNASHPNSGLATIMSDGPGGSKWMYVGRQKAGEVWHDMTGNRSGTVTINQDGWGHFFVNGGSVSVWVKR

SEQ ID NO: 32555 - protein, 485 aa, Bacillus sp.
HHDGTNGTIMQYFEWNVPNDGQHWNRLHNNAQNLKNAGITAIWIPPAWKGTSQNDVGYGAYDLYDLGEFNQKGTVRTKYGTKAELERAIRSLKANGIQVYGDVVMNHKGGADFTERVQAVEVNPQNRNQEVSGTYQIEAWTGFNFPGRGNQHSSFKWRWYHFDGTDWDQSRQLANRIYKFRGDGKAWDWEVDTENGNYDYLMYADVDMDHPEVINELNYWGVWYANTLNLDGFRLDAVKHIKFSFMRDWLGHVRGQTGKNLFAVAEYWKNDLGALENYLSKTNWTMSAFDVPLHYNLYQASNSSGNYDMRNLLNGTLVQRHPSHAVTFVDNHDTQPGEALESFVQGWFKPLAYATILTREQGYPQVFYGDYYGIPSDGVPSYRQQIDPLLKARQQYAYGRQHDYFDHWDVIGWTREGNASHPNSGLATIMSDGPGGSKWMYVGRQKAGEVWHDMTGNRSGTVTINQDGWGHFFVNGGSVSVWVKR

SEQ ID NO: 32556 - protein, 485 aa, Bacillus sp.
HHDGTNGTIMQYFEWNVPNDGQHWNRLHNNAQNLKNAGITAIWIPPAWKGTSQNDVGYGAYDLYDLGEFNQKGTVRTKYGTKAELERAIRSLKANGIQVYGDVVMNHKGGADFTERVQAVEVNPQNRNQEVSGTYQIEAWTGFNFPGRGNQHSSFKWRWYHFDGTDWDQSRQLANRIYKFRGDGKAWDWEVDTENGNYDYLMYADVDMDHPEVINELNRWGVWYANTLNLDGFRLDAVKHIKFSFMRDWLGHVRGQTGKNLFAVAEYWKNDLGALENYLSKTNWTMSAFDVPLHYNLYQASNSSGNYDLRNLLNGTLVQRHPSHAVTFVDNHDTQPGEALESFVQGWFKPLAYATILTREQGYPQVFYGDYYGIPSDGVPSYRQQIDPLLKARQQYAYGRQHDYFDHWDVIGWTREGNASHPNSGLATIMSDGPGGSKWMYVGRQKAGEVWHDMTGNRSGTVTINQDGWGHFFVNGGSVSVWVKR

SEQ ID NO: 32557 - protein, 483 aa, Bacillus sp.
HHNGTNGTLMQYFEWYLPNDGNHWNRLNSDASNLKSKGITAVWIPPAWKGASQNDVGYGAYDLYDLGEFNQKGTVRTKYGTRSQLQAAVTSLKNNGIQVYGDVVMNHKGGADATEMVKAVEVNPNNRNQEVTGEYTIEAWTRFDFPGRANTHSSFKWRWYHFDGVDWDQSRRLNNRIYKFRTKAWDWEVDTEFGNYDYLMYADIDMDHPEVVNELRNWGVWYTNTLGLDGFRIDAVKHIKYSFVRDWINHVRSAIGKNMFAVAEFWKNDLGAIENYLQKTNWNHSVFDVPLHFNLYYASKSGGNYDMRNIFNGTVVQRHPSHAVTFVDNHDSQPEESLESFVREWFKPLAYALTLTREQGYPSVFYGDYYGIPTHGVPAMRSKIDPILEARQKYAYGPQHDYIDHPDVIGWTREGDSSAAKSGLAALITDGPGGSKRMYAGLKNAGETWYDITGNKSDTVKIGSDGWGEFHVNDGSVSIYVQK

SEQ ID NO: 32558 - protein, 485 aa, Bacillus sp.
HHDGTNGTIMQYFEWNVPNDGQHWNRLHNNAQNLKNAGITAIWIPPAWKGTSQNDVGYGAYDLYDLGEFNQKGTVRTKYGTKAELERAIRSLKANGIQVYGDVVMNHKGGADFTERVQAVEVNPQNRNQEVSGTYQIESWTGFNFPGRGNQHSSFKWRWYHFDGTDWDQSRQLANRIYKFRGDGKAWDWEVDTENGNYDYLMYADVDMDHPEVINELNRWGVWYANTLNLDGFRLDAVKHIKFSFMRDWLGHVRGQTGKNLFAVAEYWKNDLGALENYLSKTNWTMSAFDVPLHYNLYQASNSSGNYDMRNLLNGTLVQRHPSHAVTFVDNHDTQPGEALESFVQGWFKPLAYATILTREQGYPQVFYGDYYGIPSDGVPSYRQQIDPLLKARQQYAYGRQHDYFDHWDVIGWTREGNASHPNSGLATIMSDGPGGSKWMYVGRQKAGEVWHDMTGNRSGTVTINQDGWGHFFVNGGSVSVWVKR

SEQ ID NO: 32559 - protein, 485 aa, Bacillus sp.
HHDGTNGTIMQYFEWNVPNDGQHWNRLHNNAQNLKNAGITAIWIPPAWKGTSQNDVGYGAYDLYDLGEFNQKGTVRTKYGTKAELERAIRSLKANGIQVYGDVVMNHKGGADFTERVQAVEVNPQNRNQEVSGTYQIEAWTGFNFPGRGNQHSSFKWRWYHFDGTDWDQSRQLANRIYKFRGDGKAWDWEVDTENGNYDYLMYADVDMDHPEVINELNRWGVWYANTLNLDGFRLDAVKHIKFSFMRDWLGHVRGQTGKNLFAVAEYWKNDLGALENYLSKTNWTMSAFDVPLHYNLYQASNSSGNYDMRNLLNGTLVQRHPSHAVTFVDNHDTQPGEALESFVQGWFKPLAYATILTREQGYPQVFYGDYYGIPSDGVPSYRQQIDPLLKARQQYAYGRQHDYFDHWDVIGWTREGNASHPNSGLATIMSPGPGGSKWMYVGRQKAGEVWHDMTGNRSGTVTINQDGWGHFFVNGGSVSVWVKR

SEQ ID NO: 32560 - protein, 485 aa, Bacillus sp.
HHDGTNGTIMQYFEWNVPNDGQHWNRLHNNAQNLKNAGITAIWIPPAWKGTSQNDVGYGAYDLYDLGEFNQKGTVRTKYGTKAELERAIRSLKANGIQVYGDVVMNHKGGADFTERVQAVEVNPQNRNQEVSGTYQIEAWTGFNFPGRGNQHSSFKWRWYHFDGTDWDQSRQLANRIYKFRGDGKAWDWEVDTENGNYDYLMYADVDMDHPEVINELNRWGVWYANTLNLDGFRLDAVKHIKFSFMRDWLGHVRGQTGKNLFAVAEYWKNDLGALENYLSKTNWTMSAFDVPLHYHLYQASNSSGNYDMRNLLNGTLVQRHPSHAVTFVDNHDTQPGEALESFVQGWFKPLAYATILTREQGYPQVFYGDYYGIPSDGVPSYRQQIDPLLKARQQYAYGRQHDYFDHWDVIGWTREGNASHPNSGLATIMSDGPGGSKWMYVGRQKAGEVWHDMTGNRSGTVTINQDGWGHFFVNGGSVSVWVKR

SEQ ID NO: 32561 - protein, 485 aa, Bacillus sp.
HHDGTNGTIMQYFEWNVPNDGQHWNRLHNNAQNLKNAGITAIWIPPAWKGTSQNDVGYGAYDLYDLGEFNQKCTVRTKYGTKAELERAIRSLKANGIQVYGDVVMNHKGGADFTERVQAVEVNPQNRNQEVSGTYQIEAWTGFNFPGRGNQHSSFKWRWYHFDGTDWDQSRQLANRIYKFRGDGKAWDWEVDTENGNYDYLMYADVDMDHPEVINELNRWGVWYANTLNLDGFRLDAVKHIKFSFMRDWLGHVRGQTGKNLFAVAEYWKNDLGALENYLSKTNWTMSAFDVPLHYNLYQASNSSGNYDMRNLLNGTLVQRHPSHAVTFVDNHDTQPGEALESFVQGWFKPLAYATILTREQGYPQVFYGDYYGIPSDGVPSYRQQIDPLLKARQQYAYGRQHDYFDHWDVIGWTREGNASHPNSGLATIMSDGPGGSKWMYVGRQKAGEVWHDMTGNRSGTVTINQDGWGHFFVNGGSVSVWVKR

SEQ ID NO: 32562 - protein, 485 aa, Bacillus sp.
HHDGTNGTIMQYFEWNVPNDGQHWNRLHNNAQNLKNAGITAIWIPPAWKGTSQNDVGYGAYDLYDLGEFNQKGTVRTKYGTKAELERAIRSLKANGIQVYGDVVMNHKGGADFTERVQAVEVNPQNRNQEVSGTYQIEAWTGFNFPGRGNQHSSFKWRWSHFDGTDWDQSRQLANRIYKFRGDGKAWDWEVDTENGNYDYLMYADVDMDHPEVINELNRWGVWYANTLNLDGFRLDAVKHIKFSFMRDWLGHVRGQTGKNLFAVAEYWKNDLGALENYLSKTNWTMSAFDVPLHYNLYQASNSRGNYDMRNLLNGTLVQRHPSHAVTFVDNHDTQPGEALESFVQGWFKPLAYATILTREQGYPQVFYGDYYGIPSDGVPSYRQQIDPLLKARQQYAYGRQHDYFDHWDVIGWTREGNASHPNSGLATIMSDGPGGSKWMYVGRQKAGEVWHDMTGNRSGTVTINQDGWGHFFVNGGSVSVWVKR

SEQ ID NO: 32563 - protein, 485 aa, Bacillus sp.
HHDGTNGTIMQYFEWNVPNDGQHWNRLHNNAQNLKNAGITAIWIPPAWKGTSQNDVGYGAYDLYDLGEFNQKGTVRTKYGTKAELERAIRSLKANGIQVYGDVVMNHKGGADFTERVQAVEVNPQNRNQEVSGTYQIEAWTGFNFPGRGNQHSSFKWRWYHFDGTDWDQSRQLANRIYKFRGDGKAWDWEVDTENGNYDYLMYADVDMDHPEVINELNRWGVWYANTLNLCGFRLDAVKHIKFSFMRDWLGHVRGQTGKNLFAVAEYWKNDLGALENYLSKTNWTMSAFDVPLHYNLYQASNSSGNYDMRNLLNGTLVQRHPSHAVTFVDNHDTQPGEALESFVQGWFKPLAYATILTREQGYPQVFYGDYYGIPSDGVPSYRQQIDPLLKARQQYAYGRQHDYFDHWDVIGWTREGNASHPNSGLATIMSDGPGGSKWMYVGRQKAGEVWHDMTGNRSGTVTINQDGWGHFFVNGGSVSVWVKR

SEQ ID NO: 32564 - protein, 485 aa, Bacillus sp.
HHDGTNGTIMQYFEWNVPNDGQHWNRLHNNAQNLKNAGITAIWIPPAWKGTSQNDVGYGAYDLYDLGEFNQKGTVRTKYGTKAELERAIRSLKANGIQVYGDVVMNHKGGADFTERVQAVEVNPQNRNQEVSGTYQIEAWTGFNFPGRGNQHSSFKWRWYHFDGTDWDQSRQLANRIYKFRGDGKAWDWEVDTENGNYDYLMYADVDMDHPEVINELNRWGVWYANTLNLDGFRLDAVKHIKFSFMRDWLGHVRGQTGKNLFAVAEYWKNDLGALENYLSKTNATMSAFDVPLHYNLYQASNSSGNYDMRNLLNGTLVQRHPSHAVTFVDNHDTQPGEALESFVQGWFKPLAYATILTREQGYPQVFYGDYYGIPSDGVPSYRQQIDPLLKARQQYAYGRQHDYFDHWDVIGWTREGNASHPNSGLATIMSDGPGGSKWMYVGRQKAGEVWHDMTGNRSGTVTINQDGWGHFFVNGGSVSVWVKR

SEQ ID NO: 32565 - protein, 485 aa, Bacillus sp.
HHDGTNGTIMQYFEWNVPNDGQHWNRLHNNAQNLKNAGITAIWIPPAWKGTSQNDVGYGAYDLYDLGEFNQKGTVRTKYGTKAELERAIRSLKANGIQVYGDVVMNHKGGADFTERVQAVEVNPQNRNQEVSGTYQIEAWTGFNFPGRGNQHSSFKWRWYHFDGTDWDQSRQLANRIYKFRGDGKAWDWEVDTENGNYDYLMYADVDMDHPEVINELNRWGVWYANTLNLDGFRLDAVKHIKFSFMRDWLGHVRGQTGKNLFAVAEYWKNDLGALENYLSKTNWTMSAFDVPLHYNLYQASNSSGNYDMRNLLNGTLVQRHPSHAVTFVDNHDTQPGEALESFVQGWFKPLAYATILTREQGYPQVFYGDYYGIPSDGVPSYRQQIDPLLKARQQYAYGRQHIYFDHWDVIGWTREGNASHPNSGLATIMSDGPGGSKWMYVGRQKAGEVWHDMTGNRSGTVTINQDGWGHFFVNGGSVSVWVKR

SEQ ID NO: 32566 - protein, 485 aa, Bacillus sp.
HHDGTNGTIMQYFEWNVPNDGQHWNRLHNNAQNLKNAGITAIWIPPAWKGTSQNDVGYGAYDLYDLGEFNQKGTVRTKYGTKAELERAIRSLKANGIQVYGDVVMNHKGGADFTERVQAVEVNPQNRNQEVSGTYQIEAWTGFNFPGRGNQHSSFKWRWYHFDGTDWDQSRQLANRIYKFRGDGKAWDWEVDTENGNYDYLMYADVDMDHPEVINELNRWGVWYANTLNLDGFRLDAVKHIKFSFMRDWLGHVRGQTGKNLFAVAEYWKNDLGALENYLSKTNWTMSAFDVPLHYNLYQASNSSGNYDMRNLLNGTLVQRHPSHAVTFVDNHDTQPGEALESFVQGWFKPLAYATILTREQGYPQVFQGDYYGIPSDGVPSYRQQIDPLLKARQQYAYGRQHDYFDHWDVIGWTREGNASHPNSGLATIMSDGPGGSKWMYVGRQKAGEVWHDMTGNRSGTVTINQDGWGHFFVNGGSVSVWVKR

SEQ ID NO: 32567 - protein, 485 aa, Bacillus sp.
HHDGTNGTIMQYFEWNVPNDGQHWNRLHNNAQNLKNAGITAIWIPPAWKGTSQNDVGYGAYDLYDLGEFNQKGTVRTKYGTKAELERAIRSLKANGIQVYGDVVMNHKGGADFTERVQAVEVNPQNRNQEVSGTYQIEAWTGFNFPGRGNQHSSFKWRWYHFDGTDWDQSRQLANRIYKFRGDGKAWDWEVDTENGNYDYLMYADVDMDHPEVINELNRWGVWYANTLNLDGFRLDAVKHIKFSFMRDWLGHVRGQTGKNLFAVAEYWKNDLGALENYLSKTNWTMSAFDVPLHYNLYQASNSSGNYDMRNLLNGTLVQRHPSHAVTFVDNHDTQPGEALESFVQGWFKPLAYATIHTREQGYPQVFYGDYYGIPSDGVPSYRQQIDPLLKARQQYAYGRQHDYFDHWDVIGWTREGNASHPNSGLATIMSDGPGGSKWMYVGRQKAGEVWHDMTGNRSGTVTINQDGWGHFFVNGGSVSVWVKR

SEQ ID NO: 32568 - protein, 485 aa, Bacillus sp.
HHDGTNGTIMQYFEWNVPNDGQHWNRLHNNAQNLKNAGITAIWIPPAWKGTSQNDVGYGAYDLYDLGEFNQKGTVRTKYGTKAELERAIRSLKANGIQVYGDVVMNHKGGADFTERVQAVEVNPQNRNQEVSGTYQIEAWTGFNFPGRGNQHSSFKWRWYHFDGTDWDQSRQLANRIYKFRGDGKAWDWEVDTENGNYDYLMYADVDMDHPEVINELNRWGVWYANTLNLDGFRLDAVKHIKFSFMRDWLGHVRGQTGKNLFAVAEYWKNDLGALENYLSKTNWTMSAFDVPLHYNLYQASNSSGNYDMRNLLNGTLVQRHPSHAVTFVDNHDTQPGEALESFVQGWFKPLAYATILTREQGYPQVFYGDYYGIPSDGVPSYRQQIDPLLKARQQYAYGRQHDYFDHWDVIGWTREGNASHPNSALATIMSDGPGGSKWMYVGRQKAGEVWHDMTGNRSGTVTINQDGWGHFFVNGGSVSVWVKR

SEQ ID NO: 32569 - protein, 485 aa, Bacillus sp.
HHDGTNGTIMQYFEWNVPNDGQHWNRLHNNAQNLKNAGITAIWIPPAWKGTSQNDVGYGAYDLYDLGEFNQKGTVRTKYGTKAELERAIRSLKANGIQVYGDVVMNHKGGADFTERVQAVEVNPQNRNQEVSGTYQIEAWTGFNFPGRGNQHSSFKWRWYHFDGTDWDQSRQLANRIYKFRGDGKAWDWEVDTENGNYDYLMYADVDMDHPEVINELNRWGVWYANTLNLDGFRLDAVKHIKFSFMRDWLGHVRGQTGKNLFAVAEYWKNDLGALENYLSKTNWTMSAFDVPLHYNLYQASNSSGNYDMRNLLNGTLVQRHPSHVVTFVDNHDTQPGEALESFVQGWFKPLAYATILTREQGYPQVFYGDYYGIPSDGVPSYRQQIDPLLKARQQYAYGRQHDYFDHWDVIGWTREGNASHPNSGLATIMSDGPGGSKWMYVGRQKAGEVWHDMTGNRSGTVTINQDGWGHFFVNGGSVSVWVKR

SEQ ID NO: 32570 - protein, 485 aa, Bacillus sp.
HHDGTNGTIMQYFEWNVPNDGQHWNRLHNNAQNLKNAGITAIWIPPAWKGTSQNDVGYGAYDLYDLGEFNQKGTVRTKYGTKAELERAIRSLKANGIQVYGDVVMNHKGGADFTERVQAVEVNPQNRNQEVSGTYQIEAWTGFNFPGRLNQHSSFKWRWYHFDGTDWDQSRQLANRIYKFRGDGKAWDWEVDTENGNYDYLMYADVDMDHPEVINELNRWGVWYANTLNLDGFRLDAVKHIKFSFMRDWLGHVRGQTGKNLFAVAEYWKNDLGALENYLSKTNWTMSAFDVPLHYNLYQASNSSGNYDMRNLLNGTLVQRHPSHAVTFVDNHDTQPGEALESFVQGWFKPLAYATILTREQGYPQVFYGDYYGIPSDGVPSYRQQIDPLLKARQQYAYGRQHDYFDHWDVIGWTREGNASHPNSGLATIMSDGPGGSKWMYVGRQKAGEVWHDMTGNRSGTVTINQDGWGHFFVNGGSVSVWVKR

SEQ ID NO: 32571 - protein, 485 aa, Bacillus sp.
HHDGTNGTIMQYFEWNVPNDGQHWNRLHNNAQNLKNAGITAIWIPPAWKGTSQNDVGYGWYDLYDLGEFNQKGTVRTKYGTKAELERAIRSLKANGIQVYGDVVMNHKGGADFTERVQAVEVNPQNRNQEVSGTYQIEAWTGFNFPGRGNQHSSFKWRWYHFDGTDWDQSRQLANRIYKFRGDGKAWDWEVDTENGNYDYLMYADVDMDHPEVINELNRWGVWYANTLNLDGFRLDAVKHIKFSFMRDWLGHVRGQTGKNLFAVAEYWKNDLGALENYLSKTNWTMSAFDVPLHYNLYQASNSSGNYDMRNLLNGTLVQRHPSHAVTFVDNHDTQPGEALESFVQGWFKPLAYATILTREQGYPQVFYGDYYGIPSDGVPSYRQQIDPLLKARQQYAYGRQHDYFDHWDVIGWTREGNASHPNSGLATIMSDGPGGSKWMYVGRQKAGEVWHDMTGNRSGTVTINQDGWGHFFVNGGSVSVWVKR

SEQ ID NO: 32572 - protein, 485 aa, Bacillus sp.
HHDGTNGTIMQYFEWNVPNDGQHWNRLHNNAQNLKNAGITAIWIPPAWKGTSQNDVGYGAYDLYDLGEFNQKGTVRTKYGTKAELERAIRSLKANGIQVYGDVVMNHKGGADFTERVQAVEVNPQNRNQEVSGTYQIEAWTGFNFPGRGNQHSSFKWRWYHFDGTDWDQSRQLANRIYKFRGDGKAWDWEVDTENGNYDYLMYADVDMDHPEVINELNRWGVWYANTLNLDGFRLDAVKHIKFSFMRDWLGHVRGQTGKNLFAVAEYWKNDLGALENYLSKTNWTMSAFDVPLHYNLYQASNSSGNYDMRNLLNGTLVQRHPSHAVTFVDNHDTQPGEALESFVQGWFKPLAYATILTREQGYPQVFYGDYYGIPSDGVPSYRQQIDPLLKARQQYAYGRQHDYFDHWDVIGWTREGNASHPNSGLATIMSDGPEGSKWMYVGRQKAGEVWHDMTGNRSGTVTINQDGWGHFFVNGGSVSVWVKR

SEQ ID NO: 32573 - protein, 485 aa, Bacillus sp.
HHDGTNGTIMQYFEWNVPNDGQHWNRLHNNAQNLKNAGITAIWIPPAWKGTSQNDVGYGAYDLYDLGEFNQKGTVRTKYGTKAELERAIRSLKANGIQVYGDVVMNHKGGADFTERVQAVEVNPQNRNQEVSGTYQIEAWTGFNFPGRGNQHSSFKWRWYHFDGTDWDQSRQLANRIYKFRGDGKAWDWEVDTENGNYDYLMYADVDMDHPEVINELNRWGVWYANTLNLDGFRLDAVKHICFSFMRDWLGHVRGQTGKNLFAVAEYWKNDLGALENYLSKTNWTMSAFDVPLHYNLYQASNSSGNYDMRNLLNGTLVQRHPSHAVTFVDNHDTQPGEALESFVQGWFKPLAYATILTREQGYPQVFYGDYYGIPSDGVPSYRQQIDPLLKARQQYAYGRQHDYFDHWDVIGWTREGNASHPNSGLATIMSDGPGGSKWMYVGRQKAGEVWHDMTGNRSGTVTINQDGWGHFFVNGGSVSVWVKR

SEQ ID NO: 32574 - protein, 485 aa, Bacillus sp.
HHDGTNGTIMQYFEWNVPNDGQHWNRLHNNAQNLKNAGITAIWIPPAWKGTSQNDVGYGAYDLYDLGEFNQKGTVRTKYGTKAELERAIRSLKANGIQVYGDVVMNHKGGADFTERVQAVEVNPQNRNQEVCGTYQIEAWTGFNFPGRGNQHSSFKWRWYHFDGTDWDQSRQLANRIYKFRGDGKAWDWEVDTENGNYDYLMYADVDMDHPEVINELNRWGVWYANTLNLDGFRLDAVKHIKFSFMRDWLGHVRGQTGKNLFAVAEYWKNDLGALENYLSKTNWTMSAFDVPLHYNLYQASNSSGNYDMRNLLNGTLVQRHPSHAVTFVDNHDTQPGEALESFVQGWFKPLAYATILTREQGYPQVFYGDYYGIPSDGVPSYRQQIDPLLKARQQYAYGRQHDYFDHWDVIGWTREGNASHPNSGLATIMSDGPGGSKWMYVGRQKAGEVWHDMTGNRSGTVTINQDGWGHFFVNGGSVSVWVKR

SEQ ID NO: 32575 - protein, 485 aa, Bacillus sp.
HHDGTNGTIMQYFEWNVPNDGQHWNRLHNNAQNLKNAGITAIWIPPAWKGTSQNDVGYGAYDLYDLGEFNQKGTVRTKYGTKAELERAIRSLKANGIQVYGDVVMNHKGGADFTERVQAVEVNPQNRNQEVSGTYQIEAWTGFNFPGRGNQHSSFKWRWYHFDGTDWDQSRQLANRIYKFRGDGKAWDWEVDTENGNYDYLMYADVDMDHPEVINELNRWGVWYANTLNLDGFRLDAVKHIKFSFMRDWLGHVRGQTGKNLFAVAEYWKNDLGALENYLSKTNWTMSAFDVPLHYNLYQASNSSGNYDMRNLLNGTLVQRHPSHAVTFVDNHDTQPGEALESFVQGWFKPLAYATILTREQGYPQVFYGDYYGIPSDGVPSYRQQIDPLLKARQQYAYGRQHDYFDHWDVIGWTREGNASHPNSGLATIMSDGPGGSKWMYVGRQKAGEVWHDMTGNRSGTVTINQDGWGHFFVTGGSVSVWVKR

SEQ ID NO: 32576 - protein, 485 aa, Bacillus sp.
HHDGTNGTIMQYFEWNVPNDGQHWNRLHNNAQNLKNAGITAIWIPPAWKGTSQNDVGYGAYDLYDLGEFNQKGTVRTKYGTKAELERAIRSLKANGIQVYGDVVMNHKGGADFTERVQAVEVNPQNRNQEVSGTYQIEAWTGFNFPGRGNQHSSFKWRWYHFDGTDWDQSRQLANRIYKFRGDGKAWDWEVDTENGNYDYLMYADVDMDAPEVINELNRWGVWYANTLNLDGFRLDAVKHIKFSFMRDWLGHVRGQTGKNLFAVAEYWKNDLGALENYLSKTNWTMSAFDVPLHYNLYQASNSSGNYDMRNLLNGTLVQRHPSHAVTFVDNHDTQPGEALESFVQGWFKPLAYATILTREQGYPQVFYGDYYGIPSDGVPSYRQQIDPLLKARQQYAYGRQHDYFDHWDVIGWTREGNASHPNSGLATIMSDGPGGSKWMYVGRQKAGEVWHDMTGNRSGTVTINQDGWGHFFVNGGSVSVWVKR

SEQ ID NO: 32577 - protein, 485 aa, Bacillus sp.
HHDGTNGTIMQYFEWNVPNDGQHWNRLHNNAQNLKNAGITAIWIPPAWKGTSQNDVGYGAYDLYDLGEFNQKGTVRTKYGTKAELERAIRSLKANGIQVYGDVVMNHKGGADFTERVQAVEVNPQNRNQEVSGTYQIEAWTGFNFPGRGNQHSSFKWRWYHFDGTDWDQSRQLANRIYKFRGDGKAWDWEVDTENGNYDYLMYADVDMDHPEVINELNRWGVWYANTLNLDGFRLDAVKHIKFSFMRDWLGHVRGQTGKNLFAVAEYWKNDLGALENGLSKTNWTMSAFDVPLHYNLYQASNSSGNYDMRNLLNGTLVQRHPSHAVTFVDNHDTQPGEALESFVQGWFKPLAYATILTREQGYPQVFYGDYYGIPSDGVPSYRQQIDPLLKARQQYAYGRQHDYFDHWDVIGWTREGNASHPNSGLATIMSDGPGGSKWMYVGRQKAGEVWHDMTGNRSGTVTINQDGWGHFFVNGGSVSVWVKR

SEQ ID NO: 32578 - protein, 485 aa, Bacillus sp.
HHDGTNGTIMQYFEWNVPNDGQHWNRLHNNAQNLKNAGITAIWIPPAWKGTSQNDVGYGAYDLYDLGEFNQKGTVRTKYGTKAELERAIRSLKANGIQVYGDVVMNHKGGADFTERVQAVEVNPQNRNQEVSGTYQIEAWTGFNFPGRGNQHSSFKWRWYHFDGTDWDQSRQLANRIYKFRGDGKAWDWEVDTENGNYDYLMYADVDMDHPEVINELNRWGVWYANTLNLDGFRLDAVKHIKFSFMRDWLGHVRGQTGKNLFAVAEYWKNCLGALENYLSKTNWTMSAFDVPLHYNLYQASNSSGNYDMRNLLNGTLVQRHPSHAVTFVDNHDTQPGEALESFVQGWFKPLAYATILTREQGYPQVFYGDYYGIPSDGVPSYRQQIDPLLKARQQYAYGRQHDYFDHWDVIGWTREGNASHPNSGLATIMSDGPGGSKWMYVGRQKAGEVWHDMTGNRSGTVTINQDGWGHFFVNGGSVSVWVKR

SEQ ID NO: 32579 - protein, 485 aa, Bacillus sp.
HHDGTNGTIMQYFEWNVPNDGQHWNRLHNNAQNLKNAGITAIWIPPAWKGTSQNDVGYGAYDLYDLGEFNQKGTVRTKYGTKAELERAIRSLKANGIQVYGDVVMNHKGGADFTERVQAVEVNPQNRNQEVSGTYQIEAWTGFNFPGRGNQHSSFKWRWYHFDGTDWDQSRQLANRIYKFRGDGKAWDWEVDTENGNYDYLMYGDVDMDHPEVINELNRWGVWYANTLNLDGFRLDAVKHIKFSFMRDWLGHVRGQTGKNLFAVAEYWKNDLGALENYLSKTNWTMSAFDVPLHYNLYQASNSSGNYDMRNLLNGTLVQRHPSHAVTFVDNHDTQPGEALESFVQGWFKPLAYATILTREQGYPQVFYGDYYGIPSDGVPSYRQQIDPLLKARQQYAYGRQHDYFDHWDVIGWTREGNASHPNSGLATIMSDGPGGSKWMYVGRQKAGEVWHDMTGNRSGTVTINQDGWGHFFVNGGSVSVWVKR

SEQ ID NO: 32580 - protein, 483 aa, Bacillus sp. (in: firmicutes)
HHDGTNGTIMQYFEWNVPNDGQHWNRLHNNAQNLKNAGITAIWIPPAWKGTSQNDVGYGAYDLYDLGEFNQKGTVRTKYGTKAELERAIRSLKANGIQVYGDVVMNHKGGADFTEYVQAVEVNPQNRNQEVPGTYNIEAWTGFNFPGRGNQHSSFKWRWYHFDGTDWDQSRQLANRIYKFRGKAWDWEVDTEFGNYDYLMYADVDMDHPEVINELNRWGVWYANTLNLDGFRLDAVKHIKFSFMRDWLGHVRGQTGKNLFAVAEYWKNDLGALENYLSKTNWTMSAFDVPLHYNLYQASNSSGNYDMRNLLNGTLVQRHPSHAVTFVDNHDTQPGEALESFVQGWFKPLAYATILTREQGYPSVFYGDYYGIPSDGVPSYRQQIDPLLKARQQYAYGRQHDYFDHWDVIGWTREGNASHPNSGLATIMSDGPGGSKWMYVGRQKAGEVWHDMTGNRSGTVTINQDGWGHFFVNGGSVSVWVKR

SEQ ID NO: 32581 - protein, 485 aa, Bacillus sp.
HHDGTNGTIMQYFEWNVPNDGQHWNRLHNNAQNLKNAGITAIWIPPAWKGTSQNDVGYGAYDLYDLGEFNQKGTVRTKYGTKAELERAIRSLKANGIQVYGDVVMNHKGGADFTERVQAVEVNPQNRNQEVSGTYQIEAWTGFNFPGRGNQHSSFKWRWYHFDGTDWDQSRQLANRIYKFRGDGKAWDWEVDTENGNYDYLMYADVDMDHPEVINELNRWGVWYANTLNLDGFRLDAVKHIKFSFMRDWLGHVRGQTGKNLFAVAEYWKNDLGALENYLSKTNWTMSAFDVPLHYNLYQASNSSGNYDMRNLLNGTLVQRHPSHAVTFVDNHDTQPGEALESFVQGWFKPLAYATILTREEGYPQVFYGDYYGIPSDGVPSYRQQIDPLLKARQQYAYGRQHDYFDHWDVIGWTREGNASHPNSGLATIMSDGPGGSKWMYVGRQKAGEVWHDMTGNRSGTVTINQDGWGHFFVNGGSVSVWVKR

SEQ ID NO: 32582 - protein, 485 aa, Bacillus sp.
HHDGTNGTIMQYFEWNVPNDGQHWNRLHNNAQNLKNAGITAIWIPPAWKGTSQNDVGYGAYDLYDLGEFNQKGTVRTKYGTKAELERAIRSLKANGIQVYGDVVMNHKGGADFTERVQAVEVNPQNRNQEVSGTYQIEAWTGFNFPGRGNQHSSFKWRWYHFDGTDWDQSRQLANRIYKFRGDGKAWDWEVDTENGNYDYLMYADVDMDHPEVINELNRWGVWYANTLNLDGFRLDAVKHIKFSFMRDWLGHVRGQTGKNLFAVAEYWKNDLGALENYLSKTNWTMSAFDVPLHYNLYQAQNSSGNYDMRNLLNGTLVQRHPSHAVTFVDNHDTQPGEALESFVQGWFKPLAYATILTREQGYPQVFYGDYYGIPSDGVPSYRQQIDPLLKARQQYAYGRQHDYFDHWDVIGWTREGNASHPNSGLATIMSDGPGGSKWMYVGRQKAGEVWHDMTGNRSGTVTINQDGWGHFFVNGGSVSVWVKR

SEQ ID NO: 32583 - protein, 485 aa, Bacillus sp.
HHDGTNGTIMQYFEWNVPNDGQHWNRLHNNAQNLKNAGITAIWIPPAWKGTSQNDVGYGAYDLYDLGEFNQKGTVRTKYGTKAELERAIRSLKANGIQVYGDVVMNHKGGADFTERVQAVEVNPQNRNQEVSGTYQIEAWTGFNFPGRGNQHSSFKWRWYHFDGTDWDQSRQLANRIYKFRGDGKAWDWEVDTENGNYDYLMYADVDMDHPEVINELNRWGVWYANTLNLGGFRLDAVKHIKFSFMRDWLGHVRGQTGKNLFAVAEYWKNDLGALENYLSKTNWTMSAFDVPLHYNLYQASNSSGNYDMRNLLNGTLVQRHPSHAVTFVDNHDTQPGEALESFVQGWFKPLAYATILTREQGYPQVFYGDYYGIPSDGVPSYRQQIDPLLKARQQYAYGRQHDYFDHWDVIGWTREGNASHPNSGLATIMSDGPGGSKWMYVGRQKAGEVWHDMTGNRSGTVTINQDGWGHFFVNGGSVSVWVKR

SEQ ID NO: 32584 - protein, 485 aa, Bacillus sp.
HHDGTNGTIMQYFEWNVPNDGQHWNRLHNNAQNLKNAGITAIWIPPAWKGTSQNDVGYGAYDLYDLGEFNQKGTVRTKYGTKAELERAIRSLKANGIQVYGDVVMNHKGGADFTERVQAVEVNPQNRNQEVSGTYQIEAWTGFNFPGRGNQHSSFKWRWYHFDGTDWDQSRQLANRIYKFRGDGKAWDWEVDTENGNYDYLMYADVDMDHPEVINELNRWGVWYANTLNLDGFRLDAVKHIKFSFMRDWLGHVRGQTGKNLFAVAEYWKNDLGALENYLSKTNWTMSAFDVPLHYNHYQASNSSGNYDMRNLLNGTLVQRHPSHAVTFVDNHDTQPGEALESFVQGWFKPLAYATILTREQGYPQVFYGDYYGIPSDGVPSYRQQIDPLLKARQQYAYGRQHDYFDHWDVIGWTREGNASHPNSGLATIMSDGPGGSKWMYVGRQKAGEVWHDMTGNRSGTVTINQDGWGHFFVNGGSVSVWVKR

SEQ ID NO: 32585 - protein, 485 aa, Bacillus sp.
HHDGTNGTIMQYFEWNVPNDGQHWNRLHNNAQNLKNAGITAIWIPPAWKGTSQNDVGYGAYDLYDLGEFNQKGTVRTKYGTKAELERAIRSLKANGIQVYGDVVMNHKGGADFTERVQAVEVNPQERNQEVSGTYQIEAWTGFNFPGRGNQHSSFKWRWYHFDGTDWDQSRQLANRIYKFRGDGKAWDWEVDTENGNYDYLMYADVDMDHPEVINELNRWGVWYANTLNLDGFRLDAVKHIKFSFMRDWLGHVRGQTGKNLFAVAEYWKNDLGALENYLSKTNWTMSAFDVPLHYNLYQASNSSGNYDMRNLLNGTLVQRHPSHAVTFVDNHDTQPGEALESFVQGWFKPLAYATILTREQGYPQVFYGDYYGIPSDGVPSYRQQIDPLLKARQQYAYGRQHDYFDHWDVIGWTREGNASHPNSGLATIMSDGPGGSKWMYVGRQKAGEVWHDMTGNRSGTVTINQDGWGHFFVNGGSVSVWVKR

SEQ ID NO: 32586 - protein, 485 aa, Bacillus sp.
HHDGTNGTIMQYFEWNVPNDGQHWNRLHNNAQNLKNAGITAIWIPPAWKGTSQNDVGYGAYDLYDLGEFNQKGTVRTKYGTKAELERAIRSLKANGIQVYGDVVMNHKGGADFTERVQAVEVNPQNRNQEVSGTYQIEAWTGFNFPGRGNQHSSFKWRWYHFDGTDWDQSRQLANRIYKFRGDGKAWDWEVDTENGNYDYLMYADVDMDHPEVINELNEWGVWYANTLNLDGFRLDAVKHIKFSFMRDWLGHVRGQTGKNLFAVAEYWKNDLGALENYLSKTNWTMSAFDVPLHYNLYQASNSSGNYDMRNLLNGTLVQRHPSHAVTFVDNHDTQPGEALESFVQGWFKPLAYATILTREQGYPQVFYGDYYGIPSDGVPSYRQQIDPLLKARQQYAYGRQHDYFDHWDVIGWTREGNASHPNSGLATIMSDGPGGSKWMYVGRQKAGEVWHDMTGNRSGTVTINQDGWGHFFVNGGSVSVWVKR

SEQ ID NO: 32587 - protein, 485 aa, Bacillus sp.
HHDGTNGTIMQYFEWNVPNDGQHWNRLHNNAQNLKNAGITAIWIPPAWKGTSQNDVGYGAYDLYDLGEFNQKGTVRTKYGTKAELERAIRSLKANGIQVYGDVVMNHKGGADFTERVQAVEVNPQNRNQEVSGTYQIEAWTGFNFPGRGNQHSSFKWRWYHFDGTDWDQSRQLANRIYKFRGDGKAWDWEVDTENGNYDYLMYADVDMDHPEVINELNRWGVWYANTLNLDGFRLDAVKHIKFSFMRDWLGHVRGQTGKNLFAVAEYWKNDLGALENYLSKTNWTMSAFDVPLHYNLYQASNSSGNYDMRNLLNGTLVQRHPSHAVTFVDNHDTQPGEALESFVQGWFKPLAYATILTREQGYPQVFYGDYYGIPSDGVPSYRQQIDPLLKARQQYAYGRQHDYFDHWDVIGWTREGNASHPNSGLATIMSDGPGGSKWMYVGRQKAGEVWHDMTRNRSGTVTINQDGWGHFFVNGGSVSVWVKR

SEQ ID NO: 32588 - protein, 485 aa, Bacillus sp.
HHDGTNGTIMQYFEWNVPNDGQHWNRLHNNAQNLKNAGITAIWIPPAWKGTSQNDVGYGAYDLYDLGEFNQKGTVRTKYGTKAELERAIRSLKANGIQVYGDVVMNHKGGADFTERVQAVEVNPQNRNQEVSGTYQIEAWTGFNFPGRGNQHSSFKWRWYHFDGTDWDQSRQLANRIYKFRGDGKAWDWEVDTENGNYDYLMYADVDMDHPEVINELNRWGVWYANTLNLDGFRLDAVKHIKFSFMRDWLGHVRGQTGKNLFAVAEYWKNDLGALENYLSKTNWTMSAFDVPLHFNLYQASNSSGNYDMRNLLNGTLVQRHPSHAVTFVDNHDTQPGEALESFVQGWFKPLAYATILTREQGYPQVFYGDYYGIPSDGVPSYRQQIDPLLKARQQYAYGRQHDYFDHWDVIGWTREGNASHPNSGLATIMSDGPGGSKWMYVGRQKAGEVWHDMTGNRSGTVTINQDGWGHFFVNGGSVSVWVKR

SEQ ID NO: 32589 - protein, 485 aa, Bacillus sp.
HHDGTNGTIMQYFEWNVPNDGQHWNRLHNNAQNLKNAGITAIWIPPAWKGTSQNDVGYGAYDLYDLGEFNQKGTVRTKYGTKAELERAIRSLKANGIQVYGDVVMNHKGGADFTERVQAVEVNPQNRNQEVSGTYQIEAWTGFNFPGRGNQHSSFKWRWYHFDGTDWDQSRQLANRIYKFRGDGKAWDWEVDTENGNYDYLMYADVDMDHPEVINELNRWGVWYANTLNLDGFRLDAVKHIKFSFMRDWLGHVRGQTGKNLFAVAEYWKNDLGALENYLSKTNWTMSAFDVPLHYNLYQASNSSGNYDMRNLLNGTLVQRHPSHAVTFVDNHDTQPGEALESFVQGWFKPLAYATILTREQGYPQVFYGDYYGIPSDGVPSYRQQIDPLLKARQQYAYGRQHDYFDHWDVIGWTREGNASHPNLGLATIMSDGPGGSKWMYVGRQKAGEVWHDMTGNRSGTVTINQDGWGHFFVNGGSVSVWVKR

SEQ ID NO: 32590 - protein, 485 aa, Bacillus sp.
HHDGTNGTIMQYFEWNVPNDGQHWNRLHNNAQNLKNAGITAIWIPPAWKGTSQNDVGYGAYDLYDLGEFNQKGTVRTKYGTKAELERAIRSLKANGIQVYGDVVMNHKGGADFTERVQAVEVNPQNRNQEVSGTYQIEAWTGFNFPVRGNQHSSFKWRWYHFDGTDWDQSRQLANRIYKFRGDGKAWDWEVDTENGNYDYLMYADVDMDHPEVINELNRWGVWYANTLNLDGFRLDAVKHIKFSFMRDWLGHVRGQTGKNLFAVAEYWKNDLGALENYLSKTNWTMSAFDVPLHYNLYQASNSSGNYDMRNLLNGTLVQRHPSHAVTFVDNHDTQPGEALESFVQGWFKPLAYATILTREQGYPQVFYGDYYGIPSDGVPSYRQQIDPLLKARQQYAYGRQHDYFDHWDVIGWTREGNASHPNSGLATIMSDGPGGSKWMYVGRQKAGEVWHDMTGNRSGTVTINQDGWGHFFVNGGSVSVWVKR

SEQ ID NO: 32591 - protein, 485 aa, Bacillus sp.
HHDGTNGTIMQYFEWNVPNDGQHWNRLHNNAQNLKNAGITAIWIPPAWKGTSQNDVGYGAYDLYDLGEFNQKGTVRTKYGTKAELERAIRSLKANGIQVYGDVVMNHKGGADFTERVQAVEVNPQNRNQEVSGTYQIEAWTGFNFPGRGNQHSSFKWRWYHFDGTDWDQSRQLANRIYKFRGDGKAWDWEVDTENGNYDYLMYADVDMDHPEVINELNRWGVWYANTLNLDGFRLDAVKHIKFSFMRDWLGHVRGQTGKNLFAVAEYWKNDLGALENYLSKTNWTMSAFDVPLHYNLYQASNSSGNYDMRNLLNGTLVQRHPSHAVTFVDNHDTQPGEALESFVQGWFKPLAYATILTREQGYPQVFYGDYYGIPSDGVPSYRQQIDPLLKARQQYAYGRQHDYFDHWDVIGWTREGNASHPNSGLATIMSDGPGGSKWMYVGRQKAGEVWHDMTYNRSGTVTINQDGWGHFFVNGGSVSVWVKR

SEQ ID NO: 32592 - protein, 485 aa, Bacillus sp.
HHDGTNGTIMQYFEWNVPNDGQHWNRLHNNAQNLKNAGITAIWIPPAWKGTSQNDVGYGAYDLYDLGEFNQKGTVRTKYGTKAELERAIRSLKANGIQVYGDVVMNHKGGADFTERVQAVEVNPQNRNQEVSGTYQIEAWTGFNFPGRGNQHSSFKWRWYHFDGTDWDQSRQLANRIYKFRGDGKAWDWEVDTENGNYDYLMYADVDMDHPEVINELNRWGVWYANTLNLDGFRLDAVKHIKFSFMRDWLGHVRGQTGKNLFAVAEYWKNDLGALENYLSKTNWTMSAFDVPLHYNLYQASNSSGNYDMRNLLNGTLVQRHPSHAVTFVDNHDTQPGEALESFVIGWFKPLAYATILTREQGYPQVFYGDYYGIPSDGVPSYRQQIDPLLKARQQYAYGRQHDYFDHWDVIGWTREGNASHPNSGLATIMSDGPGGSKWMYVGRQKAGEVWHDMTGNRSGTVTINQDGWGHFFVNGGSVSVWVKR

SEQ ID NO: 32593 - protein, 485 aa, Bacillus sp.
HHDGTNGTIMQYFEWNVPNDGQHWNRLHNNAQNLKNAGITAIWIPPAWKGTSQNDVGYGAYDLYDLGEFNQKGTVRTKYGTKAELERAIRSLKANGIQVYGDVVMNHKGGADFTERVQAVEVNPQNRNQEVSGTYQIEAWTGFNFPGRGNQHSSFKWRWYHFDGTDWDQSRQLANRIYKFRGDGKAWDWEVDTENGNYDYLMYADVDMDHPEVINELNRWGVWYANTLNLDGFRLDAVKHIKFSFMRDWLGHVRGQTGKNLFAVAEYWKNDLGALENYLSKTNWTMSAFDVPLHYNLYQASNSSGNYDMRNLLNGTLVQRHPSHAVTFVDNHDTQPGEALESFVQGWFKPLAYATILTREQGYPQVFYGDYYGIPSDGVPSYRQQIDPLLKARQQYAYGRQHDYFDHWDVIGWTREGNASHPNSGLATIASDGPGGSKWMYVGRQKAGEVWHDMTGNRSGTVTINQDGWGHFFVNGGSVSVWVKR

SEQ ID NO: 32594 - protein, 485 aa, Bacillus sp.
HHDGTNGTIMQYFEWNVPNDGQHWNRLHNNAQNLKNAGITAIWIPPAWKGTSQNDVGYGAYDLYDLGEFNQKGTVRTKYGTKAELERAIRSLKANGIQVYGDVVMNHKGGADFTERVQAVEVNPQNRNQEVSGTYQIEAWTGFNFPGRGNQHSSFKWRWYHFDGTDWDQSRQLANRIYKFRGDGKAWDWEVDTENGNYDYLMYADVDMDHPEVINELNRWGVWYANTLNLDGFRLDAVKHIKFSFMRDWLGHVRGQTGKNLFAVAEYWKNDLGALENYLSKGNWTMSAFDVPLHYNLYQASNSSGNYDMRNLLNGTLVQRHPSHAVTFVDNHDTQPGEALESFVQGWFKPLAYATILTREQGYPQVFYGDYYGIPSDGVPSYRQQIDPLLKARQQYAYGRQHDYFDHWDVIGWTREGNASHPNSGLATIMSDGPGGSKWMYVGRQKAGEVWHDMTGNRSGTVTINQDGWGHFFVNGGSVSVWVKR

SEQ ID NO: 32595 - protein, 485 aa, Bacillus sp.
HHDGTNGTIMQYFEWNVPNDGQHWNRLHNNAQNLKNAGITAIWIPPAWKGTSQNDVGYGAYDLYDLGEFNQKGTVRTKYGTKAELERAIRSLKANGIQVYGDVVMNHKGGADFTERVQAVEVNPQNRNQEVSGTYQIEAWTGFNFPGRGNQHSSFKWRWYHFDGTDWDQSRQLANRIYKFRGDGKAWDWEVDTENGNYDYLMMADVDMDHPEVINELNRWGVWYANTLNLDGFRLDAVKHIKFSFMRDWLGHVRGQTGKNLFAVAEYWKNDLGALENYLSKTNWTMSAFDVPLHYNLYQASNSSGNYDMRNLLNGTLVQRHPSHAVTFVDNHDTQPGEALESFVQGWFKPLAYATILTREQGYPQVFYGDYYGIPSDGVPSYRQQIDPLLKARQQYAYGRQHDYFDHWDVIGWTREGNASHPNSGLATIMSDGPGGSKWMYVGRQKAGEVWHDMTGNRSGTVTINQDGWGHFFVNGGSVSVWVKR

SEQ ID NO: 32596 - protein, 485 aa, Bacillus sp.
HHDGTNGTIMQYFEWNVPNDGQHWNRLHNNAQNLKNAGITAIWIPPAWKGTSQNDVGYGAYDLYDLGEFNQKGTVRTKYGTKAELERAIRSLKANGIQVYGDGVMNHKGGADFTERVQAVEVNPQNRNQEVSGTYQIEAWTGFNFPGRGNQHSSFKWRWYHFDGTDWDQSRQLANRIYKFRGDGKAWDWEVDTENGNYDYLMYADVDMDHPEVINELNRWGVWYANTLNLDGFRLDAVKHIKFSFMRDWLGHVRGQTGKNLFAVAEYWKNDLGALENYLSKTNWTMSAFDVPLHYNLYQASNSSGNYDMRNLLNGTLVQRHPSHAVTFVDNHDTQPGEALESFVQGWFKPLAYATILTREQGYPQVFYGDYYGIPSDGVPSYRQQIDPLLKARQQYAYGRQHDYFDHWDVIGWTREGNASHPNSGLATIMSDGPGGSKWMYVGRQKAGEVWHDMTGNRSGTVTINQDGWGHFFVNGGSVSVWVKR

SEQ ID NO: 32597 - protein, 485 aa, Bacillus sp.
HHDGTNGTIMQYFEWNVPNDGQHWNRLHNNAQNLKNAGITAIWIPPAWKGTSQNDVGYGAYDLYDLGEFNQKGTVRTKYGTKAELERAIRSLKANGIQVYGDVVMNHKGGADFTERVQAVEVNPQNRNQEVSGTYQIEAWTGFNFPGRGNQHSSFKWRWYHFDGTDWDQSRQLANRIYKFRGDGKAWDWEVDTENGNYDYLMYADVDMDHPEVINELNRWGVWYANTLNLDGFRLDACKHIKFSFMRDWLGHVRGQTGKNLFAVAEYWKNDLGALENYLSKTNWTMSAFDVPLHYNLYQASNSSGNYDMRNLLNGTLVQRHPSHAVTFVDNHDTQPGEALESFVQGWFKPLAYATILTREQGYPQVFYGDYYGIPSDGVPSYRQQIDPLLKARQQYAYGRQHDYFDHWDVIGWTREGNASHPNSGLATIMSDGPGGSKWMYVGRQKAGEVWHDMTGNRSGTVTINQDGWGHFFVNGGSVSVWVKR

SEQ ID NO: 32598 - protein, 485 aa, Bacillus sp.
HHDGTNGTIMQYFEWNVPNDGQHWNRLHNNAQNLKNAGITAIWIPPAWKGTSQNDVGYGAYDLYDLGEFNQKGTVRTKYGTKAELERAIRSLKANGIQVYGDVVMNHKGGADFTERVQAVEVNPQNRNQEVSGTYQIEAWTGFNFPGRGNQHSSFKWRWYHFDGTDWDQSRQLANRIYKFRGDGKAWDWEVDTENGNYDYLMYADVDMDHPEVINELNRWGVWYANTLNLDGFRLDAVKHIKFSFMRDWLGHVRGQTGKNLFAVAEYWKNDLGALENYLSKTNWTMSAFDVPLHYNLYQASNSSGNYDMRNLLNGTLVQRHPSHAVTFVDNHDTQPGEALESFVQGWFKPLAYATILTREQGYPQVFYGDYYGIPSDGVPSYRQQIDPLLKARQQYAYGRQHDYFDHWDVIGWVREGNASHPNSGLATIMSDGPGGSKWMYVGRQKAGEVWHDMTGNRSGTVTINQDGWGHFFVNGGSVSVWVKR

SEQ ID NO: 32599 - protein, 485 aa, Bacillus sp.
HHDGTNGTIMQYFEWNVPNDGQHWNRLHNNAQNLKNAGITAIWIPPAWKGTSQNDVGYGAYDLYDLGEFNQKGTVRTKYGTKAELERAIRSLKANGIQVYGDVVMNHKGGADFTERVQAVEVNPQNRNQEVSGTYQIEAWTGFNFPGRGNQHSSFKWRWYHFDGTDWDQSRQLANRIYKFRGDGKAWDWEVDTENGNYDYLMYADVDMSHPEVINELNRWGVWYANTLNLDGFRLDAVKHIKFSFMRDWLGHVRGQTGKNLFAVAEYWKNDLGALENYLSKTNWTMSAFDVPLHYNLYQASNSSGNYDMRNLLNGTLVQRHPSHAVTFVDNHDTQPGEALESFVQGWFKPLAYATILTREQGYPQVFYGDYYGIPSDGVPSYRQQIDPLLKARQQYAYGRQHDYFDHWDVIGWTREGNASHPNSGLATIMSDGPGGSKWMYVGRQKAGEVWHDMTGNRSGTVTINQDGWGHFFVNGGSVSVWVKR

SEQ ID NO: 32600 - protein, 485 aa, Bacillus sp.
HHDGTNGTIMQYFEWNVPNDGQHWNRLHNNAQNLKNAGITAIWIPPAWKGTSQNDVGYGAYDLYDLGEFNQKGTVRTKYGTKAELERAIRSLKANGIQVYGDVVMNHKGGADFTERVQAVEVNPQRRNQEVSGTYQIEAWTGFNFPGRGNQHSSFKWRWYHFDGTDWDQSRQLANRIYKFRGDGKAWDWEVDTENGNYDYLMYADVDMDHPEVINELNRWGVWYANTLNLDGFRLDAVKHIKFSFMRDWLGHVRGQTGKNLFAVAEYWKNDLGALENYLSKTNWTMSAFDVPLHYNLYQASNSSGNYDMRNLLNGTLVQRHPSHAVTFVDNHDTQPGEALESFVQGWFKPLAYATILTREQGYPQVFYGDYYGIPSDGVPSYRQQIDPLLKARQQYAYGRQHDYFDHWDVIGWTREGNASHPNSGLATIMSDGPGGSKWMYVGRQKAGEVWHDMTGNRSGTVTINQDGWGHFFVNGGSVSVWVKR

SEQ ID NO: 32601 - protein, 485 aa, Bacillus sp.
HHDGTNGTIMQYFEWNVPNDGQHWNRLHNNAQNLKNAGITAIWIPPAWKGTSQNDVGYGAYDLYDLGEFNQKGTVRTKYGTKAELERAIRSLKANGIQVYGDVVMNHKGGADFTERVQAVEVNPQNRNQEVSGTYQIEAWTGFNFPGRGNQHSSFKWRWYHFDGTDWDQSRQLANRIYKFRGDGKAWDWEVDTENGNYDYLMYADVDMDHPEVINELNRWGVWYANTLNLDGFRLDAVKHIKFSFMRDWLGHVRGQTGKNLFAVAEYWKNDLGALENYLSKTNWTMSAFDVPLHYNLYQASNSSGNYDMRNLLNGTLVQRHPSHAVTFVDNHDTQPGEALESFVQGWFKPLAYATILTREQGYPQVFYGDYYGIPSDGVPSYRQQIDPLLKARQQYAYGRQHDYFDHWDVIGWTREGNASHPNSGLATIMSDGPGGSKWMYVGRQKAGEVWHDMTGNRSGTVTIQQDGWGHFFVNGGSVSVWVKR

SEQ ID NO: 32602 - protein, 485 aa, Bacillus sp.
HHDGTNGTIMQYFEWNVPNDGQHWNRLHNNAQNLKNAGITAIWIPPAWKGTSQNDVGYGAYDLYDLGEFNQKGTVRTKYGTKAELERAIRSLKANGIQVYGDVVMNHKGGADFTERVQAVEVNPQNRNQEVSGTYQIEAWTGFNFPGRGNQHSSFKWRWYHFDGTDWDQSRQLANRIYKFRGDGKAWDWEVDTENGNYDYLMYADVDMDHPEVINELNRWGVWYANTLNLDGFRLDAVKHIKFSFMRDWLGHVRGQTGKNLFAVAEYWKNELGALENYLSKTNWTMSAFDVPLHYNLYQASNSSGNYDMRNLLNGTLVQRHPSHAVTFVDNHDTQPGEALESFVQGWFKPLAYATILTREQGYPQVFYGDYYGIPSDGVPSYRQQIDPLLKARQQYAYGRQHDYFDHWDVIGWTREGNASHPNSGLATIMSDGPGGSKWMYVGRQKAGEVWHDMTGNRSGTVTINQDGWGHFFVNGGSVSVWVKR

SEQ ID NO: 32603 - protein, 485 aa, Bacillus sp.
HHDGTNGTIMQYFEWNVPNDGQHWNRLHNNAQNLKNAGITAIWIPPAWKGTSQNDVGYGAYDLYDLGEFNQKGTTRTKYGTKAELERAIRSLKANGIQVYGDVVMNHKGGADFTERVQAVEVNPQNRNQEVSGTYQIEAWTGFNFPGRGNQHSSFKWRWYHFDGTDWDQSRQLANRIYKFRGDGKAWDWEVDTENGNYDYLMYADVDMDHPEVINELNRWGVWYANTLNLDGFRLDAVKHIKFSFMRDWLGHVRGQTGKNLFAVAEYWKNDLGALENYLSKTNWTMSAFDVPLHYNLYQASNSSGNYDMRNLLNGTLVQRHPSHAVTFVDNHDTQPGEALESFVQGWFKPLAYATILTREQGYPQVFYGDYYGIPSDGVPSYRQQIDPLLKARQQYAYGRQHDYFDHWDVIGWTREGNASHPNSGLATIMSDGPGGSKWMYVGRQKAGEVWHDMTGNRSGTVTINQDGWGHFFVNGGSVSVWVKR

SEQ ID NO: 32604 - protein, 485 aa, Bacillus sp.
HHDGTNGTIMQYFEWNVPNDGQHWNRLHNNAQNLKNAGITAIWIPPAWKGTSQNDVGYGAYDLYDLGEFNQKGTVRTKYGTKAELERAIRSLKANGIQVYGDVVMNHKGGADFTERVQAVEVNPQNRNQEVSGTYQIEAWTGFNFPGRGNQHSSFKWRWYHFDGTDWDQSRQLANRIYKFRGDGKAWDWEVDTEXGNYDYLMYADVDMDHPEVINELNRWGVWYANTLNLDGFRLDAVKHIKFSFMRDWLGHVRGQTGKNLFAVAEYWKNDLGALENYLSKTNWTMSAFDVPLHYNLYQASNSSGNYDMRNLLNGTLVQRHPSHAVTFVDNHDTQPGEALESFVQGWFKPLAYATILTREQGYPQVFYGDYYGIPSDGVPSYRQQIDPLLKARQQYAYGRQHDYFDHWDVIGWTREGNASHPNSGLATIMSDGPGGSKWMYVGRQKAGEVWHDMTGNRSGTVTINQDGWGHFFVNGGSVSVWVKR

SEQ ID NO: 32605 - protein, 483 aa, Bacillus sp. (in: firmicutes)
HHDGTNGTIMQYFEWNVPNDGQHWNRLHNNAQNLKNAGITAIWIPPAWKGTSQNDVGYGAYDLYDLGEFNQKGTVRTKYGTKAELERAIRSLKANGIQVYGDVVMNHKGGADFTERVQAVEVNPQNRNQEVSGTYQIEAWTGFNFPGRGNQHSSFKWRWYHFDGTDWDQSRQLANRIYKFRGKAWDWEVDTENGNYDYLMYADVDMDHPEVINELNRWGVWYANTLNLDGFRLDAVKHIKFSFMRDWLGHVRGQTGKNLFAIAEFWKNDLGALENYLSKTNWTMSAFDTPLHYNLYQASNSSGNYDMRNLLNGTLVQRHPSHAVTLVDNHDTQPGEALESFVQGWFKPLAYATILTREQGYPSVFYGDYYGIPSDGVPSYRQQIDPLLKARQQYAYGRQHDYFDHWDVIGWTREGNASHPNSGLATIMSDGPGGSKWMYVGRQKAGEVWHDMTGNRSGTVTINQDGWGHFFVNGGSVSVWVKR

SEQ ID NO: 32606 - protein, 485 aa, Bacillus sp.
HHDGTNGTIMQYFEWNVPNDGQHWNRLHNNAQNLKNAGITAIWIPPAWKGTSQNDVGYGAYDLYDLGEFNQKGTVRTKYGTKAELERAIRSLKANGIQVYGDVVMNHKGGADFTERVQAVEVNPQNRNQEVSGTYQIEAWTGFNFPGRGNQHSSFKWRWYHFDGTDWDQSRQLANRIYKFRGDGKAWDWEVDTENGNYDYLMYADVDMDHPEVINELNRWGVWYANTLNLDGFRLDAVKHIKFSFMRDWLGHVRGQTGKNLFAVAEYWKNDLGALENYLSKTNWTMSAFDVPLHYNLYQASNSSGNYDMRNLLNGTLVQRCPSHAVTFVDNHDTQPGEALESFVQGWFKPLAYATILTREQGYPQVFYGDYYGIPSDGVPSYRQQIDPLLKARQQYAYGRQHDYFDHWDVIGWTREGNASHPNSGLATIMSDGPGGSKWMYVGRQKAGEVWHDMTGNRSGTVTINQDGWGHFFVNGGSVSVWVKR

SEQ ID NO: 32607 - protein, 485 aa, Bacillus sp.
HEDGTNGTIMQYFEWNVPNDGQHWNRLHNNAQNLKNAGITAIWIPPAWKGTSQNDVGYGAYDLYDLGEFNQKGTVRTKYGTKAELERAIRSLKANGIQVYGDVVMNHKGGADFTERVQAVEVNPQNRNQEVSGTYQIEAWTGFNFPGRGNQHSSFKWRWYHFDGTDWDQSRQLANRIYKFRGDGKAWDWEVDTENGNYDYLMYADVDMDHPEVINELNRWGVWYANTLNLDGFRLDAVKHIKFSFMRDWLGHVRGQTGKNLFAVAEYWKNDLGALENYLSKTNWTMSAFDVPLHYNLYQASNSSGNYDMRNLLNGTLVQRHPSHAVTFVDNHDTQPGEALESFVQGWFKPLAYATILTREQGYPQVFYGDYYGIPSDGVPSYRQQIDPLLKARQQYAYGRQHDYFDHWDVIGWTREGNASHPNSGLATIMSDGPGGSKWMYVGRQKAGEVWHDMTGNRSGTVTINQDGWGHFFVNGGSVSVWVKR

SEQ ID NO: 32608 - protein, 485 aa, Bacillus sp.
HHDGTNGTIMQYFEWNVPNDGQHWNRLHNNAQNLKNAGITAIWIPPAWKGTSQNDVGYGAYDLYDLGEFNQKGTVRTKYGTKAELERAIRSLKANGIQVYGDVVMNHKGGADFTERVQAVEVNPQNRNQEVSGTYQIEAWTGFNFPGRGNQHSSFKWRWYHFDGTDWDQSRQLANRIYKFRGDGKAWDWEVDTENGNYDYLMYADVDMDHPEVINELNRWGVWYANTLNLDGFRLDAVKHIKFSFMRDWLGHVRGQTGKNLFAVAEYWKNDLGALENYLSKTNWTMSAFDVPLHYNLYQASNSSGNYDMRNLLNGTLVQRHPSHAVTMVDNHDTQPGEALESFVQGWFKPLAYATILTREQGYPQVFYGDYYGIPSDGVPSYRQQIDPLLKARQQYAYGRQHDYFDHWDVIGWTREGNASHPNSGLATIMSDGPGGSKWMYVGRQKAGEVWHDMTGNRSGTVTINQDGWGHFFVNGGSVSVWVKR

SEQ ID NO: 32609 - protein, 485 aa, Bacillus sp.
HHDGTNGTIMQYFEWNVPNDGQHWNRLHNNAQNLKNAGITAIWIPPAWKGTSQNDVGYGAYDLYDLGEFNQKGTVRTKYGTKAELERAIRSLKANGIQVYGDVVMNHKGGADFTERVQAVEVNPQNRNQEVSGTYQIEAWTGFNFPGRGNQHSSFKWRWYHFDGTDWDQSRQLANRIYKFRGDGKAWDWEVDTENGNYDYLMYADVDMDHPEVINELNRWGVWYANSLNLDGFRLDAVKHIKFSFMRDWLGHVRGQTGKNLFAVAEYWKNDLGALENYLSKTNWTMSAFDVPLHYNLYQASNSSGNYDMRNLLNGTLVQRHPSHAVTFVDNHDTQPGEALESFVQGWFKPLAYATILTREQGYPQVFYGDYYGIPSDGVPSYRQQIDPLLKARQQYAYGRQHDYFDHWDVIGWTREGNASHPNSGLATIMSDGPGGSKWMYVGRQKAGEVWHDMTGNRSGTVTINQDGWGHFFVNGGSVSVWVKR

SEQ ID NO: 32610 - protein, 485 aa, Bacillus sp.
HHDGTNGTIMQYFEWNVPNDGQHWNRLHNNAQNLKNAGITAIWIPPAWKGTSQNDVGYGAYDLYDLGEFNQKGTVRTKYGTKAELERAIRSLKANGIQVYGDVVMNHKGGADFTERVQAVEVNPQNRNQEVSGTYQIEAWTGFNFPGRGNQHSSFKWRWYHFDGTDWDQSRQLANRIYKFRGDGKAWDWEVDTENGNYDYLMYADVDMDHPEVINELNRWGVWYANTLNLDGFRLDAVKHIKFSFMRDWLGHVRGQTGKNLFAVAEYWKDDLGALENYLSKTNWTMSAFDVPLHYNLYQASNSSGNYDMRNLLNGTLVQRHPSHAVTFVDNHDTQPGEALESFVQGWFKPLAYATILTREQGYPQVFYGDYYGIPSDGVPSYRQQIDPLLKARQQYAYGRQHDYFDHWDVIGWTREGNASHPNSGLATIMSDGPGGSKWMYVGRQKAGEVWHDMTGNRSGTVTINQDGWGHFFVNGGSVSVWVKR

SEQ ID NO: 32611 - protein, 485 aa, Bacillus sp.
HHDGTNGTIMQYFEWNVPNDGQHWNRLHNNAQNLKNAGITAIWIPPAWKGTSQNDVGYGAYDLYDLGEFNQKGTVRTKYGTKAELERAIRSLKANGIQVYGDVVMNHKGGADFTERVQAVEVNPQNRNQEVSGTYQIEAWTGFNFPGRGNQHSSFKWRWYHFDGTDWDQSRQLANRIYKFRGDGKAWDWEVDTENGNYDYLMYADVDMDHPEVINELNRWGVWYANTLNLDGFRLDAVKHIKFSFMRDWLGHVRGQTGKNLFAVAEYWKNDLGALENYLSKTNWTMSAFDVPLHYNLYQASNSSGNYDMRNLLNGTLVQRHPSHAVTFVDNHDTQPGEALESFVQGWMKPLAYATILTREQGYPQVFYGDYYGIPSDGVPSYRQQIDPLLKARQQYAYGRQHDYFDHWDVIGWTREGNASHPNSGLATIMSDGPGGSKWMYVGRQKAGEVWHDMTGNRSGTVTINQDGWGHFFVNGGSVSVWVKR

SEQ ID NO: 32612 - protein, 485 aa, Bacillus sp.
HHDGTNGTIMQYFEWNVPNDGQHWNRLHNNAQNLKNAGITAIWIPPAWKGTSQNDVGYGAYDLYDLGEFNQKGTVRTKYGTKAELERAIRSLKANGIQVYGDVVMNHKGGADFSERVQAVEVNPQNRNQEVSGTYQIEAWTGFNFPGRGNQHSSFKWRWYHFDGTDWDQSRQLANRIYKFRGDGKAWDWEVDTENGNYDYLMYADVDMDHPEVINELNRWGVWYANTLNLDGFRLDAVKHIKFSFMRDWLGHVRGQTGKNLFAVAEYWKNDLGALENYLSKTNWTMSAFDVPLHYNLYQASNSSGNYDMRNLLNGTLVQRHPSHAVTFVDNHDTQPGEALESFVQGWFKPLAYATILTREQGYPQVFYGDYYGIPSDGVPSYRQQIDPLLKARQQYAYGRQHDYFDHWDVIGWTREGNASHPNSGLATIMSDGPGGSKWMYVGRQKAGEVWHDMTGNRSGTVTINQDGWGHFFVNGGSVSVWVKR

SEQ ID NO: 32613 - protein, 485 aa, Bacillus sp.
HHDGTNVTIMQYFEWNVPNDGQHWNRLHNNAQNLKNAGITAIWIPPAWKGTSQNDVGYGAYDLYDLGEFNQKGTVRTKYGTKAELERAIRSLKANGIQVYGDVVMNHKGGADFTERVQAVEVNPQNRNQEVSGTYQIEAWTGFNFPGRGNQHSSFKWRWYHFDGTDWDQSRQLANRIYKFRGDGKAWDWEVDTENGNYDYLMYADVDMDHPEVINELNRWGVWYANTLNLDGFRLDAVKHIKFSFMRDWLGHVRGQTGKNLFAVAEYWKNDLGALENYLSKTNWTMSAFDVPLHYNLYQASNSSGNYDMRNLLNGTLVQRHPSHAVTFVDNHDTQPGEALESFVQGWFKPLAYATILTREQGYPQVFYGDYYGIPSDGVPSYRQQIDPLLKARQQYAYGRQHDYFDHWDVIGWTREGNASHPNSGLATIMSDGPGGSKWMYVGRQKAGEVWHDMTGNRSGTVTINQDGWGHFFVNGGSVSVWVKR

SEQ ID NO: 32614 - protein, 485 aa, Bacillus sp.
HHDGTNGTIMQYFEWNVPNDGQHWNRLHNNAQNLKNAGITAIWIPPAWKGTSQNDVGYGAYDLYDLGEFNQKGTVRTKYGTKAELERAIRSLKANGIQVYGDVVMNHKGGADFTERVQAVEVNPQNRNQEVSGTYQIEAWTGFNFPGRGNQHSSFKWRWYHFDGTDWDQSRQLANRIYKFRGDGKAWDWEVDTENGNYDYLMYADVDMDHPEVINELNRWGVWYANTLNLDGFRLDAVKHIKFSFMRDWLGHVRGQTGKNLFAVAEYWKNDLGALENYLSKTNWTMSAFDVPLHYNLYQASNSSGNYDMRNLLNGTLVQRHPSHAVTFVDNHDTQPGEALESFVQGWFKPLAYATILTREQGYPQVFYGDYYGIPSDGVPSYRQQIDPLLKARQQYAYGRQHDYFDHWDVIGWTREGNASRPNSGLATIMSDGPGGSKWMYVGRQKAGEVWHDMTGNRSGTVTINQDGWGHFFVNGGSVSVWVKR

SEQ ID NO: 32615 - protein, 485 aa, Bacillus sp.
HHDGTNGTIMQYFEWNVPNDGQHWNRLHNNAQNLKNAGITAIWIPPAWKGTSQNDVGYGAYDLYDLGEFNQKGTVRTKYGTKAELERAIRSLKANGIQVYGDVVMNHKGGADFTERVQAVEVNPQNRNQEVSGTYQIEAWTGFNFPGRGNQHSSFKWRWYHFDGTDWDQSRQLANRIYKFRGDGKAWDWEVDTENGNYDYLMYADVDMDHPEVINELNRWGVWYANTLNLDGFRLDAVKHIKFSFMRDWLGHVRGQTGKNLFAVAEYWKNDLGALENYLSKTNWTMSAFDVPLHYNLYQASNSSGNYDMRNLLNGTLVQRHPSHAVTFVDNHDTQPGEALISFVQGWFKPLAYATILTREQGYPQVFYGDYYGIPSDGVPSYRQQIDPLLKARQQYAYGRQHDYFDHWDVIGWTREGNASHPNSGLATIMSDGPGGSKWMYVGRQKAGEVWHDMTGNRSGTVTINQDGWGHFFVNGGSVSVWVKR

SEQ ID NO: 32616 - protein, 485 aa, Bacillus sp.
HHDGGNGTIMQYFEWNVPNDGQHWNRLHNNAQNLKNAGITAIWIPPAWKGTSQNDVGYGAYDLYDLGEFNQKGTVRTKYGTKAELERAIRSLKANGIQVYGDVVMNHKGGADFTERVQAVEVNPQNRNQEVSGTYQIEAWTGFNFPGRGNQHSSFKWRWYHFDGTDWDQSRQLANRIYKFRGDGKAWDWEVDTENGNYDYLMYADVDMDHPEVINELNRWGVWYANTLNLDGFRLDAVKHIKFSFMRDWLGHVRGQTGKNLFAVAEYWKNDLGALENYLSKTNWTMSAFDVPLHYNLYQASNSSGNYDMRNLLNGTLVQRHPSHAVTFVDNHDTQPGEALESFVQGWFKPLAYATILTREQGYPQVFYGDYYGIPSDGVPSYRQQIDPLLKARQQYAYGRQHDYFDHWDVIGWTREGNASHPNSGLATIMSDGPGGSKWMYVGRQKAGEVWHDMTGNRSGTVTINQDGWGHFFVNGGSVSVWVKR

SEQ ID NO: 32617 - protein, 485 aa, Bacillus sp.
HHDGTNGTIMQYFEWNVPNDGQHWNRLHNNAQNLKNAGITAIWIPPAWKGTSQNDVGYGAYDLYDLGEFNQKGTVRTKYGTKAELERAIRSLKANGIQVYGDVVMNHKGGADFTERVQAVEVNPQNRNQEVSGTYQIEAWTGFNFPGRGNQHSSFKWRWYHFDGTDWDQSRQLANRIYKFRGDGKAWDWEVDTENGNYDYLMYADVDMDHPEVINELNRWGVWYANTLNLDGFRLDAVKHIKFSFMRDWLGHVRGQTGKNLFAVAEYWKNDLGALENYLSKTNWTMSAFDVPLHYNLYQASNSSGNYDMRNLLNGTLVQRHPSHAVTFVDNHDTQPGEALEGFVQGWFKPLAYATILTREQGYPQVFYGDYYGIPSDGVPSYRQQIDPLLKARQQYAYGRQHDYFDHWDVIGWTREGNASHPNSGLATIMSDGPGGSKWMYVGRQKAGEVWHDMTGNRSGTVTINQDGWGHFFVNGGSVSVWVKR

SEQ ID NO: 32618 - protein, 485 aa, Bacillus sp.
HHDGTNGTIMQYFEWNVPNDGQHWNRLHNNAQNLKNAGITAIWIPPAWKGTSQNDVGYGAYDLYDLGEFNQKGTVRTKYGTKAELERAIRSLKANGIQVYGDVVMNHKGGADFTERVQAVEVNPQNRNQEVSGTYQIEAWTGFNFPGRGNQHSSFKWRWYHFDGTDWDQSRQLANRIYKFRGDGKAWDWEVDTENGNYDYLMYADVDMDHPEVINELNRWGVWYANTLNLDGFRLDAVKHIKFSFMRDWLGHVRGQTGKNLFAVAEYWKNDLGALENYLSKTNWTMSAFDVPLHYNLYQASNSSGNYDMRNLSNGTLVQRHPSHAVTFVDNHDTQPGEALESFVQGWFKPLAYATILTREQGYPQVFYGDYYGIPSDGVPSYRQQIDPLLKARQQYAYGRQHDYFDHWDVIGWTREGNASHPNSGLATIMSDGPGGSKWMYVGRQKAGEVWHDMTGNRSGTVTINQDGWGHFFVNGGSVSVWVKR

SEQ ID NO: 32619 - protein, 485 aa, Bacillus sp.
HHDGTNGTIMQYFEWNVPNDGQHWNRLHNNAQNLKNAGITAIWIPPAWKGTSQNDVGYGAYDLYDLGEFNQKGTVRTKYGTKAELERAIRSLKANGIQVYGDVVMNHKGGADFLERVQAVEVNPQNRNQEVSGTYQIEAWTGFNFPGRGNQHSSFKWRWYHFDGTDWDQSRQLANRIYKFRGDGKAWDWEVDTENGNYDYLMYADVDMDHPEVINELNRWGVWYANTLNLDGFRLDAVKHIKFSFMRDWLGHVRGQTGKNLFAVAEYWKNDLGALENYLSKTNWTMSAFDVPLHYNLYQASNSSGNYDMRNLLNGTLVQRHPSHAVTFVDNHDTQPGEALESFVQGWFKPLAYATILTREQGYPQVFYGDYYGIPSDGVPSYRQQIDPLLKARQQYAYGRQHDYFDHWDVIGWTREGNASHPNSGLATIMSDGPGGSKWMYVGRQKAGEVWHDMTGNRSGTVTINQDGWGHFFVNGGSVSVWVKR

SEQ ID NO: 32620 - protein, 485 aa, Bacillus sp.
HHDGTNGTIMQYFEWNVPNDGQHWNRLHNNAQNLKNAGIDAIWIPPAWKGTSQNDVGYGAYDLYDLGEFNQKGTVRTKYGTKAELERAIRSLKANGIQVYGDVVMNHKGGADFTERVQAVEVNPQNRNQEVSGTYQIEAWTGFNFPGRGNQHSSFKWRWYHFDGTDWDQSRQLANRIYKFRGDGKAWDWEVDTENGNYDYLMYADVDMDHPEVINELNRWGVWYANTLNLDGFRLDAVKHIKFSFMRDWLGHVRGQTGKNLFAVAEYWKNDLGALENYLSKTNWTMSAFDVPLHYNLYQASNSSGNYDMRNLLNGTLVQRHPSHAVTFVDNHDTQPGEALESFVQGWFKPLAYATILTREQGYPQVFYGDYYGIPSDGVPSYRQQIDPLLKARQQYAYGRQHDYFDHWDVIGWTREGNASHPNSGLATIMSDGPGGSKWMYVGRQKAGEVWHDMTGNRSGTVTINQDGWGHFFVNGGSVSVWVKR

SEQ ID NO: 32621 - protein, 485 aa, Bacillus sp.
HHDGTNGTIMQYFEWNVPNDGQHWNRLHNNAQNLKNAGITAIWIPPAWKGTSQNDVGYGAYDLYDLGEFNQKGTVRTKYGTKAELERAIRSLKANGIQVYGDVVMNHKGGADFTERVQAVEVNPQTRNQEVSGTYQIEAWTGFNFPGRGNQHSSFKWRWYHFDGTDWDQSRQLANRIYKFRGDGKAWDWEVDTENGNYDYLMYADVDMDHPEVINELNRWGVWYANTLNLDGFRLDAVKHIKFSFMRDWLGHVRGQTGKNLFAVAEYWKNDLGALENYLSKTNWTMSAFDVPLHYNLYQASNSSGNYDMRNLLNGTLVQRHPSHAVTFVDNHDTQPGEALESFVQGWFKPLAYATILTREQGYPQVFYGDYYGIPSDGVPSYRQQIDPLLKARQQYAYGRQHDYFDHWDVIGWTREGNASHPNSGLATIMSDGPGGSKWMYVGRQKAGEVWHDMTGNRSGTVTINQDGWGHFFVNGGSVSVWVKR

SEQ ID NO: 32622 - protein, 485 aa, Bacillus sp.
HHDGTNGTIMQYFEWNVPNDGQHWNRLHNNAQNLKNAGITAIWIPPAWKGTSQNDVGYGAYDLYDLGEFNQKGTVRTKYGTKAELERAIRSLKANGIQVYGDVVMNHKGGADFTERVQAVEVNPQNRNQEVSGTYQIEAWTGFNFPGRGNQHSSFKWRWYHFDGTDWDQSRQLANRIYKFRGDGKAWDWEVDTENGNYDYLMYADVDMDHPEVINELNRWGVWYANTLNLDGFRLDAVKHIKFSVMRDWLGHVRGQTGKNLFAVAEYWKNDLGALENYLSKTNWTMSAFDVPLHYNLYQASNSSGNYDMRNLLNGTLVQRHPSHAVTFVDNHDTQPGEALESFVQGWFKPLAYATILTREQGYPQVFYGDYYGIPSDGVPSYRQQIDPLLKARQQYAYGRQHDYFDHWDVIGWTREGNASHPNSGLATIMSDGPGGSKWMYVGRQKAGEVWHDMTGNRSGTVTINQDGWGHFFVNGGSVSVWVKR

SEQ ID NO: 32623 - protein, 485 aa, Bacillus sp.
HHDGTNGTIMQYFEWNVPNDGQHWNRLHNNAQNLKNAGITAIWIPPAWKGTSQNDVGYGAYDLYDLGEFNQKGTVRTKYGTKAELERAIRSLKANGIQVYGDVVMNHKGGADFTERVQAVEVNPQNRNQEVSGTYQIEAWTGFNFPGRGNQHSSFKWRWYHFDGTDWDQSRQLANRIYKFRGDGKAWDWEVDTENGNYDYLMYADVDMDHPEVINELNRWGVWYANTLNLDGFRLDAVKHIKFSFMRDWLGHVRGQTGKNLFAVAEYWKNDLGALENYLSKTAWTMSAFDVPLHYNLYQASNSSGNYDMRNLLNGTLVQRHPSHAVTFVDNHDTQPGEALESFVQGWFKPLAYATILTREQGYPQVFYGDYYGIPSDGVPSYRQQIDPLLKARQQYAYGRQHDYFDHWDVIGWTREGNASHPNSGLATIMSDGPGGSKWMYVGRQKAGEVWHDMTGNRSGTVTINQDGWGHFFVNGGSVSVWVKR

SEQ ID NO: 32624 - protein, 485 aa, Bacillus sp.
HHDGTNGTIMQYFEWNVPNDGQHWNRLHNNAQNLKNAGITAIWIPPAWKGTSQNDVGYGAYDLYDLGEFEQKGTVRTKYGTKAELERAIRSLKANGIQVYGDVVMNHKGGADFTERVQAVEVNPQNRNQEVSGTYQIEAWTGFNFPGRGNQHSSFKWRWYHFDGTDWDQSRQLANRIYKFRGDGKAWDWEVDTENGNYDYLMYADVDMDHPEVINELNRWGVWYANTLNLDGFRLDAVKHIKFSFMRDWLGHVRGQTGKNLFAVAEYWKNDLGALENYLSKTNWTMSAFDVPLHYNLYQASNSSGNYDMRNLLNGTLVQRHPSHAVTFVDNHDTQPGEALESFVQGWFKPLAYATILTREQGYPQVFYGDYYGIPSDGVPSYRQQIDPLLKARQQYAYGRQHDYFDHWDVIGWTREGNASHPNSGLATIMSDGPGGSKWMYVGRQKAGEVWHDMTGNRSGTVTINQDGWGHFFVNGGSVSVWVKR

SEQ ID NO: 32625 - protein, 485 aa, Bacillus sp.
HHDGTNGTIMQYFEWNVPNDGQHWNRLHNNAQNLKNAGITAIWIPPAWKGTSQNDVGYGAYDLYDLGEFNQKGTVRTKYGTKAELERAIRSLKANGIQVYGDVVMNHKGGADFTERVQAVEVNPQNRNQEVSGTYQIEAWTGFNFPGRGNQHSSFKWRWYHFDGTDWDQSRQLANRIYKFRGDGKAGDWEVDTENGNYDYLMYADVDMDHPEVINELNRWGVWYANTLNLDGFRLDAVKHIKFSFMRDWLGHVRGQTGKNLFAVAEYWKNDLGALENYLSKTNWTMSAFDVPLHYNLYQASNSSGNYDMRNLLNGTLVQRHPSHAVTFVDNHDTQPGEALESFVQGWFKPLAYATILTREQGYPQVFYGDYYGIPSDGVPSYRQQIDPLLKARQQYAYGRQHDYFDHWDVIGWTREGNASHPNSGLATIMSDGPGGSKWMYVGRQKAGEVWHDMTGNRSGTVTINQDGWGHFFVNGGSVSVWVKR

SEQ ID NO: 32626 - protein, 485 aa, Bacillus sp.
HHDGTNGTIMQYFEWNVPNDGQHWNMLHNNAQNLKNAGITAIWIPPAWKGTSQNDVGYGAYDLYDLGEFNQKGTVRTKYGTKAELERAIRSLKANGIQVYGDVVMNHKGGADFTERVQAVEVNPQNRNQEVSGTYQIEAWTGFNFPGRGNQHSSFKWRWYHFDGTDWDQSRQLANRIYKFRGDGKAWDWEVDTENGNYDYLMYADVDMDHPEVINELNRWGVWYANTLNLDGFRLDAVKHIKFSFMRDWLGHVRGQTGKNLFAVAEYWKNDLGALENYLSKTNWTMSAFDVPLHYNLYQASNSSGNYDMRNLLNGTLVQRHPSHAVTFVDNHDTQPGEALESFVQGWFKPLAYATILTREQGYPQVFYGDYYGIPSDGVPSYRQQIDPLLKARQQYAYGRQHDYFDHWDVIGWTREGNASHPNSGLATIMSDGPGGSKWMYVGRQKAGEVWHDMTGNRSGTVTINQDGWGHFFVNGGSVSVWVKR

SEQ ID NO: 32627 - protein, 485 aa, Bacillus sp.
HHDGTNGTIMQYFEWNVPNDGQHWNRLHNNAQNLKNAGITAIWIPPAWKGTSQNDVGYGAYDLYDLGEFNQKGTVRTKYGTKAELERAIRSLKANGIQVYGDVVMNHKGGADFTERVQAVEVNPQNRNQEVSGTYQIEAWTGFNFPGRGNQHSSFKWRWYHFDGTDWDQSRQLANRIYKFRGDGKAWDWEVDTENGNYDYLMYADVDMDHPEVINELNRWGVWYANTLNLDGFRLDAVKHIKFSFMRDWLGHVRGQTGKNLFAVAEYWKNDLGALENYLSKTNWTMSAFDVPLHYNLYQASNSSGNYDMRNLLNGTLVQRHPSHAVTFVDNHDTQPGEALESFVLGWFKPLAYATILTREQGYPQVFYGDYYGIPSDGVPSYRQQIDPLLKARQQYAYGRQHDYFDHWDVIGWTREGNASHPNSGLATIMSDGPGGSKWMYVGRQKAGEVWHDMTGNRSGTVTINQDGWGHFFVNGGSVSVWVKR

SEQ ID NO: 32628 - protein, 485 aa, Bacillus sp.
HHDGTNGTIMQYFEWNVPNDGQHWNRLHNNAQNLKNAGITAIWIPPAWKGTSQNDVGYGAYDLYDLGEFNQKGTVRTKYGTKAELERAIRSLKASGIQVYGDVVMNHKGGADFTERVQAVEVNPQNRNQEVSGTYQIEAWTGFNFPGRGNQHSSFKWRWYHFDGTDWDQSRQLANRIYKFRGDGKAWDWEVDTENGNYDYLMYADVDMDHPEVINELNRWGVWYANTLNLDGFRLDAVKHIKFSFMRDWLGHVRGQTGKNLFAVAEYWKNDLGALENYLSKTNWTMSAFDVPLHYNLYQASNSSGNYDMRNLLNGTLVQRHPSHAVTFVDNHDTQPGEALESFVQGWFKPLAYATILTREQGYPQVFYGDYYGIPSDGVPSYRQQIDPLLKARQQYAYGRQHDYFDHWDVIGWTREGNASHPNSGLATIMSDGPGGSKWMYVGRQKAGEVWHDMTGNRSGTVTINQDGWGHFFVNGGSVSVWVKR

SEQ ID NO: 32629 - protein, 485 aa, Bacillus sp.
HHDGTNGTIMQYFEWNVPNDGQHWNRLHNNAQNLKNAGITAIWIPPAWKGTSQNDVGYGAYDLYDLGEFNQKGTVRTKYGTKAELERAIRSLKANGIQVYGDVVMNHKGGADFTERVQAVEVNPQNRNQEVSGTYQIEAWTGFNFPGRGNQHSSFKWRWYHFDGTDWDQSRQLANRIYKFRGDGKAWDWEVDTENGNYDYLMYADVDMDHPEVINELNRWGVWYANTLNLDGFRLDAVKHIKFSFMRDWLGHVRGQTGKNLFAVAEYWKNDLGALENYLSKTNWTMSAFDVPLHYMLYQASNSSGNYDMRNLLNGTLVQRHPSHAVTFVDNHDTQPGEALESFVQGWFKPLAYATILTREQGYPQVFYGDYYGIPSDGVPSYRQQIDPLLKARQQYAYGRQHDYFDHWDVIGWTREGNASHPNSGLATIMSDGPGGSKWMYVGRQKAGEVWHDMTGNRSGTVTINQDGWGHFFVNGGSVSVWVKR

SEQ ID NO: 32630 - protein, 485 aa, Bacillus sp.
HHDGTNGTIMQYFEWNVPNDGQHWNRLHNNAQNLKNAGITAIWIPPAWKGTSQNDVGYGAYDLYDLGEFNQKGTVRTKYGTKAELERAIRSLKANGIQVYGDVVMNHKGGADFTERVQAVEVNPQNRNQEVSGTYQIEAWTGFNFPGRGNQHSSFKWRWYHFDGTDWDQSRQLANRIYKFRGDGKAWDWEVDTENGNYDYLMYADVDMDHPEVINEWNRWGVWYANTLNLDGFRLDAVKHIKFSFMRDWLGHVRGQTGKNLFAVAEYWKNDLGALENYLSKTNWTMSAFDVPLHYNLYQASNSSGNYDMRNLLNGTLVQRHPSHAVTFVDNHDTQPGEALESFVQGWFKPLAYATILTREQGYPQVFYGDYYGIPSDGVPSYRQQIDPLLKARQQYAYGRQHDYFDHWDVIGWTREGNASHPNSGLATIMSDGPGGSKWMYVGRQKAGEVWHDMTGNRSGTVTINQDGWGHFFVNGGSVSVWVKR

SEQ ID NO: 32631 - protein, 485 aa, Bacillus sp.
HHDGTNGTIMQYFEWNVPNDGQHWRRLHNNAQNLKNAGITAIWIPPAWKGTSQNDVGYGAYDLYDLGEFNQKGTVRTKYGTKAELERAIRSLKANGIQVYGDVVMNHKGGADFTERVQAVEVNPQNRNQEVSGTYQIEAWTGFNFPGRGNQHSSFKWRWYHFDGTDWDQSRQLANRIYKFRGDGKAWDWEVDTENGNYDYLMYADVDMDHPEVINELNRWGVWYANTLNLDGFRLDAVKHIKFSFMRDWLGHVRGQTGKNLFAVAEYWKNDLGALENYLSKTNWTMSAFDVPLHYNLYQASNSSGNYDMRNLLNGTLVQRHPSHAVTFVDNHDTQPGEALESFVQGWFKPLAYATILTREQGYPQVFYGDYYGIPSDGVPSYRQQIDPLLKARQQYAYGRQHDYFDHWDVIGWTREGNASHPNSGLATIMSDGPGGSKWMYVGRQKAGEVWHDMTGNRSGTVTINQDGWGHFFVNGGSVSVWVKR

SEQ ID NO: 32632 - protein, 485 aa, Bacillus sp.
HHDGTNGTIMQYFEWNVPNDGQHWNRLHNNAQNLKNAGITAIWIPPAWKGTSQNDVGYGAYDLYDLGEFNQKGTVRTKYGTKAELERAIRSLKANGIQVYGDVVMNHKGGADFTERVQAVEVNPQNRNQEVSGTYQIEAWTGFNFPGRGNQHSSFKWRWYHFDGTDWDVSRQLANRIYKFRGDGKAWDWEVDTENGNYDYLMYADVDMDHPEVINELNRWGVWYANTLNLDGFRLDAVKHIKFSFMRDWLGHVRGQTGKNLFAVAEYWKNDLGALENYLSKTNWTMSAFDVPLHYNLYQASNSSGNYDMRNLLNGTLVQRHPSHAVTFVDNHDTQPGEALESFVQGWFKPLAYATILTREQGYPQVFYGDYYGIPSDGVPSYRQQIDPLLKARQQYAYGRQHDYFDHWDVIGWTREGNASHPNSGLATIMSDGPGGSKWMYVGRQKAGEVWHDMTGNRSGTVTINQDGWGHFFVNGGSVSVWVKR

SEQ ID NO: 32633 - protein, 485 aa, Bacillus sp.
HHDGTNGTIMQYFEWNVPNDGQHWNRLHNNAQNLKNAGITAIWIPPAWKGTSQNDVGYGAYDLYDLGEFNQKGTVRTKYGTKAELERAIRSLKANGIQVYGDVVMNHKGGADFTERVQAVEVNPQNRNQEVSGTYQIEAWTGFNFPGRGNQHSSFKWRWYHFDGTDWDQSRQLANRIYKFRGDGKAWDWEVDTENGNYDYLMYADVDMDHPEVINELNRWGVWYANTLNLDGFRLDAVKHIKFSFMRDWLGHVRGQTGKNLFAVAEYWKNDLGALENYLSKTNWTMSAFDVPLHYNLYQASNSSGNYDMRNLLNGTLVQRHPSHAVTFVDNHDTQPGEALESFVQGWFKPLAYATILTREQGYPQVFYGDYYGIPSDGVPSYRQQIDPLLKARQQYAYGRQHDYFDHWDVIGWTREGNASHPNSGLATIMSDGPGGSKWMYVGRQKAGEVWGDMTGNRSGTVTINQDGWGHFFVNGGSVSVWVKR

SEQ ID NO: 32634 - protein, 485 aa, Bacillus sp. (in: firmicutes)
HHDGTNGTIMQYFEWNVPNDGQHWNRLHNNAQNLKNAGITAIWIPPAWKGTSQNDVGYGAYDLYDLGEFNQKGTVRTKYGTKAELERAIRSLKANGIQVYGDVVMNHKGGADFTERVQAVEVNPQNRNQEVSGTYQIEAWTGFNFPGRGNQHSSFKWRWYHFDGTDWDQSRQLANRIYKFRGDGKAWDWEVDTENGNYDYLMYADVDMDHPEVINELNRWGVWYANTLNLDGFRLDAVKHIKFSFMRDWLGHVRGQTGKNLFAVAEYWKNDLGALENYLSWTNWTMSAFDVPLHYNLYQASNSSGNYDMRNLLNGTLVQRHPSHAVTFVDNHDTQPGEALESFVQGWFKPLAYATILTREQGYPQVFYGDYYGIPSDGVPSYRQQIDPLLKARQQYAYGRQHDYFDHWDVIGWTREGNASHPNSGLATIMSDGPGGSKWMYVGRQKAGEVWHDMTGNRSGTVTINQDGWGHFFVNGGSVSVWVKR

SEQ ID NO: 32635 - protein, 485 aa, Bacillus sp.
HHDGTNGTIMQYFEWNVPNDGQHWNRLHNNAQNLKNAGITAIWIPPAWKGTSQNDVGYGAYDLYDLGEFNQKGTVRTKYGTKAELERAIRSLKANGIQVYGDVVMNHKGGADFTERVQAVEVNPQNRNQEVSGTYQIEAWTGFNFPGRGNQHSSFKWRWYHFDGTDWDQSRQLANRIYKFRGDGKAWDWEVDTENGNYDYLMYADVDMDHPEVINELNRWGVWYANTLNLDGFRLDAVKHIKFSFMRDWLGHVRGQTGKNLFAVAEYWKNDLGALENYLSKTNWTMSAFDVPLHYNLYQASNSSGNYDMRNLLNGTLVQRHPSHAITFVDNHDTQPGEALESFVQGWFKPLAYATILTREQGYPQVFYGDYYGIPSDGVPSYRQQIDPLLKARQQYAYGRQHDYFDHWDVIGWTREGNASHPNSGLATIMSDGPGGSKWMYVGRQKAGEVWHDMTGNRSGTVTINQDGWGHFFVNGGSVSVWVKR

SEQ ID NO: 32636 - protein, 485 aa, Bacillus sp.
HHDGTNGTIMQYFEWNVPNDGQHWNRLHNNAQNLKNAGITAIWIPPAWKGTSQNDVGYGAYDLYDLGEFNQKGTVRTKYGTKAELERAIRSLKANGIQVVGDVVMNHKGGADFTERVQAVEVNPQNRNQEVSGTYQIEAWTGFNFPGRGNQHSSFKWRWYHFDGTDWDQSRQLANRIYKFRGDGKAWDWEVDTENGNYDYLMYADVDMDHPEVINELNRWGVWYANTLNLDGFRLDAVKHIKFSFMRDWLGHVRGQTGKNLFAVAEYWKNDLGALENYLSKTNWTMSAFDVPLHYNLYQASNSSGNYDMRNLLNGTLVQRHPSHAVTFVDNHDTQPGEALESFVQGWFKPLAYATILTREQGYPQVFYGDYYGIPSDGVPSYRQQIDPLLKARQQYAYGRQHDYFDHWDVIGWTREGNASHPNSGLATIMSDGPGGSKWMYVGRQKAGEVWHDMTGNRSGTVTINQDGWGHFFVNGGSVSVWVKR

SEQ ID NO: 32637 - protein, 485 aa, Bacillus sp.
HHDGTNGTIMQYFEWNVPNDGQHWNRLHNNAQNLKNAGITAIWIPPAWKGTSQNDVGYGAYDLYDLGEFNQKGTVRTKYGTKAELERAIRSLKANGIQVYGDVVMNHKGGADFTERVQAVEVNPQNRNQEVSGTYQIEAWTGFNFPGRGNQHSSFKWRWYHFDGTDWDQSRQLANRIYKFRGDGKAWDWEVDTENGNYDYLMYADVDMDHPEVINELNRWGVWYANTLNLDGFRLDAVKHIKFSFMRDWLGHVRGQTGKNLFAVAEYWKNDLGALENYLSKTNWTMSAFDVPLHYNLYQASNSSGNYDMRNLLNGTLVQRHPSHAVTFVDNHDTQPGEALESFVQGWFKPLAYATILFREQGYPQVFYGDYYGIPSDGVPSYRQQIDPLLKARQQYAYGRQHDYFDHWDVIGWTREGNASHPNSGLATIMSDGPGGSKWMYVGRQKAGEVWHDMTGNRSGTVTINQDGWGHFFVNGGSVSVWVKR

SEQ ID NO: 32638 - protein, 485 aa, Bacillus sp.
HHDGTNGSIMQYFEWNVPNDGQHWNRLHNNAQNLKNAGITAIWIPPAWKGTSQNDVGYGAYDLYDLGEFNQKGTVRTKYGTKAELERAIRSLKANGIQVYGDVVMNHKGGADFTERVQAVEVNPQNRNQEVSGTYQIEAWTGFNFPGRGNQHSSFKWRWYHFDGTDWDQSRQLANRIYKFRGDGKAWDWEVDTENGNYDYLMYADVDMDHPEVINELNRWGVWYANTLNLDGFRLDAVKHIKFSFMRDWLGHVRGQTGKNLFAVAEYWKNDLGALENYLSKTNWTMSAFDVPLHYNLYQASNSSGNYDMRNLLNGTLVQRHPSHAVTFVDNHDTQPGEALESFVQGWFKPLAYATILTREQGYPQVFYGDYYGIPSDGVPSYRQQIDPLLKARQQYAYGRQHDYFDHWDVIGWTREGNASHPNSGLATIMSDGPGGSKWMYVGRQKAGEVWHDMTGNRSGTVTINQDGWGHFFVNGGSVSVWVKR

SEQ ID NO: 32639 - protein, 485 aa, Bacillus sp.
HHDGTNGTIMQYFEWNVPNDGQHWNRLHNNAQNLKNAGITAIWIPPAWKGTSQNDVGYGAYDLYDLGEFNQKGTVRTKYGTKAELERAIRSLKANGIQVYGDVVMNHKGGADFTERVQAVEVNPQNRNQEVSGTYQIEAWTGFNFPGRGNQHSSFKWRWYHFDGTDWDQSRQLANRIYKFRGDGKAWDWEVDTENGNYDYLMYADVDMDHPEVINELNRWGVWYANTLNLDGFRLDAVKHIKFSFMRDWLGHVRGQTGKNLFAVAEYWKNDLGALENYLSKTNWTMSAFDVPLHYNLYQASNSSGNYDMRNLLNGTLVQRHPSHAVSFVDNHDTQPGEALESFVQGWFKPLAYATILTREQGYPQVFYGDYYGIPSDGVPSYRQQIDPLLKARQQYAYGRQHDYFDHWDVIGWTREGNASHPNSGLATIMSDGPGGSKWMYVGRQKAGEVWHDMTGNRSGTVTINQDGWGHFFVNGGSVSVWVKR

SEQ ID NO: 32640 - protein, 485 aa, Bacillus sp.
HHDGTNGTIMQYFEWNVPNDGQHWNRLHNNAQDLKNAGITAIWIPPAWKGTSQNDVGYGAYDLYDLGEFNQKGTVRTKYGTKAELERAIRSLKANGIQVYGDVVMNHKGGADFTERVQAVEVNPQNRNQEVSGTYQIEAWTGFNFPGRGNQHSSFKWRWYHFDGTDWDQSRQLANRIYKFRGDGKAWDWEVDTENGNYDYLMYADVDMDHPEVINELNRWGVWYANTLNLDGFRLDAVKHIKFSFMRDWLGHVRGQTGKNLFAVAEYWKNDLGALENYLSKTNWTMSAFDVPLHYNLYQASNSSGNYDMRNLLNGTLVQRHPSHAVTFVDNHDTQPGEALESFVQGWFKPLAYATILTREQGYPQVFYGDYYGIPSDGVPSYRQQIDPLLKARQQYAYGRQHDYFDHWDVIGWTREGNASHPNSGLATIMSDGPGGSKWMYVGRQKAGEVWHDMTGNRSGTVTINQDGWGHFFVNGGSVSVWVKR

SEQ ID NO: 32641 - protein, 485 aa, Bacillus sp.
HHDGTNGTIMQYFEWNVPNDGQHWNRLHNNAQNLKNAGITAIWIPPAWKGTSQNDVGYGAYDLYDLGEFNQKGTVRTKYGTKAELERAIRSLKANGIQVYGDVVMNHKGGADFTERVQAVEVNPQNRNQEVSGTYQIEAWTGFNFPGRGNQHSSFKWRWYHFDGTDWDQSRQLANRIYKFRGDGKAWDWAVDTENGNYDYLMYADVDMDHPEVINELNRWGVWYANTLNLDGFRLDAVKHIKFSFMRDWLGHVRGQTGKNLFAVAEYWKNDLGALENYLSKTNWTMSAFDVPLHYNLYQASNSSGNYDMRNLLNGTLVQRHPSHAVTFVDNHDTQPGEALESFVQGWFKPLAYATILTREQGYPQVFYGDYYGIPSDGVPSYRQQIDPLLKARQQYAYGRQHDYFDHWDVIGWTREGNASHPNSGLATIMSDGPGGSKWMYVGRQKAGEVWHDMTGNRSGTVTINQDGWGHFFVNGGSVSVWVKR

SEQ ID NO: 32642 - protein, 485 aa, Bacillus sp.
HHDGTNGTIMQYFEWNVPNDGQHWNRLHNNAQNLKNAGITAIWIPPAWKGTSQNDVGYGAYDLYDLGEFNQKGTVRTKYGTKAELERAIRSLKANGIQVYGDVVMNHKGGADFTERVQAVEVNPQNRNQEVSGTYQIEAWTGFNFPGRGNQHSSFKWRWYHFDGTDWDQSRQLANRIYKFRGDGKAWDWEVDTENGNYDYLMYADVDMDHPEVINELNRWGVWYANTLNLDGFRLDAVKHIKFSFMRDWLGHVRGQTGKNLFLVAEYWKNDLGALENYLSKTNWTMSAFDVPLHYNLYQASNSSGNYDMRNLLNGTLVQRHPSHAVTFVDNHDTQPGEALESFVQGWFKPLAYATILTREQGYPQVFYGDYYGIPSDGVPSYRQQIDPLLKARQQYAYGRQHDYFDHWDVIGWTREGNASHPNSGLATIMSDGPGGSKWMYVGRQKAGEVWHDMTGNRSGTVTINQDGWGHFFVNGGSVSVWVKR

SEQ ID NO: 32643 - protein, 485 aa, Bacillus sp.
HHDGTNGTIMQYFEWNVPNDGQHWNRLHNNAQNLKNAGITAIWIPPAWKGTSQNDVGYGAYDLYDLGEFNQKGTVRTKYGTKAELERAIRSLKANGIQVYGDVVMNHKGGADFTERVQAVEVNPQNRNQEVSGTYQIEAWTGFNFPGRGNQHSSFKWRWYHFDGTDWDQSRQLANRIYKFRGDGKAWDWEVDTENGNYDYLMYADVDMDHPEVINELNRWGVWYANTLNLDGFRLDAVKHIKFSFMRDWLGHVRGQTGKNLFAVAEYWKNDLGALENYLSKTNWTMSAFDVPLHYNLYQASNSSGNYDMRNLLNGTLVQRHPSHAVTFVDNHDTQPGEALESFVQGWFKPLAYATILTREQGYPQVFYGDYYGIESDGVPSYRQQIDPLLKARQQYAYGRQHDYFDHWDVIGWTREGNASHPNSGLATIMSDGPGGSKWMYVGRQKAGEVWHDMTGNRSGTVTINQDGWGHFFVNGGSVSVWVKR

SEQ ID NO: 32644 - protein, 485 aa, Bacillus sp.
HHDGTNGTIMQYFEWNVPNDGQHWNRLHNNAQNLKNAGITAIWIPGAWKGTSQNDVGYGAYDLYDLGEFNQKGTVRTKYGTKAELERAIRSLKANGIQVYGDVVMNHKGGADFTERVQAVEVNPQNRNQEVSGTYQIEAWTGFNFPGRGNQHSSFKWRWYHFDGTDWDQSRQLANRIYKFRGDGKAWDWEVDTENGNYDYLMYADVDMDHPEVINELNRWGVWYANTLNLDGFRLDAVKHIKFSFMRDWLGHVRGQTGKNLFAVAEYWKNDLGALENYLSKTNWTMSAFDVPLHYNLYQASNSSGNYDMRNLLNGTLVQRHPSHAVTFVDNHDTQPGEALESFVQGWFKPLAYATILTREQGYPQVFYGDYYGIPSDGVPSYRQQIDPLLKARQQYAYGRQHDYFDHWDVIGWTREGNASHPNSGLATIMSDGPGGSKWMYVGRQKAGEVWHDMTGNRSGTVTINQDGWGHFFVNGGSVSVWVKR

SEQ ID NO: 32645 - protein, 483 aa, Bacillus sp. (in: firmicutes)
HHDGTNGTIMQYFEWNVPNDGQHWNRLHNNAQNLKNAGITAIWIPPAWKGTSQNDVGYGAYDLYDLGEFNQKGTVRTKYGTKAELERAIRSLKANGIQVYGDVVMNHKGGADFTERVQAVEVNPQNLNQEVSGTYQIEAWTGFNFPGRGNQHSSFKWRWYHFDGTDWDQSRQLANRIYKFRGKAWDWEVDTENGNYDYLMYADVDMDHPEVINELNRWGVWYANTLNLDGFRLDAVKHIKFSFMRDWLGHVRGQTGKNLFAVAEYWKNDLGALENYLSKTNWTMSAFDVPLHYNLYQASNSSGNYDMRNLLNGTLVQRHPSHAVTFVDNHDTQPGEALESFVQGWFKPLAYATILTREQGYPCVFYGDYYGIPSDGVPSYRQQIDPLLKARQQYAYGRQHDYFDHWDVIGWTREGNASHPNSGLATIMSDGPGGSKWMYVGRQKAGEVWHDMTGNRSGTVTINQDGWGHFFVNGGSVSVWVKR

SEQ ID NO: 32646 - protein, 485 aa, Bacillus sp.
HHDGTNGTIMQYFEWNVPNDGQHWNRLHNNAQNLKNAGITAIWIPPAWKGTSQNDVGYGAYDLYDLGEFNQKGTVRTKYGTKAELERAIRSLKANGIQVYGDVVMNHKGGADFTERVQAVEVNPQNRNQEVSGTYQIEAWTGFNFPGRGNQHSSFKWRWYHFDGTDWDQSRQLANRIYKFRGDGKAWDWEVDTENGNYDYLMYADVDMDHPEVINELNRWGVWYANTLNLDGFRLDAVKHIKFSFMRDWLGHVRGQTGKNLFAVAEYWKNDLGALENYLSKTNWTMSAFDVPLHYNLYQASNSSGNYDMRNLLNGTLVQRHPSHAVTFVDNHDTQPGEALESFVQGWFKPLAYATILTREQGYPQVFYGDYYGIPSDGVPSYRQQIDPLLKARQQYAYGRQHDYFDHWDVIGWTREGNASCPNSGLATIMSDGPGGSKWMYVGRQKAGEVWHDMTGNRSGTVTINQDGWGHFFVNGGSVSVWVKR

SEQ ID NO: 32647 - protein, 485 aa, Bacillus sp.
HHDGTNGTIMQYFEWNVPNDGQHWNRLHNNAQNLKNAGITAIWIPPAWKGTSQNDVGYGAYDLYDLGEFNQKGTVRTKYGTKAELERAIRSLKANGIQVYGDVVMNHKGGADFTERVQAVEVNPQNRNQEVSGTYQIEAWTGFNFPGRGNQHSSFKWRWYHFDGTDWDQSRQLANRIYKFRGDGKAWDWEVDTENGNYDYLMYADVDMDHPEVINETNRWGVWYANTLNLDGFRLDAVKHIKFSFMRDWLGHVRGQTGKNLFAVAEYWKNDLGALENYLSKTNWTMSAFDVPLHYNLYQASNSSGNYDMRNLLNGTLVQRHPSHAVTFVDNHDTQPGEALESFVQGWFKPLAYATILTREQGYPQVFYGDYYGIPSDGVPSYRQQIDPLLKARQQYAYGRQHDYFDHWDVIGWTREGNASHPNSGLATIMSDGPGGSKWMYVGRQKAGEVWHDMTGNRSGTVTINQDGWGHFFVNGGSVSVWVKR

SEQ ID NO: 32648 - protein, 485 aa, Bacillus sp.
HHDGTNGTIMQYFEWNVPNDGQHWNRLHNNAQNLKNAGITAIWIPPAWKGTSQNDVGYGAYDLYDLGEFNQKGTVRTKYGTKAELERAIRSLKANGIQVYGDVVMNHKGGADFTERVQAVEVNPQNRNQEVSGTYQIEAWTGFNFPGRGNQHSSFKWRWYHFDGTDWDQSRQLANRIYKFRGDGKAWDWEVDTENGNYDYLMYADVDMDHPEVINELNRWGVWYANTLNLDGFRLDAVKHIKFSFMRDWLGHVRGQTGKNLFAVAEYWKNDLGALENYLSKTNWTMSAFDVPLHYNLYQASNSSGNYDMRNLLNGTLVQRHPSHAVTFVDNHDTQPGEALESFVQGWFKPLAYATILTREQGYPQVFYGDYYGIPSDGVPSYRQQIDPLLKARQQYAYGRQHDYFDHWDVIGWTREGNASHPNSGLATIMSDGPGGSKWMYVGRQKAGEVWHDMTGVRSGTVTINQDGWGHFFVNGGSVSVWVKR

SEQ ID NO: 32649 - protein, 485 aa, Bacillus sp.
HHDGTNGTIMQYFEWNVPNDGQHWNRLHNNAQNLKNAGITAIWIPPAWKGTSQNDVGYGAYDLYDLGEFNQKGTVRTKYGTKAELERAIRSLKANGIQVYGDVVMNHKGGADFTERVQAVEVNPQNRNQEVSGTYQIEAWTGFNFPGRGNQHSSFKWRWYHFDGTDWDQSRQLANRIYCFRGDGKAWDWEVDTENGNYDYLMYADVDMDHPEVINELNRWGVWYANTLNLDGFRLDAVKHIKFSFMRDWLGHVRGQTGKNLFAVAEYWKNDLGALENYLSKTNWTMSAFDVPLHYNLYQASNSSGNYDMRNLLNGTLVQRHPSHAVTFVDNHDTQPGEALESFVQGWFKPLAYATILTREQGYPQVFYGDYYGIPSDGVPSYRQQIDPLLKARQQYAYGRQHDYFDHWDVIGWTREGNASHPNSGLATIMSDGPGGSKWMYVGRQKAGEVWHDMTGNRSGTVTINQDGWGHFFVNGGSVSVWVKR

SEQ ID NO: 32650 - protein, 485 aa, Bacillus sp.
HHDGTNGTIMQYFEWNVPNDGQHWNRLHNNAQNLKNAGITAIWIPPAWKGTSQNDVGYGAYDLYDLGEFNQKGTVRTKYGTKAELERAIRSLKANGIQVYGDVVMNHKGGADFTERVQAVEVNPQNRNQEVSGTYQIEAWTGFNFPGRGNQHSSFKWRWSHFDGTDWDQSRQLANRIYKFRGDGKAWDWEVDTENGNYDYLMYADVDMDHPEVINELNRWGVWYANTLNLDGFRLDAVKHIKFSFMRDWLGHVRGQTGKNLFAVAEYWKNDLGALENYLSKTNWTMSAFDVPLHYNLYQASNSSGNYDMRNLLNGTLVQRHPSHAVTFVDNHDTQPGEALESFVQGWFKPLAYATILTREQGYPQVFYGDYYGIPSDGVPSYRQQIDPLLKARQQYAYGRQHDYFDHWDVIGWTREGNASHPNSGLATIMSDGPGGSKWMYVGRQKAGEVWHDMTGNRSGTVTINQDGWGHFFVNGGSVSVWVKR

SEQ ID NO: 32651 - protein, 485 aa, Bacillus sp.
HHDGTNGTIMQYFEWNVPNDGQHWNRLHNNAQNLKNAGITAIWIPPAWKGTSQNDVGYGAYDLYDLGEFNQKGTVRTKYGTKAELERAIRSLKANGIQVYGDVVMNHKGGADFTERVQAVEVNPQNRNQEVSGTYQIEAWTGFNFPGRGNQHSSFKWRWYHFDGTDWDQSRQLANRIYKFRGDGKAWDWEVDTENGNYDYLMYADVDMDHPEVINELNRWGVWYANTLNLDGFRLDAVKHIKFSFMRDWLGHVRGQTGKNLFAVAEYWKNDLGALENYLSKTNWTMLAFDVPLHYNLYQASNSSGNYDMRNLLNGTLVQRHPSHAVTFVDNHDTQPGEALESFVQGWFKPLAYATILTREQGYPQVFYGDYYGIPSDGVPSYRQQIDPLLKARQQYAYGRQHDYFDHWDVIGWTREGNASHPNSGLATIMSDGPGGSKWMYVGRQKAGEVWHDMTGNRSGTVTINQDGWGHFFVNGGSVSVWVKR

SEQ ID NO: 32652 - protein, 485 aa, Bacillus sp.
HHDGTNGTIMQYFEWNVPNDGQHWNRLHNNAQNLKNAGITAIWIPPAWKGTSQNDVGYGAYDKYDLGEFNQKGTVRTKYGTKAELERAIRSLKANGIQVYGDVVMNHKGGADFTERVQAVEVNPQNRNQEVSGTYQIEAWTGFNFPGRGNQHSSFKWRWYHFDGTDWDQSRQLANRIYKFRGDGKAWDWEVDTENGNYDYLMYADVDMDHPEVINELNRWGVWYANTLNLDGFRLDAVKHIKFSFMRDWLGHVRGQTGKNLFAVAEYWKNDLGALENYLSKTNWTMSAFDVPLHYNLYQASNSSGNYDMRNLLNGTLVQRHPSHAVTFVDNHDTQPGEALESFVQGWFKPLAYATILTREQGYPQVFYGDYYGIPSDGVPSYRQQIDPLLKARQQYAYGRQHDYFDHWDVIGWTREGNASHPNSGLATIMSDGPGGSKWMYVGRQKAGEVWHDMTGNRSGTVTINQDGWGHFFVNGGSVSVWVKR

SEQ ID NO: 32653 - protein, 485 aa, Bacillus sp.
HHDGTNGTIMQYFEWNVPNDGQHWNRLHNNAQNLKNAGITAIWIPPAWKGTSQNDVGYGVYDLYDLGEFNQKGTVRTKYGTKAELERAIRSLKANGIQVYGDVVMNHKGGADFTERVQAVEVNPQNRNQEVSGTYQIEAWTGFNFPGRGNQHSSFKWRWYHFDGTDWDQSRQLANRIYKFRGDGKAWDWEVDTENGNYDYLMYADVDMDHPEVINELNRWGVWYANTLNLDGFRLDAVKHIKFSFMRDWLGHVRGQTGKNLFAVAEYWKNDLGALENYLSKTNWTMSAFDVPLHYNLYQASNSSGNYDMRNLLNGTLVQRHPSHAVTFVDNHDTQPGEALESFVQGWFKPLAYATILTREQGYPQVFYGDYYGIPSDGVPSYRQQIDPLLKARQQYAYGRQHDYFDHWDVIGWTREGNASHPNSGLATIMSDGPGGSKWMYVGRQKAGEVWHDMTGNRSGTVTINQDGWGHFFVNGGSVSVWVKR

SEQ ID NO: 32654 - protein, 485 aa, Bacillus sp.
HHDGTNGTIMQYFEWNVPNDGQHWNRLHNNAQNLKNAGITAIWIPPAWKGTSQNDVGYGAYDLYDLGEFNQKGTVRTKYGTKAELERAIRSLKANGIQVYGDVVMNHKGGADFTERVQAVEVNPQNRNQEVSGTYQIEAWTGFNFPGRGNQHSSFKWRWYHFDGTDWDQSRQLANRIYKFRGDGKAWDWEVDTENGNYDYLMYYDVDMDHPEVINELNRWGVWYANTLNLDGFRLDAVKHIKFSFMRDWLGHVRGQTGKNLFAVAEYWKNDLGALENYLSKTNWTMSAFDVPLHYNLYQASNSSGNYDMRNLLNGTLVQRHPSHAVTFVDNHDTQPGEALESFVQGWFKPLAYATILTREQGYPQVFYGDYYGIPSDGVPSYRQQIDPLLKARQQYAYGRQHDYFDHWDVIGWTREGNASHPNSGLATIMSDGPGGSKWMYVGRQKAGEVWHDMTGNRSGTVTINQDGWGHFFVNGGSVSVWVKR

SEQ ID NO: 32655 - protein, 485 aa, Bacillus sp.
HHDGTNGTIMQYFEWNVPNDGQHWNRLHNNAQNLKNAGITAIWIPPAWKGTSQNDVGYGLYDLYDLGEFNQKGTVRTKYGTKAELERAIRSLKANGIQVYGDVVMNHKGGADFTERVQAVEVNPQNRNQEVSGTYQIEAWTGFNFPGRGNQHSSFKWRWYHFDGTDWDQSRQLANRIYKFRGDGKAWDWEVDTENGNYDYLMYADVDMDHPEVINELNRWGVWYANTLNLDGFRLDAVKHIKFSFMRDWLGHVRGQTGKNLFAVAEYWKNDLGALENYLSKTNWTMSAFDVPLHYNLYQASNSSGNYDMRNLLNGTLVQRHPSHAVTFVDNHDTQPGEALESFVQGWFKPLAYATILTREQGYPQVFYGDYYGIPSDGVPSYRQQIDPLLKARQQYAYGRQHDYFDHWDVIGWTREGNASHPNSGLATIMSDGPGGSKWMYVGRQKAGEVWHDMTGNRSGTVTINQDGWGHFFVNGGSVSVWVKR

SEQ ID NO: 32656 - protein, 485 aa, Bacillus sp.
HHDGTNGTIMQYFEWNVPNDGQHWNRLHNNAQNLKNAGITAIWIPPAWKGTSQNDVGYGAYDLYDLGEFNQKGTVRTKYGTKAELERAIRSLKANGIQVYGDVVMNHKGGADFTERVQAVEVNPQNRNQEVSGTYQIEAWTGFNFPGRGNQHSSFKWRWYHFDGTDWDQSRQLANRIYKFRGDGKAWDWEVDTENGNYDYLMYADVDMDHPEVINELNRWGVWYANTLNLDGFRLDAVKHIKFSFMRDWLGHVRGQTGKNLFAVAEYWKNDLGALENYLSKTNWTMSAFDVPLHYNLYQASNSSGNYDMRNLLNGTLVQRHPSHAVTFVDNHDTQPGEALESFVQGWFKPLAYATILTREQGYPQVFYKDYYGIPSDGVPSYRQQIDPLLKARQQYAYGRQHDYFDHWDVIGWTREGNASHPNSGLATIMSDGPGGSKWMYVGRQKAGEVWHDMTGNRSGTVTINQDGWGHFFVNGGSVSVWVKR

SEQ ID NO: 32657 - protein, 485 aa, Bacillus sp.
HHDGTNGTIMQYFEWNVPNDGQHWNRLHNNAQNLKNAGITAIWIPPAWKGTSQNDVGYGAYDLYDLGEFNQKGTVRTKYGTKAELERAIRSLKANGIQVYGDVVMNHKGGADFTERVQAVEVNPQNRNQEVSGTYQIEAWTGFNFPGRGNQHSSFKWRWYHFDGTDWDQSRQLANRIYKFRGDGKAWDWEVDTENGNYDYLMYACVDMDHPEVINELNRWGVWYANTLNLDGFRLDAVKHIKFSFMRDWLGHVRGQTGKNLFAVAEYWKNDLGALENYLSKTNWTMSAFDVPLHYNLYQASNSSGNYDMRNLLNGTLVQRHPSHAVTFVDNHDTQPGEALESFVQGWFKPLAYATILTREQGYPQVFYGDYYGIPSDGVPSYRQQIDPLLKARQQYAYGRQHDYFDHWDVIGWTREGNASHPNSGLATIMSDGPGGSKWMYVGRQKAGEVWHDMTGNRSGTVTINQDGWGHFFVNGGSVSVWVKR

SEQ ID NO: 32658 - protein, 485 aa, Bacillus sp.
HHDGTNGTIMQYFESNVPNDGQHWNRLHNNAQNLKNAGITAIWIPPAWKGTSQNDVGYGAYDLYDLGEFNQKGTVRTKYGTKAELERAIRSLKANGIQVYGDVVMNHKGGADFTERVQAVEVNPQNRNQEVSGTYQIEAWTGFNFPGRGNQHSSFKWRWYHFDGTDWDQSRQLANRIYKFRGDGKAWDWEVDTENGNYDYLMYADVDMDHPEVINELNRWGVWYANTLNLDGFRLDAVKHIKFSFMRDWLGHVRGQTGKNLFAVAEYWKNDLGALENYLSKTNWTMSAFDVPLHYNLYQASNSSGNYDMRNLLNGTLVQRHPSHAVTFVDNHDTQPGEALESFVQGWFKPLAYATILTREQGYPQVFYGDYYGIPSDGVPSYRQQIDPLLKARQQYAYGRQHDYFDHWDVIGWTREGNASHPNSGLATIMSDGPGGSKWMYVGRQKAGEVWHDMTGNRSGTVTINQDGWGHFFVNGGSVSVWVKR

SEQ ID NO: 32659 - protein, 485 aa, Bacillus sp.
HHDGTNGTIMQYFEWNVPNDGQHWNRLHNNAQNLKNAGITAIWIPPAGKGTSQNDVGYGAYDLYDLGEFNQKGTVRTKYGTKAELERAIRSLKANGIQVYGDVVMNHKGGADFTERVQAVEVNPQNRNQEVSGTYQIEAWTGFNFPGRGNQHSSFKWRWYHFDGTDWDQSRQLANRIYKFRGDGKAWDWEVDTENGNYDYLMYADVDMDHPEVINELNRWGVWYANTLNLDGFRLDAVKHIKFSFMRDWLGHVRGQTGKNLFAVAEYWKNDLGALENYLSKTNWTMSAFDVPLHYNLYQASNSSGNYDMRNLLNGTLVQRHPSHAVTFVDNHDTQPGEALESFVQGWFKPLAYATILTREQGYPQVFYGDYYGIPSDGVPSYRQQIDPLLKARQQYAYGRQHDYFDHWDVIGWTREGNASHPNSGLATIMSDGPGGSKWMYVGRQKAGEVWHDMTGNRSGTVTINQDGWGHFFVNGGSVSVWVKR

SEQ ID NO: 32660 - protein, 485 aa, Bacillus sp.
HHDGTNGTIMQYFEWNVPNDGQHWNRLHNNAQNLKNAGITAIWIPPAWKGTSQNDVGYSAYDLYDLGEFNQKGTVRTKYGTKAELERAIRSLKANGIQVYGDVVMNHKGGADFTERVQAVEVNPQNRNQEVSGTYQIEAWTGFNFPGRGNQHSSFKWRWYHFDGTDWDQSRQLANRIYKFRGDGKAWDWEVDTENGNYDYLMYADVDMDHPEVINELNRWGVWYANTLNLDGFRLDAVKHIKFSFMRDWLGHVRGQTGKNLFAVAEYWKNDLGALENYLSKTNWTMSAFDVPLHYNLYQASNSSGNYDMRNLLNGTLVQRHPSHAVTFVDNHDTQPGEALESFVQGWFKPLAYATILTREQGYPQVFYGDYYGIPSDGVPSYRQQIDPLLKARQQYAYGRQHDYFDHWDVIGWTREGNASHPNSGLATIMSDGPGGSKWMYVGRQKAGEVWHDMTGNRSGTVTINQDGWGHFFVNGGSVSVWVKR

SEQ ID NO: 32661 - protein, 485 aa, Bacillus sp.
HHDGTNGTIMQYFEWNVPNDGQHWNRLHNNAQNLKNAGITAIWIPPAWKGTSQNDVGYGAYDLYDLGEFNQKGTVRTKYGTKAELERAIRSLKANGIQVYGDVVMNHKGGADFTERVQAVEVNPQNRNQEVSGTYQIEAWTGFNFPGRGNQHSSFKWRWYHFDGTDWDQSRQLANRIYKFRGDGKAWDWEVDTENGNYDYLMYADVDMDHPEVINELNRWGVWYANTLNLDGFRLDAVKHIYFSFMRDWLGHVRGQTGKNLFAVAEYWKNDLGALENYLSKTNWTMSAFDVPLHYNLYQASNSSGNYDMRNLLNGTLVQRHPSHAVTFVDNHDTQPGEALESFVQGWFKPLAYATILTREQGYPQVFYGDYYGIPSDGVPSYRQQIDPLLKARQQYAYGRQHDYFDHWDVIGWTREGNASHPNSGLATIMSDGPGGSKWMYVGRQKAGEVWHDMTGNRSGTVTINQDGWGHFFVNGGSVSVWVKR

SEQ ID NO: 32662 - protein, 483 aa, Bacillus sp. (in: firmicutes)
HHDGTNGTIMQYFEWNVPNDGQHWNRLHNNAQNLKNAGITAIWIPPAWKGTSQNDVGYGAYDLYDLGEFNQKGTVRTKYGTKAELERAIRSLKANGIQVYGDVVMNHKGGADFTERVQAVEVNPQNRNQEVSGTYQIEAWTGFNFPGRGNQHSSFKWRWYHFDGTDWDQSRQLANRIYKFRGKAWDWEVDTEFGNYDYLMYADVDMDHPEVINELNRWGVWYANTLNLDGFRLDAVKHIKFSFMRDWLGHVRGQTGKNLFAVAEYWKNDLGALENYLSKTNWTMSAFDVPLHYNLYQASNSSGNYDMRNLLNGTLVQRHPSHAVTFVDNHDTQPGEALESFVQGWFKPLAYATILTREQGYPMVFYGDYYGIPSDGVPSYRQQIDPLLKARQQYAYGRQHDYFDHWDVIGWTREGNASHPNSGLATIMSDGPGGSKWMYVGRQKAGEVWHDMTGNRSGTVTINQDGWGHFFVNGGSVSVWVKR

SEQ ID NO: 32663 - protein, 485 aa, Bacillus sp.
HHDGTNGTIMQYFEWNVPNDGQHWNRLHNNAQNLKNAGITAIWIPPAWKGTSQNDVGYGAYDLYDLGEFNQKGTVRTKYGTKAELERAIRSLKANGIQVYGDVVMNHKGGADFTERVQAVEVNPQNRNQEVSGTYQIEAWTGFNFPGRGNQHSSFKWRWYHFDGTDWDQSRQLANRIYKFRGDGKAWDWEVDTENGNYDYLMYADVDMDHPEVINELNRWGVWYANTLNLDGFRLDAVKHIKFSFMRDWLGHVRGQTGKNLFAVAEYWXNDLGALENYLSKTNWTMSAFDVPLHYNLYQASNSSGNYDMRNLLNGTLVQRHPSHAVTFVDNHDTQPGEALESFVQGWFKPLAYATILTREQGYPQVFYGDYYGIPSDGVPSYRQQIDPLLKARQQYAYGRQHDYFDHWDVIGWTREGNASHPNSGLATIMSDGPGGSKWMYVGRQKAGEVWHDMTGNRSGTVTINQDGWGHFFVNGGSVSVWVKR

SEQ ID NO: 32664 - protein, 485 aa, Bacillus sp.
HHDGVNGTIMQYFEWNVPNDGQHWNRLHNNAQNLKNAGITAIWIPPAWKGTSQNDVGYGAYDLYDLGEFNQKGTVRTKYGTKAELERAIRSLKANGIQVYGDVVMNHKGGADFTERVQAVEVNPQNRNQEVSGTYQIEAWTGFNFPGRGNQHSSFKWRWYHFDGTDWDQSRQLANRIYKFRGDGKAWDWEVDTENGNYDYLMYADVDMDHPEVINELNRWGVWYANTLNLDGFRLDAVKHIKFSFMRDWLGHVRGQTGKNLFAVAEYWKNDLGALENYLSKTNWTMSAFDVPLHYNLYQASNSSGNYDMRNLLNGTLVQRHPSHAVTFVDNHDTQPGEALESFVQGWFKPLAYATILTREQGYPQVFYGDYYGIPSDGVPSYRQQIDPLLKARQQYAYGRQHDYFDHWDVIGWTREGNASHPNSGLATIMSDGPGGSKWMYVGRQKAGEVWHDMTGNRSGTVTINQDGWGHFFVNGGSVSVWVKR

SEQ ID NO: 32665 - protein, 485 aa, Bacillus sp.
HHDGTNGTIMQYFEWNVPNDGQHWNRLHNNAQNLKNAGITAIWIPPAWKGTSQNDVGYGAYDLYDLGEFNQKGTVRTKYGTKAELERAIRSLKANGIQVYGDVVMNHKGGADFTERVQAVEVNPQNRNQEVSGTYQIEAWTGFNFPGRGNQHSSFKWRWYHFDGTDWDQSRQLANRIYKFRGDGKAWDWEVDTENGNYDSLMYADVDMDHPEVINELNRWGVWYANTLNLDGFRLDAVKHIKFSFMRDWLGHVRGQTGKNLFAVAEYWKNDLGALENYLSKTNWTMSAFDVPLHYNLYQASNSSGNYDMRNLLNGTLVQRHPSHAVTFVDNHDTQPGEALESFVQGWFKPLAYATILTREQGYPQVFYGDYYGIPSDGVPSYRQQIDPLLKARQQYAYGRQHDYFDHWDVIGWTREGNASHPNSGLATIMSDGPGGSKWMYVGRQKAGEVWHDMTGNRSGTVTINQDGWGHFFVNGGSVSVWVKR

SEQ ID NO: 32666 - protein, 485 aa, Bacillus sp.
HHDGTNGTIMQYFEWNVPNDGQHWNRLHNNAQNLKNAGITAIWIPPAWKGTSQNDVGYGAYDLYDLGEFNQKGTVRTKYGTKAELERAIRSLKANGIQVYGDVVMNHKGGADFTERVQAVEVNPQARNQEVSGTYQIEAWTGFNFPGRGNQHSSFKWRWYHFDGTDWDQSRQLANRIYKFRGDGKAWDWEVDTENGNYDYLMYADVDMDHPEVINELNRWGVWYANTLNLDGFRLDAVKHIKFSFMRDWLGHVRGQTGKNLFAVAEYWKNDLGALENYLSKTNWTMSAFDVPLHYNLYQASNSSGNYDMRNLLNGTLVQRHPSHAVTFVDNHDTQPGEALESFVQGWFKPLAYATILTREQGYPQVFYGDYYGIPSDGVPSYRQQIDPLLKARQQYAYGRQHDYFDHWDVIGWTREGNASHPNSGLATIMSDGPGGSKWMYVGRQKAGEVWHDMTGNRSGTVTINQDGWGHFFVNGGSVSVWVKR

SEQ ID NO: 32667 - protein, 485 aa, Bacillus sp.
HHDGTNGTIMQYFEWNVPNDGQHWNRLHNNAQNLKNAGITAIWIPPAWKGTSQNDVGYGAYDLYDLGEFNQKGTVRTKYGTKAELERAIRSLKANGIQVYGDVVMNHKGGADFTERVQAVEVNPQNRNQEVSGTYQIEAWTGFNFPGRGNQHSSFKWRWYHFDSTDWDQSRQLANRIYKFRGDGKAWDWEVDTENGNYDYLMYADVDMDHPEVINELNRWGVWYANTLNLDGFRLDAVKHIKFSFMRDWLGHVRGQTGKNLFAVAEYWKNDLGALENYLSKTNWTMSAFDVPLHYNLYQASNSSGNYDMRNLLNGTLVQRHPSHAVTFVDNHDTQPGEALESFVQGWFKPLAYATILTREQGYPQVFYGDYYGIPSDGVPSYRQQIDPLLKARQQYAYGRQHDYFDHWDVIGWTREGNASHPNSGLATIMSDGPGGSKWMYVGRQKAGEVWHDMTGNRSGTVTINQDGWGHFFVNGGSVSVWVKR

SEQ ID NO: 32668 - protein, 485 aa, Bacillus sp.
HHDGTNGTIMQYFEWNVPNDGQHWNRLHNNAQNLKNAGITAIWIPPAWKGTSQNDVGYGAYDLYDLGEFNQKGTVRTKYGTKAELERAIRSLKANGIQVYGDVVMNHKGGADFTERVQAVEVNPQNRNQEVSGTYQIEAWTGFNFPGRGNQHSSFKWRWYHFDGTDWDQSRQLANRIYKFRGDGKAWDWEVDTENGNYDYLMYADVDMDHPEVINELNRWGVWYANTLNLDGFRLDAVKHIKFSFMRDWLGHVRGQTGKNLFAVAEYWKNDLGALENYLSKTNWTMSAFDVPLHYNLYQASNSSGNYDMRNLLNGTLAQRHPSHAVTFVDNHDTQPGEALESFVQGWFKPLAYATILTREQGYPQVFYGDYYGIPSDGVPSYRQQIDPLLKARQQYAYGRQHDYFDHWDVIGWTREGNASHPNSGLATIMSDGPGGSKWMYVGRQKAGEVWHDMTGNRSGTVTINQDGWGHFFVNGGSVSVWVKR

SEQ ID NO: 32669 - protein, 485 aa, Bacillus sp.
HHDGTNGTIMQYFEWNVPNDGQHWNRLHNNAQNLKNAGITAIWIPPAWKGTSQNDTGYGAYDLYDLGEFNQKGTVRTKYGTKAELERAIRSLKANGIQVYGDVVMNHKGGADFTERVQAVEVNPQNRNQEVSGTYQIEAWTGFNFPGRGNQHSSFKWRWYHFDGTDWDQSRQLANRIYKFRGDGKAWDWEVDTENGNYDYLMYADVDMDHPEVINELNRWGVWYANTLNLDGFRLDAVKHIKFSFMRDWLGHVRGQTGKNLFAVAEYWKNDLGALENYLSKTNWTMSAFDVPLHYNLYQASNSSGNYDMRNLLNGTLVQRHPSHAVTFVDNHDTQPGEALESFVQGWFKPLAYATILTREQGYPQVFYGDYYGIPSDGVPSYRQQIDPLLKARQQYAYGRQHDYFDHWDVIGWTREGNASHPNSGLATIMSDGPGGSKWMYVGRQKAGEVWHDMTGNRSGTVTINQDGWGHFFVNGGSVSVWVKR

SEQ ID NO: 32670 - protein, 485 aa, Bacillus sp.
HHDGTNGTIMQYFEWNVPNDGQHWNRLHNNAQNLKNAGITQIWIPPAWKGTSQNDVGYGAYDLYDLGEFNQKGTVRTKYGTKAELERAIRSLKANGIQVYGDVVMNHKGGADFTERVQAVEVNPQNRNQEVSGTYQIEAWTGFNFPGRGNQHSSFKWRWYHFDGTDWDQSRQLANRIYKFRGDGKAWDWEVDTENGNYDYLMYADVDMDHPEVINELNRWGVWYANTLNLDGFRLDAVKHIKFSFMRDWLGHVRGQTGKNLFAVAEYWKNDLGALENYLSKTNWTMSAFDVPLHYNLYQASNSSGNYDMRNLLNGTLVQRHPSHAVTFVDNHDTQPGEALESFVQGWFKPLAYATILTREQGYPQVFYGDYYGIPSDGVPSYRQQIDPLLKARQQYAYGRQHDYFDHWDVIGWTREGNASHPNSGLATIMSDGPGGSKWMYVGRQKAGEVWHDMTGNRSGTVTINQDGWGHFFVNGGSVSVWVKR

SEQ ID NO: 32671 - protein, 485 aa, Bacillus sp.
HHDGTNGTIMQYFEWNVPNDGQHWNRLHNNAQNLKNAGITAIWIPPAWKGTSQNDVGYGAYDAYDLGEFNQKGTVRTKYGTKAELERAIRSLKANGIQVYGDVVMNHKGGADFTERVQAVEVNPQNRNQEVSGTYQIEAWTGFNFPGRGNQHSSFKWRWYHFDGTDWDQSRQLANRIYKFRGDGKAWDWEVDTENGNYDYLMYADVDMDHPEVINELNRWGVWYANTLNLDGFRLDAVKHIKFSFMRDWLGHVRGQTGKNLFAVAEYWKNDLGALENYLSKTNWTMSAFDVPLHYNLYQASNSSGNYDMRNLLNGTLVQRHPSHAVTFVDNHDTQPGEALESFVQGWFKPLAYATILTREQGYPQVFYGDYYGIPSDGVPSYRQQIDPLLKARQQYAYGRQHDYFDHWDVIGWTREGNASHPNSGLATIMSDGPGGSKWMYVGRQKAGEVWHDMTGNRSGTVTINQDGWGHFFVNGGSVSVWVKR

SEQ ID NO: 32672 - protein, 485 aa, Bacillus sp.
HHDGTNGTIMQYFEWNVPNDGQHWNRLHNNAQNLKNAGITAIWIPPAWKGTSQNDVGYGAYDLYDLGEFNQKGTVRTKYGTKAELERAIRSLKANGIQVYGDVVMNHKGGADFTERVQAVEVNPQNRNQEVSGTYQIEAWTGFNFPGRGNQHSSFKWRWYHFDGTDWDQSRQLANRIYKFRGDGKAWDWEVDTENGNYDYLMYADVDMDHPEVINELNRWGVWYANTLNLDGFRLDAVKHIKFSFMRDWLGHVRGQTGKNLFAVAEYWKNDLGALENYLSKTNWTMTAFDVPLHYNLYQASNSSGNYDMRNLLNGTLVQRHPSHAVTFVDNHDTQPGEALESFVQGWFKPLAYATILTREQGYPQVFYGDYYGIPSDGVPSYRQQIDPLLKARQQYAYGRQHDYFDHWDVIGWTREGNASHPNSGLATIMSDGPGGSKWMYVGRQKAGEVWHDMTGNRSGTVTINQDGWGHFFVNGGSVSVWVKR

SEQ ID NO: 32673 - protein, 485 aa, Bacillus sp.
HHDGTNGTIMQYFEWNVPNDGQHWNRLHNNAQNLKNAGITAIWIPPSWKGTSQNDVGYGAYDLYDLGEFNQKGTVRTKYGTKAELERAIRSLKANGIQVYGDVVMNHKGGADFTERVQAVEVNPQNRNQEVSGTYQIEAWTGFNFPGRGNQHSSFKWRWYHFDGTDWDQSRQLANRIYKFRGDGKAWDWEVDTENGNYDYLMYADVDMDHPEVINELNRWGVWYANTLNLDGFRLDAVKHIKFSFMRDWLGHVRGQTGKNLFAVAEYWKNDLGALENYLSKTNWTMSAFDVPLHYNLYQASNSSGNYDMRNLLNGTLVQRHPSHAVTFVDNHDTQPGEALESFVQGWFKPLAYATILTREQGYPQVFYGDYYGIPSDGVPSYRQQIDPLLKARQQYAYGRQHDYFDHWDVIGWTREGNASHPNSGLATIMSDGPGGSKWMYVGRQKAGEVWHDMTGNRSGTVTINQDGWGHFFVNGGSVSVWVKR

SEQ ID NO: 32674 - protein, 485 aa, Bacillus sp.
HHDGTNGTIMQYFEWNVPNDGQHWNRLHNNAQNLKNAGITAIWIPPAWKGTSQNDVGYGAYDLYDLGEFNQKGTVRTKYGTKAELERAIRSLKANGIQVYGDVVMNHKSGADFTERVQAVEVNPQNRNQEVSGTYQIEAWTGFNFPGRGNQHSSFKWRWYHFDGTDWDQSRQLANRIYKFRGDGKAWDWEVDTENGNYDYLMYADVDMDHPEVINELNRWGVWYANTLNLDGFRLDAVKHIKFSFMRDWLGHVRGQTGKNLFAVAEYWKNDLGALENYLSKTNWTMSAFDVPLHYNLYQASNSSGNYDMRNLLNGTLVQRHPSHAVTFVDNHDTQPGEALESFVQGWFKPLAYATILTREQGYPQVFYGDYYGIPSDGVPSYRQQIDPLLKARQQYAYGRQHDYFDHWDVIGWTREGNASHPNSGLATIMSDGPGGSKWMYVGRQKAGEVWHDMTGNRSGTVTINQDGWGHFFVNGGSVSVWVKR

SEQ ID NO: 32675 - protein, 485 aa, Bacillus sp.
HHDGTNGTIMQYFEWNVPNDGQHWNRLHNNAQNLKNAGITAAWIPPAWKGTSQNDVGYGAYDLYDLGEFNQKGTVRTKYGTKAELERAIRSLKANGIQVYGDVVMNHKGGADFTERVQAVEVNPQNRNQEVSGTYQIEAWTGFNFPGRGNQHSSFKWRWYHFDGTDWDQSRQLANRIYKFRGDGKAWDWEVDTENGNYDYLMYADVDMDHPEVINELNRWGVWYANTLNLDGFRLDAVKHIKFSFMRDWLGHVRGQTGKNLFAVAEYWKNDLGALENYLSKTNWTMSAFDVPLHYNLYQASNSSGNYDMRNLLNGTLVQRHPSHAVTFVDNHDTQPGEALESFVQGWFKPLAYATILTREQGYPQVFYGDYYGIPSDGVPSYRQQIDPLLKARQQYAYGRQHDYFDHWDVIGWTREGNASHPNSGLATIMSDGPGGSKWMYVGRQKAGEVWHDMTGNRSGTVTINQDGWGHFFVNGGSVSVWVKR

SEQ ID NO: 32676 - protein, 485 aa, Bacillus sp.
HHDGTNGTIMQYFEWNVPNDGQHWNRLHNNAQNLKNAGITAIWTPPAWKGTSQNDVGYGAYDLYDLGEFNQKGTVRTKYGTKAELERAIRSLKANGIQVYGDVVMNHKGGADFTERVQAVEVNPQNRNQEVSGTYQIEAWTGFNFPGRGNQHSSFKWRWYHFDGTDWDQSRQLANRIYKFRGDGKAWDWEVDTENGNYDYLMYADVDMDHPEVINELNRWGVWYANTLNLDGFRLDAVKHIKFSFMRDWLGHVRGQTGKNLFAVAEYWKNDLGALENYLSKTNWTMSAFDVPLHYNLYQASNSSGNYDMRNLLNGTLVQRHPSHAVTFVDNHDTQPGEALESFVQGWFKPLAYATILTREQGYPQVFYGDYYGIPSDGVPSYRQQIDPLLKARQQYAYGRQHDYFDHWDVIGWTREGNASHPNSGLATIMSDGPGGSKWMYVGRQKAGEVWHDMTGNRSGTVTINQDGWGHFFVNGGSVSVWVKR

SEQ ID NO: 32677 - protein, 485 aa, Bacillus sp.
HHDGTNGTIMQYFEWNVPNDGQHWNRLHNNAQNLKNAGITAIWIPPAWKGTSQNDVGYGAYDLYDLGEFSQKGTVRTKYGTKAELERAIRSLKANGIQVYGDVVMNHKGGADFTERVQAVEVNPQNRNQEVSGTYQIEAWTGFNFPGRGNQHSSFKWRWYHFDGTDWDQSRQLANRIYKFRGDGKAWDWEVDTENGNYDYLMYADVDMDHPEVINELNRWGVWYANTLNLDGFRLDAVKHIKFSFMRDWLGHVRGQTGKNLFAVAEYWKNDLGALENYLSKTNWTMSAFDVPLHYNLYQASNSSGNYDMRNLLNGTLVQRHPSHAVTFVDNHDTQPGEALESFVQGWFKPLAYATILTREQGYPQVFYGDYYGIPSDGVPSYRQQIDPLLKARQQYAYGRQHDYFDHWDVIGWTREGNASHPNSGLATIMSDGPGGSKWMYVGRQKAGEVWHDMTGNRSGTVTINQDGWGHFFVNGGSVSVWVKR

SEQ ID NO: 32678 - protein, 485 aa, Bacillus sp.
HHDGTNGTIMQYFEWNVPNDGQHWNRLHNNAQNLKNAGITAIWIPPAWKGTSQNDVGYGAYDLYDLGEFNQKGTVRTKYGTKAELERAIRSLKANGIQVYGDVVMNHKGGADFTERVQAVEVNPQNRNQEVSGTYQIEAWTGFNFPGRGNQHSSFKWRWYHFDGTDWDQSRQLANRIYKFRGDGKAWDWEVDTENGNYDYLMYADVDMDHPEVINELNRWGVWYANTLNLDGFRLDAVKHIKFSFMRDWLGHVRGQTGKNLFAVAEYWKNDLGALENYLSKTNWTMSAFDVPLHYNSYQASNSSGNYDMRNLLNGTLVQRHPSHAVTFVDNHDTQPGEALESFVQGWFKPLAYATILTREQGYPQVFYGDYYGIPSDGVPSYRQQIDPLLKARQQYAYGRQHDYFDHWDVIGWTREGNASHPNSGLATIMSDGPGGSKWMYVGRQKAGEVWHDMTGNRSGTVTINQDGWGHFFVNGGSVSVWVKR

SEQ ID NO: 32679 - protein, 485 aa, Bacillus sp.
HHDGTNGTIMQYFEWNVPNDGQHWNRLHNNAQNLKNAGITAIWIPPAWKGTSQNDVGYGAYDLYDLGEFNQKGTVRTKYGTKAELERAIRSLKANGIQVYGDVVMNHKGGADFTERVQAVEVNPQNRNQEVSGTYQIEAWTGFNFPGRGNQHSSFKWRWYHFDGTDWDQSRQLANRIYKFRGDGKAWDWEVDTENGNYDYLMYADVDMDHPEVINELNRWGVWYANTLNLDGFRLDAVKHIKFSFMRDWLGHVRGQTGKNLFAVAEYWKNDLGALENYLSKTNWTMSAFDVPLHYNLYQASNSSGNYDMRNLLNGTLVQRHPSHAVTFVDNHDTQPGEALESFVQGWFKPLAYATILTREQGYPQVFYGDYYGIPSDGVPSYRQQIDPLLKARQQYAYGRQLDYFDHWDVIGWTREGNASHPNSGLATIMSDGPGGSKWMYVGRQKAGEVWHDMTGNRSGTVTINQDGWGHFFVNGGSVSVWVKR

SEQ ID NO: 32680 - protein, 485 aa, Bacillus sp.
HHDGTNGTIMQYFEWNVPNDGQHWNRLHNNAQNLKNAGITAIWIPPAWKGTSQNDVGYGAYDLYDLGEFNQKGTVRTKYGTKAELERAIRSLKANGIQVYGDVVMNHKGGADFTERVQAVEVNPQNRNQEVSGTYQIEAWTGFNFPIRGNQHSSFKWRWYHFDGTDWDQSRQLANRIYKFRGDGKAWDWEVDTENGNYDYLMYADVDMDHPEVINELNRWGVWYANTLNLDGFRLDAVKHIKFSFMRDWLGHVRGQTGKNLFAVAEYWKNDLGALENYLSKTNWTMSAFDVPLHYNLYQASNSSGNYDMRNLLNGTLVQRHPSHAVTFVDNHDTQPGEALESFVQGWFKPLAYATILTREQGYPQVFYGDYYGIPSDGVPSYRQQIDPLLKARQQYAYGRQHDYFDHWDVIGWTREGNASHPNSGLATIMSDGPGGSKWMYVGRQKAGEVWHDMTGNRSGTVTINQDGWGHFFVNGGSVSVWVKR

SEQ ID NO: 32681 - protein, 485 aa, Bacillus sp.
HHDGTNGTIMQYFEWNVPNDGQHWNRLHNNAQNLKNAGITAIWIPPAWKGTSQNDVGYGAYDLYDLGEFNQKGTVRTKYGTKAELERAIRSLKANGIQVYGDVVMNHKGGADFTERVQAVEVNPQNRNQEVSGTYQIEAWTGFNFPGRGNQHSSFKWRWYHFDGTDWDQSRQLANRIYKFRGDGKAWDWEVDTENGNYDYLMYADVDMDHPEVINELNRWGVWYANTLNLDGFRLDAVKHIKFSFMRDWLGHVRGQTGKNLFAVAEYWKNDLGALENYLSKTNWTMSAFDVPLWYNLYQASNSSGNYDMRNLLNGTLVQRHPSHAVTFVDNHDTQPGEALESFVQGWFKPLAYATILTREQGYPQVFYGDYYGIPSDGVPSYRQQIDPLLKARQQYAYGRQHDYFDHWDVIGWTREGNASHPNSGLATIMSDGPGGSKWMYVGRQKAGEVWHDMTGNRSGTVTINQDGWGHFFVNGGSVSVWVKR

SEQ ID NO: 32682 - protein, 485 aa, Bacillus sp.
HHDGTNGTIMQYFEWNVPNDGQHWNRLHNNAQNLKNAGITAIWIPPAWKGTSQNDVGYGAYDLYDLGEFNQKGTVRTKYGTKAELERAIRSLKANGIQVYGDVVMNHKGGADFTERVQAVEVNPQNRNQEVSGTYQIEAWTGFNFPGRGNQHSSFKWRWYHFDGTDWDQSRQLANRIYKFRGDGKAWDWEVDTENGNYDYLMYADVDMDHPEVINELNRWGVWYANTLNLDGFRLDAVKHIKFSFMRDWLGHVRGQTGKNLFAVAEYWKNDLGALENYLSKTNWTMSAFDVPLHYNLYQASNSSGNYDMRNLLNGTLVQRHPSHAGTFVDNHDTQPGEALESFVQGWFKPLAYATILTREQGYPQVFYGDYYGIPSDGVPSYRQQIDPLLKARQQYAYGRQHDYFDHWDVIGWTREGNASHPNSGLATIMSDGPGGSKWMYVGRQKAGEVWHDMTGNRSGTVTINQDGWGHFFVNGGSVSVWVKR

SEQ ID NO: 32683 - protein, 485 aa, Bacillus sp.
HHDGTNGTIMQYFEWNVPNDGQHWNRLHNNAQNLKNAGITAIWIPPAWKGTSQNDVGYGAYDLYDLGEFNQKGTVRTKYGTKAELERAIRSLKANGIQVYGDVVMNHKGGADFTERVQAVEVNPQNRNQEVSGTYQIEAWTGFNFPGRGNQHSSFKWRWYHFDGTDWDQSRQLANRIYKFRGDGKAWDWEVDTENGNYDYLMYADVDMDHPEVINELNRWGVWYANTLNLDGFRLDAVKHIKFSFMRDWLGHVRGQTGKNLFAVAEYWKNDLGALENYLSKTNWTMSAFDVPLHYNLYQASNSSGNYDMRNLLNGTLVHRHPSHAVTFVDNHDTQPGEALESFVQGWFKPLAYATILTREQGYPQVFYGDYYGIPSDGVPSYRQQIDPLLKARQQYAYGRQHDYFDHWDVIGWTREGNASHPNSGLATIMSDGPGGSKWMYVGRQKAGEVWHDMTGNRSGTVTINQDGWGHFFVNGGSVSVWVKR

SEQ ID NO: 32684 - protein, 485 aa, Bacillus sp.
HHDGTNGTIMQYFEWNVPNDGQHWNRLHNNAQNLKNAGITAIWIPPAWKGTSQNDVGYGAYDLYDLGEFNQKGTVRTKYGTKAELERAIRSLKANGIQVYGDVVMNHKGGADFTERVQAVEVNPQNRNQEVSGTYQIEAWTGFNFPGRGNQHSSFKWRWYHFDGTDWDQSRQLANRIYKFRGDGKAWDWNVDTENGNYDYLMYADVDMDHPEVINELNRWGVWYANTLNLDGFRLDAVKHIKFSFMRDWLGHVRGQTGKNLFAVAEYWKNDLGALENYLSKTNWTMSAFDVPLHYNLYQASNSSGNYDMRNLLNGTLVQRHPSHAVTFVDNHDTQPGEALESFVQGWFKPLAYATILTREQGYPQVFYGDYYGIPSDGVPSYRQQIDPLLKARQQYAYGRQHDYFDHWDVIGWTREGNASHPNSGLATIMSDGPGGSKWMYVGRQKAGEVWHDMTGNRSGTVTINQDGWGHFFVNGGSVSVWVKR

SEQ ID NO: 32685 - protein, 485 aa, Bacillus sp.
HHDGTNGTIMQYFEWNVPNDGQHWNRLHNNAQNLKNAGITAIWIPPAWKGTSQNDVGYGAYDLYDLGEFNQKGTVRTKYGTKAELERAIRSLKANGIQVYGDVVMNHKGGADFTERVQAVEVNPQNRNQEVSGTYQIEAWTGFNFPGRGNQHSSFKWRWYHFDGTDWDQSRQLANRIYKFRGDGKAWDWEVDTENGNYDYLMYADVDMDHPEVINELNRWGVWYANTLNLDGFRLDAVKHIKFSFMRDWLGHVRGQTGKNLFAVAEYWKNDLGALENYLSKTNWTMSAFDVPLHYNLYQASNSSGNYDMRNLLNGTLVQRHPSHAVTFVDNHDTQPGEALESFVQGWFKPLAYATILTREQGYPQVFYGDYYGIPSDGVPSYRQQIDPLLKARQQYAYGRQHDYFDHWDVIGWTREGNASHPNSGLATIMSDGPGGSKWMYVGRQKSGEVWHDMTGNRSGTVTINQDGWGHFFVNGGSVSVWVKR

SEQ ID NO: 32686 - protein, 485 aa, Bacillus sp.
HHDGTNGTIMQYFEWNVPNDGQHWNRLHNNAQNLKNAGITAIWIPPAWKGTSQNDVGYGAYDLYDLGEFNQKGTVRTKYGTKAELERAIRSLKANGIQVYGDVVMNHKGGADFTERVQAVEVNPQNRNQEVSGTYQIEAWTGFNFPGRGNQHSSFKWRWYHFDGTDWDQSRQLANRIYKFRGDGKAWDWEVDTENGNYDYLMYADVDMDHPEVINELNRWGVWYANTLNLDGFRLDAVKHIKFSFMRDWLGHVRGQTGKNLFAVAEYWKNDLGALENYLSKTNWTMEAFDVPLHYNLYQASNSSGNYDMRNLLNGTLVQRHPSHAVTFVDNHDTQPGEALESFVQGWFKPLAYATILTREQGYPQVFYGDYYGIPSDGVPSYRQQIDPLLKARQQYAYGRQHDYFDHWDVIGWTREGNASHPNSGLATIMSDGPGGSKWMYVGRQKAGEVWHDMTGNRSGTVTINQDGWGHFFVNGGSVSVWVKR

SEQ ID NO: 32687 - protein, 485 aa, Bacillus sp.
HHDGTNGTIMQYFEWNVPNDGQHWNRLHNNAQNLKNAGITAIWIPPAWKGTSQNDVGYGAYDLYDLGEFNQKGTVRTKYGTKAELERAIRSLKANGIQVYGDVVMNHKGGADFTERVQAVEVNPQNRNQEVSGTYQIEAWTGFNFPGRGNQHSSFKWRWYHFDGTDWDQSRQLANRIYKFRGDGKAWDWEVDTENGNYDYLMYADVDMDHPEVINELNRWGVWYANTLNLDGFRLDAVKHIKFSFMRDWLGHVRGQTGKNLFAVAEYWKNDLGALLNYLSKTNWTMSAFDVPLHYNLYQASNSSGNYDMRNLLNGTLVQRHPSHAVTFVDNHDTQPGEALESFVQGWFKPLAYATILTREQGYPQVFYGDYYGIPSDGVPSYRQQIDPLLKARQQYAYGRQHDYFDHWDVIGWTREGNASHPNSGLATIMSDGPGGSKWMYVGRQKAGEVWHDMTGNRSGTVTINQDGWGHFFVNGGSVSVWVKR

SEQ ID NO: 32688 - protein, 485 aa, Bacillus sp.
HHDGTNGTIMQYFEWNVPNDGQHWNRLHNNAQNLKNAGITAIWIPPAWKGTSQNDVGYGAYDLYDLGEFNQKGTVRTKYGTKAELERAIRSLKANGIQVYGDVVMNHKGGADFTERVQAVEVNPQNRNQEVSGTYQIEAWTGFNFPGRGNQHSSFKWRWYHFDGTDWDQSRQLANRIYKFRGDGKAWDWEVDTENGNYDYLMYADVDMDHPEVINELNRWGVWYANTLNLDGFRLDAVKHIKFSFMRDWLGHVRGQTGKNLFAVAEYWKNDLGALENYLSKTNWTMSAFDVPLHYNLYQASNSSGNYDMRNLLNGTLVQRHPSHAVTFVDNHDTQPGEALESFVQGWFKPLAYATILTREQGYPQVFYGDYYGIPSDGVPSYRQQIDPLLKARQQYAYGRQHDYFDHWDVIGWTREGNASHPNSGLATIMSDGPGMSKWMYVGRQKAGEVWHDMTGNRSGTVTINQDGWGHFFVNGGSVSVWVKR

SEQ ID NO: 32689 - protein, 485 aa, Bacillus sp.
HHDGTNGTIMQYFEWNVPNDGQHWNRLHNNAQNLKNAGITAIWIPPAWKGTSQNDVGYGAYDLSDLGEFNQKGTVRTKYGTKAELERAIRSLKANGIQVYGDVVMNHKGGADFTERVQAVEVNPQNRNQEVSGTYQIEAWTGFNFPGRGNQHSSFKWRWYHFDGTDWDQSRQLANRIYKFRGDGKAWDWEVDTENGNYDYLMYADVDMDHPEVINELNRWGVWYANTLNLDGFRLDAVKHIKFSFMRDWLGHVRGQTGKNLFAVAEYWKNDLGALENYLSKTNWTMSAFDVPLHYNLYQASNSSGNYDMRNLLNGTLVQRHPSHAVTFVDNHDTQPGEALESFVQGWFKPLAYATILTREQGYPQVFYGDYYGIPSDGVPSYRQQIDPLLKARQQYAYGRQHDYFDHWDVIGWTREGNASHPNSGLATIMSDGPGGSKWMYVGRQKAGEVWHDMTGNRSGTVTINQDGWGHFFVNGGSVSVWVKR

SEQ ID NO: 32690 - protein, 485 aa, Bacillus sp.
HHDGTNGTIMQYFEWNVPNDGQHWNRLHNNAQNLKNAGITAIWIPPAWKGTSQNDVGYGAYDLYDLGEFNQKGTVRTKYGTKAELERAIRSLKANGIQVYGDVVMNHKGGADFTERVQAVEVNPQNRNQEVSGTYQIEAWTGFNFPGRGNQHSSFKWRWYHFDGTDWDQSRQLANRIYKFRGDGKAWDWEVDTENGVYDYLMYADVDMDHPEVINELNRWGVWYANTLNLDGFRLDAVKHIKFSFMRDWLGHVRGQTGKNLFAVAEYWKNDLGALENYLSKTNWTMSAFDVPLHYNLYQASNSSGNYDMRNLLNGTLVQRHPSHAVTFVDNHDTQPGEALESFVQGWFKPLAYATILTREQGYPQVFYGDYYGIPSDGVPSYRQQIDPLLKARQQYAYGRQHDYFDHWDVIGWTREGNASHPNSGLATIMSDGPGGSKWMYVGRQKAGEVWHDMTGNRSGTVTINQDGWGHFFVNGGSVSVWVKR

SEQ ID NO: 32691 - protein, 485 aa, Bacillus sp.
HHDGTNGTIMQYFEWNVPNDGQHWNRLHNNAQNLKNAGITAIWIPPAWKGTSQNDVGYGAYDLYDLGYFNQKGTVRTKYGTKAELERAIRSLKANGIQVYGDVVMNHKGGADFTERVQAVEVNPQNRNQEVSGTYQIEAWTGFNFPGRGNQHSSFKWRWYHFDGTDWDQSRQLANRIYKFRGDGKAWDWEVDTENGNYDYLMYADVDMDHPEVINELNRWGVWYANTLNLDGFRLDAVKHIKFSFMRDWLGHVRGQTGKNLFAVAEYWKNDLGALENYLSKTNWTMSAFDVPLHYNLYQASNSSGNYDMRNLLNGTLVQRHPSHAVTFVDNHDTQPGEALESFVQGWFKPLAYATILTREQGYPQVFYGDYYGIPSDGVPSYRQQIDPLLKARQQYAYGRQHDYFDHWDVIGWTREGNASHPNSGLATIMSDGPGGSKWMYVGRQKAGEVWHDMTGNRSGTVTINQDGWGHFFVNGGSVSVWVKR

SEQ ID NO: 32692 - protein, 485 aa, Bacillus sp.
HHDGTNGTIMQYFEWNVPNDGQHWNRLHNNAQNLKNAGITAIWIPPAWKGTSQNDVGYGAYDLYDLGEFNQKGTVRTKYGTKAELERAIRSLKANGIQVYGDVVMNHKGGADFTERVQAVEVNPQNRNQEVSGTYQIEAWTGFNFPGRGNQHSSFKWRWIHFDGTDWDQSRQLANRIYKFRGDGKAWDWEVDTENGNYDYLMYADVDMDHPEVINELNRWGVWYANTLNLDGFRLDAVKHIKFSFMRDWLGHVRGQTGKNLFAVAEYWKNDLGALENYLSKTNWTMSAFDVPLHYNLYQASNSSGNYDMRNLLNGTLVQRHPSHAVTFVDNHDTQPGEALESFVQGWFKPLAYATILTREQGYPQVFYGDYYGIPSDGVPSYRQQIDPLLKARQQYAYGRQHDYFDHWDVIGWTREGNASHPNSGLATIMSDGPGGSKWMYVGRQKAGEVWHDMTGNRSGTVTINQDGWGHFFVNGGSVSVWVKR

SEQ ID NO: 32693 - protein, 485 aa, Bacillus sp.
HHDGTNGTIMQYFEWNVPNDGQHWNRLHNNAQNLKNAGITAIWIPPAWKGTSQNDVGYGAYDLYDLGEFNQKGTVVTKYGTKAELERAIRSLKANGIQVYGDVVMNHKGGADFTERVQAVEVNPQNRNQEVSGTYQIEAWTGFNFPGRGNQHSSFKWRWYHFDGTDWDQSRQLANRIYKFRGDGKAWDWEVDTENGNYDYLMYADVDMDHPEVINELNRWGVWYANTLNLDGFRLDAVKHIKFSFMRDWLGHVRGQTGKNLFAVAEYWKNDLGALENYLSKTNWTMSAFDVPLHYNLYQASNSSGNYDMRNLLNGTLVQRHPSHAVTFVDNHDTQPGEALESFVQGWFKPLAYATILTREQGYPQVFYGDYYGIPSDGVPSYRQQIDPLLKARQQYAYGRQHDYFDHWDVIGWTREGNASHPNSGLATIMSDGPGGSKWMYVGRQKAGEVWHDMTGNRSGTVTINQDGWGHFFVNGGSVSVWVKR

SEQ ID NO: 32694 - protein, 485 aa, Bacillus sp.
HHDGTNGTIMQYFEWNVPNDGQHWNRLHNNAQNLKNAGITAIWIPPAWKGTSQNDVGYGAYDLYDLGEFNQKGTVRTKYGTKAELERAIRSLKANGIQVYGDVVMNHKGGADFTERVQAVEVNPQNRNQEVSGTYQIEAWTGFNFPGRGNQHSSFKWRWYHFDGTDWDQSRQLANRIYKFRGDGKAWDWEVDTENGNYDYLMYADVDMDHPEVINELNRWGVWYANTLNLDGFRLDAVKHIKFSFMRDWLGHVRGQTGKNLFAVAEYWKNDLGALENYLSKTNWTMSAFDVPLHYNLYQASNSSGNYDMRNLLNGTLVQRHPSHAVTFVDNHDTQPGEALESFVQGWFKPLAYATILTREQGYPQVFYGDYYGIPSDGVPSYRQQIDPLLKARQQYAYGRQHDYFDHWDVIGWTRLGNASHPNSGLATIMSDGPGGSKWMYVGRQKAGEVWHDMTGNRSGTVTINQDGWGHFFVNGGSVSVWVKR

SEQ ID NO: 32695 - protein, 483 aa, Synthetic construct
LNGTLMQYFEWYMPNDGQHWKRLQNDSAYLAEHGITAVWIPPAYKGTSQADVGYGAYDLYDLGEFHQKGTVRTKYGTKGELQSAIKSLHSRDINVYGDVVINHKAGADSTEWVDAVEVNPSNRNQETSGTYQIQAWTKFDFPGRGNTYSSFKWRWYHFDGTDWDESRKLNRIYKFRGTGKAWDWEVDTENGNYDYLMFADLDYDHPDVAAEIKRWGTWYANELQLDGFRLDAVKHIKFSFLRDWVNHVREKTGKEMFTVAEYWSYDLGALENYLNKTNFNHSVFDVPLHYQFHAASTQGGGYDMRKLLNGTVVSKHPLKSVTFVDNHDTQPGQSLESTVQTWFKPLAYAFILTRESGYPQVFYGDMYGTKGDSQREIPALKHKIEPILKARKQYAYGAQHDYFDHHDIVGWTREGDSSVANSGLAALITDGPGGAKRMYVGRQNAGETWHDITGNRSEPVVINSAGWGEFHVNGGSVSIYVQR

SEQ ID NO: 32696 - protein, 484 aa, Synthetic construct
LNGTLMQYFEWYMPNDGQHWKRLQNDSAYLAEHGITAVWIPPAYKGTSQADVGYGAYDLYDLGEFHQKGTVRTKYGTKGELQSAIKSLHSRDINVYGDVVINHKGGADATENVLAVEVNPNNRNQEISGDYTIEAWTKFDFPGRGNTYSDFKWRWYHFDGVDWDQSRQFQNRIYKFRGDGKAWDWEVDSENGNYDYLMYADVDYDHPDVAAEIKRWGTWYANELQLDGFRLDAVKHIKFSFLRDWVNHVREKTGKEMFTVAEYWSYDLGALENYLNKTNFNHSVFDVPLHYQFHAASTQGGGYDMRKLLNGTVVSKHPLKSVTFVDNHDTQPGQSLESTVQTWFKPLAYAFILTRESGYPQVFYGDMYGTKGDSQREIPALKHKIEPILKARKQYAYGAQHDYFDHHDIVGWTREGDSSVANSGLAALITDGPGGAKRMYVGRQNAGETWHDITGNRSEPVVINSAGWGEFHVNGGSVSIYVQR

SEQ ID NO: 32697 - protein, 483 aa, Synthetic construct
LNGTLMQYFEWYMPNDGQHWKRLQNDSAYLAEHGITAVWIPPAYKGTSQADVGYGAYDLYDLGEFHQKGTVRTKYGTKGELQSAIKSLHSRDINVYGDVVINHKAGADGTEFVDAVEVNPSNRNQETSGTYQIQAWTKFDFPGRGNTYSSFKWRWYHFDGTDWDESRKLNRIYKFRGTGKAWDWEVDTENGNYDYLMFADLDYDHPDVAAEIKRWGTWYANELQLDGFRLDAVKHIKFSFLRDWVNHVREKTGKEMFTVAEYWSYDLGALENYLNKTNFNHSVFDVPLHYQFHAASTQGGGYDMRKLLNGTVVSKHPLKSVTFVDNHDTQPGQSLESTVQTWFKPLAYAFILTRESGYPQVFYGDMYGTKGDSQREIPALKHKIEPILKARKQYAYGAQHDYFDHHDIVGWTREGDSSVANSGLAALITDGPGGAKRMYVGRQNAGETWHDITGNRSEPVVINSAGWGEFHVNGGSVSIYVQR

SEQ ID NO: 32698 - protein, 482 aa, Bacillus sp. (in: firmicutes)
HHDGTNGTIMQYFEWNVPNDGQHWNRLHNNAQNLKNAGITAIWIPPAWKGTSQNDVGYGAYDLYDLGEFNQKGTVRTKYGTKAELERAIRSLKANGIQVYGDVVMNHKGGADFTERVQAVEVNPQNRNQEVSGTYQIEAWTGFNFPGRGNQHSSFKWRWYHFDGTDWDQSRQLANRIYKFRGKAWDWEVDTENGNYDYLMYADVDMDHPEVINELNRWGVWYANTLNLDGFRLDAVKHIKFSFMRDWLGHVRGQTGKNLFAIGEFWKNDLGALENYLSKTNWTMSAFDPLHYNLYQASNSSGNYDMRNLLNGTLVQRHPSHAVTLVDNHDTQPGEALESFVQGWFKPLAYATILTREQGYPSVFYGDYYGIPSDGVPSYRQQIDPLLKARQQYAYGRQHDYFDHWDVIGWTREGNASHPNSGLATIMSDGPGGSKWMYVGRQKAGEVWHDMTGNRSGTVTINQDGWGHFFVNGGSVSVWVKR

SEQ ID NO: 32699 - protein, 482 aa, Bacillus sp. (in: firmicutes)
HHDGTNGTIMQYFEWNVPNDGQHWNRLHNNAQNLKNAGITAIWIPPAWKGTSQNDVGYGAYDLYDLGEFNQKGTVRTKYGTKAELERAIRSLKANGIQVYGDVVMNHKGGADFTERVQAVEVNPQNRNQVSGAYQIEAWTGFNFPGRGNQHSSFKWRWYHFDGTDWDQSRQLANRIYKFNGKAWDWEVDTEFGNYDYLMYADVDMDHPEVINELNRWGVWYANTLNLDGFRLDAVKHIKFSFMRDWLGHVRGQTGKNLFAVAEYWKNDLGALENYLSKTNWTMSAFDVPLHYNLYQASNSSGNYDMRNLLNGTLVQRHPSHAVTFVDNHDTQPGEALESFVQGWFKPLAYATILTREQGYPSVFYGDYYGIPSDGVPSYRQQIDPLLKARQQYAYGRQHDYFDHWDVIGWTREGNASHPNSGLATIMSDGPGGSKWMYVGRQKAGEVWHDMTGNRSGTVTINQDGWGHFFVNGGSVSVWVKR

SEQ ID NO: 32700 - protein, 482 aa, Bacillus sp. (in: firmicutes)
HHDGTNGTIMQYFEWYVPNDGQHWNRLHNNAQNLKNAGITAIWIPPAWKGTSQNDVGYGAYDLYDLGEFNQKGTVRTKYGTKAELERAIRSLKANGIQVYGDVVMNHKGGADFTERVQAVEVNPQNRNQEVSGTYQIEAWTGFNFPGRGNQHSSFKWRWHHFDGTDWDQSRQLANRIYKFRGKAWDWEVDTEFGNYDYLMYADVDMDHPEVINELNRWGVWYANTLNLDGFRLDAVKHIKFSFMRDWLGHVRGQTGKNLFAVAEYWKNDLGAENYLSKTNWTMSAFDVPLHYNLYQASNSGGNYDMRNLLNGTLVQRHPSHAVTFVDNHDTQPEEALESFVQGWFKPLAYATILTREQGYPSVFYGDYYGIPSDGVPSYRQQIDPLLKARQQYAYGRQHDYFDHWDVIGWTREGNASHPNSGLATIMSDGPGGSKWMYVGRQKAGEVWHDMTGNRSGTVTINQDGWGHFFVNGGSVSVWVKR

SEQ ID NO: 32701 - protein, 482 aa, Synthetic construct
HHNGTNGTMMQYFEWYLPNDGNHWNRLNSDASNLKSKGITAVWIPPAWKGASQNDVGYGAYDLYDLGEFNQKGTVRTKYGTRSQLQAAVTSLKNNGIQVYGDVVINHKAGADATEMVRAVEVNPNNRNQEVTGEHTIEAWTRFDFPGRGNTHSSFKWRWYHFDGVDWDESRRLNRIYKFRGKAWDWEVDTENGNYDYLMYADYDYDHPEVVNEIRNWGVWYTNTLGLDGFRLDAVKHIKYSFLRDWVNHVRSATGKNMFTVAEFWKNDLGAIENYLQKTNWNHSVFDVPLHYNLYNASKSGGNYDMRNIFNGTVVQRHPSHAVTFVDNHDSQPEEALESTVETWFKPLAYALTLTREQGYPSVFYGDYYGTPTHGIPALRSKIDPILEARQKYAYGPQHDYLDHPDIIGWTREGDSSHPNSGLATLITDGPGGAKRMYVGAKNAGETWHDITGNRSEPVVINSEGWGEFHVNDGSVSIYVQR

SEQ ID NO: 32702 - protein, 482 aa, Bacillus sp. (in: firmicutes)
HHDGTNGTIMQYFEWNVPNDGQHWNRLHNNAQNLKNAGITAIWIPPAWKGTSQNDVGYGAYDLYDLGEFNQKGTVRTKYGTKAELERAIRSLKANGIQVYGDVVMNHKGGADFTERVQAVEVNPQNRNQEVSGTYQIEAWTGFNFPGRGNQHSSFKWRWYHFDGTDWDQSRQLANRIYKFRGKAWDWEVDTENGNYDYLMYADVDMDHPEVINELNRWGVWYANTLNLDGFRLDAVKHIKFSFMRDWLGHVRGQTGKNLFAGEFWKNDLGALENYLSKTNWTMSAFDIPLHYNLYQASNSSGNYDMRNLLNGTLVQRHPSHAVTLVDNHDTQPGEALESFVQGWFKPLAYATILTREQGYPSVFYGDYYGIPSDGVPSYRQQIDPLLKARQQYAYGRQHDYFDHWDVIGWTREGNASHPNSGLATIMSDGPGGSKWMYVGRQKAGEVWHDMTGNRSGTVTINQDGWGHFFVNGGSVSVWVKR

SEQ ID NO: 32703 - protein, 482 aa, Bacillus sp. (in: firmicutes)
HHDGTNGTIMHYFEWNVPNDGQHWNRLHNNAQNLKNAGITAIWIPPAWKGTSQNDVGYGAYDLYDLGEFNQKGTVRTKYGTKAELERAIRSLKANGIQVYGDVVMNHKGGADFTERVQAVEVNPQNRNQEVSGTYQIEAWTGFNFPGRGNQHSSFKWRWYHFDGTDWDQSRQLANRIYKFRGKAWDWEVDTENGNYDYLMYADVDMDHPEVINELNRWGVWYANTLNLDGFRLDAVKHIKFSFMRDWLGHVRGQTGKNLFAGEFWKNDLGALENYLSKTNWTMSAFDVPLHYNLYQASNSSGNYDMRNLLNGTLVQRHPSHAVTFVDNHDTQPGEALESFVQGWFKPLAYATILTREQGYPCVFYGDYYGIPSDGVPSYRQQIDPLLKARQQYAYGRQHDYFDHWDVIGWTREGNASHPNSGLATIMSDGPGGSKWMYVGRQKAGEVWHDMTGNRSGTVTINQDGWGHFFVNGGSVSVWVKR

SEQ ID NO: 32704 - protein, 484 aa, Synthetic construct
HHDGTNGTIMQYFEWNVPNDGQHWNRLHNNAQNLKNAGITAIWIPPAWKGTSQNDVGYGAYDLYDLGEFNQKGTVRTKYGTKAELERAIRSLKANGIQVYGDVVMNHKAGADGTEFVDAVEVNPSNRNQETSGTYQIQAWTKFDFPGRGNTYSSFKWRWYHFDGTDWDESRKLNRIYKFRGTGKAWDWEVDTENGNYDYLMFADLDMDHPEVINELNRWGVWYANTLNLDGFRLDAVKHIKFSFMRDWLGHVRGQTGKNLFAVAEYWKNDLGALENYLSKTNWTMSAFDVPLHYNLYQASNSSGNYDMRNLLNGTLVQRHPSHAVTFVDNHDTQPGEALESFVQGWFKPLAYATILTREQGYPQVFYGDYYGIPSDGVPSYRQQIDPLLKARQQYAYGRQHDYFDHWDVIGWTREGNASHPNSGLATIMSDGPGGSKWMYVGRQKAGEVWHDMTGNRSGTVTINQDGWGHFFVNGGSVSVWVKR

SEQ ID NO: 32705 - protein, 484 aa, Synthetic construct
HHDGTNGTIMQYFEWNVPNDGQHWNRLHNNAQNLKNAGITAIWIPPAWKGTSQNDVGYGAYDLYDLGEFNQKGTVRTKYGTKAELERAIRSLKANGIQVYGDVVMNHKAGADSTEWVDAVEVNPSNRNQETSGTYQIQAWTKFDFPGRGNTYSSFKWRWYHFDGTDWDESRKLNRIYKFRGTGKAWDWEVDTENGNYDYLMFADLDMDHPEVINELNRWGVWYANTLNLDGFRLDAVKHIKFSFMRDWLGHVRGQTGKNLFAVAEYWKNDLGALENYLSKTNWTMSAFDVPLHYNLYQASNSSGNYDMRNLLNGTLVQRHPSHAVTFVDNHDTQPGEALESFVQGWFKPLAYATILTREQGYPQVFYGDYYGIPSDGVPSYRQQIDPLLKARQQYAYGRQHDYFDHWDVIGWTREGNASHPNSGLATIMSDGPGGSKWMYVGRQKAGEVWHDMTGNRSGTVTINQDGWGHFFVNGGSVSVWVKR

SEQ ID NO: 32706 - protein, 481 aa, Bacillus licheniformis
VNGTLMQYFEWYTPNDGQHWKRLQNDAEHLSDIGITAVWIPPAYKAISQADVGYGAYDLYDLGEFHQKGTVRTKYGTKGELQSAIKSLHSRDINVYGDVVINHKAGADATEDVTAVEVDPADRNRVISGEHLIKAWTHFHFPGRGSTYSDFKWYWYHFDGTDWDESRKLNRIYLFQGKTWDWEVSNEFGNYDYLMYADYDYDYPDVVAEITRWGTWYANELQLDGFRLDAVKHIKFSFLRDWVNHVREKTGKPMFTVAEYWSNDLGALENYLNKTNFNHSVFDVPLHYQFHAASTQGGGYDMRKLLNGTVVSKHPLLSVTFVDNHDTQPGQSLESTVQTWFKPLAYAFILTRESGYPSVFYGDMYGTKGDSQREIPALKHKIEPILKARKQYAYGAQHDYFDHHDIVGWTREGVSSVANSGLAALITDGPGGAKWMYVGRQNAGETWHDITGNRSEPVVINSEGWGEFHVNGGSVSIYVQR

SEQ ID NO: 32707 - protein, 481 aa, Bacillus amyloliquefaciens
VNGTLMQYFEWYTPNDGQHWKRLQNDAEHLSDIGITAVWIPPAYKAISQADVGYGAYDLYDLGEFHQKGTVRTKYGTKGELQSAIKSLHSRDINVYGDVVINHKAGADATEDVTAVEVDPADRNRVISGEHLIKAWTHFWFPGRGSTYSDFKWYWWHFDGTDWDESRKLNRIYLFQGKTWDWPVSNEFGNYDYLMYADYDYDYPDVVAEITRWGTWYANELQLDGFRLDAVKHIKFSFLRDWVNHVREKTGKEMFTVAEYWSNDLGALENYLNKTNFNHSVFDVPLHYQFHAASTQGGGYDMRKLLNGTVVSKHPLKSVTFVDNHDTQPGQSLESTVQTWFKPLAYAFILTRESGYPSVFYGDMYGTKGDSQREIPALKHKIEPILKARKQYAYGAQHDYFDHHDIVGWTREGVSSVANSGLAALITDGPGGAKWMYVGRQNAGETWHDITGNRSEPVVINSEGWGEFHVNGGSVSIYVQR

SEQ ID NO: 32708 - protein, 481 aa, Bacillus licheniformis
VNGTLMQYFEWYTPNDGQHWKRLQNDAEHLSDIGITAVWIPPAYKAISQADVGYGAYDLYDLGEFHQKGTVRTKYGTKGELQSAIKSLHSRDINVYGDVVINHKAGADATEDVTAVEVDPADRNRVISGEHLIRAWTHFHFPGRGSTYSDFKWYWYHFDGTDWDESRKLNRIYLFQGKTWDWEVSNEFGNYDYLMYADYDYDYPDVVAEITRWGTWYANELQLDGFRLDAVKHIKFSFLRDWVNHVREKTGKPMFTVAEYWSNDLGALENYLNKTNFNHSVFDVPLHYQFHAASTQGGGYDMRKLLNGTVVSKHPLKSVTFVDNHDTQPGQSLESTVQTWFKPLAYAFILTRESGYPSVFYGDMYGTKGDSQREIPALKHKIEPILKARKQYAYGAQHDYFDHHDIVGWTREGVSSVANSGLAALITDGPGGAKWMYVGRQNAGETWHDITGNRSEPVVINSEGWGEFHVNGGSVSIYVQR

SEQ ID NO: 32709 - protein, 481 aa, Bacillus licheniformis
VNGTLMQYFEWYTPNDGQHWKRLQNDAEHLSDIGITAVWIPPAYKAISQADVGYGAYDLYDLGEFHQKGTVRTKYGTKGELQSAIKSLHSRDINVYGDVVINHKAGADATEDVTAVEVDPADRNRVISGEHLIKAWTHFHFPGRGSTYSDFKWYWYHFDGTDWDESRKLNRIYLFQGKTWDWEVSNEFGNYDYLMYADYDYDYPDVVAEITRWGTWYANELQLDGFRLDAVKHIRFSFLRDWVNHVREKTGKPMFTVAEYWSNDLGALENYLNKTNFNHSVFDVPLHYQFHAASTQGGGYDMRKLLNGTVVSKHPLKSVTFVDNHDTQPGQSLESTVQTWFKPLAYAFILTRESGYPSVFYGDMYGTKGDSQREIPALKHKIEPILKARKQYAYGAQHDYFDHHDIVGWTREGVSSVANSGLAALITDGPGGAKWMYVGRQNAGETWHDITGNRSEPVVINSEGWGEFHVNGGSVSIYVQR

SEQ ID NO: 32710 - protein, 481 aa, Bacillus licheniformis
VNGTLMQYFEWYTPNDGQHWKRLQNDAEHLSDIGITAVWIPPAYKAISQADVGYGAYDLYDLGEFHQKGTVRTKYGTKGELQSAIKSLHSRDINVYGDVVINHKAGADATEDVTAVEVDPADRNRVISGEHLIKAWTHFHFPGRGSTYSDFKWYWYHFDGTDWDESRKLNRIYLFQGKTWDWEVSNEFGNYDYLMYADYDYDYPDVVAEITRWGTWYANELQLDGFRLDAVKHIKFSFLRDWVNHVREKTGKPMFTVAEYWSNDLGALENYLNKTNFNHSVFDVPLHYQFHAASTQGGGYDMRKLLNGTVVSKHPLQSVTFVDNHDTQPGQSLESTVQTWFKPLAYAFILTRESGYPSVFYGDMYGTKGDSQREIPALKHKIEPILKARKQYAYGAQHDYFDHHDIVGWTREGVSSVANSGLAALITDGPGGAKWMYVGRQNAGETWHDITGNRSEPVVINSEGWGEFHVNGGSVSIYVQR

SEQ ID NO: 32711 - protein, 481 aa, Bacillus licheniformis
VNGTLMQYFEWYTPNDGQHWKRLQNDAEHLSDIGITAVWIPPAYKAISQADVGYGAYDLYDLGEFWQKGTVRTKYGTKGELQSAIKSLHSRDINVYGDVVINHKAGADATEDVQAVEVDPADRNRVISGEHLIKAWTHFHFPGRGSTYSDFKWYWYHFDGTDWDESRKLNRIYLFQGKTWDWPVSNEFGNYDYLMYADYDYDYPDVVAEITRWGTWYANELQLDGFRLDAVKHIKFSFLRDWVNHVREKTGKEMFTVAEYWSNDLGALENYLNKTNFNHSVFDVPLHYQFHAASTQGGGYDMRKLLNGTVVSKHPLKSVTFVDNHDTQPGQSLESTVQTWFKPLAYAFILTRESGYPSVFYGDMYGTKGDSQREIPALKHKIEPILKARKQYAYGAQHDYFDHHDIVGWTREGVSSVANSGLAALITDGPGGAKWMYVGRQNAGETWHDITGNRSEPVVINSEGWGEFHVNGGSVSIYVQR

SEQ ID NO: 32712 - protein, 481 aa, Bacillus amyloliquefaciens
VNGTLMQYFEWYTPNDGQHWKRLQNDAEHLSDIGITAVWIPPAYKAISQADVGYGAYDLYDLGEFHQKGTVRTKYGTKGELQSAIKSLHSRDINVYGDVVINHKAGADATEDVTAVEVDPADRNRVISGEHLIKAWTHFHFPGRGSTYSDFKWWWWHFDGTDWDESRKLNRIYLFQGKTWDWPVSNEFGNYDYLMYADYDYDYPDVVAEITRWGTWYANELQLDGFRLDAVKHIKFSFLRDWVNHVREKTGKEMFTVAEYWSNDLGALENYLNKTNFNHSVFDVPLHYQFHAASTQGGGYDMRKLLNGTVVSKHPLKSVTFVDNHDTQPGQSLESTVQTWFKPLAYAFILTRESGYPSVFYGDMYGTKGDSQREIPALKHKIEPILKARKQYAYGAQHDYFDHHDIVGWTREGVSSVANSGLAALITDGPGGAKWMYVGRQNAGETWHDITGNRSEPVVINSEGWGEFHVNGGSVSIYVQR

SEQ ID NO: 32713 - protein, 481 aa, Bacillus licheniformis
VNGTLMQYFEWYTPNDGQHWKRLQNDAEHLSDIGITAVWIPPAYKAISQADVGYGAYDLYDLGEFHQKGTVRTKYGTKGELQSAIKSLHSRDINVYGDVVINHKAGADATEDVTAVEVDPADRNRVISGEHLIKAWTHFHFPGRGSTYSDFKWYWYHFDGTDWDESRKLNRIYLFQGKTWDWEVSNEFGNYDYLMYADYDYDYPDVVAEITRWGTWYANELQLDGFRLDAVTHIKFSFLRDWVNHVREKTGKPMFTVAEYWSNDLGALENYLNKTNFNHSVFDVPLHYQFHAASTQGGGYDMRKLLNGTVVSKHPLKSVTFVDNHDTQPGQSLESTVQTWFKPLAYAFILTRESGYPSVFYGDMYGTKGDSQREIPALKHKIEPILKARKQYAYGAQHDYFDHHDIVGWTREGVSSVANSGLAALITDGPGGAKWMYVGRQNAGETWHDITGNRSEPVVINSEGWGEFHVNGGSVSIYVQR

SEQ ID NO: 32714 - protein, 481 aa, Bacillus licheniformis
VNGTLMQYFEWYTPNDGQHWKRLQNDAEHLSDIGITAVWIPPAYKAISQADVGYGAYDLYDLGEFHQKGTVRTKYGTKGELQSAIKSLHSRDINVYGDVVINHKAGADATEDVTAVEVDPADRNRVISGEHLIKAWTHFHFPGRGSTYSDFAWYWYHFDGTDWDESRKLNRIYLFQGKTWDWEVSNEFGNYDYLMYADYDYDYPDVVAEITRWGTWYANELQLDGFRLDAVKHIKFSFLRDWVNHVREKTGKPMFTVAEYWSNDLGALENYLNKTNFNHSVFDVPLHYQFHAASTQGGGYDMRKLLNGTVVSKHPLKSVTFVDNHDTQPGQSLESTVQTWFKPLAYAFILTRESGYPSVFYGDMYGTKGDSQREIPALKHKIEPILKARKQYAYGAQHDYFDHHDIVGWTREGVSSVANSGLAALITDGPGGAKWMYVGRQNAGETWHDITGNRSEPVVINSEGWGEFHVNGGSVSIYVQR

SEQ ID NO: 32715 - protein, 481 aa, Bacillus licheniformis
VNGTLMQYFEWYTPNDGQHWKRLQNDAEHLSDIGITAVWIPPAYKAISQADVGYGAYDLYDLGEFHQKGTVRTKYGTKGELQSAIKSLHSRDINVYGDVVINHKAGADATEDVTAVEVDPADRNRVISGEHLIKAWTHFHFPGRGSTYSDFHWYWYHFDGTDWDESRKLNRIYLFQGKTWDWEVSNEFGNYDYLMYADYDYDYPDVVAEITRWGTWYANELQLDGFRLDAVKHIKFSFLRDWVNHVREKTGKPMFTVAEYWSNDLGALENYLNKTNFNHSVFDVPLHYQFHAASTQGGGYDMRKLLNGTVVSKHPLKSVTFVDNHDTQPGQSLESTVQTWFKPLAYAFILTRESGYPSVFYGDMYGTKGDSQREIPALKHKIEPILKARKQYAYGAQHDYFDHHDIVGWTREGVSSVANSGLAALITDGPGGAKWMYVGRQNAGETWHDITGNRSEPVVINSEGWGEFHVNGGSVSIYVQR

SEQ ID NO: 32716 - protein, 481 aa, Bacillus amyloliquefaciens
VNGTLMQYFEWYTPNDGQHWKRLQNDAEHLSDIGITAVWIPPAYKAISQADVGYGAYDLYDLGEFHQKGTVRTKYGTKGELQSAIKSLHSRDINVYGDVVINHKAGADATEDVTAVEVDPADRNRVISGEHLIKAWTHFHFPGRGSTYSDFKWYWWHFDGTDWDESRKLNRIYLFQGKTWDWPVSNEFGNYDYLMYADYDYDYPDVVAEITRWGTWYANELQLDGFRLDAVKHIKFSFLRDWVNHVREKTGKEMFTVAEYWSNDLGALENYLNKTNFNHSVFDVPLHYQFHAASTQGGGYDMRKLLNGTVVSKHPLKSVTFVDNHDTQPGQSLESTVQTWFKPLAYAFILTRESGYPSVFYGDMYGTKGDSQREIPALKHKIEPILKARKQYAYGAQHDYFDHHDIVGWTREGVSSVANSGLAALITDGPGGAKWMYVGRQNAGETWHDITGNRSEPVVINSEGWGEFHVNGGSVSIYVQR

SEQ ID NO: 32717 - protein, 481 aa, Bacillus licheniformis
VNGTLMQYFEWYTPNDGQHWKRLQNDAEHLSDIGITAVWIPPAYKAISQADVGYGAYDLYDLGEFHQKGTVRTKYGTKGELQSAIKSLHSRDINVYGDVVINHKAGADATEDVTAVEVDPADRNRVISGEHLIKAWTHFHFPGRGSTYSDFKWYWYHFDGTDWDESRKLNRIYLFQGKTWDWEVSNEFGNYDYLMYADYDYDYPDVVAEITRWGTWYANELQLDGFRLDAVKHIKFSFLRDWVNHVREKTGKPMFTVAEYWSNDLGALENYLNKTNFNHSVFDVPLHYQFHAASTQGGGYDMRKLLNGTVVSKHPLKSVTFVDNHDTQPGQSLESTVQTWFKPLAYAFILTRESGYPSVFYGDMYGTKGDSQREIPALKHKIEPILKARVQYAYGAQHDYFDHHDIVGWTREGVSSVANSGLAALITDGPGGAKWMYVGRQNAGETWHDITGNRSEPVVINSEGWGEFHVNGGSVSIYVQR

SEQ ID NO: 32718 - protein, 481 aa, Bacillus licheniformis
VNGTLMQYFEWYTPNDGQHWKRLQNDAEHLSDIGITAVWIPPAYKAISQADVGYGAYDLYDLGEFHQKGTVRTKYGTKGELQSAIKSLHSRDINVYGDVVINHKAGADATEDVTAVEVDPADRNRVISGEHLIKAWTHFHFPGRGSTYSDFKWYWYHFDGTDWDESRKLNRIYLFQGKTWDWEVSNEFGNYDYLMYADYDYDYPDVVAEITRWGTWYANELQLDGFRLDAVKHIKFSFLRDWVNHVREKTGKPMFTVAEYWSNDLGALENYLNKTNFNHSVFDVPLHYQFHAASTQGGGYDMRKLLNGTVVSKHPLKSVTFVDNHDTQPGQSLESTVQTWFKPLAYAFILTRESGYPSVFYGDMYGTKGDSQREIPALKHKIEPILKARVDYAYGAQHDYFDHHDIVGWTREGVSSVANSGLAALITDGPGGAKWMYVGRQNAGETWHDITGNRSEPVVINSEGWGEFHVNGGSVSIYVQR

SEQ ID NO: 32719 - protein, 481 aa, Bacillus licheniformis
VNGTLMQYFEWYTPNDGQHWKRLQNDAEHLSDIGITAVWIPPAYKAISQADVGYGAYDLYDLGEFHQKGTVRTKYGTKGELQSAIKSLHSRDINVYGDVVINHKAGADATEDVTAVEVDPADRNRVISGEHLIKAWTHFHFPGRGSTYSDFSWYWYHFDGTDWDESRKLNRIYLFQGKTWDWEVSNEFGNYDYLMYADYDYDYPDVVAEITRWGTWYANELQLDGFRLDAVKHIKFSFLRDWVNHVREKTGKPMFTVAEYWSNDLGALENYLNKTNFNHSVFDVPLHYQFHAASTQGGGYDMRKLLNGTVVSKHPLKSVTFVDNHDTQPGQSLESTVQTWFKPLAYAFILTRESGYPSVFYGDMYGTKGDSQREIPALKHKIEPILKARKQYAYGAQHDYFDHHDIVGWTREGVSSVANSGLAALITDGPGGAKWMYVGRQNAGETWHDITGNRSEPVVINSEGWGEFHVNGGSVSIYVQR

SEQ ID NO: 32720 - protein, 481 aa, Bacillus licheniformis
VNGTLMQYFEWYTPNDGQHWKRLQNDAEHLSDIGITAVWIPPAYKAISQADVGYGAYDLYDLGEFHQKGTVRTKYGTKGELQSAIKSLHSRDINVYGDVVINHKAGADATEDVTAVEVDPADRNRVISGEHLIKAWTHFHFPGRGSTYSDFKWYWYHFDGTDWDESRSLNRIYLFQGKTWDWEVSNEFGNYDYLMYADYDYDYPDVVAEITRWGTWYANELQLDGFRLDAVKHIKFSFLRDWVNHVREKTGKPMFTVAEYWSNDLGALENYLNKTNFNHSVFDVPLHYQFHAASTQGGGYDMRKLLNGTVVSKHPLKSVTFVDNHDTQPGQSLESTVQTWFKPLAYAFILTRESGYPSVFYGDMYGTKGDSQREIPALKHKIEPILKARKQYAYGAQHDYFDHHDIVGWTREGVSSVANSGLAALITDGPGGAKWMYVGRQNAGETWHDITGNRSEPVVINSEGWGEFHVNGGSVSIYVQR

SEQ ID NO: 32721 - protein, 481 aa, Bacillus licheniformis
VNGTLMQYFEWYTPNDGQHWKRLQNDAEHLSDIGITAVWIPPAYKAISQADVGYGAYDLYDLGEFHQKGTVRTKYGTKGELQSAIKSLHSRDINVYGDVVINHKAGADATEDVTAVEVDPADRNRVISGEHLIKAWTHFHFPGRGSTYSDFKWYWYHFDGTDWDESRRLNRIYLFQGKTWDWEVSNEFGNYDYLMYADYDYDYPDVVAEITRWGTWYANELQLDGFRLDAVKHIKFSFLRDWVNHVREKTGKPMFTVAEYWSNDLGALENYLNKTNFNHSVFDVPLHYQFHAASTQGGGYDMRKLLNGTVVSKHPLKSVTFVDNHDTQPGQSLESTVQTWFKPLAYAFILTRESGYPSVFYGDMYGTKGDSQREIPALKHKIEPILKARKQYAYGAQHDYFDHHDIVGWTREGVSSVANSGLAALITDGPGGAKWMYVGRQNAGETWHDITGNRSEPVVINSEGWGEFHVNGGSVSIYVQR

SEQ ID NO: 32722 - protein, 481 aa, Bacillus licheniformis
LNGTLMQYFEWYMPNDGQHWRRLQNDSAYLAEHGITAVWIPPAYKGTSQADVGYGAYDLYDLGEFHQKGTVRTKYGTKGELQSAIKSLHSRDINVYGDVVINHKGGADATEDVTAVEVDPADRNRVISGEHLIKAWTHFHFPGRGSTYSDFKWHWYHFDGTDWDESRKLNRIYKFQGKAWDWPVSNENGNYDYLMYADYDYDHPDVAAEIKRWGTWYANELQLDGFRLDAVKHIKFSFLRDWVNHVREKTGKEMFTVAEYWQNDLGALENYLNFTNFNHSVFDVPLHYQFHAASTQGGGYDMRKLLNGTVVSKHPLKSVTFVDNHDTQPGQSLESTVQTWFKPLAYAFILTRESGYPQVFYGDMYGTKGDSQREIPALKHKIEPILKARKQYAYGAQHDYFDHHDIVGWTREGDSSVANSGLAALITDGPGGAKRMYVGRQNAGETWHDITGNRSEPVVINSEGWGEFHVNGGSVSIYVQR

SEQ ID NO: 32723 - protein, 481 aa, Bacillus licheniformis
LNGTLMQYFEWYMPNDGQHWRRLQNDSAYLAEHGITAVWIPPAYKGTSQADVGYGAYDLYDLGEFHQKGTVRTKYGTKGELQSAIKSLHSRDINVYGDVVINHKGGADATEDVTAVEVDPADRNRVISGEHLIKAWTHFHFPGRGSTYSDFKWHWYHFDGTDWDESRKLNRIYKFQGKAWDWPVSNENGNYDYLMYADYDYDHPDVAAEIKRWGTWYANELQLDGFRLDAVKHIKFYFLRDWVNHVREKTGKEMFTVAEYWQNDLGALENYLNKTNFNHSVFDVPLHYQFHAASTQGGGYDMRKLLNGTVVSKHPLKSVTFVDNHDTQPGQSLESTVQTWFKPLAYAFILTRESGYPQVFYGDMYGTKGDSQREIPALKHKIEPILKARKQYAYGAQHDYFDHHDIVGWTREGDSSVANSGLAALITDGPGGAKRMYVGRQNAGETWHDITGNRSEPVVINSEGWGEFHVNGGSVSIYVQR

SEQ ID NO: 32724 - protein, 481 aa, Bacillus licheniformis
LNGTLMQYFEWYMPNDGQHWRRLQNDSAYLAEHGITAVWIPPAYKGTSQADVGYGAYNLYDLGEFHQKGTVRTKYGTKGELQSAIKSLHSRDINVYGDVVINHKGGADATEDVTAVEVDPADRNRVISGEHLIKAWTHFHFPGRGSTYSDFKWHWYHFDGTDWDESRKLNRIYKFQGKAWDWEVSNENGNYDYLMYADIDYDHPVVAAEIKRWGTWYANELQLDGFRLDAVKHIKFSFLRDWVNHVREKTGKEMFTVAEYWQNDLGALENYLNKTNFNHSVFDVPLHYQFHAASTQGGGYDMRKLLNGTVVSKHPMKSVTFVDNHDTQPGQSLESTVQTWFKPLAYAFILTRESGYPQVFYGDMYGTKGDSQREIPALKHKIEPILKARKQYAYGAQHDYFDHHDIVGWTREGDSSVANSGLAALITDGPGGAKRMYVGRQNAGETWHDITGNRSEPVVINSEGWGEFHVNGGSVSIYVQR

SEQ ID NO: 32725 - protein, 481 aa, Bacillus pumilus
LNGTLMQYFEWHMPNDGQHWKRLQNDSAYLAEHGITAVWIPPAYKGTSQADVGYGAYDLYDLGEFHQKGTVRTKYGTKGELQSAIKSLHSRDINVYGDVVINHKGGADATEDVTAVEVDPADRNRVISGERRIKAWTHFHFPGRGSTYSDFKWHWYHFDGTDWDESRKLNRIYKFQGKAWDWEVSXENGNYDYLMYADIDYDHPDVAAEIKRWGTWYANELQLDGFRLDAVKHIKFSFLRDWVNHVREKTGKEMFTVAEYWPNDLGALENYLNKTNFNHSVFDVPLHYQFHAASTQGGGYDMRKLLNSTVVSKHPLKAVTFVDNHDTQPGQSLESTVQTWFKPLAYAFILTRESGYPQVFYGDMYGTKGDSQREIPALKHKIEPILKARKQYAHGAQHDYFDHHDIVGWTREGDSSVANSGLAALITDGPGGAKRMYVGRQNAGETWHDITGNRSEPVVINSEGWGEFHVNGGSVSIYVQR

SEQ ID NO: 32726 - protein, 481 aa, Bacillus licheniformis
LNGTLMQYFEWYMPNDGQHWRRLQNDSAYLAEHGITAVWIPPAYKGTSQADVGYGAYDLYDLGEFHQKGTVRTKYGTKGELQSAIKSLHSRDINVYGDVVINHKGGADATEDVTAVEVDPADRNRVISGEHLIKAWTHFHFPGRGSTYSDFKWHWYHFDGTDWDESRKLNRIYKFQGKAWDWPVSNENGNYDYLMYADYDYDHPDVAAEIKRWGTWYANELQLDGFRLDAVKHIKFSFLRDWVNHVREKTGKEMFTVAEYWQNDLGALENYLNLTNFNHSVFDVPLHYQFHAASTQGGGYDMRKLLNGTVVSKHPLKSVTFVDNHDTQPGQSLESTVQTWFKPLAYAFILTRESGYPQVFYGDMYGTKGDSQREIPALKHKIEPILKARKQYAYGAQHDYFDHHDIVGWTREGDSSVANSGLAALITDGPGGAKRMYVGRQNAGETWHDITGNRSEPVVINSEGWGEFHVNGGSVSIYVQR

SEQ ID NO: 32727 - protein, 481 aa, unidentified
LNGTLMQYFEWYMPNDGQHWKRLQNDSAYLAEHGITAVWIPPAYKGTSQDDVGYGAYDLYDLGEFHQKGTVRTKYGTKGELQSAINSLHSRDINVYGDVVINHKGGADATEDVTAVEVDPADRNRVTSGEQRIKAWTHFQFPGRGSTYSDFKWHWYHFDGTDWDESRKLNRIYKFQGKAWDWEVSNVNGNYDYLMYADIDYDHPDATAEIKRWGTWYANELQLDGFRLDAVKHIKFSFLRDWVNHVREKTGKEMFTVAEYWQNDLGALENYLNKTNFNHSVFDVPLHYQFHAASTQGGGYDMRKLLNGTVVSKHPVKAVTFVDNHDTQPGQSLESTVQTWFKPLAYAFILTREAGYPQIFYGDMYGTKGASQREIPALKHKIEPILKARIQYAYGAQHDYFDHHDIVGWTREGDSSVANSGLAALITDGPGGTKRMYVGRQNAGETWHDITGNRSDSVVINAEGWGEFHVNGGSVSIYVQR

SEQ ID NO: 32728 - protein, 481 aa, Bacillus licheniformis
LNGTLMQYFEWYMPNDGQHWRRLQNDSAYLAEHGITAVWIPPAYKGTSQADVGYGAYDLYDLGEFHQKGTVRTKYGTKGELQSAIKSLHSRDINVYGDVVINHKGGADATEDVTAVEVDPADRNRVISGEHLIKAWTHFHFPGRGSTYSDFKWHWYHFDGTDWDESRKLNRIYKFQGKAWDWEVSNENGNYDYLMYADIDYDHPEVAAEIKRWGTWYANELQLDGFRLDAVKHIKFSFLRDWVNHVRGKTGKEMFTVAEYWQNDLGALENYLNKTNFNHSVFDVPLHYQFHAASTQGGGYDMRKLLNGTVVSKHPLKSVTFVDNHDTQPGQSLESTVQTWFKPLAYAFILTRESGYPQVFYGDMYGTKGDSQREIPALKHKIEPILKARKQYAYGAQHDYFDHLDIVGWTREGDSSVANSGLAAIITDGPGGAKRMYVGRQNAGETWHDITGNRSEPVVINSEGWGEFHVNGGSVSIYVQR

SEQ ID NO: 32729 - protein, 481 aa, Bacillus licheniformis
LNGTLMQYFEWYMPNDGQHWRRLQNDSAYLAEHGITAVWIPPAYKGTSQADVGYGAYDLYDLGEFHQKGTVRTKYGTKGELQSAIKSLHSRDINVYGDVVINHKGGADATEDVTAVEVDPADRNRVISGEHLIKAWTHFHFPGRGSTYSDFKWHWYHFDGTDWDESRKLNRIYLFQGKAWDWPVSNENGNYDYLMYADIDYDHPDVAAEIKRWGTWYANELQLDGFRLDAVKHIKFSFLRDWVNHVREKTGKEMFTVAEYWQNDLGALENYLNKTNFNHSVFDVPLHYQFHAASTQGGGYDMRKLLNGTVVSKHPLKSVTFVDNHDTQPGQSLESTVQTWFKPLAYAFILTRESGYPQVFYGDMYGTKGDSQREIPALKHKIEPILKARKQYAYGAQHDYFDHHDIVGWTREGDSSVANSGLAALITDGPGGAKRMYVGRQNAGETWHDITGNRSEPVVINSEGWGEFHVNGGSVSIYVQR

SEQ ID NO: 32730 - protein, 481 aa, Bacillus amyloliquefaciens
LNGTLMQYFEWYMPNDGQHWRRLQNDSAYLAEHGITAVWIPPAYKGTSQADVGYGAYDLYDLGEFHQKGTVRTKYGTKGELQSAIKSLHSRDINVYGDVVINHKGGADATEDVTAVEVDPADRNRVISGEHLIKAWTHFHFPGRGSTYSDFKWHWYHFDGTDWDESRKLNRIYKFQGKAWDWEVSNENGNYDYLMYADIDYDHPDVAAEIKRWGTWYANELQLDGFRLDAVKHIKFSFLRDWVNHVREKTGKEMFTVAEYWQNDLGALENYLNKTNFNHSVFDVPLHYQFHAASTQGGGYDMRKLLNGTVVSKHPLKSVTFVDNHDTQPGQSLESTVQTWFKPLAYAFILTRESGYPQVFYGDMYGTKGDSQREIPALKHKIEPILKARKQYAYGAQHDYFDHHDIVGWTREGDSSVANSGLAALITDGPGGAKWMYVGRQNAGETWHDITGNRSEPVVINSEGWGNFHVNGGSVSIYVQR

SEQ ID NO: 32731 - protein, 481 aa, Bacillus licheniformis
LNGTLMQYFEWYMPNDGQHWKRLQNDSAYLAEHGITAVWIPPAYKGTSQADVGYGAYDLYDLGEFHQKGTVRTKYGTKGELQSAIKSLHSRDINVYGDVVINHKGGADATEDVTAVEVDPADRNRVISGEHLIKAWTHFHFPGRGSTYSDFKWHWYHFDGTAGDESRKLNRIYKFQGKAWDWEVSNENGNYDYLMYADIDYDHPDVAAEIKRWGTWYANELQLDGFRLDAVKHIKFSFLRDWVNHVREKTGKEMFTVAEYWQNDLGALENYLNKTNFNHSLFDVPLHYQFHAASTQGGGYDMRKLLNGTVVSKHPLKSVTFVDNHDTQPGQSLESTVQTWFKPLAYAFILTRESGYPQVFYGDMYGTKGDSQREIPALKHKIEPILKARKQYAYGAQHDYFDHHDIVGWTREGDSSVANSGLAALITDGPGGAKRMYVGRQNAGETWHDITGNRSEPVVINSEGWGEFHVNGGSVSIYVQR

SEQ ID NO: 32732 - protein, 481 aa, Bacillus sp. SCSIO 15121
LNGTLMQYFEWYMPNDGQHWKRLQNDSAYLAEHGITAVWIPPAYKGTSQDDVGYGAYDLYDLGEFHQKGTVRTKYGTKGELQSAINSLHSRDINVYGDVVINHKGGADATEDVTAVEVDPADRNRVTSGEQRIKAWTHFQFPGRGSTYSDFKWHWYHFDGTDWDESRKLNRIYLFQGKAWDWEVSNENGNYDYLMYADIDYDHPDVTAEIKRWGTWYANELQLDGFRLDAVKHIKFSFLRDWVNHVREKTGKEMFTVAEYWQNDLGALENYLNKTNFNHSVFDVPLHYQFHAASTQGGGYDMRKLLNGTVVSKHPVKAVTFVDNHDTQPGQSLESTVQTWFKPLAYAFILTREAGYPQIFYGDMYGTKGASQREIPALKHKIEPILKARKQYAYGAQHDYFDHHNIVGWTREGDSSVANSGLAALITDGPSGTKRMYVGRQNAGETWHDITGNRSDSVVINAEGWGEFHVNGGSVSIYVQR

SEQ ID NO: 32733 - protein, 481 aa, Bacillus licheniformis
LNGTLMQYFEWYMPNDGQHWRRLQNDSAYLAEHGITAVWIPPAYKGTSQADVGYGAYDLYDLGEFHQKGTVRTKYGTKGELQSAIKSLHSRDINVYGDVVINHKGGADATEDVTAVEVDPADRNRVISGEHLIKAWTHFHFPGRGSTYSDFKWHWYHFDGTDWDESRKLNRIYKFQGKAWDWPVSNENGNYDYLMYADIDYDHPDVAAEIKRWGTWYANELQLDGFRLDAVKHIKFSFLRDWVNHVREKTGKEMFTVAEYWQNDLGALENYLNLTNFNHSVFDVPLHYQFHAASTQGGGYDMRKLLNGTVVSKHPLKSVTFVDNHDTQPGQSLESTVQTWFKPLAYAFILTRESGYPQVFYGDMYGTKGDSQREIPALKHKIEPILKARKQYAYGAQHDYFDHHDIVGWTREGDSSVANSGLAALITDGPGGAKRMYVGRQNAGETWHDITGNRSEPVVINSEGWGEFHVNGGSVSIYVQR

SEQ ID NO: 32734 - protein, 481 aa, Bacillus licheniformis
LNGTLMQYFEWYMPNDGQHWRRLQNDSAYLAEHGITAVWIPPAYKGTSQADVGYGAYDLYDLGEFHQKGTVRTKYGTKGELQSAIKSLHSRDINVYGDVVINHKGGADATEDVTAVEVDPADRNRVISGEHLIKAWTHFHFPGRGSTYSDFKWHWYHFDGTDWDESRKLNRIYRFQGKAWDWEVSNENGNYDYLMYADFDYDNPDVAAEIKRWGTWYANELQLDGFRLDAVKHIKFSFLRDWVNHVREKTGKEMFTVAEYWQNDLGALENYLNKTNFNHSVFDVPLHYQFHAASTQGGGYDMRKLLNGTVVSKHPLKSVTFVDNHDTQPGQSLESTVQTWFKPLAYAFILTRESGYPQVFYGDMYGTKGDSQREIPALKHKIEPILKARKQYAYGAQHDYFDHHDIVGWTREGDSSVANSGLAALITDGPGGAKRMYVGRQNAGETWHDITGNRSEPVVINSEGWGEFHVNGGSVSIYVQR

SEQ ID NO: 32735 - protein, 481 aa, Bacillus licheniformis
LNGTLMQYFEWYMPNDGQHWRRLQNDSAYLAEHGITAVWIPPAYKGLTQADVGYGAYDLYDLGEFHQKGTVRTKYGTKGELQSAIKSLHSRDINVYGDVVINHKGGADATEDVTAVEVDPADRNRVISGEHLIKAWTHFHFPGRGSTYSDFKWHWYHFDGTDWDESRKLNRIYLFQGKAWDWPVSNENGNYDYLMYADIDYDHPDVAAEIKRWGTWYANELQLDGFRLDAVKHIKFSFLRDWVNHVREKTGKEMFTVAEYWQNDLGALENYLNKTNFNHSVFDVPLHYQFHAASTQGGGYDMRKLLNGTVVSKHPLKSVTFVDNHDTQPGQSLESTVQTWFKPLAYAFILTRESGYPQVFYGDMYGTKGDSQREIPALKHKIEPILKARKQYAYGAQHDYFDHHDIVGWTREGDSSVANSGLAALITDGPGGAKRMYVGRQNAGETWHDITGNRSEPVVINSEGWGEFHVNGGSVSIYVQR

SEQ ID NO: 32736 - protein, 481 aa, Bacillus licheniformis
LNGTLMQYFEWYMPNDGQHWRRLQNDSAYLAEHGITAVWIPPAYKGTSQADVGYGAYDLYDLGEFHQKGTVRTKYGTKGELQSAIKSLHSRDINVYGDVVINHKGGADATEDVTAVEVDPADRNRVISGEHLIKAWTHFHFPGRGSTYSDFKWHWYHFDGTDWDESRKLNRIYKFQGKAWDWPVSNENGNYDYLMYADYDYDHPDVAAEIKRWGTWYANELQLDGFRLDAVKHIKFSFLRDWVNHVREKTGKEMFTVAEYWQNDLGALENYLNYTNFNHSVFDVPLHYQFHAASTQGGGYDMRKLLNGTVVSKHPLKSVTFVDNHDTQPGQSLESTVQTWFKPLAYAFILTRESGYPQVFYGDMYGTKGDSQREIPALKHKIEPILKARKQYAYGAQHDYFDHHDIVGWTREGDSSVANSGLAALITDGPGGAKRMYVGRQNAGETWHDITGNRSEPVVINSEGWGEFHVNGGSVSIYVQR

SEQ ID NO: 32737 - protein, 481 aa, Bacillus licheniformis
LNGTLMQYFEWYMPNDGQHWRRLQNDSAYLAEHGITAVWIPPAYKGTSQADVGYGAYDLYDLGEFHQKGTVRTKYGTKGELQSAIKSLHSRDINVYGDVVINHKGGADATEDVTAVEVDPADRNRVISGAHLIKAWTHFHFPGRGSTYSDFKWHWYHFDGTDWDESRKLNRIYKFQGKAWDWEVSNENGNYDYLMYADIDYDHPVVAAEIKRWGTWYANELQLDGFRLDAVKHIKFSFLRDWVNHVREKTGKEMFTVAEYWQNDLGALENYLNKTNFNHSVFDVPLHYQFHAASTQGGGYDMRKLLNGTVVSKHPLKSVTFVDNHDTQPGQSLESTVQTWFKPLAYAFILTRESGYPQVFYGDMYGTKGDSQREIPALKHKIEPILKARKQYAYGAQHDYFDHHDIVGWTREGDSSVANSGLAALITDGPGGAKRMYVGRQNAGETWHDITGNRSEPVVINSEGWGEFHVNGGSVSIYVQR

SEQ ID NO: 32738 - protein, 481 aa, Bacillus licheniformis
LNGTLMQYFEWYMPNDGQHWRRLQNDSAYLAEHGITAVWIPPAYKGTSQADVGYGAYDLYDLGEFHQKGTVRTKYGTKGELQSAIKSLHSRDINVYGDVVINHKGGADATEDVTAVEVDPADRNRVISGEHLIKAWTHFHFPGRGSTYSDFKWHWYHFDGTDWDESRKLNRIYKFQGKAWDWPVSNENGNYDYLMYADIDYDHPDVAAEIKRWGTWYANELQLDGFRLDAVKHIKFQFLRDWVNHVREKTGKEMFTVAEYWQNDLGALENYLNKTNFNHSVFDVPLHYQFHAASTQGGGYDMRKLLNGTVVSKHPLKSVTFVDNHDTQPGQSLESTVQTWFKPLAYAFILTRESGYPQVFYGDMYGTKGDSQREIPALKHKIEPILKARKQYAYGAQHDYFDHHDIVGWTREGDSSVANSGLAALITDGPGGAKRMYVGRQNAGETWHDITGNRSEPVVINSEGWGEFHVNGGSVSIYVQR

SEQ ID NO: 32739 - protein, 481 aa, unidentified
VNGTLMQYFEWYTPNDGQHWKRLQNDAEHLSDIGITAVWIPPAYKAISQADVGYGAYDLYDLGEWHQKGTVRTKYGTKGELQSAIKSLHSRDINVYGDVVINHKAGADATEDVTAVEVDPADRNRVISGEHLIKAWTHFHFPGRGSTYSDFKWYWYHFDGTDWDESRKLNRIYLFQGKTWDWPVSNEFGNYDYLMYADYDYDYPDVVAEITRWGTWYANELQLDGFRLDAVKHIKFSFLRDWVNHVREKTGKEMFTVAEYWSNDLGALENYLNKTNFNHSVFDVPLHYQFHAASTQGGGYDMRKLLNGTVVSKHPLKSVTFVDNHDTQPGQSLESTVQTWFKPLAYAFILTRESGYPSVFYGDMYGTKGDSQREIPALKHKIEPILKARKQYAYGAQHDYFDHHDIVGWTREGVSSVANSGLAALITDGPGGAKWMYVGRQNAGETWHDITGNRSEPVVINSEGWGEFHVNGGSVSIYVQR

SEQ ID NO: 32740 - protein, 481 aa, Bacillus licheniformis
LNGTLMQYFEWYMPNDGQHWRRLQNDSAYLAEHGITAVWIPPAYKGTSQADVGYGAYDLYDLGEFHQKGTVRTKYGTKGELQSAIKSLHSRDINVYGDVVINHKGGADATEDVTAVEVDPADRNRVISGEHLIKAWTHFHFPGRGSTYSDFKWHWYHFDGTDWDESRKLNRIYKFQGKAWDWPVSNENGNYDYLMYADYDYDHPDVAAEIKRWGTWYANELQLDGFRLDAVKHIKFSFLRDWVNHVREKTGKEMFTVAEYWQNDLGALENYLNWTNFNHSVFDVPLHYQFHAASTQGGGYDMRKLLNGTVVSKHPLKSVTFVDNHDTQPGQSLESTVQTWFKPLAYAFILTRESGYPQVFYGDMYGTKGDSQREIPALKHKIEPILKARKQYAYGAQHDYFDHHDIVGWTREGDSSVANSGLAALITDGPGGAKRMYVGRQNAGETWHDITGNRSEPVVINSEGWGEFHVNGGSVSIYVQR

SEQ ID NO: 32741 - protein, 481 aa, Bacillus licheniformis
LNGTLMQYFEWYMPNDGQHWRRLQNDSAYLAEHGITAVWIPPAYKGGSQADVGYGAYDLYDLGEFHQKGTVRTKYGTKGELQSAIKSLHSRDINVYGDVVINHKGGADATEDVTAVEVDPADRNRVISGEHLIKAWTHFHFPGRGSTYSDFKWHWYHFDGTDWDESRKLNRIYLFQGKAWDWPVSNENGNYDYLMYADIDYDHPDVAAEIKRWGTWYANELQLDGFRLDAVKHIKFSFLRDWVNHVREKTGKEMFTVAEYWQNDLGALENYLNKTNFNHSVFDVPLHYQFHAASTQGGGYDMRKLLNGTVVSKHPLKSVTFVDNHDTQPGQSLESTVQTWFKPLAYAFILTRESGYPQVFYGDMYGTKGDSQREIPALKHKIEPILKARKQYAYGAQHDYFDHHDIVGWTREGDSSVANSGLAALITDGPGGAKRMYVGRQNAGETWHDITGNRSEPVVINSEGWGEFHVNGGSVSIYVQR

SEQ ID NO: 32742 - protein, 481 aa, Bacillus licheniformis
LNGTLMQYFEWYMPNDGQHWRRLQNDSAYLAEHGITAVWIPPAYKGTSQADVGYGAYDLYDLGEFHQKGTVRTKYGTKGELQSAIKSLHSRDINVYGDVVINHKGGADATEDVTAVEVDPADRNRVISGEHLIKAWTHFHFPGRGSTYSDFKWHWYHFDGTDWDESRKLNRIYLFQGKAWDWPVSNENGNYDYLMYADIDYDHPDVAAEIKRWGTWYANELQLDGFRLDAVKHIKFSFLRDWVNHVREKTGKEMFTVAEYWQNDLGALENYLNKTNFNHSVFDVPLHYQFHAASTQGGGYDMRKLLNGTVVSKHPLKSVTFVDNHDTQPGQSLESTVQTWFKPLAYAFILTRESGYPQVFYGDMYGTKGDSQVEIPALKHKIEPILKARKQYAYGAQHDYFDHHDIVGWTREGDSSVANSGLAALITDGPGGAKRMYVGRQNAGETWHDITGNRSEPVVINSEGWGEFHVNGGSVSIYVQR

SEQ ID NO: 32743 - protein, 481 aa, Bacillus licheniformis
LNGTLMQYFEWYMPNDGQHWRRLQNDSAYLAEHGITAVWIPPAYKGTSQADVGYGAYDLYDLGEFHQKGTVRTKYGTKGELQSAIKSLHSRDINVYGDVVINHKGGADATEDVTAVEVDPADRNRVISGEHLIKAWTHFHFPGRGSTYSDFKWHWYHFDGTDWDESRKLNRIYKFQGKAWDWPVSNENGNYDYLMYADYDYDHPDVAAEIKRWGTWYANELQLDGFRLDAVKHIKFSFLRDWVNHVREKTGKEMFTVAEYWQNDLGALENYLNITNFNHSVFDVPLHYQFHAASTQGGGYDMRKLLNGTVVSKHPLKSVTFVDNHDTQPGQSLESTVQTWFKPLAYAFILTRESGYPQVFYGDMYGTKGDSQREIPALKHKIEPILKARKQYAYGAQHDYFDHHDIVGWTREGDSSVANSGLAALITDGPGGAKRMYVGRQNAGETWHDITGNRSEPVVINSEGWGEFHVNGGSVSIYVQR

SEQ ID NO: 32744 - protein, 481 aa, Bacillus licheniformis
LNGTLMQYFEWYMPNDGQHWRRLQNDSAYLAEHGITAVWIPPAYKGTSQADVGYGAYDLYDLGEFHQKGTVRTKYGTKGELQSAIKSLHSRDINVYGDVVINHKGGADATEDVTAVEVDPADRNRVISGEHLIKAWTHFHFPGRGSTYSDFKWHWYHFDGTDWDESRKLNRIYKFQGKAWDWPVSNENGNYDYLMYADYDYDHPDVAAEIKRWGTWYANELQLDGFRLDAVKHIKFSFLRDWVNHVREKTGKEMFTVAEYWQNDLGALENYLNHTNFNHSVFDVPLHYQFHAASTQGGGYDMRKLLNGTVVSKHPLKSVTFVDNHDTQPGQSLESTVQTWFKPLAYAFILTRESGYPQVFYGDMYGTKGDSQREIPALKHKIEPILKARKQYAYGAQHDYFDHHDIVGWTREGDSSVANSGLAALITDGPGGAKRMYVGRQNAGETWHDITGNRSEPVVINSEGWGEFHVNGGSVSIYVQR

SEQ ID NO: 32745 - protein, 481 aa, Bacillus licheniformis
LNGTLMQYFEWYMPNDGQHWKRLQNDSAYLAEHGITAVWIPPAYKGTSQDDVGYGAYDLYDLGEFHQKGTVRTKYGTKGELQSAINSLHSRDINVYGDVVINHKGGADATEDVTAVEVDPADRNRVTSGEQRIKAWTHFQFPGRGSTYSDFKWYWYHFDGTDWDESRKLNRIYKFQGKAWDWEVSNENGNYDYLMYADIDYDHPDVTAEIKRWGTWYANELQLDGFRLDAVKHIKFSFLRDWVNHVREKTGKEMFTVAEYWQNDLGALENYLNKTNFNHSVFDVPLHYQFHAASTQGGGYDMRKLLNGTVVSKHPVKAVTFVDNHDTQPGQSLESTVQTWFKPLAYAFILTREAGYPQIFYGDMYGTKGASQREIPAMKHKIEPILKARKQYAYGAQHDYFDHHNIVGWTREGDSSVANSGLAALITDGPGGTKRMYVGRQNAGETWDDITGNRSDSVVINAEGWGEFHVNGGSVSIYVQR

SEQ ID NO: 32746 - protein, 481 aa, Bacillus sp.
LNGTLMQYFEWYMPNDGQHWRRLQNDSAYLAEHGITAVWIPPAYKGTSQADVGYGAYDLYDLGEFHQKGTVRTKYGTKGELQSAIKSLHSRDINVYGDVVINHKGGADATEDVTAVEVDPADRNRVISGEHLIKAWTHFHFPGRGSTYSDFKWHWYHFDGTDWDESRKLNRIYKFQGKAWDWEVSNEFGNYDYLMYADIDYDHPDVAAEIKRWGTWYANELQLDGFRLDAVKHIKFSFLRDWVNHVREKTGKEMFTVAEYWSNDLGALENYLNKTNFNHSVFDVPLHYQFHAASTQGGGYDMRKLLNGTVVSKHPLKSVTFVDNHDTQPGQSLESTVQTWFKPLAYAFILTRESGYPQVFYGDMYGTKGDSQREIPALKHKIEPILKARKQYAYGAQHDYFDHHDIVGWTREGDSSVANSGLAALITDGPGGAKRMYVGRQNAGETWHDITGNRSEPVVINSEGWGEFHVNGGSVSIYVQR

SEQ ID NO: 32747 - protein, 481 aa, Bacillus licheniformis
LNGTLMQYFEWYMPNDGQHWRRLQNDSAYLAEHGITAVWIPPAYKGTSQADVGYGAYDLYDLGEFHQKGTVRTKYGTKGELQSAIKSLHSRDINVYGDVVINHKGGADATEDVTAVEVDPADRNRVISGEHLIKAWTHFHFPGRGSTYSDFKWHWYHFDGTDWDESRKLNRIYKFQGKAWDWPVSNENGNYDYLMYADIDYDHPDVAAEIKRWGTWYANELQLDGFRLDAVKHIKFSFLRDWVNHVREKTGKEMFTVAEYWQNDLGALENYLNYTNFNHSVFDVPLHYQFHAASTQGGGYDMRKLLNGTVVSKHPLKSVTFVDNHDTQPGQSLESTVQTWFKPLAYAFILTRESGYPQVFYGDMYGTKGDSQREIPALKHKIEPILKARKQYAYGAQHDYFDHHDIVGWTREGDSSVANSGLAALITDGPGGAKRMYVGRQNAGETWHDITGNRSEPVVINSEGWGEFHVNGGSVSIYVQR

SEQ ID NO: 32748 - protein, 481 aa, Bacillus sp. SCSIO 15121
LNGTLMQYFEWYMPNDGQHWKRLQNDSAYLAEHGITAVWIPPAYKGTSQDDVGYGAYDLYDLGEFHQKGTVRTKYGTKGELQSAINSLHSRDINVYGDVVINHKGGADATEDVTAVEVDPADRNRVTSGEQRIKAWTHFQFPGRGSTYSDFKWHWEHFDGTDWDESRKLNRIYKFQGKAWDWEVSNENGNYDYLMYADIDYDHPDVTAEIKRWGTWYANELQLDGFRLDAVKHIKFSFLRDWVNHVREKTGKEMFTVAEYWQNDLGALENYLNKTNFNHSVFDVPLHYQFHAASTQGGGYDMRKLLNGTVVSKHPVKAVTFVDNHDTQPGQSLESTVQTWFKPLAYAFILTREAGYPQIFYGDMYGTKGASQREIPALKHKIEPILKARKQYAYGAQHDYFDHHNIVGWTREGDSSVANSGLAALITDGPSGTKRMYVGRQNAGETWHDITGNRSDSVVINAEGWGEFHVNGGSVSIYVQR

SEQ ID NO: 32749 - protein, 481 aa, Bacillus licheniformis
LNGTLMQYFEWYMPNDGQHWRRLQNDSAYLAEHGITAVWIPPAYKGTSQADVGYGAYDLYDLGEFHQKGTVRTKYGTKGELQSAIKSLHSRDINVYGDVVINHKGGADATEDVTAVEVDPADRNRVISGEHLIKAWTHFHFPGRGSTYSDFKWHWYHFDGTDWDESRKLNRIYKFQGKAWDWPVSNENGNYDYLMYADIDYDHPDVAAEIKRWGTWYANELQLDGFRLDAVKHIKFFFLRDWVNHVREKTGKEMFTVAEYWQNDLGALENYLNKTNFNHSVFDVPLHYQFHAASTQGGGYDMRKLLNGTVVSKHPLKSVTFVDNHDTQPGQSLESTVQTWFKPLAYAFILTRESGYPQVFYGDMYGTKGDSQREIPALKHKIEPILKARKQYAYGAQHDYFDHHDIVGWTREGDSSVANSGLAALITDGPGGAKRMYVGRQNAGETWHDITGNRSEPVVINSEGWGEFHVNGGSVSIYVQR

SEQ ID NO: 32750 - protein, 481 aa, Bacillus licheniformis
LNGTLMQYFEWYMPNDGQHWRRLQNDSAYLAEHGITAVWIPPAYKGTSQADVGYGAYDLYDLGEFHQKGTVRTKYGTKGELQSAIKSLHSRDINVYGDVVINHKGGADATEDVTAVEVDPADRNRVISGEHLIKAWTHFHFPGRGSTYSDFKWHWYHFDGTDWDESRKLNRIYKFQGKAWDWPVSNENGNYDYLMYADIDYDHPDVAAEIKRWGTWYANELQLDGFRLDAVKHIKFWFLRDWVNHVREKTGKEMFTVAEYWQNDLGALENYLNKTNFNHSVFDVPLHYQFHAASTQGGGYDMRKLLNGTVVSKHPLKSVTFVDNHDTQPGQSLESTVQTWFKPLAYAFILTRESGYPQVFYGDMYGTKGDSQREIPALKHKIEPILKARKQYAYGAQHDYFDHHDIVGWTREGDSSVANSGLAALITDGPGGAKRMYVGRQNAGETWHDITGNRSEPVVINSEGWGEFHVNGGSVSIYVQR

SEQ ID NO: 32751 - protein, 481 aa, Bacillus licheniformis
LNGTLMQYFEWYMPNDGQHWRRLQNDSAYLAEHGITAVWIPPAYKGTSQADVGYGAYDLYDLGEFHQKGTVRTKYGTKGELQSAIKSLHSRDINVYGDVVINHKGGADATEDVTAVEVDPADRNRVISGEHLIKAWTHFHFPGRGSTYSDFKWHWYHFDGTDWDESRKLNRIYKFQGKAWDWPVSNENGNYDYLMYADIDYDHPDVAAEIKRWGTWYANELQLDGFRLDAVKHIKFSFLRDWVNHVREKTGKEMFTVAEYWQNDLGALENYLNHTNFNHSVFDVPLHYQFHAASTQGGGYDMRKLLNGTVVSKHPLKSVTFVDNHDTQPGQSLESTVQTWFKPLAYAFILTRESGYPQVFYGDMYGTKGDSQREIPALKHKIEPILKARKQYAYGAQHDYFDHHDIVGWTREGDSSVANSGLAALITDGPGGAKRMYVGRQNAGETWHDITGNRSEPVVINSEGWGEFHVNGGSVSIYVQR

SEQ ID NO: 32752 - protein, 481 aa, Bacillus licheniformis
LNGTLMQYFEWYMPNDGQHWRRLQNDSAYLAEHGITAVWIPPAYKGTSQADVGYGAYDLYDLGEFHQKGTVRTKYGTKGELQSAIKSLHSRDINVYGDVVINHKGGADATEDVTAVEVDPADRNRVISGEHLIKAWTHFHFPGRGSTYSDFKWHWYHFDGTDWDESRKLNRIYLFQGKAWDWPVSNENGNYDYLMYADIDYDHPDVAAEIKRWGTWYANELQLDGFRLDAVKHIKFSFLRDWVNHVREKTGKEMFTVAEYWQNDLGALENYLNKTNFNHSVFDVPLHYQFHAASTQGGGYDMRKLLNGTVVSKHPLKSVTFVDNHDTQPGQSLESTVQTWFKPLAYAFILTRESGYPQVFYGDMYGTKGDSQGEIPALKHKIEPILKARKQYAYGAQHDYFDHHDIVGWTREGDSSVANSGLAALITDGPGGAKRMYVGRQNAGETWHDITGNRSEPVVINSEGWGEFHVNGGSVSIYVQR

SEQ ID NO: 32753 - protein, 481 aa, Bacillus licheniformis
LNGTLMQYFEWYMPNDGQHWRRLQNDSAYLAEHGITAVWIPPAYKGTSQADVGYGAYDLYDLGEFHQKGTVRTKYGTKGELQSAIKSLHSRDINVYGDVVINHKGGADATEDVTAVEVDPADRNRVISGEHLIKAWTHFHFPGRGSTYSDFKWHWYHFDGTDWDESRKLNRIYKFQGKAWDWPVSNENGNYDYLMYADIDYDHPDVAAEIKRWGTWYANELQLDGFRLDAVKHIKFSFLRDWVNHVREKTGKEMFTVAEYWQNDLGALENYLNITNFNHSVFDVPLHYQFHAASTQGGGYDMRKLLNGTVVSKHPLKSVTFVDNHDTQPGQSLESTVQTWFKPLAYAFILTRESGYPQVFYGDMYGTKGDSQREIPALKHKIEPILKARKQYAYGAQHDYFDHHDIVGWTREGDSSVANSGLAALITDGPGGAKRMYVGRQNAGETWHDITGNRSEPVVINSEGWGEFHVNGGSVSIYVQR

SEQ ID NO: 32754 - protein, 481 aa, Bacillus licheniformis
LNGTLMQYFEWYMPNDGQHWRRLQNDSAYLAEHGITAVWIPPAYKGTSQADVGYGAYDLYDLGEFHQKGTVRTKYGTKGELQSAIKSLHSRDINVYGDVVINHKGGADATEDVTAVEVDPADRNRVISGEHLIKAWTHFHFPGRGSTYSDFKWHWYHFDGTDWDESRKLNRIYKFQGKAWDWEVSNENGNYDYLMYADIDYDHPDVAAEIKRWGTWYANELQLDGFRLDAVKHIPFWFLRDWVNHVREKTGKEMFTVAEYWQNDLGALENYLNKTNFNHSVFDVPLHYQFHAASTQGGGYDMRKLLNGTVVSKHPLKSVTFVDNHDTQPGQSLESTVQTWFKPLAYAFILTRESGYPQVFYGDMYGTKGDSQREIPALKHKIEPILKARKQYAYGAQHDYFDHHDIVGWTREGDSSVANSGLAALITDGPGGAKRMYVGRQNAGETWHDITGNRSEPVVINSEGWGEFHVNGGSVSIYVQR

SEQ ID NO: 32755 - protein, 481 aa, Bacillus licheniformis
LNGTLMQYFEWYMPNDGQHWRRLQNDSAYLAEHGITAVWIPPAYKGTSQADVGYGAYDLYDLGEFHQKGTVRTKYGTKGELQSAIKSLHSRDINVYGDVVINHKGGADATEDVDAVEVDPADRNRVISGEHLIKAWTHFHFPGRGSTYSDFKWHWYHFDGTDWDESRKLNRIYKFQGKAWDWEVSNENGNYDYDMYADIDYDHPDVAAEIKRWGTWYANELQLDGFRLDAVKHIKFSFLRDWVNHVREKTGKEMFTVAEYWQNDLGALENYLNKTNFNHSVFDVPLHYQFHAASTQGGGYDMRKLLNGTVVSKHPLKSVTFVDNHDTQPGQSLESTVQTWFKPLAYAFILTRESGYPQVFYGDMYGTKGDSQREIPALKHKIEPILKARKQYAYGAQHDYFDHHDIVGWTREGDSSVANSGLAALITDGPGGAKRMYVGRQNAGETWHDITGNRSEPVVINSEGWGEFHVNGGSVSIYVQR

SEQ ID NO: 32756 - protein, 481 aa, Bacillus licheniformis
LNGTLMQYFEWYMPNDGQHWRRLQNDSAYLAEHGITAVWIPPAYKGTSQADVGYGAYDLYDLGEFHQKGTVRTKYGTKGELQSAIKSLHSRDINVYGDVVINHKGGADATEDVTAVEVDPADRNRVISGEHLIKAWTHFHFPGRGSTYSDFKWHWYHFDGTDWDESRKLNRIYKFQGKAWDWPVSNENGNYDYLMYADIDYDHPDVAAEIKRWGTWYANELQLDGFRLDAVKHIKFHFLRDWVNHVREKTGKEMFTVAEYWQNDLGALENYLNKTNFNHSVFDVPLHYQFHAASTQGGGYDMRKLLNGTVVSKHPLKSVTFVDNHDTQPGQSLESTVQTWFKPLAYAFILTRESGYPQVFYGDMYGTKGDSQREIPALKHKIEPILKARKQYAYGAQHDYFDHHDIVGWTREGDSSVANSGLAALITDGPGGAKRMYVGRQNAGETWHDITGNRSEPVVINSEGWGEFHVNGGSVSIYVQR

SEQ ID NO: 32757 - protein, 481 aa, Bacillus licheniformis
LNGTLMQYFEWYMPNDGQHWRRLQNDSAYLAEHGITAVWIPPAYKGHSQADVGYGAYDLYDLGEFHQKGTVRTKYGTKGELQSAIKSLHSRDINVYGDVVINHKGGADATEDVTAVEVDPADRNRVISGEHLIKAWTHFHFPGRGSTYSDFKWHWYHFDGTDWDESRKLNRIYLFQGKAWDWPVSNENGNYDYLMYADIDYDHPDVAAEIKRWGTWYANELQLDGFRLDAVKHIKFSFLRDWVNHVREKTGKEMFTVAEYWQNDLGALENYLNKTNFNHSVFDVPLHYQFHAASTQGGGYDMRKLLNGTVVSKHPLKSVTFVDNHDTQPGQSLESTVQTWFKPLAYAFILTRESGYPQVFYGDMYGTKGDSQREIPALKHKIEPILKARKQYAYGAQHDYFDHHDIVGWTREGDSSVANSGLAALITDGPGGAKRMYVGRQNAGETWHDITGNRSEPVVINSEGWGEFHVNGGSVSIYVQR

SEQ ID NO: 32758 - protein, 481 aa, Bacillus licheniformis
LNGTLMQYFEWYMPNDGQHWRRLQNDSAYLAEHGITAVWIPPAYKGTSQADVGYGAYDLYDLGEFHQKGTVRTKYGTKGELQSAIKSLHSRDINVYGDVVINHKGGADATEDVTAVEVDPADRNRVISGEHLIKAWTHFHFPGRGSTYSDFKWHWYHFDGTDWDESRKLNRIYKFQGKAWDWPVSNENGNYDYLMYADIDYDHPDVAAEIKRWGTWYANELQLDGFRLDAVKHIKFSFLRDWVNHVREKTGKEMFTVAEYWQNDLGALENYLNFTNFNHSVFDVPLHYQFHAASTQGGGYDMRKLLNGTVVSKHPLKSVTFVDNHDTQPGQSLESTVQTWFKPLAYAFILTRESGYPQVFYGDMYGTKGDSQREIPALKHKIEPILKARKQYAYGAQHDYFDHHDIVGWTREGDSSVANSGLAALITDGPGGAKRMYVGRQNAGETWHDITGNRSEPVVINSEGWGEFHVNGGSVSIYVQR

SEQ ID NO: 32759 - protein, 481 aa, Bacillus licheniformis
LNGTLMQYFEWYMPNDGQHWRRLQNDSAYLAEHGITAVWIPPAYKGTSQADVGYGAYDLYDLGEFHQKGTVRTKYGTKGELQSAIKSLHSRDINVYGDVVINHKGGADATEDVTAVEVDPADRNRVISGEHLIKAWTHFHFPGRGSTYSDFKWHWYHFDGTDWDESRKLNRIYKFQGKAWDWEVSNENGNYDYLMYADIDYDHPDVAAEIKRWGTWYANELQLDGFRLDAVKHIKFSFLRDWVNHVREKTGKEMFTVAEYWQNDLGALENYLNKTNFNHSVFDVPLHYQFHAASTQGGGYDMRKLLNGTVVSKHPLKSVTFVDNHDTQPGQSLESTVQTWFKPLAYAFILTRESGYPQVFYGDMYGTKGDSQREIPALKHKIEPILKARKQYAYGAQHDYFDHHDIVGWTREGDSSVANSGLAALITDGPGGAKRMYVGRQNAGQTWHDITGNRSEPVVINSEGWGEFHVNGGSVSIYVKR

SEQ ID NO: 32760 - protein, 481 aa, Bacillus licheniformis
LNGTLMQYFEWYMPNDGQHWRRLQNDSAYLAEHGITAVWIPPAYKGTSQADVGYGAYDLYDLGEFHQKGTVRTKYGTKGELQSAIKSLHSRDINVYGDVVINHKGGADATEDVTAVEVDPADRNRVISGEHLIKAWTHFHFPGRGSTYSDFKWHWYHFDGTDWDESRKLNRIYKFQGKAWDWPVSNENGNYDYLMYADYDYDHPDVAAEIKRWGTWYANELQLDGFRLDAVKHIKFQFLRDWVNHVREKTGKEMFTVAEYWQNDLGALENYLNKTNFNHSVFDVPLHYQFHAASTQGGGYDMRKLLNGTVVSKHPLKSVTFVDNHDTQPGQSLESTVQTWFKPLAYAFILTRESGYPQVFYGDMYGTKGDSQREIPALKHKIEPILKARKQYAYGAQHDYFDHHDIVGWTREGDSSVANSGLAALITDGPGGAKRMYVGRQNAGETWHDITGNRSEPVVINSEGWGEFHVNGGSVSIYVQR

SEQ ID NO: 32761 - protein, 481 aa, Bacillus licheniformis
LNGTLMQYFEWYMPNDGQHWRRLQNDSAYLAEHGITAVWIPPAYKGTSQADVGYGAYDLYDLGEFHQKGTVRTKYGTKGELQSAIKSLHSRDINVYGDVVINHKGGADATEDVTAVEVDPADRNRVISGEHLIKAWTHFHFPGRGSTYSDFKWHWYHFDGTDWDESRKLNRIYKFQGKAWDWPVSNENGNYDYLMYADIDYDHPDVAAEIKRWGTWYANELQLDGFRLDAVKHIKFSFLRDWVNHVREKTGKEMFTVAEYWQNDLGALENYLNWTNFNHSVFDVPLHYQFHAASTQGGGYDMRKLLNGTVVSKHPLKSVTFVDNHDTQPGQSLESTVQTWFKPLAYAFILTRESGYPQVFYGDMYGTKGDSQREIPALKHKIEPILKARKQYAYGAQHDYFDHHDIVGWTREGDSSVANSGLAALITDGPGGAKRMYVGRQNAGETWHDITGNRSEPVVINSEGWGEFHVNGGSVSIYVQR

SEQ ID NO: 32762 - protein, 481 aa, Bacillus licheniformis
LNGTLMQYFEWYMPNDGQHWRRLQNDSAYLAEHGITAVWIPPAYKGTSQADVGYGAYDLYDLGEFHQKGTVRTKYGTKGELQSAIKSLHSRDINVYGDVVINHKGGADATEDVTAVEVDPADRNRVISGEHLIKAWTHFHFPGRGSTYSDFKWHWYHFDGTDWDESRKLNRIYKFQGKAWDWPVSNENGNYDYLMYADYDYDHPDVAAEIKRWGTWYANELQLDGFRLDAVKHIKFFFLRDWVNHVREKTGKEMFTVAEYWQNDLGALENYLNKTNFNHSVFDVPLHYQFHAASTQGGGYDMRKLLNGTVVSKHPLKSVTFVDNHDTQPGQSLESTVQTWFKPLAYAFILTRESGYPQVFYGDMYGTKGDSQREIPALKHKIEPILKARKQYAYGAQHDYFDHHDIVGWTREGDSSVANSGLAALITDGPGGAKRMYVGRQNAGETWHDITGNRSEPVVINSEGWGEFHVNGGSVSIYVQR

SEQ ID NO: 32763 - protein, 481 aa, Bacillus licheniformis
LNGTLMQYFEWYMPNDGQHWRRLQNDSAYLAEHGITAVWIPPAYKGTSQADVGYGAYDLYDLGEFHQKGTVRTKYGTKGELQSAIKSLHSRDINVYGDVVINHKGGADATEDVTAVEVDPADRNRVISGEHLIKAWTHFHFPGRGSTYSDFKWHWYHFDGTDWDESRKLNRIYKFQGKAWDWEVSNENGNYDYLMYADIDYDHPDVAAEIKRWGTWYANELQLDGFRLDAVKHIKFSFLRDWVNHVREKTGKEMFTVAEYWQNDLGALENYLNKTNFNHSVFDVPLHYQFHAASTQGGGYDMRKLLNGTVVSKHPLKSVTFVDNHDTQPGQSLESTVQTWFKPLAYAFILTRESGYPQVFYGDMYGTKGDSQREIPALKHKIEPILKARKQYAYGAQHDYFDHHDIVGWTREGDSSVANSGLAALITDGPGGAKRMYVGRQNAGKTWHDITGNRSEPVVINSEGWGEFHVNGGSVSIYVKR

SEQ ID NO: 32764 - protein, 481 aa, Bacillus licheniformis
LNGTLMQYFEWYMPNDGQHWRRLQNDSAYLAEHGITAVWIPPAYKGTSQADVGYGAYDLYDLGEFHQKGTVRTKYGTKGELQSAIKSLHSRDINVYGDVVINHKGGADATEDVTAVEVDPADRNRVISGEHLIKAWTHFHFPGRGSTYSDFKWHWYHFDGTDWDESRKLNRIYKFQGKAWDWPVSNENGNYDYLMYADIDYDHPDVAAEIKRWGTWYANELQLDGFRLDAVKHIKFYFLRDWVNHVREKTGKEMFTVAEYWQNDLGALENYLNKTNFNHSVFDVPLHYQFHAASTQGGGYDMRKLLNGTVVSKHPLKSVTFVDNHDTQPGQSLESTVQTWFKPLAYAFILTRESGYPQVFYGDMYGTKGDSQREIPALKHKIEPILKARKQYAYGAQHDYFDHHDIVGWTREGDSSVANSGLAALITDGPGGAKRMYVGRQNAGETWHDITGNRSEPVVINSEGWGEFHVNGGSVSIYVQR

SEQ ID NO: 32765 - protein, 480 aa, unidentified
NGTMMQYFEWYVPNDGQQWNRLRTDAPYLSSVGITAVWTPPAYKGTSQADVGYGPYDLYDLGEFNQKGTVRTKYGTKGELKSAVNTLHSNGIQVYGDVVMNHKAGADYTENVTAVEVNPSNRNQETSGEYNIQAWTGFNFPGRGTTYSNFKWQWFHFDGTDWDQSRSLSRIFKFTGKAWDWEVSSENGNYDYLMYADIDYDHPDVVNEMKKWGVWYANEVGLDGYRLDAVKHIKFSFLKDWVDNARAATGKEMFTVGEYWQNDLGALNNYLAKVNYNQSLFDAPLHYNFYAASTGGGYYDMRNILNNTLVASNPTKAVTLVENHDTQPGQSLESTVQPWFKPLAYAFILTRSGGYPSVFYGDMYGTKGTTTREIPALKSKIEPLLKARKDYAYGPQHDYIDHPDVIGWTREGDSSAAKSGLAALITDGPGGSKRMYAGLKNAGETWYDITGNRSDTVKIGSDGWGEFHVNDGSVSIYVQK

SEQ ID NO: 32766 - protein, 478 aa, Bacillus licheniformis
LNGTLMQYFEWYMPNDGQHWRRLQNDSAYLAEHGITAVWIPPAYKGTSQADVGYGAYDLYDLGEFHQKGTVRTKYGTKGELQSAIKSLHSRDINVYGDWINHKGGADATEDVTAVEVDPADRNRVISGEHLIKAWTHFHFPGRGSTYSDFKWHWYHFDGTDWDESRKLNRIYKFQGKAWDWEVSNENGNYDYLMYADIDYDHPDVAAEIKRWGTWYANELQLDGFRLDAVKHIKFSFLRDWVNHVREKTGKEMFTVAEYWQNDLGALENYLNKTNFNHSVFDVPLHYQFHAASTQGGGYDMRKLLNGTWSKHPLKSVTFVDNHDTQPGQSLESTVQTWFKPLAYAFILTRESGYPQVFYGDMYGTKGDSQREIPALKHKIEPILKARKQYAYGAQHDYFDHHDIVGWTREGDSSVANSGLAALITDGPGGAKRMYVGRQNAGETWHDITGNRSEPWINSEGWGEFHVNGGSVSIYVQR

SEQ ID NO: 32767 - protein, 483 aa, Bacillus sp. (in: firmicutes)
HHDGTNGTIMQYFEWNVPNDGQHWNRLHNNAQNLKNAGITAIWIPPAWKGTSQNDVGYGAYDLYDLGEFNQKGTVRTKYGTKAELERAIRSLKANGIQVYGDVVMNHKGGADFTERVQAVEVNPQNRNQEVSGTYQIEAWTGFNFPGRGNQHSSFKWRWYHFDGTDWDQSRQLANRIYKFRGKDWDWEVDTEFGNYDYLMYADVDMDHPEVINELNRWGVWYANTLNLDGFRLDAVKHIKFSFMRDWLGHVRGQTGKNLFAVAEYWKNDLGALENYLSKTNWTMSAFDVPLHYNLYQASNSSGNYDMRNLLNGTLVQRHPSHAVTFVDNHDTQPGEALESFVQGWFKPLAYATILTREQGYPQVFYGDYYGIPSDGVPSYRQQIDPLLKARQQYAYGRQHDYFDHWDVIGWTREGNASHPNSGLATIMSDGPGGSKWMYVGRQKAGEVWHDMTGNRSGTVTINQDGWGHFFVNGGSVSVWVKR

SEQ ID NO: 32768 - protein, 485 aa, Bacillus sp.
HHDGTNGTIMQYFEWNVPNDGQHWNRLHNNAQNLKNAGITAIWIPPAWKGTSQNDVGYGAYDLYDLGEFNQKGTVRTKYGTKAELERAIRSLKANGIQVYGDVVMNHKGGADFTERVQAVEVNPQNRNQEVSGTYQIEAWTGFNFPGRGNQHSSFKWRWYHFDGTDWDQSRQLANRIYKFRGDGKAWDWEVDTENGNYDYLPLADVDMDHPEVINELNRWGVWYANTLNLDGFRLDAVKHIKFSFMRDWLGHVRGQTGKNLFAVAEYWKNDLGALENYLSKTNWTMSAFDVPLHYNLYQASNSSGNYDMRNLLNGTLVQRHPSHAVTFVDNHDTQPGEALESFVQGWFKPLAYATILTREQGYPQVFYGDYYGIPSDGVPSYRQQIDPLLKARQQYAYGRQHDYFDHWDVIGWTREGNASHPNSGLATIMSDGPGGSKWMYVGRQKAGEVWHDMTGNRSGTVTINQDGWGHFFVNGGSVSVWVKR

SEQ ID NO: 32769 - protein, 483 aa, Bacillus sp.
HHDGTNGTIMQYFEWNVPNDGQHWNRLHNNAQNLKNAGITAIWIPPAWKGTSQNDVGYGAYDLYDLGEFNQKGTVRTKYGTKAELERAIRSLKANGIQVYGDVVMNHKGGADFTERVQAVEVNPQNRNQEVSGTYEIEAWTGFNFPGRGNQHSSFKWRWYHFDGTDWDQSRQLSNRIYKFXGKAWDWEVDTENGNYDYLMYADVDMNHPEVINELNRWGVWYANTLNLDGFRLDAVKHIQFSFMRNWLGHVRGQTGKNLFAVAEYWKNDLGALENYLSKTNWTMSAFDVPLHYNLYQASNSGGNYDMRNLLNGTLVQRHPSHAVTFVDNHDTQPGEALESFVQGWFKPLAYATILTREQGYPQVFYGDYYGIPSDGVPSYRQQIDPLLKARQQYAYGRQHDYFDHWDVIGWTREGNASHPNSGLATIMSDGPGGSKWMYVGRQKAGEVWHDITGNRSGTVTINQDGWGQFFVNGGSVSVWVKR

SEQ ID NO: 32770 - protein, 483 aa, Bacillus sp. (in: firmicutes)
HHDGTNGTIMQYFEWNVPNDGQHWNRLHNNAQNLKNAGITAIWIPPAWKGTSQNDVGYGAYDLYDLGEFNQKGTVRTKYGTKAELERAIRSLKANGIQVYGDVVMNHKGGADFTERVQAVEVNPQNRNQEVSGTYQIEAWTGFNFPGRGNQHSSFKWRWYHFDGTDWDQSRQLANRIYKFRGKAWDWEVDTENGNYDYLMYADVDMDHPEVINELNRWGVWYANTLNLDGFRLDAVKHIKFSFMRDWLGHVRGQTGKNLFAAAEFWKNDLGALENYLSKTNWTMSAFDTPLHYNLYQASNSSGNYDMRNLLNGTLVQRHPSHAVTLVDNHDTQPGEALESFVQGWFKPLAYATILTREQGYPCVFYGDYYGIPSDGVPSYRQQIDPLLKARQQYAYGRQHDYFDHWDVIGWTREGNASHPNSGLATIMSDGPGGSKWMYVGRQKAGEVWHDMTGNRSGTVTINQDGWGHFFVNGGSVSVWVKR

SEQ ID NO: 32771 - protein, 483 aa, Bacillus sp. (in: firmicutes)
HHDGTNGTIMQYFEWNVPNDGQHWNRLHNNAQNLKNAGITAIWIPPAWKGTSQNDVGYGAYDLYDLGEFNQKGTVRTKYGTKAELERAIRSLKANGIQVYGDVVMNHKGGADFTEKVQAVEVNPQNRNQEVLGTYRIEAWTGFNFPGRGNQHSSFKWRWYHFDGTDWDQSRQLANRIYKFCGKAWDWEVDTEFGNYDYLMYADVDMDHPEVINELNRWGVWYANTLNLDGFRLDAVKHIKFSFMRDWLGHVRGQTGKNLFAVAEYWKNDLGALENYLSKTNWTMSAFDVPLHYNLYQASNSSGNYDMRNLLNGTLVQRHPSHAVTFVDNHDTQPGEALESFVQGWFKPLAYATILTREQGYPSVFYGDYYGIPSDGVPSYRQQIDPLLKARQQYAYGRQHDYFDHWDVIGWTREGNASHPNSGLATIMSDGPGGSKWMYVGRQKAGEVWHDMTGNRSGTVTINQDGWGHFFVNGGSVSVWVKR

SEQ ID NO: 32772 - protein, 485 aa, Bacillus sp.
HHDGTNGTIMQYFEWNVPNDGQHWNRLHNNAQNLKNAGITAIWIPPAWKGTSQNDVGYGAYDLYDLGEFNQKGTVRTKYGTKAELERAIRSLKANGIQVYGDVVMNHKGGADFTERVQAVEVNPQNRNQEVSGTYQIEAWTGFNFPGRGNQHSSFKWRWYHFDGTDWDQSRQLANRIYKFRGDGKAWDWEVDTENGNYDQLEYADVDMDHPEVINELNRWGVWYANTLNLDGFRLDAVKHIKFSFMRDWLGHVRGQTGKNLFAVAEYWKNDLGALENYLSKTNWTMSAFDVPLHYNLYQASNSSGNYDMRNLLNGTLVQRHPSHAVTFVDNHDTQPGEALESFVQGWFKPLAYATILTREQGYPQVFYGDYYGIPSDGVPSYRQQIDPLLKARQQYAYGRQHDYFDHWDVIGWTREGNASHPNSGLATIMSDGPGGSKWMYVGRQKAGEVWHDMTGNRSGTVTINQDGWGHFFVNGGSVSVWVKR

SEQ ID NO: 32773 - protein, 485 aa, Bacillus sp. (in: firmicutes)
HHDGTNGTIMQYFEWNVPNDGQHWNRLHNNAQNLKNAGITAIWIPPAWKGTSQNDVGYGAYDLYDLGEFNQKGTVRTKYGTKAELERAIRSLKANGIQVYGDVVMNHKGGADFTERVQAVEVNPQNRNQEVSGTYQIEAWTGFNFPGRGNQHSSFKWRWYHFDGTDWDQSRQLANRIYKFRGDGKAWDWPVDTENGNYDYLMYADVDMDHPEVINELNRWGVWYANTLNLDGFRLDAVKHIKFSFMRDWLGHVRGQTGKNLFAVAEYWKNDLGALENYLSWTNWTMSAFDVPLHYNLYQASNSSGNYDMRNLLNGTLVQRHPSHAVTFVDNHDTQPGEALESFVQGWFKPLAYATILTREQGYPQVFYGDYYGIPSDGVPSYRQQIDPLLKARQQYAYGRQHDYFDHWDVIGWTREGNASHPNSGLATIMSDGPGGSKWMYVGRQKAGEVWHDMTGNRSGTVTINQDGWGHFFVNGGSVSVWVKR

SEQ ID NO: 32774 - protein, 483 aa, Bacillus sp. (in: firmicutes)
HHDGTNGTIMQYFEWNVPNDGQHWNRLHNNAQNLKNAGITAIWIPPAWKGTSQNDVGYGAYDLYDLGEFNQKGTVRTKYGTKAELERAIRSLKANGIQVYGDVVMNHKGGADFTERVQAVEVNPQNRNQEVSGTYQIEAWTGFNFPGRGNQHSSFKWRWYHFDGTDWDQSRQLANRIYKFRGKAWDWEVDTEFGNYDYLMYADVDMDHPEVINELNRWGVWYANTLNLDGFRLDAVKHIKFSFMRDWLGHVRGQTGKNLFAVAEYWKNDLGALENYLSKTNWTMSAFDVPLHYNLYQASNSSGNYDMRNLLNGTLVQRHPSHAVTFVDNHDTQPEEALESFVQGWFKPLAYATILTREQGYPSVFYGDYYGIKSNGVPSYRQQIDPLLKARQQYAYGRQHDYFDHWDVIGWTREGNASHPNSGLATIMSDGPGGSKWMYVGRQKAGEVWHDMTGNRSGTVTINQDGWGHFFVNGGSVSVWVKR

SEQ ID NO: 32775 - protein, 485 aa, Bacillus sp.
HHDGTNGTIMQYFEWNVPNDGQHWNRLHNNAQNLKNAGITAIWIPPAWKGTSQNDVGYGAYDLYDLGEFNQKGTVRTKYGTKAELERAIRSLKANGIQVYGDVVMNHKGGADFTERVQAVEVNPQNRNQEVSGTYQIEAWTGFNFPGRGNQHSSFKWRWYHFDGTDWDQSRQLANRIYKFRGDGKAWDWEVDTENGNYDYLYRADVDMDHPEVINELNRWGVWYANTLNLDGFRLDAVKHIKFSFMRDWLGHVRGQTGKNLFAVAEYWKNDLGALENYLSKTNWTMSAFDVPLHYNLYQASNSSGNYDMRNLLNGTLVQRHPSHAVTFVDNHDTQPGEALESFVQGWFKPLAYATILTREQGYPQVFYGDYYGIPSDGVPSYRQQIDPLLKARQQYAYGRQHDYFDHWDVIGWTREGNASHPNSGLATIMSDGPGGSKWMYVGRQKAGEVWHDMTGNRSGTVTINQDGWGHFFVNGGSVSVWVKR

SEQ ID NO: 32776 - protein, 485 aa, Bacillus sp.
HHDGTNGTIMQYFEWNVPNDGQHWNRLHNNAQNLKNAGITAIWIPPAWKGTSQNDVGYGAYDLYDLGEFNQKGTVRTKYGTKAELERAIRSLKANGIQVYGDVVMNHKGGADFTERVQAVEVNPQNRNQEVSGTYQIEAWTGFNFPGRGNQHSSFKWRWYHFDGTDWDQSRQLANRIYKFRGDGKAWDWEVDTENGNYDYSLYADVDMDHPEVINELNRWGVWYANTLNLDGFRLDAVKHIKFSFMRDWLGHVRGQTGKNLFAVAEYWKNDLGALENYLSKTNWTMSAFDVPLHYNLYQASNSSGNYDMRNLLNGTLVQRHPSHAVTFVDNHDTQPGEALESFVQGWFKPLAYATILTREQGYPQVFYGDYYGIPSDGVPSYRQQIDPLLKARQQYAYGRQHDYFDHWDVIGWTREGNASHPNSGLATIMSDGPGGSKWMYVGRQKAGEVWHDMTGNRSGTVTINQDGWGHFFVNGGSVSVWVKR

SEQ ID NO: 32777 - protein, 485 aa, Bacillus sp.
HHDGTNGTIMQYFEWNVPNDGQHWNRLHNNAQNLKNAGITAIWIPPAWKGTSQNDVGYGAYDLYDLGEFNQKGTVRTKYGTKAELERAIRSLKANGIQVYGDVVMNHKGGADFTERVQAVEVNPQNRNQEVSGTYQIEAWTGFNFPGRGNQHSSFKWRWYHFDGTDWDQSRQLANRIYKFRGDGKAWDWEVDTENGNYDYYLYADVDMDHPEVINELNRWGVWYANTLNLDGFRLDAVKHIKFSFMRDWLGHVRGQTGKNLFAVAEYWKNDLGALENYLSKTNWTMSAFDVPLHYNLYQASNSSGNYDMRNLLNGTLVQRHPSHAVTFVDNHDTQPGEALESFVQGWFKPLAYATILTREQGYPQVFYGDYYGIPSDGVPSYRQQIDPLLKARQQYAYGRQHDYFDHWDVIGWTREGNASHPNSGLATIMSDGPGGSKWMYVGRQKAGEVWHDMTGNRSGTVTINQDGWGHFFVNGGSVSVWVKR

SEQ ID NO: 32778 - protein, 485 aa, Bacillus sp.
HHDGTNGTIMQYFEWNVPNDGQHWNRLHNNAQNLKNAGITAIWIPPAWKGTSQNDVGYGAYDLYDLGEFNQKGTVRTKYGTKAELERAIRSLKANGIQVYGDVVMNHKGGADFTERVQAVEVNPQNRNQEVSGTYQIEAWTGFNFPGRGNQHSSFKWRWYHFDGTDWDQSRQLANRIYKFRGDGKAWDWEVDTENGNYDYLLPADVDMDHPEVINELNRWGVWYANTLNLDGFRLDAVKHIKFSFMRDWLGHVRGQTGKNLFAVAEYWKNDLGALENYLSKTNWTMSAFDVPLHYNLYQASNSSGNYDMRNLLNGTLVQRHPSHAVTFVDNHDTQPGEALESFVQGWFKPLAYATILTREQGYPQVFYGDYYGIPSDGVPSYRQQIDPLLKARQQYAYGRQHDYFDHWDVIGWTREGNASHPNSGLATIMSDGPGGSKWMYVGRQKAGEVWHDMTGNRSGTVTINQDGWGHFFVNGGSVSVWVKR

SEQ ID NO: 32779 - protein, 485 aa, Bacillus sp.
HHDGTNGTIMQYFEWNVPNDGQHWNRLHNNAQNLKNAGITAIWIPPAWKGTSQNDVGYGAYDLYDLGEFNQKGTVRTKYGTKAELERAIRSLKANGIQVYGDVVMNHKGGADFTERVQAVEVNPQNRNQEVSGTYQIEAWTGFNFPGRGNQHSSFKWRWYHFDGTDWDQSRQLANRIYKFRGDGKAWDWEVDTENGNYDYLWGADVDMDHPEVINELNRWGVWYANTLNLDGFRLDAVKHIKFSFMRDWLGHVRGQTGKNLFAVAEYWKNDLGALENYLSKTNWTMSAFDVPLHYNLYQASNSSGNYDMRNLLNGTLVQRHPSHAVTFVDNHDTQPGEALESFVQGWFKPLAYATILTREQGYPQVFYGDYYGIPSDGVPSYRQQIDPLLKARQQYAYGRQHDYFDHWDVIGWTREGNASHPNSGLATIMSDGPGGSKWMYVGRQKAGEVWHDMTGNRSGTVTINQDGWGHFFVNGGSVSVWVKR

SEQ ID NO: 32780 - protein, 485 aa, Bacillus sp.
HHDGTNGTIMQYFEWNVPNDGQHWNRLHNNAQNLKNAGITAIWIPPAWKGTSQNDVGYGAYDLYDLGEFNQKGTVRTKYGTKAELERAIRSLKANGIQVYGDVVMNHKGGADFTERVQAVEVNPQNRNQEVSGTYQIEAWTGFNFPGRGNQHSSFKWRWYHFDGTDWDQSRQLANRIYKFRGDGKAWDWEVDTENGNYDYLLWADVDMDHPEVINELNRWGVWYANTLNLDGFRLDAVKHIKFSFMRDWLGHVRGQTGKNLFAVAEYWKNDLGALENYLSKTNWTMSAFDVPLHYNLYQASNSSGNYDMRNLLNGTLVQRHPSHAVTFVDNHDTQPGEALESFVQGWFKPLAYATILTREQGYPQVFYGDYYGIPSDGVPSYRQQIDPLLKARQQYAYGRQHDYFDHWDVIGWTREGNASHPNSGLATIMSDGPGGSKWMYVGRQKAGEVWHDMTGNRSGTVTINQDGWGHFFVNGGSVSVWVKR

SEQ ID NO: 32781 - protein, 485 aa, Bacillus sp.
HHDGTNGTIMQYFEWNVPNDGQHWNRLHNNAQNLKNAGITAIWIPPAWKGTSQNDVGYGAYDLYDLGEFNQKGTVRTKYGTKAELERAIRSLKANGIQVYGDVVMNHKGGADFTERVQAVEVNPQNRNQEVSGTYQIEAWTGFNFPGRGNQHSSFKWRWYHFDGTDWDQSRQLANRIYKFRGDGKAWDWEVDTENGNYDYPLYADVDMDHPEVINELNRWGVWYANTLNLDGFRLDAVKHIKFSFMRDWLGHVRGQTGKNLFAVAEYWKNDLGALENYLSKTNWTMSAFDVPLHYNLYQASNSSGNYDMRNLLNGTLVQRHPSHAVTFVDNHDTQPGEALESFVQGWFKPLAYATILTREQGYPQVFYGDYYGIPSDGVPSYRQQIDPLLKARQQYAYGRQHDYFDHWDVIGWTREGNASHPNSGLATIMSDGPGGSKWMYVGRQKAGEVWHDMTGNRSGTVTINQDGWGHFFVNGGSVSVWVKR

SEQ ID NO: 32782 - protein, 485 aa, Bacillus sp.
HHDGTNGTIMQYFEWNVPNDGQHWNRLHNNAQNLKNAGITAIWIPPAWKGTSQNDVGYGAYDLYDLGEFNQKGTVRTKYGTKAELERAIRSLKANGIQVYGDVVMNHKGGADFTERVQAVEVNPQNRNQEVSGTYQIEAWTGFNFPGRGNQHSSFKWRWYHFDGTDWDQSRQLANRIYKFRGDGKAWDWEVDTEXGNYDYLMYADVDMDHPXVINELNRWGVWYANTLNLDGFRLDAVKHIKFSFMRDWLGHVRGQTGKNLFAVAEYWKNDLGALENYLSKTNWTMSAFDVPLHYNLYQASNSSGNYDMRNLLNGTLVQRHPSHAVTFVDNHDTQPGEALESFVQGWFKPLAYATILTREQGYPQVFYGDYYGIPSDGVPSYRQQIDPLLKARQQYAYGRQHDYFDHWDVIGWTREGNASHPNSGLATIMSDGPGGSKWMYVGRQKAGEVWHDMTGNRSGTVTINQDGWGHFFVNGGSVSVWVKR

SEQ ID NO: 32783 - protein, 485 aa, Bacillus sp.
HHDGTNGTIMQYFEWNVPNDGQHWNRLHNNAQNLKNAGITAIWIPPAWKGTSQNDVGYGAYDLYDLGEFNQKGTVRTKYGTKAELERAIRSLKANGIQVYGDVVMNHKGGADFTERVQAVEVNPQNRNQEVSGTYQIEAWTGFNFPGRGNQHSSFKWRWYHFDGTDWDQSRQLANRIYKFRGDGKAWDWEVDTENGNYDYLRQADVDMDHPEVINELNRWGVWYANTLNLDGFRLDAVKHIKFSFMRDWLGHVRGQTGKNLFAVAEYWKNDLGALENYLSKTNWTMSAFDVPLHYNLYQASNSSGNYDMRNLLNGTLVQRHPSHAVTFVDNHDTQPGEALESFVQGWFKPLAYATILTREQGYPQVFYGDYYGIPSDGVPSYRQQIDPLLKARQQYAYGRQHDYFDHWDVIGWTREGNASHPNSGLATIMSDGPGGSKWMYVGRQKAGEVWHDMTGNRSGTVTINQDGWGHFFVNGGSVSVWVKR

SEQ ID NO: 32784 - protein, 485 aa, Bacillus sp.
HHDGTNGTIMQYFEWNVPNDGQHWNRLHNNAQNLKNAGITAIWIPPAWKGTSQNDVGYGAYDLYDLGEFNQKGTVRTKYGTKAELERAIRSLKANGIQVYGDVVMNHKGGADFTERVQAVEVNPQNRNQEVSGTYQIEAWTGFNFPGRGNQHSSFKWRWYHFDGTDWDQSRQLANRIYKFRGDGKAWDWEVDTENGNYDYLMYADVDMDHPEVINELNRWGVWYANTLNLDGFRLDAVKHIKFSFMRDWLGHVRGQTGKNLFAVAEYWKNDLGALENYLSKTNWTMSAFDVPLHYNLYQASNSSKNYDMRNLLNGTLVQRHPSHAVTFVDNHDTQPGEALESFVQGWFKPLAYATILTREQGYPQVFYGDYYGIPSDGVPSYRQQIDPLLKARQQYAYGRQHDYFDHWDVIGWTREGNASHPNSGLATIMSDGPGGSKWMYVGRQKAGEVWHDMTGNRSGTVTINQDGWGHFFVNGRSVSVWVKR

SEQ ID NO: 32785 - protein, 485 aa, Bacillus sp.
HHDGTNGTIMQYFEWNVPNDGQHWNRLHNNAQNLKNAGITAIWIPPAWKGTSQNDVGYGAYDLYDLGEFNQKGTVRTKYGTKAELERAIRSLKANGIQVYGDVVMNHKGGADFTERVQAVEVNPQNRNQEVSGTYQIEAWTGFNFPGRGNQHSSFKWRWYHFDGTDWDQSRQLANRIYKFRGDGKAWDWEVDTENGNYDYWLYADVDMDHPEVINELNRWGVWYANTLNLDGFRLDAVKHIKFSFMRDWLGHVRGQTGKNLFAVAEYWKNDLGALENYLSKTNWTMSAFDVPLHYNLYQASNSSGNYDMRNLLNGTLVQRHPSHAVTFVDNHDTQPGEALESFVQGWFKPLAYATILTREQGYPQVFYGDYYGIPSDGVPSYRQQIDPLLKARQQYAYGRQHDYFDHWDVIGWTREGNASHPNSGLATIMSDGPGGSKWMYVGRQKAGEVWHDMTGNRSGTVTINQDGWGHFFVNGGSVSVWVKR

SEQ ID NO: 32786 - protein, 483 aa, Bacillus sp.
HHNGTNGTMMQYFEWYLPNDGNHWNRLNSDASNLKSKGIKAVWIPPAWKGASQNDVGYGAYDLYDLGEFNQRGTVRTKYGTRSQLQAAVTSLKNNGIQVYGDVVMNHKGGADATEMVPAVEVNPNNRNQEVTGEYTIEAWTRFDFPGRGNTHSSFKWRWYHFDGVDFDQSRRLNNRIYKFRSKAWDWEVDTEFGNYDYLMYADYDYDHPETTNEMRNWGVWYTNTLGLDGFRIDAVKHIKYSFTRDWINHVRSATGKNMFAVAEFWKNDLGAIENYLQKTNWNHSVFDVPLHYNLYNASKSGGNYDMRNIFNGTVVQAHPSQAVTFVDNHDSQPEEALESFVEEWFKPLAYALTLTREQGYPSVFYGDYYGIPTHGVPAMRSKIDPILEARQKYAYGPQHDYLDHPDVIGWTREGDSSHPKSGLATLITDGPGGSKRMYAGLKNAGETWYDITGNRSDTVKIGSDGWGEFHVNDGSVSIYVQK

SEQ ID NO: 32787 - protein, 485 aa, Bacillus sp.
HHDGTNGTIMQYFEWNVPNDGQHWNRLHNNAQNLKNAGITAIWIPPAWKGTSQNDVGYGAYDLYDLGEFNQKGTVRTKYGTKAELERAIRSLKANGIQVYGDVVMNHKGGADFTERVQAVEVNPQNRNQEVSGTYQIEAWTGFNFPGRGNQHSSFKWRWSHFDGTDWDQSRQLANRIYKFRGDGKAWDWEVDTENGNYDYLMYADVDMDHPEVINELNRWGVWYANTLNLDGFRLDAVKHIKFSFMRDWLGHVRGQTGKNLFAVAEYWKNDLGALENYLSKTNWTMSAFDVPLHYNLYQASNSSGNYDMRNLLNGTLVQRHPSHAVTFVDNHDTQPGEALESFVQGWFKPLAYATILTREQGYPQVFYGDYYGIPSDGVPSYRQQIDPLLKARQQYAYGRQHDYFDHWDVIGWTREGNASHPNSGLATIMSDGPGGSKTMYVGRQKAGEVWHDMTGNRSGTVTINQDGWGHFFVNGGSVSVWVKR

SEQ ID NO: 32788 - protein, 485 aa, Bacillus sp.
HHDGTNGTIMQYFEWNVPNDGQHWNRLHNNAQNLKNAGITAIWIPPAWKGTSQNDVGYGAYDLYDLGEFNQKGTVRTKYGTKAELERAIRSLKANGIQVYGDVVMNHKGGADFTERVQAVEVNPQNRNQEVSGTYQIEAWTGFNFPGRGNQHSSFKWRWYHFDGTDWDQSRQLANRIYKFRGDGKAWDWEVDTENGNYDYLLQADVDMDHPEVINELNRWGVWYANTLNLDGFRLDAVKHIKFSFMRDWLGHVRGQTGKNLFAVAEYWKNDLGALENYLSKTNWTMSAFDVPLHYNLYQASNSSGNYDMRNLLNGTLVQRHPSHAVTFVDNHDTQPGEALESFVQGWFKPLAYATILTREQGYPQVFYGDYYGIPSDGVPSYRQQIDPLLKARQQYAYGRQHDYFDHWDVIGWTREGNASHPNSGLATIMSDGPGGSKWMYVGRQKAGEVWHDMTGNRSGTVTINQDGWGHFFVNGGSVSVWVKR

SEQ ID NO: 32789 - protein, 485 aa, Bacillus sp.
HHDGTNGTIMQYFEWNVPNDGQHWNRLHNNAQNLKNAGITAIWIPPAWKGTSQNDVGYGAYDLYDLGEFNQKGTVRTKYGTKAELERAIRSLKANGIQVYGDVVMNHKGGADFTERVQAVEVNPQNRNQEVSGTYQIEAWTGFNFPGRGNQHSSFKWRWYHFDGTDWDQSRQLANRIYKFRGDGKAWDWEVDTENGNYDYLMYADXDMDHPEVINXLNRWGVWYANTLNLDGFRLDAVKHIKFSFMRDWLGHVRGQTGKNLFAVAEYWKNDLGALENYLSKTNWTMSAFDVPLHYNLYQASNSSGNYDMRNLLNGTLVQRHPSHAVTFVDNHDTQPGEALESFVQGWFKPLAYATILTREQGYPQVFYGDYYGIPSDGVPSYRQQIDPLLKARQQYAYGRQHDYFDHWDVIGWTREGNASHPNSGLATIMSDGPGGSKWMYVGRQKAGEVWHDMTGNRSGTVTINQDGWGHFFVNGGSVSVWVKR

SEQ ID NO: 32790 - protein, 485 aa, Bacillus sp.
HHDGTNGTIMQYFEWNVPNDGQHWNRLHNNAQNLKNAGITAIWIPPAWKGTSQNDVGYGAYDLYDLGEFNQKGTVRTKYGTKAELERAIRSLKANGIQVYGDVVMNHKGGADFTERVQAVEVNPQNRNQEVSGTYQIEAWTGFNFPGRGNQHSSFKWRWYHFDGTDWDQSRQLANRIYKFRGDGKAWDWEVDTENGNYDYLNQADVDMDHPEVINELNRWGVWYANTLNLDGFRLDAVKHIKFSFMRDWLGHVRGQTGKNLFAVAEYWKNDLGALENYLSKTNWTMSAFDVPLHYNLYQASNSSGNYDMRNLLNGTLVQRHPSHAVTFVDNHDTQPGEALESFVQGWFKPLAYATILTREQGYPQVFYGDYYGIPSDGVPSYRQQIDPLLKARQQYAYGRQHDYFDHWDVIGWTREGNASHPNSGLATIMSDGPGGSKWMYVGRQKAGEVWHDMTGNRSGTVTINQDGWGHFFVNGGSVSVWVKR

SEQ ID NO: 32791 - protein, 483 aa, Bacillus sp. (in: firmicutes)
HHDGTNGTIMQYFEWNVPNDGQHWNRLHNNAQNLKNAGITAIWIPPAWKGTSQNDVGYGAYDLYDLGEFNQKGTVRTKYGTKAELERAIRSLKANGIQVYGDVVMNHKGGADFTERVQAVEVNPQNRNQEVDDTYQIEAWTGFNFPGRGNQHSSFKWRWYHFDGTDWDQSRQLANRIYKFRGKAWDWEVDTENGNYDYLMYADVDMDHPEVINELNRWGVWYANTLNLDGFRLDAVKHIKFSFMRDWLGHVRGQTGKNLFAVAEYWKNDLGALENYLSKTNWTMSAFDVPLHYNLYQASNSSGNYDMRNLLNGTLVQRHPSHAVTFVDNHDTQPGEALESFVQGWFKPLAYATILTREQGYPQVFYGDYYGIPSDGVPSYRQQIDPLLKARQQYAYGRQHDYFDHWDVIGWTREGNASHPNSGLATIMSDGPGGSKWMYVGRQKAGEVWHDMTGNRSGTVTINQDGWGHFFVNGGSVSVWVKR

SEQ ID NO: 32792 - protein, 485 aa, Bacillus sp.
HHDGTNGTIMQYFEWNVPNDGQHWNRLHNNAQNLKNAGITAIWIPPAWKGTSQNDVGYGAYDLYDLGEFNQKGTVRTKYGTKAELERAIRSLKANGIQVYGDVVMNHKGGADFTERVQAVEVNPQNRNQEVSGTYQIEAWTGFNFPGRGNQHSSFKWRWYHFDGTDWDQSRQLANRIYKFRGDGKAWDWEVDTENGNYDYLPHADVDMDHPEVINELNRWGVWYANTLNLDGFRLDAVKHIKFSFMRDWLGHVRGQTGKNLFAVAEYWKNDLGALENYLSKTNWTMSAFDVPLHYNLYQASNSSGNYDMRNLLNGTLVQRHPSHAVTFVDNHDTQPGEALESFVQGWFKPLAYATILTREQGYPQVFYGDYYGIPSDGVPSYRQQIDPLLKARQQYAYGRQHDYFDHWDVIGWTREGNASHPNSGLATIMSDGPGGSKWMYVGRQKAGEVWHDMTGNRSGTVTINQDGWGHFFVNGGSVSVWVKR

SEQ ID NO: 32793 - protein, 485 aa, Bacillus sp.
HHDGTNGTIMQYFEWNVPNDGQHWNRLHNNAQNLKNAGITAIWIPPAWKGTSQNDVGYGAYDLYDLGEFNQKGTVRTKYGTKAELERAIRSLKANGIQVYGDVVMNHKGGADFTERVQAVEVNPQNRNQEVSGTYQIEAWTGFNFPGRGNQHSSFKWRWYHFDGTDWDQSRQLANRIYKFRGDGKAWDWEVDTENGNYDNLLYADVDMDHPEVINELNRWGVWYANTLNLDGFRLDAVKHIKFSFMRDWLGHVRGQTGKNLFAVAEYWKNDLGALENYLSKTNWTMSAFDVPLHYNLYQASNSSGNYDMRNLLNGTLVQRHPSHAVTFVDNHDTQPGEALESFVQGWFKPLAYATILTREQGYPQVFYGDYYGIPSDGVPSYRQQIDPLLKARQQYAYGRQHDYFDHWDVIGWTREGNASHPNSGLATIMSDGPGGSKWMYVGRQKAGEVWHDMTGNRSGTVTINQDGWGHFFVNGGSVSVWVKR

SEQ ID NO: 32794 - protein, 483 aa, Bacillus sp. (in: firmicutes)
HHDGTNGTIMQYFEWNVPNDGQHWNRLHNNAQNLKNAGITAIWIPPAWKGTSQNDVGYGAYDLYDLGEFNQKGTVRTKYGTKAELERAIRSLKANGIQVYGDVVMNHKGGADFTERVQAVEVNPQNRNQEVSGTYQIEAWTGFNFPGRGNQHSSFKWRWYHFDGTDWDQSLQLANRIYKFRGKAWDWEVDTENGNYDYLMYADVDMDHPEVINELNRWGVWYANTLNLDGFRLDAVKHIKFSFMRDWLGHVRGQTGKNLFAVAEYWKNDLGALENYLSKTNWTMSAFDVPLHYNLYQASHSSGNYDMRNLLNGTLVQRHPSHAVTFVDNHDTQPGEALESFVQGWFKPLAYATILTREQGYPCVFYGDYYGIPSDGVPSYRQQIDPLLKARQQYAYGRQHDYFDHWDVIGWTREGNASHPNSGLATIMSDGPGGSKWMYVGRQKAGEVWHDMTGNRSGTVTINQDGWGHFFVNGGSVSVWVKR

SEQ ID NO: 32795 - protein, 485 aa, Bacillus sp.
HHDGTNGTIMQYFEWNVPNDGQHWNRLHNNAQNLKNAGITAIWIPPAWKGTSQNDVGYGAYDLYDLGEFNQKGTVRTKYGTKAELERAIRSLKANGIQVYGDVVMNHKGGADFTERVQAVEVNPQNRNQEVSGTYQIEAWTGFNFPGRGNQHSSFKWRWYHFDGTDWDQSRQLANRIYKFRGDGKAWDWEVDTENGNYDYLMYADVDMDHPEVINELNRWGVWYANTLNLDGFRLDAVKHIKFSFMRDWLGHVRGQTGKNLFAVAEYWKNDLGALENYLSKTNGTMSAFDVPLHYNLYQASNSSRNYDMRNLLNGTLVQRHPSHAVTFVDNHDTQPGEALESFVQGWFKPLAYATILTREQGYPQVFYGDYYGIPSDGVPSYRQQIDPLLKARQQYAYGRQHDYFDHWDVIGWTREGNASHPNSGLATIMSDGPGGSKWMYVGRQKAGEVWHDMTGNRSGTVTINQDGWGHFFVNGGSVSVWVKR

SEQ ID NO: 32796 - protein, 485 aa, Bacillus sp.
HHDGTNGTIMQYFEWNVPNDGQHWNRLHNNAQNLKNAGITAIWIPPAWKGTSQNDVGYGAYDLYDLGEFNQKGTVRTKYGTKAELERAIRSLKANGIQVYGDVVMNHKGGADFTERVQAVEVNPQNRNQEVSGTYQIEAWTGFNFPGRGNQHSSFKWRWYHFDGTDWDQSRQLANRIYKFRGDGKAWDWEVDTENGNYDKLLYADVDMDHPEVINELNRWGVWYANTLNLDGFRLDAVKHIKFSFMRDWLGHVRGQTGKNLFAVAEYWKNDLGALENYLSKTNWTMSAFDVPLHYNLYQASNSSGNYDMRNLLNGTLVQRHPSHAVTFVDNHDTQPGEALESFVQGWFKPLAYATILTREQGYPQVFYGDYYGIPSDGVPSYRQQIDPLLKARQQYAYGRQHDYFDHWDVIGWTREGNASHPNSGLATIMSDGPGGSKWMYVGRQKAGEVWHDMTGNRSGTVTINQDGWGHFFVNGGSVSVWVKR

SEQ ID NO: 32797 - protein, 483 aa, Bacillus sp. (in: firmicutes)
HHDGTNGTIMQYFEWNVPNDGQHWNRLHNNAQNLKNAGITAIWIPPAWKGTSQNDVGYGAYDLYDLGEFNQKGTVRTKYGTKAELERAIRSLKANGIQVYGDVVMNHKGGADFTERVQAVEVNPQNRNQEVSGTYQIEAWTGFNFPGRGNQHSSFKWRWYHFDGTDWDQSRQLANRIYKFRGKAWDWEVDTEFGNYDYLMYADVDMDHPEVINELNRWGVWYANTLNLDGFRLDAVKHIKFSFMRDWLGHVRGQTGKNLFAVAEYWKNDLGALENYLSKTNWTMSAFDVPLHYNLYQASNSSGNYDMRNLLNGTLVQRHPSHAVTFVDNHDTQPDEALESFVQGWFKPLAYATILTREQGYPSVFYGDYYGIKSYGVPSYRQQIDPLLKARQQYAYGRQHDYFDHWDVIGWTREGNASHPNSGLATIMSDGPGGSKWMYVGRQKAGEVWHDMTGNRSGTVTINQDGWGHFFVNGGSVSVWVKR

SEQ ID NO: 32798 - protein, 483 aa, Bacillus sp.
HHDGTNGTIMQYFEWNVPNDGQHWNRLHNNAQNLKNAGITAIWIPPAWKGTSQNDVGYGAYDLYDLGEFNQKGTVRTKYGTKAELERAIRSLKANGIQVYGDVVMNHKGGADFTERVQAVEVNPQNRNQEVSGTYQIEAWTGFNFPGRGNQHSSFKWRWYHFDGTDWDQSRQLANRIYKFDGKAWDWEVDTENGNYDYLMYADVDMDHPEVINELNRWGVWYANTLNLDGFRLDAVKHIKFSFMRDWLGHVRGQTGKNLFAVAEYWXNDLGALENYLSKTNWTMSAFDVPLHYNLYQASNSSGNYDMRNLLNGTLVQRHPSHAVTFVDNHDTQPGEALESFVQGWFKPLAYATILTREQGYPQVFYGDYYGIPSDGVPSYRQQIDPLLKARQQYAYGRQHDYFDHWDVIGWTREGNASHPNSGLATIMSDGPGGSKWMYVGRQKAGEVWHDMTGNRSGTVTINQDGWGHFFVNGGSVSVWVKR

SEQ ID NO: 32799 - protein, 483 aa, Bacillus sp. (in: firmicutes)
HHDGTNGTIMQYFEWNVPNDGQHWNRLHNNAQNLKNAGITAIWIPPAWKGTSQNDVGYGAYDLYDLGEFNQKGTVRTKYGTKAELERAIRSLKANGIQVYGDVVMNHKGGADFTEKVQAVEVNPQNRNQEVPGTYDIEAWTGFNFPGRGNQHSSFKWRWYHFDGTDWDQSRQLANRIYKFQGKAWDWEVDTEFGNYDYLMYADVDMDHPEVINELNRWGVWYANTLNLDGFRLDAVKHIKFSFMRDWLGHVRGQTGKNLFAVAEYWKNDLGALENYLSKTNWTMSAFDVPLHYNLYQASNSSGNYDMRNLLNGTLVQRHPSHAVTFVDNHDTQPGEALESFVQGWFKPLAYATILTREQGYPSVFYGDYYGIPSDGVPSYRQQIDPLLKARQQYAYGRQHDYFDHWDVIGWTREGNASHPNSGLATIMSDGPGGSKWMYVGRQKAGEVWHDMTGNRSGTVTINQDGWGHFFVNGGSVSVWVKR

SEQ ID NO: 32800 - protein, 485 aa, Bacillus sp.
HHDGTNGTIMQYFEWNVPNDGQHWNRLHNNAQNLKNAGITAIWIPPAWKGTSQNDVGYGAYDLYDLGEFNQKGTVRTKYGTKAELERAIRSLKANGIQVYGDVVMNHKGGADFTERVQAVEVNPQNRNQEVSGTYQIEAWTGFNFPGRGNQHSSFKWRWYHFDGTDWDQSRQLANRIYKFRGDGKAWDWEVDTEXGNYDYLMYADXDMDHPEVINELNRWGVWYANTLNLDGFRLDAVKHIKFSFMRDWLGHVRGQTGKNLFAVAEYWKNDLGALENYLSKTNWTMSAFDVPLHYNLYQASNSSGNYDMRNLLNGTLVQRHPSHAVTFVDNHDTQPGEALESFVQGWFKPLAYATILTREQGYPQVFYGDYYGIPSDGVPSYRQQIDPLLKARQQYAYGRQHDYFDHWDVIGWTREGNASHPNSGLATIMSDGPGGSKWMYVGRQKAGEVWHDMTGNRSGTVTINQDGWGHFFVNGGSVSVWVKR

SEQ ID NO: 32801 - protein, 485 aa, Bacillus sp.
HHDGTNGTIMQYFEWNVPNDGQHWNRLHNNAQNLKNAGITAIWIPPAWKGTSQNDVGYGAYDLYDLGEFNQKGTVRTKYGTKAELERAIRSLKANGIQVYGDVVMNHKGGADFTERVQAVEVNPQNRNQEVSGTYQIEAWTGFNFPGRGNQHSSFKWRWYHFDGTDWDQSRQLANRIYKFRGDGKAWDWEVDTENGNYDYSNYADVDMDHPEVINELNRWGVWYANTLNLDGFRLDAVKHIKFSFMRDWLGHVRGQTGKNLFAVAEYWKNDLGALENYLSKTNWTMSAFDVPLHYNLYQASNSSGNYDMRNLLNGTLVQRHPSHAVTFVDNHDTQPGEALESFVQGWFKPLAYATILTREQGYPQVFYGDYYGIPSDGVPSYRQQIDPLLKARQQYAYGRQHDYFDHWDVIGWTREGNASHPNSGLATIMSDGPGGSKWMYVGRQKAGEVWHDMTGNRSGTVTINQDGWGHFFVNGGSVSVWVKR

SEQ ID NO: 32802 - protein, 485 aa, Bacillus sp.
HHDGTNGTIMQYFEWNVPNDGQHWNRLHNNAQNLKNAGITAIWIPPAWKGTSQNDVGYGAYDLYDLGEFNQKGTVRTKYGTKAELERAIRSLKANGIQVYGDVVMNHKGGADFTERVQAVEVNPQNRNQEVSGTYQIEAWTGFNFPGRGNQHSSFKWRWYHFDGTDWDQSRQLANRIYKFRGDGKAWDWEVDTENGNYDYLLEADVDMDHPEVINELNRWGVWYANTLNLDGFRLDAVKHIKFSFMRDWLGHVRGQTGKNLFAVAEYWKNDLGALENYLSKTNWTMSAFDVPLHYNLYQASNSSGNYDMRNLLNGTLVQRHPSHAVTFVDNHDTQPGEALESFVQGWFKPLAYATILTREQGYPQVFYGDYYGIPSDGVPSYRQQIDPLLKARQQYAYGRQHDYFDHWDVIGWTREGNASHPNSGLATIMSDGPGGSKWMYVGRQKAGEVWHDMTGNRSGTVTINQDGWGHFFVNGGSVSVWVKR

SEQ ID NO: 32803 - protein, 485 aa, Bacillus sp.
HHDGTNGTIMQYFEWNVPNDGQHWNRLHNNAQNLKNAGITAIWIPPAWKGTSQNDVGYGAYDLYDLGEFNQKGTVRTKYGTKAELERAIRSLKANGIQVYGDVVMNHKGGADFTERVQAVEVNPQNRNQEVSGTYQIEAYTGFNFPGRGNQHSSFKWRWYHFDGTDWDQSRQLANRIYKFRGDGKAWDWEVDTDNGNYDYLMYADVDMDHPEVINELNRWGVWYANTLNLDGFRLDAVKHIKFSFMRDWLGHVRGQTGKNLFAVAEYWKNDLGALENYLSKTNWTMSAFDVPLHYNLYQASNSSGNYDMRNLLNGTLVQRHPSHAVTFVDNHDTQPGEALESFVQGWFKPLAYATILTREQGYPQVFYGDYYGIPSDGVPSYRQQIDPLLKARQQYAYGRQHDYFDHWDVIGWTREGNASHPNSGLATIMSDGPGGSKWMYVGRQKAGEVWHDMTGNRSGTVTINQDGWGHFFVNGGSVSVWVKR

SEQ ID NO: 32804 - protein, 485 aa, Bacillus sp.
HHDGTNGTIMQYFEWNVPNDGQHWNRLHNNAQNLKNAGITAIWIPPAWKGTSQNDVGYGAYDLYDLGEFNQKGTVRTKYGTKAELERAIRSLKANGIQVYGDVVMNHKGGADFTERVQAVEVNPQNRNQEVSGTYQIEAWTGFNFPGRGNQHSSFKWRWYHFDGTDWDQSRQLANRIYKFRGDGKAWDWEVDTENGNYDYPSYADVDMDHPEVINELNRWGVWYANTLNLDGFRLDAVKHIKFSFMRDWLGHVRGQTGKNLFAVAEYWKNDLGALENYLSKTNWTMSAFDVPLHYNLYQASNSSGNYDMRNLLNGTLVQRHPSHAVTFVDNHDTQPGEALESFVQGWFKPLAYATILTREQGYPQVFYGDYYGIPSDGVPSYRQQIDPLLKARQQYAYGRQHDYFDHWDVIGWTREGNASHPNSGLATIMSDGPGGSKWMYVGRQKAGEVWHDMTGNRSGTVTINQDGWGHFFVNGGSVSVWVKR

SEQ ID NO: 32805 - protein, 485 aa, Bacillus sp.
HHDGTNGTIMQYFEWNVPNDGQHWNRLHNNAQNLKNAGITAIWIPPAWKGTSQNDVGYGAYDLYDLGEFNQKGTVRTKYGTKAELERAIRSLKANGIQVYGDVVMNHKGGADFTERVQAVEVNPQNRNQEVSGTYQIEAWTGFNFPGRGNQHSSFKWRWYHFDGTDWDQSRQLANRIYKFRGDGKAWDWEVDTENGNYDYLMYADVDMDHPEVINELNRWGVWYANTLNLDGFRLDAVKHIKFSFMRDWLGHVRGQTGKNLFAVAEYWKNDLGALENYLSKTNWTMSAFDVPLHYNLYQASNSSKNYDMRNLLNGTLVQRHPSHAVTFVDNHDTQPGEALESFVQGWFKPLAYATILTREQGYPQVFYGDYYGIPSDGVPSYRQQIDPLLKARQQYAYGRQHDYFDHWDVIGWTREGNASHPNSGLATIMSDGPGGSKWMYVGRQKAGEVWHDMTGNRSGTVTINQDGWGHFFVNKGSVSVWVKR

SEQ ID NO: 32806 - protein, 485 aa, Bacillus sp.
HHDGTNGTIMQYFEWNVPNDGQHWNRLHNNAQNLKNAGITAIWIPPAWKGTSQNDVGYGAYDLYDLGEFNQKGTVRTKYGTKAELERAIRSLKANGIQVYGDVVMNHKGGADFTERVQAVEVNPQNRNQEVSGTYQIEAWTGFNFPGRGNQHSSFKWRWYHFDGTDWDQSRQLANRIYKFRGDGKAWDWEVDTENGNYDYLPIADVDMDHPEVINELNRWGVWYANTLNLDGFRLDAVKHIKFSFMRDWLGHVRGQTGKNLFAVAEYWKNDLGALENYLSKTNWTMSAFDVPLHYNLYQASNSSGNYDMRNLLNGTLVQRHPSHAVTFVDNHDTQPGEALESFVQGWFKPLAYATILTREQGYPQVFYGDYYGIPSDGVPSYRQQIDPLLKARQQYAYGRQHDYFDHWDVIGWTREGNASHPNSGLATIMSDGPGGSKWMYVGRQKAGEVWHDMTGNRSGTVTINQDGWGHFFVNGGSVSVWVKR

SEQ ID NO: 32807 - protein, 485 aa, Bacillus sp.
HHDGTNGTIMQYFEWNVPNDGQHWNRLHNNAQNLKNAGITAIWIPPAWKGTSQNDVGYGAYDLYDLGEFNQKGTVRTKYGTKAELERAIRSLKANGIQVYGDVVMNHKGGADFTERVQAVEVNPQNRNQEVSGTYEIEAWTGFNFPGRGNQHSSFKWRWYHFDGTDWDQSRQLSNRIYKFRGDGKAWDWEVDTENGNYDYLMYADVDMNHPEVINELNRWGVWYANTLNLDGFRLDAVKHIQFSFMRNWLGHVRGQTGKNLFAVAEYWXNDLGALENYLSKTNWTMSAFDVPLHYNLYQASNSGGNYDMRNLLNGTLVQRHPSHAVTFVDNHDTQPGEALESFVQGWFKPLAYATILTREQGYPQVFYGDYYGIPSDGVPSYRQQIDPLLKARQQYAYGRQHDYFDHWDVIGWTREGNASHPNSGLATIMSDGPGGSKWMYVGRQKAGEVWHDITGNRSGTVTINQDGWGQFFVNGGSVSVWVKR

SEQ ID NO: 32808 - protein, 485 aa, Bacillus sp. (in: firmicutes)
HHDGTNGTIMQYFEWNVPNDGQHWNRLHNNAQNLKNAGITAIWIPPAWKGTSQNDVGYGAYDLYDLGEFNQKGTVRTKYGTKAELERAIRSLKANGIQVYGDVVMNHKGGADFTERVQAVEVNPQNRNQEVSGTYQIEAWTGFNFPGRGNQHSSFKWRWYHFDGTDWDQSRQLANRIYKFRGDGKAWDWPVDTENGNYDYLMYADVDMDHPEVINELNRWGVWYANTLNLDGFRLDAVKHIKFQFMRDWLGHVRGQTGKNLFAVAEYWKNDLGALENYLSKTNWTMSAFDVPLHYNLYQASNSSGNYDMRNLLNGTLVQRHPSHAVTFVDNHDTQPGEALESFVQGWFKPLAYATILTREQGYPQVFYGDYYGIPSDGVPSYRQQIDPLLKARQQYAYGRQHDYFDHWDVIGWTREGNASHPNSGLATIMSDGPGGSKWMYVGRQKAGEVWHDMTGNRSGTVTINQDGWGHFFVNGGSVSVWVKR

SEQ ID NO: 32809 - protein, 483 aa, Bacillus sp. (in: firmicutes)
HHDGTNGTIMQYFEWNVPNDGQHWNRLHNNAQNLKNAGITAIWIPPAWKGTSQNDVGYGAYDLYDLGEFNQKGTVRTKYGTKAELERAIRSLKANGIQVYGDVVMNHKGGADFTERVQAVEVNPQNNNQEVSGTYQIEAWTGFNFPGRGNQHSSFKWRWYHFDGTDWDQSHQLANRIYKFRGKAWDWEVDTENGNYDYLMYADVDMDHPEVINELNRWGVWYANTLNLDGFRLDAVKHIKFSFLRDWLGHVRGQTGKNLFAVAEYWKNDLGAVENYLSKTNWTMSAFDVPLHYNLYQASNSSGNYDMRNLLNGTLVQRHPSHAVTFVDNHDTQPGEALESFVQGWFKPLAYATILTREQGYPSVFYGDYYGIPSDGVPSYRQQIDPLLKARQQYAYGRQHDYFDHWDVIGWTREGNASHPNSGLATIMSDGPGGSKWMYVGRQKAGEVWHDMTGNRSGTVTINQDGWGHFFVNGGSVSVWVKR

SEQ ID NO: 32810 - protein, 483 aa, Bacillus sp.
HHDGTNGTIMQYFEWNVPNDGQHWNRLHNNAQNLKNAGITAIWIPPAWKGTSQNDVGYGAYDLYDLGEFNQKGTVRTKYGTKAELERAIRSLKANGIQVYGDVVMNHKGGADFTERVQAVEVNPQNRNQEVSGTYQIEAWTGFNFPGRGNQHSSFKWRWYHFDGTDWDQSRQLANRIYKFDGKAWDWEVDTEXGNYDYLMYADVDMDHPEVINELNRWGVWYANTLNLDGFRLDAVKHIKFSFMRDWLGHVRGQTGKNLFAVAEYWKNDLGALENYLSKTNWTMSAFDVPLHYNLYQASNSSGNYDMRNLLNGTLVQRHPSHAVTFVDNHDTQPGEALESFVQGWFKPLAYATILTREQGYPQVFYGDYYGIPSDGVPSYRQQIDPLLKARQQYAYGRQHDYFDHWDVIGWTREGNASHPNSGLATIMSDGPGGSKWMYVGRQKAGEVWHDMTGNRSGTVTINQDGWGHFFVNGGSVSVWVKR

SEQ ID NO: 32811 - protein, 485 aa, Bacillus sp.
HHDGTNGTIMQYFEWNVPNDGQHWNRLHNNAQNLKNAGITAIWIPPAWKGTSQNDVGYGAYDLYDLGEFNQKGTVRTKYGTKAELERAIRSLKANGIQVYGDVVMNHKGGADFTERVQAVEVNPQNRNQEVSGTYQIEAWTGFNFPGRGNQHSSFKWRWYHFDGTDWDQSRQLANRIYKFRGDGKAWDWEVDTENGNYDYDLYADVDMDHPEVINELNRWGVWYANTLNLDGFRLDAVKHIKFSFMRDWLGHVRGQTGKNLFAVAEYWKNDLGALENYLSKTNWTMSAFDVPLHYNLYQASNSSGNYDMRNLLNGTLVQRHPSHAVTFVDNHDTQPGEALESFVQGWFKPLAYATILTREQGYPQVFYGDYYGIPSDGVPSYRQQIDPLLKARQQYAYGRQHDYFDHWDVIGWTREGNASHPNSGLATIMSDGPGGSKWMYVGRQKAGEVWHDMTGNRSGTVTINQDGWGHFFVNGGSVSVWVKR

SEQ ID NO: 32812 - protein, 485 aa, Bacillus sp.
HHDGTNGTIMQYFEWNVPNDGQHWNRLHNNAQNLKNAGITAIWIPPAWKGTSQNDVGYGAYDLYDLGEFNQKGTVRTKYGTKAELERAIRSLKANGIQVYGDVVMNHKGGADFTERVQAVEVNPQNRNQEVSGTYQIEAWTGFNFPGRGNQHSSFKWRWYHFDGTDWDQSRQLANRIYKFRGDGKAWDWEVDTENGNYDYLLSADVDMDHPEVINELNRWGVWYANTLNLDGFRLDAVKHIKFSFMRDWLGHVRGQTGKNLFAVAEYWKNDLGALENYLSKTNWTMSAFDVPLHYNLYQASNSSGNYDMRNLLNGTLVQRHPSHAVTFVDNHDTQPGEALESFVQGWFKPLAYATILTREQGYPQVFYGDYYGIPSDGVPSYRQQIDPLLKARQQYAYGRQHDYFDHWDVIGWTREGNASHPNSGLATIMSDGPGGSKWMYVGRQKAGEVWHDMTGNRSGTVTINQDGWGHFFVNGGSVSVWVKR

SEQ ID NO: 32813 - protein, 483 aa, Bacillus sp. (in: firmicutes)
HHDGTNGTIMQYFEWNVPNDGQHWNRLHNNAQNLKNAGITAIWIPPAWKGTSQNDVGYGAYDLYDLGEFNQKGTVRTKYGTKAELERAIRSLKANGIQVYGDVVMNHKGGADFTERVQAVEVNPQNRNQEVSGTYQIEAWTGFNFPGRGNQHSSFKWRWYHFDGTDWDQSRQLANRIYKFRGKAWDWEVDTENGNYDYLMYADVDMDHPEVINELNRWGVWYANTLNLDGFRLDAVKHIKFSFMRDWLGHVRGQTGKNLFAIAEYWKNDLGALENYLSKTNWTMSAFDTPLHYNLYQASNSSGNYDMRNLLNGTLVQRHPSHAVTFVDNHDTQPGEALESFVQGWFKPLAYATILTREQGYPKVFYGDYYGIPSDGVPSYRQQIDPLLKARQQYAYGRQHDYFDHWDVIGWTREGNASHPNSGLATIMSDGPGGSKWMYVGRQKAGEVWHDMTGNRSGTVTINQDGWGHFFVNGGSVSVWVKR

SEQ ID NO: 32814 - protein, 483 aa, Bacillus sp. (in: firmicutes)
HHDGTNGTIMQYFEWNVPNDGQHWNRLHNNAQNLKNAGITAIWIPPAWKGTSQNDVGYGAYDLYDLGEFNQKGTVRTKYGTKAELERAIRSLKANGIQVYGDVVMNHKGGADFTESVQAVEVNPQNRNQEVSGTHGIEAWTGFNFPGRGNQHSSFKWRWYHFDGTDWDQSRQLANRIYKFTGKAWDWEVDTEFGNYDYLMYADVDMDHPEVINELNRWGVWYANTLNLDGFRLDAVKHIKFSFMRDWLGHVRGQTGKNLFAVAEYWKNDLGALENYLSKTNWTMSAFDVPLHYNLYQASNSSGNYDMRNLLNGTLVQRHPSHAVTFVDNHDTQPGEALESFVQGWFKPLAYATILTREQGYPSVFYGDYYGIPSDGVPSYRQQIDPLLKARQQYAYGRQHDYFDHWDVIGWTREGNASHPNSGLATIMSDGPGGSKWMYVGRQKAGEVWHDMTGNRSGTVTINQDGWGHFFVNGGSVSVWVKR

SEQ ID NO: 32815 - protein, 483 aa, Synthetic construct
HHNGLNGTMMQYFEWYLPNDGNHWNRLNSDASYLAEHGITAVWIPPAWKGASQNDVGYGAYDLYDLGEFNQKGTVRTKYGTRSQLQAAVTSLKNRGIQVYGDVVMNHKAGADATEMVRAVEVNPNNRNQEVTGEYTIEAWTRFDFPGRGNTHSSFKWRWYHFDGVDWDQSRRLNNRIYKFRGKAWDWPVDTENGNYDYLMYADIDMDHPEVVNELRNWGVWYTNTLGLDGFRIDAVKHIKYSFTRDWINHVRSATGKNMFAVAEFWKNDLGAIENYLNKTNFNHSVFDVPLHYQFYNASKSGGNYDMRKLLNGTVVSKHPSKAVTFVDNHDTQPEEALESFVEEWFKPLAYAFILTRESGYPSVFYGDMYGIPTHGVPAMKHKIEPILKARKQYAYGAQHDYLDHPDVIGWTREGDSSHPKSGLATLITDGPGGSKRMYAGLKNAGETWYDITGNRSDTVKIGSDGWGEFHVNDGSVSIYVQK

SEQ ID NO: 32816 - protein, 483 aa, Bacillus sp. (in: firmicutes)
HHDGTNGTIMQYFEWNVPNDGQHWNRLHNNAQNLKNAGITAIWIPPAWKGTSQNDVGYGAYDLYDLGEFNQKGTVRTKYGTKAELERAIRSLKANGIQVYGDVVMNHKGGADFTERVQAVEVNPQNRNQEVSGTYQIEAWTGFNFPGRGNQHSSFKWRWYHFDGTDWDQSRQLANRIYKFRGKAWDWEVDTENGNYDYLMYADVDMDHPEVINELNRWGVWYANTLNLDGFRLDAVKHIKFSFMRDWLGHVRGQTGKNLFAIAEYWKNDLGALENYLSKTNWTMSAFDVPLHYNLYQASNSSGNYDMRNLLNGTLVQRHPSHAVTFVDNHDTQPGEALESFVQGWFKPLAYATIFTREQGYPQVFYGDYYGIPSDGVPSYRQQIDPLLKARQQYAYGRQHDYFDHWDVIGWTREGNASHPNSGLATIMSDGPGGSKWMYVGRQKAGEVWHDMTGNRSGTVTINQDGWGHFFVNGGSVSVWVKR

SEQ ID NO: 32817 - protein, 483 aa, Bacillus sp. (in: firmicutes)
HHDGTNGTIMQYFEWNVPNDGQHWNRLHNNAQNLKNAGITAIWIPPAWKGTSQNDVGYGAYDLYDLGEFNQKGTVRTKYGTKAELERAIRSLKANGIQVYGDVVMNHKGGADFTERVQAVEVNPQNNNQEVSGTYQIEAWTGFNFPGRGNQHSSFKWRWYHFDGTDWDQSLQLANRIYKFRGKAWDWEVDTENGNYDYLMYADVDMDHPEVINELNRWGVWYANTLNLDGFRLDAVKHIKFSFLRDWLGHVRGQTGKNLFAVAEYWKNDLGAVENYLSKTNWTMSAFDVPLHYNLYQASNSSGNYDMRNLLNGTLVQRHPSHAVTFVDNHDTQPGEALESFVQGWFKPLAYATILTREQGYPSVFYGDYYGIPSDGVPSYRQQIDPLLKARQQYAYGRQHDYFDHWDVIGWTREGNASHPNSGLATIMSDGPGGSKWMYVGRQKAGEVWHDMTGNRSGTVTINQDGWGHFFVNGGSVSVWVKR

SEQ ID NO: 32818 - protein, 483 aa, Bacillus sp. (in: firmicutes)
HHDGTNGTIMQYFEWNVPNDGQHWNRLHNNAQNLKNAGITAIWIPPAWKGTSQNDVGYGAYDLYDLGEFNQKGTVRTKYGTKAELERAIRSLKANGIQVYGDVVMNHKGGADFTECVQAVEVNPQNRNQEVAGTYSIEAWTGFNFPGRGNQHSSFKWRWYHFDGTDWDQSRQLANRIYKFAGKAWDWEVDTEFGNYDYLMYADVDMDHPEVINELNRWGVWYANTLNLDGFRLDAVKHIKFSFMRDWLGHVRGQTGKNLFAVAEYWKNDLGALENYLSKTNWTMSAFDVPLHYNLYQASNSSGNYDMRNLLNGTLVQRHPSHAVTFVDNHDTQPGEALESFVQGWFKPLAYATILTREQGYPSVFYGDYYGIPSDGVPSYRQQIDPLLKARQQYAYGRQHDYFDHWDVIGWTREGNASHPNSGLATIMSDGPGGSKWMYVGRQKAGEVWHDMTGNRSGTVTINQDGWGHFFVNGGSVSVWVKR

SEQ ID NO: 32819 - protein, 485 aa, Bacillus sp.
HHDGTNGTIMQYFEWNVPNDGQHWNRLHNNAQNLKNAGITAIWIPPAWKGTSQNDVGYGAYDLYDLGEFNQKGTVRTKYGTKAELERAIRSLKANGIQVYGDVVMNHKGGADFTERVQAVEVNPQNRNQEVSGTYQIEAYTGFNFPGRGNQHSSFKWRWYHFDGTDWDQSRQLANRIYKFRGDGKAWDWEVDTENGNYDYLMYADVDMDHPEVINELNRWGVWYANTLNLDGFRLDAVKHIKFSFMRDWLGHVRGQTGKNLFAVAEYWKNDLGALENYLSKTNWTMSAFDVPLHYNLYQASNSSGNYDMRNLLNGTLVQRHPSHAVTFVDNHDTQPGEALESFVQGWFKPLAYATILTREQGYPQVFYGDYYGIPSDGVPSYRQQIDPLLKARQQYAYGRQHDYFDHWDVIGWTREGNASHPNSGLATIMSDGPGGSKWMYVGRQKAGEVWHDMTGNRSGTVTINQDGWGHFFVNGRSVSVWVKR

SEQ ID NO: 32820 - protein, 485 aa, Bacillus sp.
HHDGTNGTIMQYFEWNVPNDGQHWNRLHNNAQNLKNAGITAIWIPPAWKGTSQNDVGYGAYDLYDLGEFNQKGTVRTKYGTKAELERAIRSLKANGIQVYGDVVMNHKGGADFTERVQAVEVNPQNRNQEVSGTYQIEAWTGFNFPGRGNQHSSFKWRWYHFDGTDWDQSRQLANRIYKFRGDGKAWDWEVDTENGNYDYLMYADVDMDHPEVINELNRWGVWYANTLNLDGFRLDAVKHIKFSFMRDWLGHVRGQTGKNLFAVAEYWKNDLGALENYLSKTNGTMSAFDVPLHYNLYQASNSSGNYDMRNLLNGTLVQRHPSHAVTFVDNHDTQPGEALESFVQGWFKPLAYATILTREQGYPQVFYGDYYGIPSDGVPSYRQQIDPLLKARQQYAYGRQHDYFDHWDVIGWTREGNASHPNSGLATIMSDGPGGSKWMYVGRQKAGEVWHDMTGNRSGTVTINQDGWGHFFVNKGSVSVWVKR

SEQ ID NO: 32821 - protein, 483 aa, Bacillus sp.
HHDGTNGTIMQYFEWNVPNDGQHWNRLHNNAQNLKNAGITAIWIPPAWKGTSQNDVGYGAYDLYDLGEFNQKGTVRTKYGTKAELERAIRSLKANGIQVYGDVVMNHKGGADFTERVQAVEVNPQNRNQEVSGTYQIEAWTGFNFPGRGNQHSSFKWRWYHFDGTDWDQSRQLANRIYKFDGKAWDWEVDTEFGNYDYLMYADVDMDHPEVINELNRWGVWYANTLNLDGFRLDAVKHIKFSFMRDWLGHVRGQTGKNLFAVAEYWKNDLGALENYLSKTNWTMSAFDVPLHYNLYQASNSSGNYDMRNLLNGTLVQRHPSHAVTFVDNHDTQPGEALESFVQGWFKPLAYATILTREQGYPQVFYGDYYGIPSDGVPSYRQQIDPLLKARQQYAYGRQHDYFDHWDVIGWTREGNASHPNSGLATIMSDGPGGSKWMYVGRQKAGEVWHDMTGNRSGTVTINQDGWGHFFVNGGSVSVWVKR

SEQ ID NO: 32822 - protein, 485 aa, Bacillus sp.
HHDGTNGTIMQYFEWNVPNDGQHWNRLHNNAQNLKNAGITAIWIPPAWKGTSQNDVGYGAYDLYDLGEFNQKGTVRTKYGTKAELERAIRSLKANGIQVYGDVVMNHKGGADFTERVQAVEVNPQNRNQEVSGTYQIEAWTGFNFPGRGNQHSSFKWRWYHFDGTDWDQSRQLANRIYKFRGDGKAWDWEVDTENGNYDYLLLADVDMDHPEVINELNRWGVWYANTLNLDGFRLDAVKHIKFSFMRDWLGHVRGQTGKNLFAVAEYWKNDLGALENYLSKTNWTMSAFDVPLHYNLYQASNSSGNYDMRNLLNGTLVQRHPSHAVTFVDNHDTQPGEALESFVQGWFKPLAYATILTREQGYPQVFYGDYYGIPSDGVPSYRQQIDPLLKARQQYAYGRQHDYFDHWDVIGWTREGNASHPNSGLATIMSDGPGGSKWMYVGRQKAGEVWHDMTGNRSGTVTINQDGWGHFFVNGGSVSVWVKR

SEQ ID NO: 32823 - protein, 485 aa, Bacillus sp.
HHDGTNGTIMQYFEWNVPNDGQHWNRLHNNAQNLKNAGITAIWIPPAWKGTSQNDVGYGAYDLYDLGEFNQKGTVRTKYGTKAELERAIRSLKANGIQVYGDVVMNHKGGADFTERVQAVEVNPQNRNQEVSGTYQIEAWTGFNFPGRGNQHSSFKWRWYHFDGTDWDQSRQLANRIYKFRGDGKAWDWEVDTENGNYDYRLYADVDMDHPEVINELNRWGVWYANTLNLDGFRLDAVKHIKFSFMRDWLGHVRGQTGKNLFAVAEYWKNDLGALENYLSKTNWTMSAFDVPLHYNLYQASNSSGNYDMRNLLNGTLVQRHPSHAVTFVDNHDTQPGEALESFVQGWFKPLAYATILTREQGYPQVFYGDYYGIPSDGVPSYRQQIDPLLKARQQYAYGRQHDYFDHWDVIGWTREGNASHPNSGLATIMSDGPGGSKWMYVGRQKAGEVWHDMTGNRSGTVTINQDGWGHFFVNGGSVSVWVKR

SEQ ID NO: 32824 - protein, 485 aa, Bacillus sp.
HHDGTNGTIMQYFEWNVPNDGQHWNRLHNNAQNLKNAGITAIWIPPAWKGTSQNDVGYGAYDLYDLGEFNQKGTVRTKYGTKAELERAIRSLKANGIQVYGDVVMNHKGGADFTERVQAVEVNPQNRNQEVSGTYQIEAWTGFNFPGRGNQHSSFKWRWYHFDGTDWDQSRQLANRIYKFRGDGKAWDWEVDTENGNYDYLFPADVDMDHPEVINELNRWGVWYANTLNLDGFRLDAVKHIKFSFMRDWLGHVRGQTGKNLFAVAEYWKNDLGALENYLSKTNWTMSAFDVPLHYNLYQASNSSGNYDMRNLLNGTLVQRHPSHAVTFVDNHDTQPGEALESFVQGWFKPLAYATILTREQGYPQVFYGDYYGIPSDGVPSYRQQIDPLLKARQQYAYGRQHDYFDHWDVIGWTREGNASHPNSGLATIMSDGPGGSKWMYVGRQKAGEVWHDMTGNRSGTVTINQDGWGHFFVNGGSVSVWVKR

SEQ ID NO: 32825 - protein, 485 aa, Bacillus sp.
HHDGTNGTIMQYFEWNVPNDGQHWNRLHNNAQNLKNAGITAIWIPPAWKGTSQNDVGYGAYDLYDLGEFNQKGTVRTKYGTKAELERAIRSLKANGIQVYGDVVMNHKGGADFTERVQAVEVNPQNRNQEVSGTYQIEAWTGFNFPGRGNQHSSFKWRWYHFDGTDWDQSRQLANRIYKFRGDGKAWDWEVDTENGNYDYLPQADVDMDHPEVINELNRWGVWYANTLNLDGFRLDAVKHIKFSFMRDWLGHVRGQTGKNLFAVAEYWKNDLGALENYLSKTNWTMSAFDVPLHYNLYQASNSSGNYDMRNLLNGTLVQRHPSHAVTFVDNHDTQPGEALESFVQGWFKPLAYATILTREQGYPQVFYGDYYGIPSDGVPSYRQQIDPLLKARQQYAYGRQHDYFDHWDVIGWTREGNASHPNSGLATIMSDGPGGSKWMYVGRQKAGEVWHDMTGNRSGTVTINQDGWGHFFVNGGSVSVWVKR

SEQ ID NO: 32826 - protein, 483 aa, Bacillus sp.
HHDGTNGTIMQYFEWNVPNDGQHWNRLHNNAQNLKNAGITAIWIPPAWKGTSQNDVGYGAYDLYDLGEFNQKGTVRTKYGTKAELERAIRSLKANGIQVYGDVVMNHKGGADFTERVQAVEVNPQNRNQEVSGTYEIEAWTGFNFPGRGNQHSSFKWRWYHFDGTDWDQSRQLSNRIYKFRGKAWDWEVDTENGNYDYLMYADVDMNHPEVINELNRWGVWYANTLNLDGFRLDAVKHIQFSFMRNWLGHVRGQTGKNLFAVAEYWXNDLGALENYLSKTNWTMSAFDVPLHYNLYQASNSGGNYDMRNLLNGTLVQRHPSHAVTFVDNHDTQPGEALESFVQGWFKPLAYATILTREQGYPQVFYGDYYGIPSDGVPSYRQQIDPLLKARQQYAYGRQHDYFDHWDVIGWTREGNASHPNSGLATIMSDGPGGSKWMYVGRQKAGEVWHDITGNRSGTVTINQDGWGQFFVNGGSVSVWVKR

SEQ ID NO: 32827 - protein, 483 aa, Bacillus sp.
HHNGTNGTMMQYFEWYLPNDGNHWNRLNSDASNLKSKGIKAVWIPPAWKGASQNDVGYGAYDLYDLGEFNQKGTVRTKYGTRSQLQAAVTSLKNNGIQVYGDVVMNHKGGADATEMVRAVEVNPNNRNQEVTGEYTIEAWTRFDFPGRGNTHSSFKWRWYHFDGVDFDQSRKLNNRIYKFRGKAWDWEVDTEFGNYDYLMYVDYDYDHPESTNEMRNWGVWYTNTLGLDGFRIDAVKHIKYSFTRDWINHVRIATGKNMFAVAEFWKNDLGAIENYLQKTNWNHSVFDVPLHYNLYNASKSGGNYDMRNIFNGTVVQAHPSQAVTFVDNHDSQPEEALESFVDEWFKPLAYALTLTREQGYPSVFYGDYYGIPTHGVPAMRSKIDPILEARQKYAYGPQHDYLDHPDVIGWTREGDSSHPKSGLATLITDGPGGSKRMYAGLKNAGETWYDITGNRSDTVKIGSDGWGEFHVNDQSVSIYVQK

SEQ ID NO: 32828 - protein, 485 aa, Bacillus sp.
HHDGTNGTIMQYFEWNVPNDGQHWNRLHNNAQNLKNAGITAIWIPPAWKGTSQNDVGYGAYDLYDLGEFNQKGTVRTKYGTKAELERAIRSLKANGIQVYGDVVMNHKGGADFTERVQAVEVNPQNRNQEVSGTYQIEAWTGFNFPGRGNQHSSFKWRWYHFDGTDWDQSRQLANRIYKFRGDGKAWDWEVDTENGNYDYLPEADVDMDHPEVINELNRWGVWYANTLNLDGFRLDAVKHIKFSFMRDWLGHVRGQTGKNLFAVAEYWKNDLGALENYLSKTNWTMSAFDVPLHYNLYQASNSSGNYDMRNLLNGTLVQRHPSHAVTFVDNHDTQPGEALESFVQGWFKPLAYATILTREQGYPQVFYGDYYGIPSDGVPSYRQQIDPLLKARQQYAYGRQHDYFDHWDVIGWTREGNASHPNSGLATIMSDGPGGSKWMYVGRQKAGEVWHDMTGNRSGTVTINQDGWGHFFVNGGSVSVWVKR

SEQ ID NO: 32829 - protein, 485 aa, Bacillus sp.
HHDGTNGTIMQYFEWNVPNDGQHWNRLHNNAQNLKNAGITAIWIPPAWKGTSQNDVGYGAYDLYDLGEFNQKGTVRTKYGTKAELERAIRSLKANGIQVYGDVVMNHKGGADFTERVQAVEVNPQNRNQEVSGTYQIEAWTGFNFPGRGNQHSSFKWRWYHFDGTDWDQSRQLANRIYKFRGDGKAWDWEVDTENGNYDYLLHADVDMDHPEVINELNRWGVWYANTLNLDGFRLDAVKHIKFSFMRDWLGHVRGQTGKNLFAVAEYWKNDLGALENYLSKTNWTMSAFDVPLHYNLYQASNSSGNYDMRNLLNGTLVQRHPSHAVTFVDNHDTQPGEALESFVQGWFKPLAYATILTREQGYPQVFYGDYYGIPSDGVPSYRQQIDPLLKARQQYAYGRQHDYFDHWDVIGWTREGNASHPNSGLATIMSDGPGGSKWMYVGRQKAGEVWHDMTGNRSGTVTINQDGWGHFFVNGGSVSVWVKR

SEQ ID NO: 32830 - protein, 485 aa, Bacillus sp.
HHDGTNGTIMQYFEWNVPNDGQHWNRLHNNAQNLKNAGITAIWIPPAWKGTSQNDVGYGAYDLYDLGEFNQKGTVRTKYGTKAELERAIRSLKANGIQVYGDVVMNHKGGADFTERVQAVEVNPQNRNQEVSGTYQIEAWTGFNFPGRGNQHSSFKWRWYHFDGTDWDQSRQLANRIYKFRGDGKAWDWEVDTENGNYDYLPTADVDMDHPEVINELNRWGVWYANTLNLDGFRLDAVKHIKFSFMRDWLGHVRGQTGKNLFAVAEYWKNDLGALENYLSKTNWTMSAFDVPLHYNLYQASNSSGNYDMRNLLNGTLVQRHPSHAVTFVDNHDTQPGEALESFVQGWFKPLAYATILTREQGYPQVFYGDYYGIPSDGVPSYRQQIDPLLKARQQYAYGRQHDYFDHWDVIGWTREGNASHPNSGLATIMSDGPGGSKWMYVGRQKAGEVWHDMTGNRSGTVTINQDGWGHFFVNGGSVSVWVKR

SEQ ID NO: 32831 - protein, 485 aa, Bacillus sp.
HHDGTNGTIMQYFEWNVPNDGQHWNRLHNNAQNLKNAGITAIWIPPAWKGTSQNDVGYGAYDLYDLGEFNQKGTVRTKYGTKAELERAIRSLKANGIQVYGDVVMNHKGGADFTERVQAVEVNPQNRNQEVSGTYQIEAWTGFNFPGRGNQHSSFKWRWYHFDGTDWDQSRQLANRIYKFRGDGKAWDWEVDTENGNYDYLYPADVDMDHPEVINELNRWGVWYANTLNLDGFRLDAVKHIKFSFMRDWLGHVRGQTGKNLFAVAEYWKNDLGALENYLSKTNWTMSAFDVPLHYNLYQASNSSGNYDMRNLLNGTLVQRHPSHAVTFVDNHDTQPGEALESFVQGWFKPLAYATILTREQGYPQVFYGDYYGIPSDGVPSYRQQIDPLLKARQQYAYGRQHDYFDHWDVIGWTREGNASHPNSGLATIMSDGPGGSKWMYVGRQKAGEVWHDMTGNRSGTVTINQDGWGHFFVNGGSVSVWVKR

SEQ ID NO: 32832 - protein, 485 aa, Bacillus sp.
HHDGTNGTIMQYFEWNVPNDGQHWNRLHNNAQNLKNAGITAIWIPPAWKGTSQNDVGYGAYDLYDLGEFNQKGTVRTKYGTKAELERAIRSLKANGIQVYGDVVMNHKGGADFTERVQAVEVNPQNRNQEVSGTYEIEAWTGFNFPGRGNQHSSFKWRWYHFDGTDWDQSRQLSNRIYKFRGDGKAWDWEVDTEFGNYDYLMYADVDMNHPEVINELNRWGVWYANTLNLDGFRLDAVKHIQFSFMRNWLGHVRGQTGKNLFAVAEYWKNDLGALENYLSKTNWTMSAFDVPLHYNLYQASNSGGNYDMRNLLNGTLVQRHPSHAVTFVDNHDTQPGEALESFVQGWFKPLAYATILTREQGYPQVFYGDYYGIPSDGVPSYRQQIDPLLKARQQYAYGRQHDYFDHWDVIGWTREGNASHPNSGLATIMSDGPGGSKWMYVGRQKAGEVWHDITGNRSGTVTINQDGWGQFFVNGGSVSVWVKR

SEQ ID NO: 32833 - protein, 485 aa, Bacillus sp.
HHDGTNGTIMQYFEWNVPNDGQHWNRLHNNAQNLKNAGITAIWIPPAWKGTSQNDVGYGAYDLYDLGEFNQKGTVRTKYGTKAELERAIRSLKANGIQVYGDVVMNHKGGADFTERVQAVEVNPQNRNQEVSGTYQIEAWTGFNFPGRGNQHSSFKWRWYHFDGTDWDQSRQLANRIYKFRGDGKAWDWEVDTENGNYDYLIRADVDMDHPEVINELNRWGVWYANTLNLDGFRLDAVKHIKFSFMRDWLGHVRGQTGKNLFAVAEYWKNDLGALENYLSKTNWTMSAFDVPLHYNLYQASNSSGNYDMRNLLNGTLVQRHPSHAVTFVDNHDTQPGEALESFVQGWFKPLAYATILTREQGYPQVFYGDYYGIPSDGVPSYRQQIDPLLKARQQYAYGRQHDYFDHWDVIGWTREGNASHPNSGLATIMSDGPGGSKWMYVGRQKAGEVWHDMTGNRSGTVTINQDGWGHFFVNGGSVSVWVKR

SEQ ID NO: 32834 - protein, 485 aa, Bacillus sp.
HHDGTNGTIMQYFEWNVPNDGQHWNRLHNNAQNLKNAGITAIWIPPAWKGTSQNDVGYGAYDLYDLGEFNQKGTVRTKYGTKAELERAIRSLKANGIQVYGDVVMNHKGGADFTERVQAVEVNPQNRNQEVSGTYQIEAWTGFNFPGRGNQHSSFKWRWYHFDGTDWDQSRQLANRIYKFRGDGKAWDWEVDTENGNYDYRQYADVDMDHPEVINELNRWGVWYANTLNLDGFRLDAVKHIKFSFMRDWLGHVRGQTGKNLFAVAEYWKNDLGALENYLSKTNWTMSAFDVPLHYNLYQASNSSGNYDMRNLLNGTLVQRHPSHAVTFVDNHDTQPGEALESFVQGWFKPLAYATILTREQGYPQVFYGDYYGIPSDGVPSYRQQIDPLLKARQQYAYGRQHDYFDHWDVIGWTREGNASHPNSGLATIMSDGPGGSKWMYVGRQKAGEVWHDMTGNRSGTVTINQDGWGHFFVNGGSVSVWVKR

SEQ ID NO: 32835 - protein, 485 aa, Bacillus sp.
HHDGTNGTIMQYFEWNVPNDGQHWNRLHNNAQNLKNAGITAIWIPPAWKGTSQNDVGYGAYDLYDLGEFNQKGTVRTKYGTKAELERAIRSLKANGIQVYGDVVMNHKGGADFTERVQAVEVNPQNRNQEVSGTYQIEAWTGFNFPGRGNQHSSFKWRWYHFDGTDWDQSRQLANRIYKFRGDGKAWDWEVDTENGNYDYLMYADVDMDHPEVINELNRWGVWYANTLNLDGFRLDAVKHIKFSFMRDWLGHVRGQTGKNLFAVAEYWKNDLGALENYLSKTNGTMSAFDVPLHYNLYQASNSSGNYDMRNLLNGTLVQRHPSHAVTFVDNHDTQPGEALESFVQGWFKPLAYATILTREQGYPQVFYGDYYGIPSDGVPSYRQQIDPLLKARQQYAYGRQHDYFDHWDVIGWTREGNASHPNSGLATIMSDGPGGSKWMYVGRQKAGEVWHDMTGNRSGTVTINQDGWGHFFVNGRSVSVWVKR

SEQ ID NO: 32836 - protein, 485 aa, Bacillus sp.
HHDGTNGTIMQYFEWNVPNDGQHWNRLHNNAQNLKNAGITAIWIPPAWKGTSQNDVGYGAYDLYDLGEFNQKGTVRTKYGTKAELERAIRSLKANGIQVYGDVVMNHKGGADFTERVQAVEVNPQNRNQEVSGTYQIEAYTGFNFPGRGNQHSSFKWRWYHFDGTDWDQSRQLANRIYKFRGDGKAWDWEVDTENGNYDYLMYADVDMDHPEVINELNRWGVWYANTLNLDGFRLDAVKHIKFSFMRDWLGHVRGQTGKPLFAVAEYWKNDLGALENYLSKTNWTMSAFDVPLHYNLYQASNSRGNYDMRNLLNGTLVQRHPSHAVTFVDNHDTQPGEALESFVQGWFKPLAYATILTREQGYPQVFYGDYYGIPSDGVPSYRQQIDPLLKARQQYAYGRQHDYFDHWDVIGWTREGNASHPNSGLATIMSDGPGGSKWMYVGRQKAGEVWHDMTGNRSGTVTINQDGWGHFFVKGGSVSVWVKR

SEQ ID NO: 32837 - protein, 483 aa, Bacillus sp.
HHDGTNGTIMQYFEWNVPNDGQHWNRLHNNAQNLKNAGITAIWIPPAWKGTSQNDVGYGAYDLYDLGEFNQKGTVRTKYGTKAELERAIRSLKANGIQVYGDVVMNHKGGADFTERVQAVEVNPQNRNQEVSGTYQIEAWTGFNFPGRGNQHSSFKWRWYHFDGTDWDQSRQLANRIYKFDGKAWDWEVDTENGNYDYLMYADVDMDHPEVINXLNRWGVWYANTLNLDGFRLDAVKHIKFSFMRDWLGHVRGQTGKNLFAVAEYWKNDLGALENYLSKTNWTMSAFDVPLHYNLYQASNSSGNYDMRNLLNGTLVQRHPSHAVTFVDNHDTQPGEALESFVQGWFKPLAYATILTREQGYPQVFYGDYYGIPSDGVPSYRQQIDPLLKARQQYAYGRQHDYFDHWDVIGWTREGNASHPNSGLATIMSDGPGGSKWMYVGRQKAGEVWHDMTGNRSGTVTINQDGWGHFFVNGGSVSVWVKR

SEQ ID NO: 32838 - protein, 485 aa, Bacillus sp. (in: firmicutes)
HHDGTNGTIMQYFEWNVPNDGQHWNRLHNNAQNLKNAGITAIWIPPAWKGTSQNDVGYGAYDLYDLGEFNQKGTVRTKYGTKAELERAIRSLKANGIQVYGDVVMNHKGGADFTERVQAVEVNPQNRNQEVSGTYQIEAWTGFNFPGRGNQHSSFKWRWYHFDGTDWDQSRQLANRIYKFRGDGKAWDWPVDTENGNYDYLMYADVDMDHPEVINELNRWGVWYANTLNLDGFRLDAVKHIKFSFMRDWLGHVRGQTGKNLFAVAEYWKNDLGALENYLSITNWTMSAFDVPLHYNLYQASNSSGNYDMRNLLNGTLVQRHPSHAVTFVDNHDTQPGEALESFVQGWFKPLAYATILTREQGYPQVFYGDYYGIPSDGVPSYRQQIDPLLKARQQYAYGRQHDYFDHWDVIGWTREGNASHPNSGLATIMSDGPGGSKWMYVGRQKAGEVWHDMTGNRSGTVTINQDGWGHFFVNGGSVSVWVKR

SEQ ID NO: 32839 - protein, 485 aa, Bacillus sp.
HHDGTNGTIMQYFEWNVPNDGQHWNRLHNNAQNLKNAGITAIWIPPAWKGTSQNDVGYGAYDLYDLGEFNQKGTVRTKYGTKAELERAIRSLKANGIQVYGDVVMNHKGGADFTERVQAVEVNPQNRNQEVSGTYQIEAWTGFNFPGRGNQHSSFKWRWYHFDGTDWDQSRQLANRIYKFRGDGKAWDWEVDTENGNYDYLYSADVDMDHPEVINELNRWGVWYANTLNLDGFRLDAVKHIKFSFMRDWLGHVRGQTGKNLFAVAEYWKNDLGALENYLSKTNWTMSAFDVPLHYNLYQASNSSGNYDMRNLLNGTLVQRHPSHAVTFVDNHDTQPGEALESFVQGWFKPLAYATILTREQGYPQVFYGDYYGIPSDGVPSYRQQIDPLLKARQQYAYGRQHDYFDHWDVIGWTREGNASHPNSGLATIMSDGPGGSKWMYVGRQKAGEVWHDMTGNRSGTVTINQDGWGHFFVNGGSVSVWVKR

SEQ ID NO: 32840 - protein, 485 aa, Bacillus sp.
HHDGTNGTIMQYFEWNVPNDGQHWNRLHNNAQNLKNAGITAIWIPPAWKGTSQNDVGYGAYDLYDLGEFNQKGTVRTKYGTKAELERAIRSLKANGIQVYGDVVMNHKGGADFTERVQAVEVNPQNRNQEVSGTYQIEAWTGFNFPGRGNQHSSFKWRWYHFDGTDWDQSRQLANRIYKFRGDGKAWDWEVDTENGNYDDLLYADVDMDHPEVINELNRWGVWYANTLNLDGFRLDAVKHIKFSFMRDWLGHVRGQTGKNLFAVAEYWKNDLGALENYLSKTNWTMSAFDVPLHYNLYQASNSSGNYDMRNLLNGTLVQRHPSHAVTFVDNHDTQPGEALESFVQGWFKPLAYATILTREQGYPQVFYGDYYGIPSDGVPSYRQQIDPLLKARQQYAYGRQHDYFDHWDVIGWTREGNASHPNSGLATIMSDGPGGSKWMYVGRQKAGEVWHDMTGNRSGTVTINQDGWGHFFVNGGSVSVWVKR

SEQ ID NO: 32841 - protein, 485 aa, Bacillus sp.
HHDGTNGTIMQYFEWNVPNDGQHWNRLHNNAQNLKNAGITAIWIPPAWKGTSQNDVGYGAYDLYDLGEFNQKGTVRTKYGTKAELERAIRSLKANGIQVYGDVVMNHKGGADFTERVQAVEVNPQNRNQEVSGTYQIEAWTGFNFPGRGNQHSSFKWRWYHFDGTDWDQSRQLANRIYKFRGDGKAWDWEVDTENGNYDELLYADVDMDHPEVINELNRWGVWYANTLNLDGFRLDAVKHIKFSFMRDWLGHVRGQTGKNLFAVAEYWKNDLGALENYLSKTNWTMSAFDVPLHYNLYQASNSSGNYDMRNLLNGTLVQRHPSHAVTFVDNHDTQPGEALESFVQGWFKPLAYATILTREQGYPQVFYGDYYGIPSDGVPSYRQQIDPLLKARQQYAYGRQHDYFDHWDVIGWTREGNASHPNSGLATIMSDGPGGSKWMYVGRQKAGEVWHDMTGNRSGTVTINQDGWGHFFVNGGSVSVWVKR

SEQ ID NO: 32842 - protein, 483 aa, Bacillus sp. (in: firmicutes)
HHDGTNGTIMQYFEWNVPNDGQHWNRLHNNAQNLKNAGITAIWIPPAWKGTSQNDVGYGAYDLYDLGEFNQKGTVRTKYGTKAELERAIRSLKANGIQVYGDVVMNHKGGADFTECVQAVEVNPQNRNQEVMGTYSIEAWTGFNFPGRGNQHSSFKWRWYHFDGTDWDQSRQLANRIYKFQGKAWDWEVDTEFGNYDYLMYADVDMDHPEVINELNRWGVWYANTLNLDGFRLDAVKHIKFSFMRDWLGHVRGQTGKNLFAVAEYWKNDLGALENYLSKTNWTMSAFDVPLHYNLYQASNSSGNYDMRNLLNGTLVQRHPSHAVTFVDNHDTQPGEALESFVQGWFKPLAYATILTREQGYPSVFYGDYYGIPSDGVPSYRQQIDPLLKARQQYAYGRQHDYFDHWDVIGWTREGNASHPNSGLATIMSDGPGGSKWMYVGRQKAGEVWHDMTGNRSGTVTINQDGWGHFFVNGGSVSVWVKR

SEQ ID NO: 32843 - protein, 485 aa, Bacillus sp.
HHDGTNGTIMQYFEWNVPNDGQHWNRLHNNAQNLKNAGITAIWIPPAWKGTSQNDVGYGAYDLYDLGEFNQKGTVRTKYGTKAELERAIRSLKANGIQVYGDVVMNHKGGADFTERVQAVEVNPQNRNQEVSGTYQIEAWTGFNFPGRGNQHSSFKWRWYHFDGTDWDQSRQLANRIYKFRGDGKAWDWEVDTENGNYDYTQYADVDMDHPEVINELNRWGVWYANTLNLDGFRLDAVKHIKFSFMRDWLGHVRGQTGKNLFAVAEYWKNDLGALENYLSKTNWTMSAFDVPLHYNLYQASNSSGNYDMRNLLNGTLVQRHPSHAVTFVDNHDTQPGEALESFVQGWFKPLAYATILTREQGYPQVFYGDYYGIPSDGVPSYRQQIDPLLKARQQYAYGRQHDYFDHWDVIGWTREGNASHPNSGLATIMSDGPGGSKWMYVGRQKAGEVWHDMTGNRSGTVTINQDGWGHFFVNGGSVSVWVKR

SEQ ID NO: 32844 - protein, 483 aa, Bacillus sp. (in: firmicutes)
HHDGTNGTIMQYFEWNVPNDGQHWNRLHNNAQNLKNAGITAIWIPPAWKGTSQNDVGYGAYDLYDLGEFNQKGTVRTKYGTKAELERAIRSLKANGIQVYGDVVMNHKGGADFTERVQAVEVNPQNRNQEVSGTYQIEAWTGFNFPGRGNQHSSFKWRWYHFDGTDWDFARQLANRIYKFRGKAWDWEVDTENGNYDYLMYADVDMDHPEVINELNRWGVWYANTLNLDGFRLDAVKHIKFSFMRDWLGHVRGQTGKNLFAVAEYWKNDLGALENYLSKTNWTMSAFDVPLHYNLYQASNSSGNYDMRNLLNGTLVQRHPSHAVTFVDNHDTQPGEALESFVQGWFKPLAYATILTREQGYPQVFYGDYYGIPSDGVPSYRQQIDPLLKARQQYAYGRQHDYFDHWDVIGWTREGNASHPNSGLATIMSDGPGGSKWMYVGRQKAGEVWHDMTGNRSGTVTINQDGWGHFFVNGGSVSVWVKR

SEQ ID NO: 32845 - protein, 485 aa, Bacillus sp.
HHDGTNGTIMQYFEWNVPNDGQHWNRLHNNAQNLKNAGITAIWIPPAWKGTSQNDVGYGAYDLYDLGEFNQKGTVRTKYGTKAELERAIRSLKANGIQVYGDVVMNHKGGADFTERVQAVEVNPQNRNQEVSGTYQIEAWTGFNFPGRGNQHSSFKWRWYHFDGTDWDQSRQLANRIYKFRGDGKAWDWEVDTENGNYDYQQYADVDMDHPEVINELNRWGVWYANTLNLDGFRLDAVKHIKFSFMRDWLGHVRGQTGKNLFAVAEYWKNDLGALENYLSKTNWTMSAFDVPLHYNLYQASNSSGNYDMRNLLNGTLVQRHPSHAVTFVDNHDTQPGEALESFVQGWFKPLAYATILTREQGYPQVFYGDYYGIPSDGVPSYRQQIDPLLKARQQYAYGRQHDYFDHWDVIGWTREGNASHPNSGLATIMSDGPGGSKWMYVGRQKAGEVWHDMTGNRSGTVTINQDGWGHFFVNGGSVSVWVKR

SEQ ID NO: 32846 - protein, 485 aa, Bacillus sp.
HHDGTNGTIMQYFEWNVPNDGQHWNRLHNNAQNLKNAGITAIWIPPAWKGTSQNDVGYGAYDLYDLGEFNQKGTVRTKYGTKAELERAIRSLKANGIQVYGDVVMNHKGGADFTERVQAVEVNPQNRNQEVSGTYQIEAYTGFNFPGRGNQHSSFKWRWYHFDGTDWDQSRQLANRIYKFRGDGKAWDWEVDTENGNYDYLMYADVDMDHPEVINELNRWGVWYANTLNLDGFRLDAVKHIKFSFMRDWLGHVRGQTGKPLFAVAEYWKNDLGALENYLSKTNWTMSAFDVPLHYNLYQASNSRGNYDMRNLLNGTLVQRHPSHAVTFVDNHDTQPGEALESFVQGWFKPLAYATILTREQGYPQVFYGDYYGIPSDGVPSYRQQIDPLLKARQQYAYGRQHDYFDHWDVIGWTREGNASHPNSGLATIMSDGPGGSKWMYVGRQKAGEVWHDMTGNRSGTVTINQDGWGHFFVNGKSVSVWVKR

SEQ ID NO: 32847 - protein, 483 aa, Bacillus sp.
HHDGTNGTIMQYFEWNVPNDGQHWNRLHNNAQNLKNAGITAIWIPPAWKGTSQNDVGYGAYDLYDLGEFNQKGTVRTKYGTKAELERAIRSLKANGIQVYGDVVMNHKGGADFTERVQAVEVNPQNRNQEVSGTYEIEAWTGFNFPGRGNQHSSFKWRWYHFDGTDWDQSRQLSNRIYKFRGKAWDWEVDTENGNYDYLMYADXDMNHPEVINELNRWGVWYANTLNLDGFRLDAVKHIQFSFMRNWLGHVRGQTGKNLFAVAEYWKNDLGALENYLSKTNWTMSAFDVPLHYNLYQASNSGGNYDMRNLLNGTLVQRHPSHAVTFVDNHDTQPGEALESFVQGWFKPLAYATILTREQGYPQVFYGDYYGIPSDGVPSYRQQIDPLLKARQQYAYGRQHDYFDHWDVIGWTREGNASHPNSGLATIMSDGPGGSKWMYVGRQKAGEVWHDITGNRSGTVTINQDGWGQFFVNGGSVSVWVKR

SEQ ID NO: 32848 - protein, 485 aa, Bacillus sp.
HHDGTNGTIMQYFEWNVPNDGQHWNRLHNNAQNLKNAGITAIWIPPAWKGTSQNDVGYGAYDLYDLGEFNQKGTVRTKYGTKAELERAIRSLKANGIQVYGDVVMNHKGGADFTERVQAVEVNPQNRNQEVSGTYQIEAWTGFNFPGRGNQHSSFKWRWYHFDGTDWDQSRQLANRIYKFRGDGKAWDWEVDTENGNYDYLNDADVDMDHPEVINELNRWGVWYANTLNLDGFRLDAVKHIKFSFMRDWLGHVRGQTGKNLFAVAEYWKNDLGALENYLSKTNWTMSAFDVPLHYNLYQASNSSGNYDMRNLLNGTLVQRHPSHAVTFVDNHDTQPGEALESFVQGWFKPLAYATILTREQGYPQVFYGDYYGIPSDGVPSYRQQIDPLLKARQQYAYGRQHDYFDHWDVIGWTREGNASHPNSGLATIMSDGPGGSKWMYVGRQKAGEVWHDMTGNRSGTVTINQDGWGHFFVNGGSVSVWVKR

SEQ ID NO: 32849 - protein, 485 aa, Bacillus sp.
HHDGTNGTIMQYFEWNVPNDGQHWNRLHNNAQNLKNAGITAIWIPPAWKGTSQNDVGYGAYDLYDLGEFNQKGTVRTKYGTKAELERAIRSLKANGIQVYGDVVMNHKGGADFTERVQAVEVNPQNRNQEVSGTYQIEAWTGFNFPGRGNQHSSFKWRWYHFDGTDWDQSRQLANRIYKFRGDGKAWDWEVDTENGNYDYLIEADVDMDHPEVINELNRWGVWYANTLNLDGFRLDAVKHIKFSFMRDWLGHVRGQTGKNLFAVAEYWKNDLGALENYLSKTNWTMSAFDVPLHYNLYQASNSSGNYDMRNLLNGTLVQRHPSHAVTFVDNHDTQPGEALESFVQGWFKPLAYATILTREQGYPQVFYGDYYGIPSDGVPSYRQQIDPLLKARQQYAYGRQHDYFDHWDVIGWTREGNASHPNSGLATIMSDGPGGSKWMYVGRQKAGEVWHDMTGNRSGTVTINQDGWGHFFVNGGSVSVWVKR

SEQ ID NO: 32850 - protein, 485 aa, Bacillus sp.
HHDGTNGTIMQYFEWNVPNDGQHWNRLHNNAQNLKNAGITAIWIPPAWKGTSQNDVGYGAYDLYDLGEFNQKGTVRTKYGTKAELERAIRSLKANGIQVYGDVVMNHKGGADFTERVQAVEVNPQNRNQEVSGTYQIEAWTGFNFPGRGNQHSSFKWRWYHFDGTDWDQSRQLANRIYKFRGDGKAWDWEVDTENGNYDWLLYADVDMDHPEVINELNRWGVWYANTLNLDGFRLDAVKHIKFSFMRDWLGHVRGQTGKNLFAVAEYWKNDLGALENYLSKTNWTMSAFDVPLHYNLYQASNSSGNYDMRNLLNGTLVQRHPSHAVTFVDNHDTQPGEALESFVQGWFKPLAYATILTREQGYPQVFYGDYYGIPSDGVPSYRQQIDPLLKARQQYAYGRQHDYFDHWDVIGWTREGNASHPNSGLATIMSDGPGGSKWMYVGRQKAGEVWHDMTGNRSGTVTINQDGWGHFFVNGGSVSVWVKR

SEQ ID NO: 32851 - protein, 485 aa, Bacillus sp.
HHDGTNGTIMQYFEWNVPNDGQHWNRLHNNAQNLKNAGITAIWIPPAWKGTSQNDVGYGAYDLYDLGEFNQKGTVRTKYGTKAELERAIRSLKANGIQVYGDVVMNHKGGADFTERVQAVEVNPQNRNQEVSGTYQIEAWTGFNFPGRGNQHSSFKWRWYHFDGTDWDQSRQLANRIYKFRGDGKAWDWEVDTENGNYDWLQYADVDMDHPEVINELNRWGVWYANTLNLDGFRLDAVKHIKFSFMRDWLGHVRGQTGKNLFAVAEYWKNDLGALENYLSKTNWTMSAFDVPLHYNLYQASNSSGNYDMRNLLNGTLVQRHPSHAVTFVDNHDTQPGEALESFVQGWFKPLAYATILTREQGYPQVFYGDYYGIPSDGVPSYRQQIDPLLKARQQYAYGRQHDYFDHWDVIGWTREGNASHPNSGLATIMSDGPGGSKWMYVGRQKAGEVWHDMTGNRSGTVTINQDGWGHFFVNGGSVSVWVKR

SEQ ID NO: 32852 - protein, 485 aa, Bacillus sp.
HHDGTNGTIMQYFEWNVPNDGQHWNRLHNNAQNLKNAGITAIWIPPAWKGTSQNDVGYGAYDLYDLGEFNQKGTVRTKYGTKAELERAIRSLKANGIQVYGDVVMNHKGGADFTERVQAVEVNPQNRNQEVSGTYQIEAWTGFNFPGRGNQHSSFKWRWYHFDGTDWDQSRQLANRIYKFRGDGKAWDWEVDTENGNYDYQYYADVDMDHPEVINELNRWGVWYANTLNLDGFRLDAVKHIKFSFMRDWLGHVRGQTGKNLFAVAEYWKNDLGALENYLSKTNWTMSAFDVPLHYNLYQASNSSGNYDMRNLLNGTLVQRHPSHAVTFVDNHDTQPGEALESFVQGWFKPLAYATILTREQGYPQVFYGDYYGIPSDGVPSYRQQIDPLLKARQQYAYGRQHDYFDHWDVIGWTREGNASHPNSGLATIMSDGPGGSKWMYVGRQKAGEVWHDMTGNRSGTVTINQDGWGHFFVNGGSVSVWVKR

SEQ ID NO: 32853 - protein, 485 aa, Bacillus sp.
HHDGTNGTIMQYFEWNVPNDGQHWNRLHNNAQNLKNAGITAIWIPPAWKGTSQNDVGYGAYDLYDLGEFNQKGTVRTKYGTKAELERAIRSLKANGIQVYGDVVMNHKGGADFTERVQAVEVNPQNRNQEVSGTYQIEAWTGFNFPGRGNQHSSFKWRWYHFDGTDWDQSRQLANRIYKFRGDGKAWDWEVDTENGNYDYQPYADVDMDHPEVINELNRWGVWYANTLNLDGFRLDAVKHIKFSFMRDWLGHVRGQTGKNLFAVAEYWKNDLGALENYLSKTNWTMSAFDVPLHYNLYQASNSSGNYDMRNLLNGTLVQRHPSHAVTFVDNHDTQPGEALESFVQGWFKPLAYATILTREQGYPQVFYGDYYGIPSDGVPSYRQQIDPLLKARQQYAYGRQHDYFDHWDVIGWTREGNASHPNSGLATIMSDGPGGSKWMYVGRQKAGEVWHDMTGNRSGTVTINQDGWGHFFVNGGSVSVWVKR

SEQ ID NO: 32854 - protein, 483 aa, Bacillus sp. (in: firmicutes)
HHDGTNGTIMQYFEWEVPNDGQHWNRLHNNAQNLKNAGITAIWIPPAWKGTSQNDVGYGAYDLYDLGEFNQKGTVRTKYGTKAELERAIRSLKANGIQVYGDVVMNHKGGADFTERVQAVEVNPQNRNQEVSGTYQIEAWTGFNFPGRGNQHSSFKWRWYHFDGTDWDQSRQLANRIYKFRGKAWDWEVDTEFGNYDYLMYADVDMDHPEVINELNRWGVWYANTLNLDGFRLDAVKHIKFSFMRDWLGHVRGQTGKNLFAVAEYWKNDLGALENYLSKTNWTMSAFDVPLHYNLYQASNSSGNYDMRNLLNGTLVQRHPSHAVTFVDNHDTQPDEALESFVQGWFKPLAYATILTREQGYPSVFYGDYYGIKSNGVPSYRQQIDPLLKARQQYAYGRQHDYFDHWDVIGWTREGNASHPNSGLATIMSDGPGGSKWMYVGRQKAGEVWHDMTGNRSGTVTINQDGWGHFFVNGGSVSVWVKR

SEQ ID NO: 32855 - protein, 485 aa, Bacillus sp.
HHDGTNGTIMQYFEWNVPNDGQHWNRLHNNAQNLKNAGITAIWIPPAWKGTSQNDVGYGAYDLYDLGEFNQKGTVRTKYGTKAELERAIRSLKANGIQVYGDVVMNHKGGADFTERVQAVEVNPQNRNQEVSGTYQIEAWTGFNFPGRGNQHSSFKWRWYHFDGTDWDQSRQLANRIYKFRGDGKAWDWEVDTENGNYDYVLYADVDMDHPEVINELNRWGVWYANTLNLDGFRLDAVKHIKFSFMRDWLGHVRGQTGKNLFAVAEYWKNDLGALENYLSKTNWTMSAFDVPLHYNLYQASNSSGNYDMRNLLNGTLVQRHPSHAVTFVDNHDTQPGEALESFVQGWFKPLAYATILTREQGYPQVFYGDYYGIPSDGVPSYRQQIDPLLKARQQYAYGRQHDYFDHWDVIGWTREGNASHPNSGLATIMSDGPGGSKWMYVGRQKAGEVWHDMTGNRSGTVTINQDGWGHFFVNGGSVSVWVKR

SEQ ID NO: 32856 - protein, 485 aa, Bacillus sp.
HHDGTNGTIMQYFEWNVPNDGQHWNRLHNNAQNLKNAGITAIWIPPAWKGTSQNDVGYGAYDLYDLGEFNQKGTVRTKYGTKAELERAIRSLKANGIQVYGDVVMNHKGGADFTERVQAVEVNPQNRNQEVSGTYQIEAWTGFNFPGRGNQHSSFKWRWYHFDGTDWDQSRQLANRIYKFRGDGKAWDWEVDTENGNYDYQIYADVDMDHPEVINELNRWGVWYANTLNLDGFRLDAVKHIKFSFMRDWLGHVRGQTGKNLFAVAEYWKNDLGALENYLSKTNWTMSAFDVPLHYNLYQASNSSGNYDMRNLLNGTLVQRHPSHAVTFVDNHDTQPGEALESFVQGWFKPLAYATILTREQGYPQVFYGDYYGIPSDGVPSYRQQIDPLLKARQQYAYGRQHDYFDHWDVIGWTREGNASHPNSGLATIMSDGPGGSKWMYVGRQKAGEVWHDMTGNRSGTVTINQDGWGHFFVNGGSVSVWVKR

SEQ ID NO: 32857 - protein, 485 aa, Bacillus sp.
HHDGTNGTIMQYFEWNVPNDGQHWNRLHNNAQNLKNAGITAIWIPPAWKGTSQNDVGYGAYDLYDLGEFNQKGTVRTKYGTKAELERAIRSLKANGIQVYGDVVMNHKGGADFTERVQAVEVNPQNRNQEVSGTYQIEAWTGFNFPGRGNQHSSFKWRWYHFDGTDWDQSRQLANRIYKFRGDGKAWDWEVDTENGNYDYLMYADVDMDHPEVINELNRWGVWYANTLNLDGFRLDAVKHIKFSFMRDWLGHVRGQTGKNLFAVAEYWKNDLGALENYLSKTNWTMSAFDVPLHYNLYQASNSSGNYDMRNLLNGTLVQRHPSHAVTFVDNHDTQPGEALESFVQGWFKPLAYATILTREQGYPQVFYGDYYGIPSDGVPSYRQQIDPLLKARQQYAYGRQHDYFDHWDVIGWTREGNASHPNSGLATIMSDGPGGSKNMYVGRQKAGEVWHDMTGNRSGTVTINQDGWGHFFVNKGSVSVWVKR

SEQ ID NO: 32858 - protein, 485 aa, Bacillus sp.
HHDGTNGTIMQYFEWNVPNDGQHWNRLHNNAQNLKNAGITAIWIPPAWKGTSQNDVGYGAYDLYDLGEFNQKGTVRTKYGTKAELERAIRSLKANGIQVYGDVVMNHKGGADFTERVQAVEVNPQNRNQEVSGTYQIEAWTGFNFPGRGNQHSSFKWRWYHFDGTDWDQSRQLANRIYKFRGDGKAWDWEVDTENGNYDYLMYADVDMDHPEVINXLNRWGVWYANTLNLDGFRLDAVKHIKFSFMRDWLGHVRGQTGKNLFAVAEYWXNDLGALENYLSKTNWTMSAFDVPLHYNLYQASNSSGNYDMRNLLNGTLVQRHPSHAVTFVDNHDTQPGEALESFVQGWFKPLAYATILTREQGYPQVFYGDYYGIPSDGVPSYRQQIDPLLKARQQYAYGRQHDYFDHWDVIGWTREGNASHPNSGLATIMSDGPGGSKWMYVGRQKAGEVWHDMTGNRSGTVTINQDGWGHFFVNGGSVSVWVKR

SEQ ID NO: 32859 - protein, 485 aa, Bacillus sp.
HHDGTNGTIMQYFEWNVPNDGQHWNRLHNNAQNLKNAGITAIWIPPAWKGTSQNDVGYGAYDLYDLGEFNQKGTVRTKYGTKAELERAIRSLKANGIQVYGDVVMNHKGGADFTERVQAVEVNPQNRNQEVSGTYQIEAWTGFNFPGRGNQHSSFKWRWSHFDGTDWDQSRQLANRIYKFRGDGKAWDWEVDTENGNYDYLMYADVDMDHPDVINELNRWGVWYANTLNLDGFRLDAVKHIKFSFMRDWLGHVRGQTGKNLFAVAEYWKNDLGALENYLSKTNWTMSAFDVPLHYNLYQASNSSGNYDMRNLLNGTLVQRHPSHAVTFVDNHDTQPGEALESFVQGWFKPLAYATILTREQGYPQVFYGDYYGIPSDGVPSYRQQIDPLLKARQQYAYGRQHDYFDHWDVIGWTREGNASHPNSGLATIMSDGPGGSKWMYVGRQKAGEVWHDMTGNRSGTVTINQDGWGHFFVNGGSVSVWVKR

SEQ ID NO: 32860 - protein, 485 aa, Bacillus sp.
HHDGTNGTIMQYFEWNVPNDGQHWNRLHNNAQNLKNAGITAIWIPPAWKGTSQNDVGYGAYDLYDLGEFNQKGTVRTKYGTKAELERAIRSLKANGIQVYGDVVMNHKGGADFTERVQAVEVNPQNRNQEVSGTYQIEAWTGFNFPGRGNQHSSFKWRWYHFDGTDWDQSRQLANRIYKFRGDGKAWDWEVDTENGNYDYLLNADVDMDHPEVINELNRWGVWYANTLNLDGFRLDAVKHIKFSFMRDWLGHVRGQTGKNLFAVAEYWKNDLGALENYLSKTNWTMSAFDVPLHYNLYQASNSSGNYDMRNLLNGTLVQRHPSHAVTFVDNHDTQPGEALESFVQGWFKPLAYATILTREQGYPQVFYGDYYGIPSDGVPSYRQQIDPLLKARQQYAYGRQHDYFDHWDVIGWTREGNASHPNSGLATIMSDGPGGSKWMYVGRQKAGEVWHDMTGNRSGTVTINQDGWGHFFVNGGSVSVWVKR

SEQ ID NO: 32861 - protein, 483 aa, Bacillus sp. (in: firmicutes)
HHDGTNGTIMQYFEWNVPNDGQHWNRLHNNAQNLKNAGITAIWIPPAWKGTSQNDVGYGAYDLYDLGEFNQKGTVRTKYGTKAELERAIRSLKANGIQVYGDVVMNHKGGADFTERVQAVEVNPQNRNQDVSGYYQIEAWTGFNFPGRGNQHSSFKWRWYHFDGTDWDQSRQLANRIYKFHGKAWDWEVDTEFGNYDYLMYADVDMDHPEVINELNRWGVWYANTLNLDGFRLDAVKHIKFSFMRDWLGHVRGQTGKNLFAVAEYWKNDLGALENYLSKTNWTMSAFDVPLHYNLYQASNSSGNYDMRNLLNGTLVQRHPSHAVTFVDNHDTQPGEALESFVQGWFKPLAYATILTREQGYPSVFYGDYYGIPSDGVPSYRQQIDPLLKARQQYAYGRQHDYFDHWDVIGWTREGNASHPNSGLATIMSDGPGGSKWMYVGRQKAGEVWHDMTGNRSGTVTINQDGWGHFFVNGGSVSVWVKR

SEQ ID NO: 32862 - protein, 485 aa, Bacillus sp. (in: firmicutes)
HHDGTNGTIMQYFEWNVPNDGQHWNRLHNNAQNLKNAGITAIWIPPAWKGTSQNDVGYGAYDLYDLGEFNQKGTVRTKYGTKAELERAIRSLKANGIQVYGDVVMNHKGGADFTERVQAVEVNPQNRNQEVSGTYQIEAWTGFNFPGRGNQHSSFKWRWYHFDGTDWDQSRQLANRIYKFRGDGKAWDWPVDTENGNYDYLMYADVDMDHPEVINELNRWGVWYANTLNLDGFRLDAVKHIKFFFMRDWLGHVRGQTGKNLFAVAEYWKNDLGALENYLSKTNWTMSAFDVPLHYNLYQASNSSGNYDMRNLLNGTLVQRHPSHAVTFVDNHDTQPGEALESFVQGWFKPLAYATILTREQGYPQVFYGDYYGIPSDGVPSYRQQIDPLLKARQQYAYGRQHDYFDHWDVIGWTREGNASHPNSGLATIMSDGPGGSKWMYVGRQKAGEVWHDMTGNRSGTVTINQDGWGHFFVNGGSVSVWVKR

SEQ ID NO: 32863 - protein, 483 aa, Bacillus sp. (in: firmicutes)
HHDGTNGTIMQYFEWNVPNDGQHWNRLHNNAQNLKNAGITAIWIPPAWKGTSQNDVGYGAYDLYDLGEFNQKGTVRTKYGTKAELERAIRSLKANGIQVYGDVVMNHKGGADFTERVQAVEVNPQNRNQTVSGYYQIEAWTGFNFPGRGNQHSSFKWRWYHFDGTDWDQSRQLANRIYKFRGKKWDWEVDTEFGNYDYLMYADVDMDHPEVINELNRWGVWYANTLNLDGFRLDAVKHIKFSFMRDWLGHVRGQTGKNLFAVAEYWKNDLGALENYLSKTNWTMSAFDVPLHYNLYQASNSSGNYDMRNLLNGTLVQRHPSHAVTFVDNHDTQPGEALESFVQGWFKPLAYATILTREQGYPSVFYGDYYGIPSDGVPSYRQQIDPLLKARQQYAYGRQHDYFDHWDVIGWTREGNASHPNSGLATIMSDGPGGSKWMYVGRQKAGEVWHDMTGNRSGTVTINQDGWGHFFVNGGSVSVWVKR

SEQ ID NO: 32864 - protein, 485 aa, Bacillus sp.
HHDGTNGTIMQYFEWNVPNDGQHWNRLHNNAQNLKNAGITAIWIPPAWKGTSQNDVGYGAYDLYDLGEFNQKGTVRTKYGTKAELERAIRSLKANGIQVYGDVVMNHKGGADFTERVQAVEVNPQNRNQEVSGTYQIEAWTGFNFPGRGNQHSSFKWRWYHFDGTDWDQSRQLANRIYKFRGDGKAWDWEVDTENGNYDYLLRADVDMDHPEVINELNRWGVWYANTLNLDGFRLDAVKHIKFSFMRDWLGHVRGQTGKNLFAVAEYWKNDLGALENYLSKTNWTMSAFDVPLHYNLYQASNSSGNYDMRNLLNGTLVQRHPSHAVTFVDNHDTQPGEALESFVQGWFKPLAYATILTREQGYPQVFYGDYYGIPSDGVPSYRQQIDPLLKARQQYAYGRQHDYFDHWDVIGWTREGNASHPNSGLATIMSDGPGGSKWMYVGRQKAGEVWHDMTGNRSGTVTINQDGWGHFFVNGGSVSVWVKR

SEQ ID NO: 32865 - protein, 483 aa, Bacillus sp. (in: firmicutes)
HHDGTNGTIMQYFEWNVPNDGQHWNRLHNNAQNLKNAGITAIWIPPAWKGTSQNDVGYGAYDLYDLGEFNQKGTVRTKYGTKAELERAIRSLKANGIQVYGDVVMNHKGGADFTERVQAVEVNPQNRNQIVSGAYQIEAWTGFNFPGRGNQHSSFKWRWYHFDGTDWDQSRQLANRIYKFNGKAWDWEVDTEFGNYDYLMYADVDMDHPEVINELNRWGVWYANTLNLDGFRLDAVKHIKFSFMRDWLGHVRGQTGKNLFAVAEYWKNDLGALENYLSKTNWTMSAFDVPLHYNLYQASNSSGNYDMRNLLNGTLVQRHPSHAVTFVDNHDTQPGEALESFVQGWFKPLAYATILTREQGYPSVFYGDYYGIPSDGVPSYRQQIDPLLKARQQYAYGRQHDYFDHWDVIGWTREGNASHPNSGLATIMSDGPGGSKWMYVGRQKAGEVWHDMTGNRSGTVTINQDGWGHFFVNGGSVSVWVKR

SEQ ID NO: 32866 - protein, 485 aa, Bacillus sp.
HHDGTNGTIMQYFEWNVPNDGQHWNRLHNNAQNLKNAGITAIWIPPAWKGTSQNDVGYGAYDLYDLGEFNQKGTVRTKYGTKAELERAIRSLKANGIQVYGDVVMNHKGGADFTERVQAVEVNPQNRNQEVSGTYQIEAYTGFNFPGRGNQHSSFKWRWYHFDGTDWDQSRQLANRIYKFRGDGKAWDWEVDTENGNYDYLMYADVDMDHPEVINELNRWGVWYANTLNLDGFRLDAVKHIKFSFMRDWLGHVRGQTGKNLFAVAEYWKNDLGALENYLSKTNWTMSAFDVPLHYNLYQASNSSGNYDMRNLLNGTLVQRHPSHAVTFVDNHDTQPGEALESFVQGWFKPLAYATILTREQGYPQVFYGDYYGIPSDGVPSYRQQIDPLLKARQQYAYGRQHDYFDHWDVIGWTREGNASHPNSGLATIMSDGPGGSKTMYVGRQKAGEVWHDMTGNRSGTVTINQDGWGHFFVNGGSVSVWVKR

SEQ ID NO: 32867 - protein, 485 aa, Bacillus sp.
HHDGTNGTIMQYFEWNVPNDGQHWNRLHNNAQNLKNAGITAIWIPPAWKGTSQNDVGYGAYDLYDLGEFNQKGTVRTKYGTKAELERAIRSLKANGIQVYGDVVMNHKGGADFTERVQAVEVNPQNRNQEVSGTYQIEAWTGFNFPGRGNQHSSFKWRWYHFDGTDWDQSRQLANRIYKFRGDGKAWDWEVDTENGNYDYRTYADVDMDHPEVINELNRWGVWYANTLNLDGFRLDAVKHIKFSFMRDWLGHVRGQTGKNLFAVAEYWKNDLGALENYLSKTNWTMSAFDVPLHYNLYQASNSSGNYDMRNLLNGTLVQRHPSHAVTFVDNHDTQPGEALESFVQGWFKPLAYATILTREQGYPQVFYGDYYGIPSDGVPSYRQQIDPLLKARQQYAYGRQHDYFDHWDVIGWTREGNASHPNSGLATIMSDGPGGSKWMYVGRQKAGEVWHDMTGNRSGTVTINQDGWGHFFVNGGSVSVWVKR

SEQ ID NO: 32868 - protein, 483 aa, Bacillus sp. (in: firmicutes)
HHDGTNGTIMQYFEWNVPNDGQHWNRLHNNAQNLKNAGITAIWIPPAWKGTSQNDVGYGAYDLYDLGEFNQKGTVRTKYGTKAELLRAIRSLKANGIQVYGDVVMNHKGGADFTERVQAVEVNPQNRNQEVSGTYQIEAWTGFNFPGRGNQHSSFKWRWYHFDGTDWDQSLQLANRIYKFRGKAWDWEVDTENGNYDYLMYADVDMDHPEVINELNRWGVWYANTLNLDGFRLDAVKHIKFSFMRDWLGHVRGQTGKNLFAVAEYWKNDLGALENYLSKTNWTMSAFDVPLHYNLYQASNSSGRYDMRNLLNGTLVQRHPSHAVTFVDNHDTQPGEALESFVQGWFKPLAYATILTREQGYPSVFYGDYYGIPSDGVPSYRQQIDPLLKARQQYAYGRQHDYFDHWDVIGWTREGNASHPNSGLATIMSDGPGGSKWMYVGRQKAGEVWHDMTGNRSGTVTINQDGWGHFFVNGGSVSVWVKR

SEQ ID NO: 32869 - protein, 485 aa, Bacillus sp.
HHDGTNGTIMQYFEWNVPNDGQHWNRLHNNAQNLKNAGITAIWIPPAWKGTSQNDVGYGAYDLYDLGEFNQKGTVRTKYGTKAELERAIRSLKANGIQVYGDVVMNHKGGADFTERVQAVEVNPQNRNQEVSGTYQIEAWTGFNFPGRGNQHSSFKWRWYHFDGTDWDQSRQLANRIYKFRGDGKAWDWEVDTENGNYDYLMYADVDMDHPEVINELNRWGVWYANTLNLDGFRLDAVKHIKFSFMRDWLGHVRGQTGKNLFAVAEYWKNDLGALENYLSKTNWTMSAFDVPLHYNLYQASNSSGNYDMRNLLNGTLVQRHPSHAVTFVDNHDTQPGEALESFVQGWFKPLAYATILTREQGYPQVFYGDYYGIPSDGVPSYRQQIDPLLKARQQYAYGRQHDYFDHWDVIGWTREGNASHPNSGLATIMSDGPGGSKNMYVGRQKAGEVWHDMTGNRSGTVTINQDGRGHFFVNGGSVSVWVKR

SEQ ID NO: 32870 - protein, 485 aa, Bacillus sp.
HHDGTNGTIMQYFEWNVPNDGQHWNRLHNNAQNLKNAGITAIWIPPAWKGTSQNDVGYGAYDLYDLGEFNQKGTVRTKYGTKAELERAIRSLKANGIQVYGDVVMNHKGGADFTERVQAVEVNPQNRNQEVSGTYQIEAWTGFNFPGRGNQHSSFKWRWYHFDGTDWDQSRQLANRIYKFRGDGKAWDWEVDTENGNYDYTEYADVDMDHPEVINELNRWGVWYANTLNLDGFRLDAVKHIKFSFMRDWLGHVRGQTGKNLFAVAEYWKNDLGALENYLSKTNWTMSAFDVPLHYNLYQASNSSGNYDMRNLLNGTLVQRHPSHAVTFVDNHDTQPGEALESFVQGWFKPLAYATILTREQGYPQVFYGDYYGIPSDGVPSYRQQIDPLLKARQQYAYGRQHDYFDHWDVIGWTREGNASHPNSGLATIMSDGPGGSKWMYVGRQKAGEVWHDMTGNRSGTVTINQDGWGHFFVNGGSVSVWVKR

SEQ ID NO: 32871 - protein, 485 aa, Bacillus sp.
HHDGTNGTIMQYFEWNVPNDGQHWNRLHNNAQNLKNAGITAIWIPPAWKGTSQNDVGYGAYDLYDLGEFNQKGTVRTKYGTKAELERAIRSLKANGIQVYGDVVMNHKGGADFTERVQAVEVNPQNRNQEVSGTYQIEAWTGFNFPGRGNQHSSFKWRWYHFDGTDWDQSRQLANRIYKFRGDGKAWDWEVDTENGNYDTLLYADVDMDHPEVINELNRWGVWYANTLNLDGFRLDAVKHIKFSFMRDWLGHVRGQTGKNLFAVAEYWKNDLGALENYLSKTNWTMSAFDVPLHYNLYQASNSSGNYDMRNLLNGTLVQRHPSHAVTFVDNHDTQPGEALESFVQGWFKPLAYATILTREQGYPQVFYGDYYGIPSDGVPSYRQQIDPLLKARQQYAYGRQHDYFDHWDVIGWTREGNASHPNSGLATIMSDGPGGSKWMYVGRQKAGEVWHDMTGNRSGTVTINQDGWGHFFVNGGSVSVWVKR

SEQ ID NO: 32872 - protein, 483 aa, Bacillus sp. (in: firmicutes)
HHDGTNGTIMHYFEWNVPNDGQHWNRLHNNAQNLKNAGITAIWIPPAWKGTSQNDVGYGAYDLYDLGEFNQKGTVRTKYGTKAELERAIRSLKANGIQVYGDVVMNHKGGADFTERVQAVEVNPQNRNQEVSGTYQIEAWTGFNFPGRGNQHSSFKWRWYHFDGTDWDQSRQLANRIYKFRGKAWDWEVDTENGNYDYLMYADVDMDHPEVINELNRWGVWYANTLNLDGFRLDAVKHIKFSFMRDWLGHVRGQTGKNLFAIAEFWKNDLGALENYLSKTNWTMSAFDVPLHYNLYQASNSSGNYDMRNLLNGTLVQRHPSHAVTLVDNHDTQPGEALESFVQGWFKPLAYATILTREQGYPCVFYGDYYGIPSDGVPSYRQQIDPLLKARQQYAYGRQHDYFDHWDVIGWTREGNASHPNSGLATIMSDGPGGSKWMYVGRQKAGEVWHDMTGNRSGTVTINQDGWGHFFVNGGSVSVWVKR

SEQ ID NO: 32873 - protein, 485 aa, Bacillus sp.
HHDGTNGTIMQYFEWNVPNDGQHWNRLHNNAQNLKNAGITAIWIPPAWKGTSQNDVGYGAYDLYDLGEFNQKGTVRTKYGTKAELERAIRSLKANGIQVYGDVVMNHKGGADFTERVQAVEVNPQNRNQEVSGTYQIEAWTGFNFPGRGNQHSSFKWRWYHFDGTDWDQSRQLANRIYKFRGDGKAWDWEVDTENGNYDYLPSADVDMDHPEVINELNRWGVWYANTLNLDGFRLDAVKHIKFSFMRDWLGHVRGQTGKNLFAVAEYWKNDLGALENYLSKTNWTMSAFDVPLHYNLYQASNSSGNYDMRNLLNGTLVQRHPSHAVTFVDNHDTQPGEALESFVQGWFKPLAYATILTREQGYPQVFYGDYYGIPSDGVPSYRQQIDPLLKARQQYAYGRQHDYFDHWDVIGWTREGNASHPNSGLATIMSDGPGGSKWMYVGRQKAGEVWHDMTGNRSGTVTINQDGWGHFFVNGGSVSVWVKR

SEQ ID NO: 32874 - protein, 485 aa, Bacillus sp.
HHDGTNGTIMQYFEWNVPNDGQHWNRLHNNAQNLKNAGITAIWIPPAWKGTSQNDVGYGAYDLYDLGEFNQKGTVRTKYGTKAELERAIRSLKANGIQVYGDVVMNHKGGADFTERVQAVEVNPQNRNQEVSGTYQIEAWTGFNFPGRGNQHSSFKWRWSHFDGTDWDQSRQLANRIYKFRGDGKAWDWEVDTENGNYDYLMYADVDMDHPEVINELNRWGVWYANTLNLDGFRLDAVKHIKFSFMRDWLGHVRGQTGKNLFAVAEYWKNDLGALENYLSKTNWTMSAFDVPLHYNLYQASNSSGNYDMRNLLNGTLVQRHPSHAVTFVDNHDTQPGEALESFVQGWFKPLAYATILTREQGYPQVFYGDYYGIPSDGVPSYRQQIDPLLKARQQYAYGRQHDYFDHWDVIGWTREGNASHPNSGLATIMSDGPGGSKWMYVGRQKAGEVWHDMTGNRSGTVTINQDGWGHFFVNGRSVSVWVKR

SEQ ID NO: 32875 - protein, 485 aa, Bacillus sp.
HHDGTNGTIMQYFEWNVPNDGQHWNRLHNNAQNLKNAGITAIWIPPAWKGTSQNDVGYGAYDLYDLGEFNQKGTVRTKYGTKAELERAIRSLKANGIQVYGDVVMNHKGGADFTERVQAVEVNPQNRNQEVSGTYQIEAWTGFNFPGRGNQHSSFKWRWYHFDGTDWDQSRQLANRIYKFRGDGKAWDWEVDTENGNYDYLPFADVDMDHPEVINELNRWGVWYANTLNLDGFRLDAVKHIKFSFMRDWLGHVRGQTGKNLFAVAEYWKNDLGALENYLSKTNWTMSAFDVPLHYNLYQASNSSGNYDMRNLLNGTLVQRHPSHAVTFVDNHDTQPGEALESFVQGWFKPLAYATILTREQGYPQVFYGDYYGIPSDGVPSYRQQIDPLLKARQQYAYGRQHDYFDHWDVIGWTREGNASHPNSGLATIMSDGPGGSKWMYVGRQKAGEVWHDMTGNRSGTVTINQDGWGHFFVNGGSVSVWVKR

SEQ ID NO: 32876 - protein, 485 aa, Bacillus sp.
HHDGTNGTIMQYFEWNVPNDGQHWNRLHNNAQNLKNAGITAIWIPPAWKGTSQNDVGYGAYDLYDLGEFNQKGTVRTKYGTKAELERAIRSLKANGIQVYGDVVMNHKGGADFTERVQAVEVNPQNRNQEVSGTYQIEAWTGFNFPGRGNQHSSFKWRWYHFDGTDWDQSRQLANRIYKFRGDGKAWDWEVDTENGNYDQLKYADVDMDHPEVINELNRWGVWYANTLNLDGFRLDAVKHIKFSFMRDWLGHVRGQTGKNLFAVAEYWKNDLGALENYLSKTNWTMSAFDVPLHYNLYQASNSSGNYDMRNLLNGTLVQRHPSHAVTFVDNHDTQPGEALESFVQGWFKPLAYATILTREQGYPQVFYGDYYGIPSDGVPSYRQQIDPLLKARQQYAYGRQHDYFDHWDVIGWTREGNASHPNSGLATIMSDGPGGSKWMYVGRQKAGEVWHDMTGNRSGTVTINQDGWGHFFVNGGSVSVWVKR

SEQ ID NO: 32877 - protein, 485 aa, Bacillus sp.
HHDGTNGTIMQYFEWNVPNDGQHWNRLHNNAQNLKNAGITAIWIPPAWKGTSQNDVGYGAYDLYDLGEFNQKGTVRTKYGTKAELERAIRSLKANGIQVYGDVVMNHKGGADFTERVQAVEVNPQNRNQEVSGTYQIEAWTGFNFPGRGNQHSSFKWRWYHFDGTDWDQSRQLANRIYKFRGDGKAWDWEVDTEXGNYDYLMYADVDMDHPEVINELNRWGVWYANTLNLDGFRLDAVKHIKFSFMRDWLGHVRGQTGKNLFAVAEYWXNDLGALENYLSKTNWTMSAFDVPLHYNLYQASNSSGNYDMRNLLNGTLVQRHPSHAVTFVDNHDTQPGEALESFVQGWFKPLAYATILTREQGYPQVFYGDYYGIPSDGVPSYRQQIDPLLKARQQYAYGRQHDYFDHWDVIGWTREGNASHPNSGLATIMSDGPGGSKWMYVGRQKAGEVWHDMTGNRSGTVTINQDGWGHFFVNGGSVSVWVKR

SEQ ID NO: 32878 - protein, 485 aa, Bacillus sp.
HHDGTNGTIMQYFEWNVPNDGQHWNRLHNNAQNLKNAGITAIWIPPAWKGTSQNDVGYGAYDLYDLGEFNQKGTVRTKYGTKAELERAIRSLKANGIQVYGDVVMNHKGGADFTERVQAVEVNPQNRNQEVSGTYQIEAWTGFNFPGRGNQHSSFKWRWYHFDGTDWDQSRQLANRIYKFRGDGKAWDWEVDTENGNYDYEKYADVDMDHPEVINELNRWGVWYANTLNLDGFRLDAVKHIKFSFMRDWLGHVRGQTGKNLFAVAEYWKNDLGALENYLSKTNWTMSAFDVPLHYNLYQASNSSGNYDMRNLLNGTLVQRHPSHAVTFVDNHDTQPGEALESFVQGWFKPLAYATILTREQGYPQVFYGDYYGIPSDGVPSYRQQIDPLLKARQQYAYGRQHDYFDHWDVIGWTREGNASHPNSGLATIMSDGPGGSKWMYVGRQKAGEVWHDMTGNRSGTVTINQDGWGHFFVNGGSVSVWVKR

SEQ ID NO: 32879 - protein, 485 aa, Bacillus sp.
HHDGTNGTIMQYFEWNVPNDGQHWNRLHNNAQNLKNAGITAIWIPPAWKGTSQNDVGYGAYDLYDLGEFNQKGTVRTKYGTKAELERAIRSLKANGIQVYGDVVMNHKGGADFTERVQAVEVNPQNRNQEVSGTYQIEAWTGFNFPGRGNQHSSFKWRWYHFDGTDWDQSRQLANRIYKFRGDGKAWDWEVDTENGNYDQLLYADVDMDHPEVINELNRWGVWYANTLNLDGFRLDAVKHIKFSFMRDWLGHVRGQTGKNLFAVAEYWKNDLGALENYLSKTNWTMSAFDVPLHYNLYQASNSSGNYDMRNLLNGTLVQRHPSHAVTFVDNHDTQPGEALESFVQGWFKPLAYATILTREQGYPQVFYGDYYGIPSDGVPSYRQQIDPLLKARQQYAYGRQHDYFDHWDVIGWTREGNASHPNSGLATIMSDGPGGSKWMYVGRQKAGEVWHDMTGNRSGTVTINQDGWGHFFVNGGSVSVWVKR

SEQ ID NO: 32880 - protein, 485 aa, Bacillus sp.
HHDGTNGTIMQYFEWNVPNDGQHWNRLHNNAQNLKNAGITAIWIPPAWKGTSQNDVGYGAYDLYDLGEFNQKGTVRTKYGTKAELERAIRSLKANGIQVYGDVVMNHKGGADFTERVQAVEVNPQNRNQEVSGTYQIEAWTGFNFPGRGNQHSSFKWRWYHFDGTDWDQSRQLANRIYKFRGDGKAWDWEVDTENGNYDYQNYADVDMDHPEVINELNRWGVWYANTLNLDGFRLDAVKHIKFSFMRDWLGHVRGQTGKNLFAVAEYWKNDLGALENYLSKTNWTMSAFDVPLHYNLYQASNSSGNYDMRNLLNGTLVQRHPSHAVTFVDNHDTQPGEALESFVQGWFKPLAYATILTREQGYPQVFYGDYYGIPSDGVPSYRQQIDPLLKARQQYAYGRQHDYFDHWDVIGWTREGNASHPNSGLATIMSDGPGGSKWMYVGRQKAGEVWHDMTGNRSGTVTINQDGWGHFFVNGGSVSVWVKR

SEQ ID NO: 32881 - protein, 485 aa, Bacillus sp.
HHDGTNGTIMQYFEWNVPNDGQHWNRLHNNAQNLKNAGITAIWIPPAWKGTSQNDVGYGAYDLYDLGEFNQKGTVRTKYGTKAELERAIRSLKANGIQVYGDVVMNHKGGADFTERVQAVEVNPQNRNQEVSGTYQIEAWTGFNFPGRGNQHSSFKWRWYHFDGTDWDQSRQLANRIYKFRGDGKAWDWEVDTENGNYDHLLYADVDMDHPEVINELNRWGVWYANTLNLDGFRLDAVKHIKFSFMRDWLGHVRGQTGKNLFAVAEYWKNDLGALENYLSKTNWTMSAFDVPLHYNLYQASNSSGNYDMRNLLNGTLVQRHPSHAVTFVDNHDTQPGEALESFVQGWFKPLAYATILTREQGYPQVFYGDYYGIPSDGVPSYRQQIDPLLKARQQYAYGRQHDYFDHWDVIGWTREGNASHPNSGLATIMSDGPGGSKWMYVGRQKAGEVWHDMTGNRSGTVTINQDGWGHFFVNGGSVSVWVKR

SEQ ID NO: 32882 - protein, 485 aa, Bacillus sp.
HHDGTNGTIMQYFEWNVPNDGQHWNRLHNNAQNLKNAGITAIWIPPAWKGTSQNDVGYGAYDLYDLGEFNQKGTVRTKYGTKAELERAIRSLKANGIQVYGDVVMNHKGGADFTERVQAVEVNPQNRNQEVSGTYQIEAWTGFNFPGRGNQHSSFKWRWYHFDGTDWDQSRQLANRIYKFRGDGKAWDWEVDTENGNYDYLPDADVDMDHPEVINELNRWGVWYANTLNLDGFRLDAVKHIKFSFMRDWLGHVRGQTGKNLFAVAEYWKNDLGALENYLSKTNWTMSAFDVPLHYNLYQASNSSGNYDMRNLLNGTLVQRHPSHAVTFVDNHDTQPGEALESFVQGWFKPLAYATILTREQGYPQVFYGDYYGIPSDGVPSYRQQIDPLLKARQQYAYGRQHDYFDHWDVIGWTREGNASHPNSGLATIMSDGPGGSKWMYVGRQKAGEVWHDMTGNRSGTVTINQDGWGHFFVNGGSVSVWVKR

SEQ ID NO: 32883 - protein, 485 aa, Bacillus sp.
HHDGTNGTIMQYFEWNVPNDGQHWNRLHNNAQNLKNAGITAIWIPPAWKGTSQNDVGYGAYDLYDLGEFNQKGTVRTKYGTKAELERAIRSLKANGIQVYGDVVMNHKGGADFTERVQAVEVNPQNRNQEVSGTYQIEAWTGFNFPGRGNQHSSFKWRWYHFDGTDWDQSRQLANRIYKFRGDGKAWDWEVDTENGNYDYGWYADVDMDHPEVINELNRWGVWYANTLNLDGFRLDAVKHIKFSFMRDWLGHVRGQTGKNLFAVAEYWKNDLGALENYLSKTNWTMSAFDVPLHYNLYQASNSSGNYDMRNLLNGTLVQRHPSHAVTFVDNHDTQPGEALESFVQGWFKPLAYATILTREQGYPQVFYGDYYGIPSDGVPSYRQQIDPLLKARQQYAYGRQHDYFDHWDVIGWTREGNASHPNSGLATIMSDGPGGSKWMYVGRQKAGEVWHDMTGNRSGTVTINQDGWGHFFVNGGSVSVWVKR

SEQ ID NO: 32884 - protein, 485 aa, Bacillus sp.
HHDGTNGTIMQYFEWNVPNDGQHWNRLHNNAQNLKNAGITAIWIPPAWKGTSQNDVGYGAYDLYDLGEFNQKGTVRTKYGTKAELERAIRSLKANGIQVYGDVVMNHKGGADFTERVQAVEVNPQNRNQEVSGTYQIEAWTGFNFPGRGNQHSSFKWRWYHFDGTDWDQSRQLANRIYKFRGDGKAWDWEVDTENGNYDPLLYADVDMDHPEVINELNRWGVWYANTLNLDGFRLDAVKHIKFSFMRDWLGHVRGQTGKNLFAVAEYWKNDLGALENYLSKTNWTMSAFDVPLHYNLYQASNSSGNYDMRNLLNGTLVQRHPSHAVTFVDNHDTQPGEALESFVQGWFKPLAYATILTREQGYPQVFYGDYYGIPSDGVPSYRQQIDPLLKARQQYAYGRQHDYFDHWDVIGWTREGNASHPNSGLATIMSDGPGGSKWMYVGRQKAGEVWHDMTGNRSGTVTINQDGWGHFFVNGGSVSVWVKR

SEQ ID NO: 32885 - protein, 485 aa, Bacillus sp.
HHDGTNGTIMQYFEWNVPNDGQHWNRLHNNAQNLKNAGITAIWIPPAWKGTSQNDVGYGAYDLYDLGEFNQKGTVRTKYGTKAELERAIRSLKANGIQVYGDVVMNHKGGADFTERVQAVEVNPQNRNQEVSGTYQIEAWTGFNFPGRGNQHSSFKWRWYHFDGTDWDQSRQLANRIYKFRGDGKAWDWEVDTENGNYDYHTYADVDMDHPEVINELNRWGVWYANTLNLDGFRLDAVKHIKFSFMRDWLGHVRGQTGKNLFAVAEYWKNDLGALENYLSKTNWTMSAFDVPLHYNLYQASNSSGNYDMRNLLNGTLVQRHPSHAVTFVDNHDTQPGEALESFVQGWFKPLAYATILTREQGYPQVFYGDYYGIPSDGVPSYRQQIDPLLKARQQYAYGRQHDYFDHWDVIGWTREGNASHPNSGLATIMSDGPGGSKWMYVGRQKAGEVWHDMTGNRSGTVTINQDGWGHFFVNGGSVSVWVKR

SEQ ID NO: 32886 - protein, 483 aa, Bacillus sp. (in: firmicutes)
HHDGTNGTIMQYFEWNVPNDGQHWNRLHNNAQNLKNAGITAIWIPPAWKGTSQNDVGYGAYDLYDLGEFNQKGTVRTKYGTKAELERAIRSLKANGIQVYGDVVMNHKGGADTTERVQAVEVNPQNRNQEVSGTYQIEAWTGFNFPGRGNQHSSFKWRWYHFDGTDWDQSKQLANRIYKFRGKAWDWEVDTENGNYDYLMYADVDMDHPEVINELNRWGVWYANTLNLDGFRLDAVKHIKFSFMRDWLGHVRGQTGKNLFAVAEYWKNDLVALENYLSKTNWTMSAFDVPLHYNLYQASNSSGNYDMRNLLNGTLVQRHPSHAVTFVDNHDTQPGEALESFVQGWFKPLAYATILTREQGYPQVFYGDYYGIPSDGVPSYRQQIDPLLKARQQYAYGRQHDYFDHWDVIGWTREGNASHPNSGLATIMSDGPGGSKWMYVGRQKAGEVWHDMTGNRSGTVTINQDGWGHFFVNGGSVSVWVKR

SEQ ID NO: 32887 - protein, 485 aa, Bacillus sp.
HHDGTNGTIMQYFEWNVPNDGQHWNRLHNNAQNLKNAGITAIWIPPAWKGTSQNDVGYGAYDLYDLGEFNQKGTVRTKYGTKAELERAIRSLKANGIQVYGDVVMNHKGGADFTERVQAVEVNPQNRNQEVSGTYEIEAWTGFNFPGRGNQHSSFKWRWYHFDGTDWDQSRQLSNRIYKFRGDGKAWDWEVDTEXGNYDYLMYADVDMNHPEVINELNRWGVWYANTLNLDGFRLDAVKHIQFSFMRNWLGHVRGQTGKNLFAVAEYWKNDLGALENYLSKTNWTMSAFDVPLHYNLYQASNSGGNYDMRNLLNGTLVQRHPSHAVTFVDNHDTQPGEALESFVQGWFKPLAYATILTREQGYPQVFYGDYYGIPSDGVPSYRQQIDPLLKARQQYAYGRQHDYFDHWDVIGWTREGNASHPNSGLATIMSDGPGGSKWMYVGRQKAGEVWHDITGNRSGTVTINQDGWGQFFVNGGSVSVWVKR

SEQ ID NO: 32888 - protein, 485 aa, Bacillus sp.
HHDGTNGTIMQYFEWNVPNDGQHWNRLHNNAQNLKNAGITAIWIPPAWKGTSQNDVGYGAYDLYDLGEFNQKGTVRTKYGTKAELERAIRSLKANGIQVYGDVVMNHKGGADFTERVQAVEVNPQNRNQEVSGTYQIEAWTGFNFPGRGNQHSSFKWRWYHFDGTDWDQSRQLANRIYKFRGDGKAWDWEVDTENGNYDYLLTADVDMDHPEVINELNRWGVWYANTLNLDGFRLDAVKHIKFSFMRDWLGHVRGQTGKNLFAVAEYWKNDLGALENYLSKTNWTMSAFDVPLHYNLYQASNSSGNYDMRNLLNGTLVQRHPSHAVTFVDNHDTQPGEALESFVQGWFKPLAYATILTREQGYPQVFYGDYYGIPSDGVPSYRQQIDPLLKARQQYAYGRQHDYFDHWDVIGWTREGNASHPNSGLATIMSDGPGGSKWMYVGRQKAGEVWHDMTGNRSGTVTINQDGWGHFFVNGGSVSVWVKR

SEQ ID NO: 32889 - protein, 485 aa, Bacillus sp.
HHDGTNGTIMQYFEWNVPNDGQHWNRLHNNAQNLKNAGITAIWIPPAWKGTSQNDVGYGAYDLYDLGEFNQKGTVRTKYGTKAELERAIRSLKANGIQVYGDVVMNHKGGADFTERVQAVEVNPQNRNQEVSGTYQIEAWTGFNFPGRGNQHSSFKWRWYHFDGTDWDQSRQLANRIYKFRGDGKAWDWEVDTENGNYDYLMYADXDMDHPXVINELNRWGVWYANTLNLDGFRLDAVKHIKFSFMRDWLGHVRGQTGKNLFAVAEYWKNDLGALENYLSKTNWTMSAFDVPLHYNLYQASNSSGNYDMRNLLNGTLVQRHPSHAVTFVDNHDTQPGEALESFVQGWFKPLAYATILTREQGYPQVFYGDYYGIPSDGVPSYRQQIDPLLKARQQYAYGRQHDYFDHWDVIGWTREGNASHPNSGLATIMSDGPGGSKWMYVGRQKAGEVWHDMTGNRSGTVTINQDGWGHFFVNGGSVSVWVKR

SEQ ID NO: 32890 - protein, 483 aa, Bacillus sp. (in: firmicutes)
HHDGTNGTIMQYFEWNVPNDGQHWNRLHNNAQNLKNAGITAIWIPPAWKGTSQNDVGYGAYDLYDLGEFNQKGTVRTKYGTKAELERAIRSLKANGIQVYGDVVMNHKGGADFTERVQAVEVNPQNRNQEVSGTYQIEAWTGFNFPGRGNQHSSFKWRWYHFDGTDWDQSRQLANRIYKFRGKAWDWEVDTENGNYDYLMLADLDMDHPEVINELNRWGVWYANTLNLDGFRLDAVKHIKFSFMRDWLGHVRGQTGKNLFAVAEYWKNDLGALENYLSKTNWTMSAFDVPLHYNLYQASNSSGNYDMRNLLNGTLVQRHPSHAVTFVDNHDTQPGEALESFVQGWFKPLAYATILTREQGYPQVFYGDYYGIPSDGVPSYRQQIDPLLKARQQYAYGRQHDYFDHWDVIGWTREGNASHPNSGLATIMSDGPGGSKWMYVGRQKAGEVWHDMTGNRSGTVTINQDGWGHFFVNGGSVSVWVKR

SEQ ID NO: 32891 - protein, 485 aa, Bacillus sp.
HHDGTNGTIMQYFEWNVPNDGQHWNRLHNNAQNLKNAGITAIWIPPAWKGTSQNDVGYGAYDLYDLGEFNQKGTVRTKYGTKAELERAIRSLKANGIQVYGDVVMNHKGGADFTERVQAVEVNPQNRNQEVSGTYQIEAWTGFNFPGRGNQHSSFKWRWYHFDGTDWDQSRQLANRIYKFRGDGKAWDWEVDTENGNYDYLMYADVDMDHPXVINXLNRWGVWYANTLNLDGFRLDAVKHIKFSFMRDWLGHVRGQTGKNLFAVAEYWKNDLGALENYLSKTNWTMSAFDVPLHYNLYQASNSSGNYDMRNLLNGTLVQRHPSHAVTFVDNHDTQPGEALESFVQGWFKPLAYATILTREQGYPQVFYGDYYGIPSDGVPSYRQQIDPLLKARQQYAYGRQHDYFDHWDVIGWTREGNASHPNSGLATIMSDGPGGSKWMYVGRQKAGEVWHDMTGNRSGTVTINQDGWGHFFVNGGSVSVWVKR

SEQ ID NO: 32892 - protein, 485 aa, Bacillus sp.
HHDGTNGTIMQYFEWNVPNDGQHWNRLHNNAQNLKNAGITAIWIPPAWKGTSQNDVGYGAYDLYDLGEFNQKGTVRTKYGTKAELERAIRSLKANGIQVYGDVVMNHKGGADFTERVQAVEVNPQNRNQEVSGTYQIEAWTGFNFPGRGNQHSSFKWRWYHFDGTDWDQSRQLANRIYKFRGDGKAWDWEVDTENGNYDYLLDADVDMDHPEVINELNRWGVWYANTLNLDGFRLDAVKHIKFSFMRDWLGHVRGQTGKNLFAVAEYWKNDLGALENYLSKTNWTMSAFDVPLHYNLYQASNSSGNYDMRNLLNGTLVQRHPSHAVTFVDNHDTQPGEALESFVQGWFKPLAYATILTREQGYPQVFYGDYYGIPSDGVPSYRQQIDPLLKARQQYAYGRQHDYFDHWDVIGWTREGNASHPNSGLATIMSDGPGGSKWMYVGRQKAGEVWHDMTGNRSGTVTINQDGWGHFFVNGGSVSVWVKR

SEQ ID NO: 32893 - protein, 485 aa, Bacillus sp.
HHDGTNGTIMQYFEWNVPNDGQHWNRLHNNAQNLKNAGITAIWIPPAWKGTSQNDVGYGAYDLYDLGEFNQKGTVRTKYGTKAELERAIRSLKANGIQVYGDVVMNHKGGADFTERVQAVEVNPQNRNQEVSGTYQIEAWTGFNFPGRGNQHSSFKWRWYHFDGTDWDQSRQLANRIYKFRGDGKAWDWEVDTENGNYDYTLYADVDMDHPEVINELNRWGVWYANTLNLDGFRLDAVKHIKFSFMRDWLGHVRGQTGKNLFAVAEYWKNDLGALENYLSKTNWTMSAFDVPLHYNLYQASNSSGNYDMRNLLNGTLVQRHPSHAVTFVDNHDTQPGEALESFVQGWFKPLAYATILTREQGYPQVFYGDYYGIPSDGVPSYRQQIDPLLKARQQYAYGRQHDYFDHWDVIGWTREGNASHPNSGLATIMSDGPGGSKWMYVGRQKAGEVWHDMTGNRSGTVTINQDGWGHFFVNGGSVSVWVKR

SEQ ID NO: 32894 - protein, 483 aa, Bacillus sp. (in: firmicutes)
HHDGTNGTIMQYFEWYVPNDGQHWNRLHNNAQNLKNAGITAIWIPPAWKGTSQNDVGYGAYDLYDLGEFNQKGTVRTKYGTKAELERAIRSLKANGIQVYGDVVMNHKGGADFTERVQAVEVNPQNRNQEVSGTYQIEAWTGFNFPGRGNQHSSFKWRWHHFDGTDWDQSRQLANRIYKFRGKAWDWEVDTEFGNYDYLMYADVDMDHPEVINELNRWGVWYANTLNLDGFRLDAVKHIKFSFMRDWLGHVRGQTGKNLFAVAEYWKNDLGAIENYLSKTNWTMSAFDVPLHYNLYQASNSGGNYDMRNLLNGTLVQRHPSHAVTFVDNHDTQPEEALESFVQGWFKPLAYATILTREQGYPSVFYGDYYGIPSDGVPSYRQQIDPLLKARQQYAYGRQHDYFDHWDVIGWTREGNASHPNSGLATIMSDGPGGSKWMYVGRQKAGEVWHDMTGNRSGTVTINQDGWGHFFVNGGSVSVWVKR

SEQ ID NO: 32895 - protein, 485 aa, Bacillus sp.
HHDGTNGTIMQYFEWNVPNDGQHWNRLHNNAQNLKNAGITAIWIPPAWKGTSQNDVGYGAYDLYDLGEFNQKGTVRTKYGTKAELERAIRSLKANGIQVYGDVVMNHKGGADFTERVQAVEVNPQNRNQEVSGTYQIEAWTGFNFPGRGNQHSSFKWRWYHFDGTDWDQSRQLANRIYKFRGDGKAWDWEVDTENGNYDYPQYADVDMDHPEVINELNRWGVWYANTLNLDGFRLDAVKHIKFSFMRDWLGHVRGQTGKNLFAVAEYWKNDLGALENYLSKTNWTMSAFDVPLHYNLYQASNSSGNYDMRNLLNGTLVQRHPSHAVTFVDNHDTQPGEALESFVQGWFKPLAYATILTREQGYPQVFYGDYYGIPSDGVPSYRQQIDPLLKARQQYAYGRQHDYFDHWDVIGWTREGNASHPNSGLATIMSDGPGGSKWMYVGRQKAGEVWHDMTGNRSGTVTINQDGWGHFFVNGGSVSVWVKR

SEQ ID NO: 32896 - protein, 483 aa, Bacillus sp.
HHNGTNGTMMQYFEWYLPNDGNHWNRLNSDASNLKSKGIKAVWIPPAWKGASQNDVGYGAYDLYDLGEFNQRGTVRTKYGTRSQLQAAVTSLKNNGIQVYGDVVMNHKGGADATEMVRAVEVNPNNRNQEVTGEYTIEAWTRFDFPGRGNTHSSFKWRWYHFDGVDFDQSRKLNNRIYKFRGKAWDWEVDTEFGNYDYLMYVDYDYDHPESTNEMRNWGVWYTNTLGLDGFRIDAVKHIKYSFTRDWINHVRIATGKNMFAVAEFWKNDLGAIENYLQKTNWNHSVFDVPLHYNLYNASKSGGNYDMRNIFNGTVVQAHPSQAVTFVDNHDSQPEEALESFVDEWFKPLAYALTLTREQGYPSVFYGDYYGIPTHGVPAMRSKIDPILEARQKYAYGPQHDYLDHPDVIGWTREGDSSHPKSGLATLITDGPGGSKRMYAGLKNAGETWYDITGNRSDTVKIGSDGWGEFHVNDGSVSIYVQK

SEQ ID NO: 32897 - protein, 485 aa, Bacillus sp.
HHDGTNGTIMQYFEWNVPNDGQHWNRLHNNAQNLKNAGITAIWIPPAWKGTSQNDVGYGAYDLYDLGEFNQKGTVRTKYGTKAELERAIRSLKANGIQVYGDVVMNHKGGADFTERVQAVEVNPQNRNQEVSGTYQIEAWTGFNFPGRGNQHSSFKWRWYHFDGTDWDQSRQLANRIYKFRGDGKAWDWEVDTENGNYDPLQYADVDMDHPEVINELNRWGVWYANTLNLDGFRLDAVKHIKFSFMRDWLGHVRGQTGKNLFAVAEYWKNDLGALENYLSKTNWTMSAFDVPLHYNLYQASNSSGNYDMRNLLNGTLVQRHPSHAVTFVDNHDTQPGEALESFVQGWFKPLAYATILTREQGYPQVFYGDYYGIPSDGVPSYRQQIDPLLKARQQYAYGRQHDYFDHWDVIGWTREGNASHPNSGLATIMSDGPGGSKWMYVGRQKAGEVWHDMTGNRSGTVTINQDGWGHFFVNGGSVSVWVKR

SEQ ID NO: 32898 - protein, 485 aa, Bacillus sp.
HHDGTNGTIMQYFEWNVPNDGQHWNRLHNNAQNLKNAGITAIWIPPAWKGTSQNDVGYGAYDLYDLGEFNQKGTVRTKYGTKAELERAIRSLKANGIQVYGDVVMNHKGGADFTERVQAVEVNPQNRNQEVSGTYQIEAWTGFNFPGRGNQHSSFKWRWYHFDGTDWDQSRQLANRIYKFRGDGKAWDWEVDTENGNYDYLQRADVDMDHPEVINELNRWGVWYANTLNLDGFRLDAVKHIKFSFMRDWLGHVRGQTGKNLFAVAEYWKNDLGALENYLSKTNWTMSAFDVPLHYNLYQASNSSGNYDMRNLLNGTLVQRHPSHAVTFVDNHDTQPGEALESFVQGWFKPLAYATILTREQGYPQVFYGDYYGIPSDGVPSYRQQIDPLLKARQQYAYGRQHDYFDHWDVIGWTREGNASHPNSGLATIMSDGPGGSKWMYVGRQKAGEVWHDMTGNRSGTVTINQDGWGHFFVNGGSVSVWVKR

SEQ ID NO: 32899 - protein, 483 aa, Bacillus sp. (in: firmicutes)
HHDGTNGTIMQYFEWNVPNDGQHWNRLHNNAQNLKNAGITAIWIPPAWKGTSQNDVGYGAYDLYDLGEFNQKGTVRTKYGTKAELERAIRSLKANGIQVYGDVVMNHKGGADFTESVQAVEVNPQNRNQEVLGTYEIEAWTGFNFPGRGNQHSSFKWRWYHFDGTDWDQSRQLANRIYKFGGKAWDWEVDTEFGNYDYLMYADVDMDHPEVINELNRWGVWYANTLNLDGFRLDAVKHIKFSFMRDWLGHVRGQTGKNLFAVAEYWKNDLGALENYLSKTNWTMSAFDVPLHYNLYQASNSSGNYDMRNLLNGTLVQRHPSHAVTFVDNHDTQPGEALESFVQGWFKPLAYATILTREQGYPSVFYGDYYGIPSDGVPSYRQQIDPLLKARQQYAYGRQHDYFDHWDVIGWTREGNASHPNSGLATIMSDGPGGSKWMYVGRQKAGEVWHDMTGNRSGTVTINQDGWGHFFVNGGSVSVWVKR

SEQ ID NO: 32900 - protein, 485 aa, Bacillus sp.
HHDGTNGTIMQYFEWNVPNDGQHWNRLHNNAQNLKNAGITAIWIPPAWKGTSQNDVGYGAYDLYDLGEFNQKGTVRTKYGTKAELERAIRSLKANGIQVYGDVVMNHKGGADFTERVQAVEVNPQNRNQEVSGTYQIEAWTGFNFPGRGNQHSSFKWRWYHFDGTDWDQSRQLANRIYKFRGDGKAWDWEVDTENGNYDYLHWADVDMDHPEVINELNRWGVWYANTLNLDGFRLDAVKHIKFSFMRDWLGHVRGQTGKNLFAVAEYWKNDLGALENYLSKTNWTMSAFDVPLHYNLYQASNSSGNYDMRNLLNGTLVQRHPSHAVTFVDNHDTQPGEALESFVQGWFKPLAYATILTREQGYPQVFYGDYYGIPSDGVPSYRQQIDPLLKARQQYAYGRQHDYFDHWDVIGWTREGNASHPNSGLATIMSDGPGGSKWMYVGRQKAGEVWHDMTGNRSGTVTINQDGWGHFFVNGGSVSVWVKR

SEQ ID NO: 32901 - protein, 485 aa, Bacillus sp.
HHDGTNGTIMQYFEWNVPNDGQHWNRLHNNAQNLKNAGITAIWIPPAWKGTSQNDVGYGAYDLYDLGEFNQKGTVRTKYGTKAELERAIRSLKANGIQVYGDVVMNHKGGADFTERVQAVEVNPQNRNQEVSGTYEIEAWTGFNFPGRGNQHSSFKWRWYHFDGTDWDQSRQLSNRIYKFRGDGKAWDWEVDTENGNYDYLMYADVDMNHPEVINXLNRWGVWYANTLNLDGFRLDAVKHIQFSFMRNWLGHVRGQTGKNLFAVAEYWKNDLGALENYLSKTNWTMSAFDVPLHYNLYQASNSGGNYDMRNLLNGTLVQRHPSHAVTFVDNHDTQPGEALESFVQGWFKPLAYATILTREQGYPQVFYGDYYGIPSDGVPSYRQQIDPLLKARQQYAYGRQHDYFDHWDVIGWTREGNASHPNSGLATIMSDGPGGSKWMYVGRQKAGEVWHDITGNRSGTVTINQDGWGQFFVNGGSVSVWVKR

SEQ ID NO: 32902 - protein, 485 aa, Bacillus sp.
HHDGTNGTIMQYFEWNVPNDGQHWNRLHNNAQNLKNAGITAIWIPPAWKGTSQNDVGYGAYDLYDLGEFNQKGTVRTKYGTKAELERAIRSLKANGIQVYGDVVMNHKGGADFTERVQAVEVNPQNRNQEVSGTYQIEAWTGFNFPGRGNQHSSFKWRWYHFDGTDWDQSRQLANRIYKFRGDGKAWDWEVDTENGNYDYLFQADVDMDHPEVINELNRWGVWYANTLNLDGFRLDAVKHIKFSFMRDWLGHVRGQTGKNLFAVAEYWKNDLGALENYLSKTNWTMSAFDVPLHYNLYQASNSSGNYDMRNLLNGTLVQRHPSHAVTFVDNHDTQPGEALESFVQGWFKPLAYATILTREQGYPQVFYGDYYGIPSDGVPSYRQQIDPLLKARQQYAYGRQHDYFDHWDVIGWTREGNASHPNSGLATIMSDGPGGSKWMYVGRQKAGEVWHDMTGNRSGTVTINQDGWGHFFVNGGSVSVWVKR

SEQ ID NO: 32903 - protein, 483 aa, Bacillus sp. (in: firmicutes)
HHDGTNGTIMQYFEWNVPNDGQHWNRLHNNAQNLKNAGITAIWIPPAWKGTSQNDVGYGAYDLYDLGEFNQKGTVRTKYGTKAELERAIRSLKANGIQVYGDVVMNHKGGADFTERVQAVEVNPQNRNQEVSGTYQIEAWTGFNFPGRGNQHSSFKWRWYHFDGTDWDQSYQLANRIYKFRGKAWDWEVDTENGNYDYLMYADVDMDHPEVINELNRWGVWYANTLNLDGFRLDAVKHIKFSFMRDWLGHVRGQTGKNLFAVAEYWKNDLGALENYLSKTNWTMSAFDVPLHYNLYQASNSSGKYDMRNLLNGTLVQRHPSHAVTFVDNHDTQPGEALESFVQGWFKPLAYATILTREQGYPQVFYGDYYGIPSDGVPSYRQQIDPLLKARQQYAYGRQHDYFDHWDVIGWTREGNASHPNSGLATIMSDGPGGSKWMYVGRQKAGEVWHDMTGNRSGTVTINQDGWGHFFVNGGSVSVWVKR

SEQ ID NO: 32904 - protein, 485 aa, Bacillus sp.
HHDGTNGTIMQYFEWNVPNDGQHWNRLHNNAQNLKNAGITAIWIPPAWKGTSQNDVGYGAYDLYDLGEFNQKGTVRTKYGTKAELERAIRSLKANGIQVYGDVVMNHKGGADFTERVQAVEVNPQNRNQEVSGTYQIEAWTGFNFPGRGNQHSSFKWRWYHFDGTDWDQSRQLANRIYKFRGDGKAWDWEVDTENGNYDYQWYADVDMDHPEVINELNRWGVWYANTLNLDGFRLDAVKHIKFSFMRDWLGHVRGQTGKNLFAVAEYWKNDLGALENYLSKTNWTMSAFDVPLHYNLYQASNSSGNYDMRNLLNGTLVQRHPSHAVTFVDNHDTQPGEALESFVQGWFKPLAYATILTREQGYPQVFYGDYYGIPSDGVPSYRQQIDPLLKARQQYAYGRQHDYFDHWDVIGWTREGNASHPNSGLATIMSDGPGGSKWMYVGRQKAGEVWHDMTGNRSGTVTINQDGWGHFFVNGGSVSVWVKR

SEQ ID NO: 32905 - protein, 485 aa, Bacillus sp.
HHDGTNGTIMQYFEWNVPNDGQHWNRLHNNAQNLKNAGITAIWIPPAWKGTSQNDVGYGAYDLYDLGEFNQKGTVRTKYGTKAELERAIRSLKANGIQVYGDVVMNHKGGADFTERVQAVEVNPQNRNQEVSGTYQIEAWTGFNFPGRGNQHSSFKWRWYHFDGTDWDQSRQLANRIYKFRGDGKAWDWEVDTENGNYDYLMYADVDMDHPEVINELNRWGVWYANTLNLDGFRLDAVKHIKFSFMRDWLGHVRGQTGKNLFAVAEYWKNDLGALENYLSKTNWTMSAFDVPLHYNLYQASNSSGNYDMRNLLNGTLVQRHPSHAVTFVDNHDTQPGEALESFVQGWFKPLAYATILTREQGYPQVFYGDYYGIPSDGVPSYRQQIDPLLKARQQYAYGRQHDYFDHWDVIGWTREGNASHPNSGLATIMSDGPGGSKWMYVGRQKAGEVWHDMTGNRSGTVTINQDGTGHFFVNKGSVSVWVKR

SEQ ID NO: 32906 - protein, 485 aa, Bacillus sp.
HHDGTNGTIMQYFEWNVPNDGQHWNRLHNNAQNLKNAGITAIWIPPAWKGTSQNDVGYGAYDLYDLGEFNQKGTVRTKYGTKAELERAIRSLKANGIQVYGDVVMNHKGGADFTERVQAVEVNPQNRNQEVSGTYQIEAWTGFNFPGRGNQHSSFKWRWYHFDGTDWDQSRQLANRIYKFRGDGKAWDWEVDTENGNYDQLNYADVDMDHPEVINELNRWGVWYANTLNLDGFRLDAVKHIKFSFMRDWLGHVRGQTGKNLFAVAEYWKNDLGALENYLSKTNWTMSAFDVPLHYNLYQASNSSGNYDMRNLLNGTLVQRHPSHAVTFVDNHDTQPGEALESFVQGWFKPLAYATILTREQGYPQVFYGDYYGIPSDGVPSYRQQIDPLLKARQQYAYGRQHDYFDHWDVIGWTREGNASHPNSGLATIMSDGPGGSKWMYVGRQKAGEVWHDMTGNRSGTVTINQDGWGHFFVNGGSVSVWVKR

SEQ ID NO: 32907 - protein, 485 aa, Bacillus sp.
HHDGTNGTIMQYFEWNVPNDGQHWNRLHNNAQNLKNAGITAIWIPPAWKGTSQNDVGYGAYDLYDLGEFNQKGTVRTKYGTKAELERAIRSLKANGIQVYGDVVMNHKGGADFTERVQAVEVNPQNRNQEVSGTYQIEAWTGFNFPGRGNQHSSFKWRWYHFDGTDWDQSRQLANRIYKFRGDGKAWDWEVDTENGNYDYLWPADVDMDHPEVINELNRWGVWYANTLNLDGFRLDAVKHIKFSFMRDWLGHVRGQTGKNLFAVAEYWKNDLGALENYLSKTNWTMSAFDVPLHYNLYQASNSSGNYDMRNLLNGTLVQRHPSHAVTFVDNHDTQPGEALESFVQGWFKPLAYATILTREQGYPQVFYGDYYGIPSDGVPSYRQQIDPLLKARQQYAYGRQHDYFDHWDVIGWTREGNASHPNSGLATIMSDGPGGSKWMYVGRQKAGEVWHDMTGNRSGTVTINQDGWGHFFVNGGSVSVWVKR

SEQ ID NO: 32908 - protein, 485 aa, Bacillus sp.
HHNGTNGTMMQYFEWYLPNDGNHWNRLNSDASNLKSKGIKAVWIPPAWKGASQNDVGYGAYDLYDLGEFNQKGTVRTKYGTRSQLQAAVTSLKNNGIQVYGDVVMNHKGGADATEMVRAVEVNPNNRNQEVTGEYTIEAWTRFDFPGRGNTHSSFKWRWYHFDGVDFDQSRKLNNRIYKFRGHGKAWDWEVDTEFGNYDYLMYVDYDYDHPESTNEMRNWGVWYTNTLGLDGFRIDAVKHIKYSFTRDWINHVRIATGKNMFAVAEFWKNDLGAIENYLQKTNWNHSVFDVPLHYNLYNASKSGGNYDMRNIFNGTVVQAHPSQAVTFVDNHDSQPEEALESFVDEWFKPLAYALTLTREQGYPSVFYGDYYGIPTHGVPAMRSKIDPILEARQKYAYGPQHDYLDHPDVIGWTREGDSSHPKSGLATLITDGPGGSKRMYAGLKNAGETWYDITGNRSDTVKIGSDGWGEFHVNDQSVSIYVQK

SEQ ID NO: 32909 - protein, 483 aa, Bacillus sp.
HHDGTNGTIMQYFEWNVPNDGQHWNRLHNNAQNLKNAGITAIWIPPAWKGTSQNDVGYGAYDLYDLGEFNQKGTVRTKYGTKAELERAIRSLKANGIQVYGDVVMNHKGGADFTERVQAVEVNPQNRNQEVSGTYEIEAWTGFNFPGRGNQHSSFKWRWYHFDGTDWDQSRQLSNRIYKFRGKAWDWEVDTENGNYDYLMYADVDMNHPXVINELNRWGVWYANTLNLDGFRLDAVKHIQFSFMRNWLGHVRGQTGKNLFAVAEYWKNDLGALENYLSKTNWTMSAFDVPLHYNLYQASNSGGNYDMRNLLNGTLVQRHPSHAVTFVDNHDTQPGEALESFVQGWFKPLAYATILTREQGYPQVFYGDYYGIPSDGVPSYRQQIDPLLKARQQYAYGRQHDYFDHWDVIGWTREGNASHPNSGLATIMSDGPGGSKWMYVGRQKAGEVWHDITGNRSGTVTINQDGWGQFFVNGGSVSVWVKR

SEQ ID NO: 32910 - protein, 485 aa, Bacillus sp.
HHDGTNGTIMQYFEWNVPNDGQHWNRLHNNAQNLKNAGITAIWIPPAWKGTSQNDVGYGAYDLYDLGEFNQKGTVRTKYGTKAELERAIRSLKANGIQVYGDVVMNHKGGADFTERVQAVEVNPQNRNQEVSGTYQIEAWTGFNFPGRGNQHSSFKWRWYHFDGTDWDQSRQLANRIYKFRGDGKAWDWEVDTENGNYDYLVSADVDMDHPEVINELNRWGVWYANTLNLDGFRLDAVKHIKFSFMRDWLGHVRGQTGKNLFAVAEYWKNDLGALENYLSKTNWTMSAFDVPLHYNLYQASNSSGNYDMRNLLNGTLVQRHPSHAVTFVDNHDTQPGEALESFVQGWFKPLAYATILTREQGYPQVFYGDYYGIPSDGVPSYRQQIDPLLKARQQYAYGRQHDYFDHWDVIGWTREGNASHPNSGLATIMSDGPGGSKWMYVGRQKAGEVWHDMTGNRSGTVTINQDGWGHFFVNGGSVSVWVKR

SEQ ID NO: 32911 - protein, 485 aa, Bacillus sp.
HHDGTNGTIMQYFEWNVPNDGQHWNRLHNNAQNLKNAGITAIWIPPAWKGTSQNDVGYGAYDLYDLGEFNQKGTVRTKYGTKAELERAIRSLKANGIQVYGDVVMNHKGGADFTERVQAVEVNPQNRNQEVSGTYQIEAWTGFNFPGRGNQHSSFKWRWYHFDGTDWDQSRQLANRIYKFRGDGKAWDWEVDTENGNYDYLNPADVDMDHPEVINELNRWGVWYANTLNLDGFRLDAVKHIKFSFMRDWLGHVRGQTGKNLFAVAEYWKNDLGALENYLSKTNWTMSAFDVPLHYNLYQASNSSGNYDMRNLLNGTLVQRHPSHAVTFVDNHDTQPGEALESFVQGWFKPLAYATILTREQGYPQVFYGDYYGIPSDGVPSYRQQIDPLLKARQQYAYGRQHDYFDHWDVIGWTREGNASHPNSGLATIMSDGPGGSKWMYVGRQKAGEVWHDMTGNRSGTVTINQDGWGHFFVNGGSVSVWVKR

SEQ ID NO: 32912 - protein, 485 aa, Bacillus sp.
HHDGTNGTIMQYFEWNVPNDGQHWNRLHNNAQNLKNAGITAIWIPPAWKGTSQNDVGYGAYDLYDLGEFNQKGTVRTKYGTKAELERAIRSLKANGIQVYGDVVMNHKGGADFTERVQAVEVNPQNRNQEVSGTYQIEAWTGFNFPGRGNQHSSFKWRWYHFDGTDWDQSRQLANRIYKFRGDGKAWDWEVDTENGNYDYPWYADVDMDHPEVINELNRWGVWYANTLNLDGFRLDAVKHIKFSFMRDWLGHVRGQTGKNLFAVAEYWKNDLGALENYLSKTNWTMSAFDVPLHYNLYQASNSSGNYDMRNLLNGTLVQRHPSHAVTFVDNHDTQPGEALESFVQGWFKPLAYATILTREQGYPQVFYGDYYGIPSDGVPSYRQQIDPLLKARQQYAYGRQHDYFDHWDVIGWTREGNASHPNSGLATIMSDGPGGSKWMYVGRQKAGEVWHDMTGNRSGTVTINQDGWGHFFVNGGSVSVWVKR

SEQ ID NO: 32913 - protein, 483 aa, Bacillus sp. (in: firmicutes)
HHDGTNGTIMQYFEWNVPNDGQHWNRLHNNAQNLKNAGITAIWIPPAWKGTSQNDVGYGAYDLYDLGEFNQKGTVRTKYGTKAELERAIRSLKANGIQVYGDVVMNHKGGADFTESVQAVEVNPQNRNQEVFGTYQIEAWTGFNFPGRGNQHSSFKWRWYHFDGTDWDQSRQLANRIYKFNGKAWDWEVDTEFGNYDYLMYADVDMDHPEVINELNRWGVWYANTLNLDGFRLDAVKHIKFSFMRDWLGHVRGQTGKNLFAVAEYWKNDLGALENYLSKTNWTMSAFDVPLHYNLYQASNSSGNYDMRNLLNGTLVQRHPSHAVTFVDNHDTQPGEALESFVQGWFKPLAYATILTREQGYPSVFYGDYYGIPSDGVPSYRQQIDPLLKARQQYAYGRQHDYFDHWDVIGWTREGNASHPNSGLATIMSDGPGGSKWMYVGRQKAGEVWHDMTGNRSGTVTINQDGWGHFFVNGGSVSVWVKR

SEQ ID NO: 32914 - protein, 485 aa, Bacillus sp.
HHDGTNGTIMQYFEWNVPNDGQHWNRLHNNAQNLKNAGITAIWIPPAWKGTSQNDVGYGAYDLYDLGEFNQKGTVRTKYGTKAELERAIRSLKANGIQVYGDVVMNHKGGADFTERVQAVEVNPQNRNQEVSGTYQIEAWTGFNFPGRGNQHSSFKWRWYHFDGTDWDQSRQLANRIYKFRGDGKAWDWEVDTENGNYDYLLYGDVDMDHPEVINELNRWGVWYANTLNLDGFRLDAVKHIKFSFMRDWLGHVRGQTGKNLFAVAEYWKNDLGALENYLSKTNWTMSAFDVPLHYNLYQASNSSGNYDMRNLLNGTLVQRHPSHAVTFVDNHDTQPGEALESFVQGWFKPLAYATILTREQGYPQVFYGDYYGIPSDGVPSYRQQIDPLLKARQQYAYGRQHDYFDHWDVIGWTREGNASHPNSGLATIMSDGPGGSKWMYVGRQKAGEVWHDMTGNRSGTVTINQDGWGHFFVNGGSVSVWVKR

SEQ ID NO: 32915 - protein, 485 aa, Bacillus sp.
HHDGTNGTIMQYFEWNVPNDGQHWNRLHNNAQNLKNAGITAIWIPPAWKGTSQNDVGYGAYDLYDLGEFNQKGTVRTKYGTKAELERAIRSLKANGIQVYGDVVMNHKGGADFTERVQAVEVNPQNRNQEVSGTYQIEAWTGFNFPGRGNQHSSFKWRWYHFDGTDWDQSRQLANRIYKFRGDGKAWDWEVDTENGNYDYELYADVDMDHPEVINELNRWGVWYANTLNLDGFRLDAVKHIKFSFMRDWLGHVRGQTGKNLFAVAEYWKNDLGALENYLSKTNWTMSAFDVPLHYNLYQASNSSGNYDMRNLLNGTLVQRHPSHAVTFVDNHDTQPGEALESFVQGWFKPLAYATILTREQGYPQVFYGDYYGIPSDGVPSYRQQIDPLLKARQQYAYGRQHDYFDHWDVIGWTREGNASHPNSGLATIMSDGPGGSKWMYVGRQKAGEVWHDMTGNRSGTVTINQDGWGHFFVNGGSVSVWVKR

SEQ ID NO: 32916 - protein, 485 aa, Bacillus sp.
HHDGTNGTIMQYFEWNVPNDGQHWNRLHNNAQNLKNAGITAIWIPPAWKGTSQNDVGYGAYDLYDLGEFNQKGTVRTKYGTKAELERAIRSLKANGIQVYGDVVMNHKGGADFTERVQAVEVNPQNRNQEVSGTYQIEAWTGFNFPGRGNQHSSFKWRWYHFDGTDWDQSRQLANRIYKFRGDGKAWDWEVDTENGNYDYSVYADVDMDHPEVINELNRWGVWYANTLNLDGFRLDAVKHIKFSFMRDWLGHVRGQTGKNLFAVAEYWKNDLGALENYLSKTNWTMSAFDVPLHYNLYQASNSSGNYDMRNLLNGTLVQRHPSHAVTFVDNHDTQPGEALESFVQGWFKPLAYATILTREQGYPQVFYGDYYGIPSDGVPSYRQQIDPLLKARQQYAYGRQHDYFDHWDVIGWTREGNASHPNSGLATIMSDGPGGSKWMYVGRQKAGEVWHDMTGNRSGTVTINQDGWGHFFVNGGSVSVWVKR

SEQ ID NO: 32917 - protein, 483 aa, Bacillus sp.
HHDGTNGTIMQYFEWNVPNDGQHWNRLHNNAQNLKNAGITAIWIPPAWKGTSQNDVGYGAYDLYDLGEFNQKGTVRTKYGTKAELERAIRSLKANGIQVYGDVVMNHKGGADFTERVQAVEVNPQNRNQEVSGTYEIEAWTGFNFPGRGNQHSSFKWRWYHFDGTDWDQSRQLSNRIYKFRGKAWDWEVDTEFGNYDYLMYADVDMNHPEVINELNRWGVWYANTLNLDGFRLDAVKHIQFSFMRNWLGHVRGQTGKNLFAVAEYWKNDLGALENYLSKTNWTMSAFDVPLHYNLYQASNSGGNYDMRNLLNGTLVQRHPSHAVTFVDNHDTQPGEALESFVQGWFKPLAYATILTREQGYPQVFYGDYYGIPSDGVPSYRQQIDPLLKARQQYAYGRQHDYFDHWDVIGWTREGNASHPNSGLATIMSDGPGGSKWMYVGRQKAGEVWHDITGNRSGTVTINQDGWGQFFVNGGSVSVWVKR

SEQ ID NO: 32918 - protein, 485 aa, Bacillus sp.
HHDGTNGTIMQYFEWNVPNDGQHWNRLHNNAQNLKNAGITAIWIPPAWKGTSQNDVGYGAYDLYDLGEFNQKGTVRTKYGTKAELERAIRSLKANGIQVYGDVVMNHKGGADFTERVQAVEVNPQNRNQEVSGTYQIEAWTGFNFPGRGNQHSSFKWRWYHFDGTDWDQSRQLANRIYKFRGDGKAWDWEVDTENGNYDYGLYADVDMDHPEVINELNRWGVWYANTLNLDGFRLDAVKHIKFSFMRDWLGHVRGQTGKNLFAVAEYWKNDLGALENYLSKTNWTMSAFDVPLHYNLYQASNSSGNYDMRNLLNGTLVQRHPSHAVTFVDNHDTQPGEALESFVQGWFKPLAYATILTREQGYPQVFYGDYYGIPSDGVPSYRQQIDPLLKARQQYAYGRQHDYFDHWDVIGWTREGNASHPNSGLATIMSDGPGGSKWMYVGRQKAGEVWHDMTGNRSGTVTINQDGWGHFFVNGGSVSVWVKR

SEQ ID NO: 32919 - protein, 485 aa, Bacillus sp.
HHDGTNGTIMQYFEWNVPNDGQHWNRLHNNAQNLKNAGITAIWIPPAWKGTSQNDVGYGAYDLYDLGEFNQKGTVRTKYGTKAELERAIRSLKANGIQVYGDVVMNHKGGADFTERVQAVEVNPQNRNQEVSGTYQIEAWTGFNFPGRGNQHSSFKWRWYHFDGTDWDQSRQLANRIYKFRGDGKAWDWEVDTENGNYDYLLFADVDMDHPEVINELNRWGVWYANTLNLDGFRLDAVKHIKFSFMRDWLGHVRGQTGKNLFAVAEYWKNDLGALENYLSKTNWTMSAFDVPLHYNLYQASNSSGNYDMRNLLNGTLVQRHPSHAVTFVDNHDTQPGEALESFVQGWFKPLAYATILTREQGYPQVFYGDYYGIPSDGVPSYRQQIDPLLKARQQYAYGRQHDYFDHWDVIGWTREGNASHPNSGLATIMSDGPGGSKWMYVGRQKAGEVWHDMTGNRSGTVTINQDGWGHFFVNGGSVSVWVKR

SEQ ID NO: 32920 - protein, 485 aa, Bacillus sp.
HHDGTNGTIMQYFEWNVPNDGQHWNRLHNNAQNLKNAGITAIWIPPAWKGTSQNDVGYGAYDLYDLGEFNQKGTVRTKYGTKAELERAIRSLKANGIQVYGDVVMNHKGGADFTERVQAVEVNPQNRNQEVSGTYQIEAYTGFNFPGRGNQHSSFKWRWYHFDGTDWDQSRQLANRIYKFRGDGKAWDWEVDTENGNYDYLMYADVDMDHPEVINELNRWGVWYANTLNLDGFRLDAVKHIKFSFMRDWLGHVRGQTGKNLFAVAEYWKNDLGALENYLSKTNWTMSAFDVPLHYNLYQASNSRGNYDMRNLLNGTLVQRHPSHAVTFVDNHDTQPGEALESFVQGWFKPLAYATILTREQGYPQVFYGDYYGIPSDGVPSYRQQIDPLLKARQQYAYGRQHDYFDHWDVIGWTREGNASHPNSGLATIMSDGPGGSKWMYVGRQKAGEVWHDMTGNRSGTVTINQDGWGHFFVKGGSVSVWVKR

SEQ ID NO: 32921 - protein, 485 aa, Bacillus sp.
HHDGTNGTIMQYFEWNVPNDGQHWNRLHNNAQNLKNAGITAIWIPPAWKGTSQNDVGYGAYDLYDLGEFNQKGTVRTKYGTKAELERAIRSLKANGIQVYGDVVMNHKGGADFTERVQAVEVNPQNRNQEVSGTYQIEAWTGFNFPGRGNQHSSFKWRWYHFDGTDWDQSRQLANRIYKFRGDGKAWDWEVDTENGNYDYHQYADVDMDHPEVINELNRWGVWYANTLNLDGFRLDAVKHIKFSFMRDWLGHVRGQTGKNLFAVAEYWKNDLGALENYLSKTNWTMSAFDVPLHYNLYQASNSSGNYDMRNLLNGTLVQRHPSHAVTFVDNHDTQPGEALESFVQGWFKPLAYATILTREQGYPQVFYGDYYGIPSDGVPSYRQQIDPLLKARQQYAYGRQHDYFDHWDVIGWTREGNASHPNSGLATIMSDGPGGSKWMYVGRQKAGEVWHDMTGNRSGTVTINQDGWGHFFVNGGSVSVWVKR

SEQ ID NO: 32922 - protein, 485 aa, Bacillus sp.
HHDGTNGTIMQYFEWNVPNDGQHWNRLHNNAQNLKNAGITAIWIPPAWKGTSQNDVGYGAYDLYDLGEFNQKGTVRTKYGTKAELERAIRSLKANGIQVYGDVVMNHKGGADFTERVQAVEVNPQNRNQEVSGTYQIEAWTGFNFPGRGNQHSSFKWRWYHFDGTDWDQSRQLANRIYKFRGDGKAWDWEVDTEXGNYDYLMYADVDMDHPEVINXLNRWGVWYANTLNLDGFRLDAVKHIKFSFMRDWLGHVRGQTGKNLFAVAEYWKNDLGALENYLSKTNWTMSAFDVPLHYNLYQASNSSGNYDMRNLLNGTLVQRHPSHAVTFVDNHDTQPGEALESFVQGWFKPLAYATILTREQGYPQVFYGDYYGIPSDGVPSYRQQIDPLLKARQQYAYGRQHDYFDHWDVIGWTREGNASHPNSGLATIMSDGPGGSKWMYVGRQKAGEVWHDMTGNRSGTVTINQDGWGHFFVNGGSVSVWVKR

SEQ ID NO: 32923 - protein, 485 aa, Bacillus sp.
HHDGTNGTIMQYFEWNVPNDGQHWNRLHNNAQNLKNAGITAIWIPPAWKGTSQNDVGYGAYDLYDLGEFNQKGTVRTKYGTKAELERAIRSLKANGIQVYGDVVMNHKGGADFTERVQAVEVNPQNRNQEVSGTYQIEAWTGFNFPGRGNQHSSFKWRWYHFDGTDWDQSRQLANRIYKFRGDGKAWDWEVDTENGNYDYLQEADVDMDHPEVINELNRWGVWYANTLNLDGFRLDAVKHIKFSFMRDWLGHVRGQTGKNLFAVAEYWKNDLGALENYLSKTNWTMSAFDVPLHYNLYQASNSSGNYDMRNLLNGTLVQRHPSHAVTFVDNHDTQPGEALESFVQGWFKPLAYATILTREQGYPQVFYGDYYGIPSDGVPSYRQQIDPLLKARQQYAYGRQHDYFDHWDVIGWTREGNASHPNSGLATIMSDGPGGSKWMYVGRQKAGEVWHDMTGNRSGTVTINQDGWGHFFVNGGSVSVWVKR

SEQ ID NO: 32924 - protein, 485 aa, Bacillus sp.
HHDGTNGTIMQYFEWNVPNDGQHWNRLHNNAQNLKNAGITAIWIPPAWKGTSQNDVGYGAYDLYDLGEFNQKGTVRTKYGTKAELERAIRSLKANGIQVYGDVVMNHKGGADFTERVQAVEVNPQNRNQEVSGTYQIEAWTGFNFPGRGNQHSSFKWRWYHFDGTDWDQSRQLANRIYKFRGDGKAWDWEVDTENGNYDYSGYADVDMDHPEVINELNRWGVWYANTLNLDGFRLDAVKHIKFSFMRDWLGHVRGQTGKNLFAVAEYWKNDLGALENYLSKTNWTMSAFDVPLHYNLYQASNSSGNYDMRNLLNGTLVQRHPSHAVTFVDNHDTQPGEALESFVQGWFKPLAYATILTREQGYPQVFYGDYYGIPSDGVPSYRQQIDPLLKARQQYAYGRQHDYFDHWDVIGWTREGNASHPNSGLATIMSDGPGGSKWMYVGRQKAGEVWHDMTGNRSGTVTINQDGWGHFFVNGGSVSVWVKR

SEQ ID NO: 32925 - protein, 483 aa, Bacillus sp. (in: firmicutes)
HHDGTNGTIMQYFEWNVPNDGQHWNRLHNNAQNLKNAGITAIWIPPAWKGTSQNDVGYGAYDLYDLGEFNQKGTVRTKYGTKAELERAIRSLKANGIQVYGDVVMNHKGGADFTERVQAVEVNPQNRNQEVSGTYQIEAWTGFNFPGRGNQHSSFKWRWYHFDGTDWDQSRQLANRIYKFRGKAMDWEVDTEFGNYDYLMYADVDMDKPEVINELNRWGVWYANTLNLDGFRLDAVKHIKFSFMRDWLGHVRGQTGKNLFAVAEYWKNDLGALENYLSKTNWTMSAFDVPLHYNLYQASNSSGNYDMRNLLNGTLVQRHPSHAVTFVDNHDTQPGEALESFVQGWFKPLAYATILTREQGYPSVFYGDYYGIPSDGVPSYRQQIDPLLKARQQYAYGRQHDYFDHWDVIGWTREGNASHPNSGLATIMSDGPGGSKWMYVGRQKAGEVWHDMTGNRSGTVTINQDGWGHFFVNGGSVSVWVKR

SEQ ID NO: 32926 - protein, 485 aa, Bacillus sp.
HHDGTNGTIMQYFEWNVPNDGQHWNRLHNNAQNLKNAGITAIWIPPAWKGTSQNDVGYGAYDLYDLGEFNQKGTVRTKYGTKAELERAIRSLKANGIQVYGDVVMNHKGGADFTERVQAVEVNPQNRNQEVSGTYQIEAYTGFNFPGRGNQHSSFKWRWYHFDGTDWDQSRQLANRIYKFRGDGKAWDWEVDTENGNYDYLMYADVDMDHPEVINELNRWGVWYANTLNLDGFRLDAVKHIKFSFMRDWLGHVRGQTGKNLFAVAEYWKNDLGALENYLSKTNWTMSAFDVPLHYNLYQASNSRGNYDMRNLLNGTLVQRHPSHAVTFVDNHDTQPGEALESFVQGWFKPLAYATILTREQGYPQVFYGDYYGIPSDGVPSYRQQIDPLLKARQQYAYGRQHDYFDHWDVIGWTREGNASHPNSGLATIMSDGPGGSKWMYVGRQKAGEVWHDMTGNRSGTVTINQDGWGHFFVNKGSVSVWVKR

SEQ ID NO: 32927 - protein, 485 aa, Bacillus sp.
HHDGTNGTIMQYFEWNVPNDGQHWNRLHNNAQNLKNAGITAIWIPPAWKGTSQNDVGYGAYDLYDLGEFNQKGTVRTKYGTKAELERAIRSLKANGIQVYGDVVMNHKGGADFTERVQAVEVNPQNRNQEVSGTYQIEAWTGFNFPGRGNQHSSFKWRWYHFDGTDWDQSRQLANRIYKFRGDGKAWDWEVDTENGNYDWLHYADVDMDHPEVINELNRWGVWYANTLNLDGFRLDAVKHIKFSFMRDWLGHVRGQTGKNLFAVAEYWKNDLGALENYLSKTNWTMSAFDVPLHYNLYQASNSSGNYDMRNLLNGTLVQRHPSHAVTFVDNHDTQPGEALESFVQGWFKPLAYATILTREQGYPQVFYGDYYGIPSDGVPSYRQQIDPLLKARQQYAYGRQHDYFDHWDVIGWTREGNASHPNSGLATIMSDGPGGSKWMYVGRQKAGEVWHDMTGNRSGTVTINQDGWGHFFVNGGSVSVWVKR

SEQ ID NO: 32928 - protein, 485 aa, Bacillus sp.
HHDGTNGTIMQYFEWNVPNDGQHWNRLHNNAQNLKNAGITAIWIPPAWKGTSQNDVGYGAYDLYDLGEFNQKGTVRTKYGTKAELERAIRSLKANGIQVYGDVVMNHKGGADFTERVQAVEVNPQNRNQEVSGTYQIEAWTGFNFPGRGNQHSSFKWRWYHFDGTDWDQSRQLANRIYKFRGDGKAWDWEVDTENGNYDYLMYADVDMDHPEVINELNRWGVWYANTLNLDGFRLDAVKHIKFSFMRDWLGHVRGQTGKNLFAVAEYWKNDLGALENYLSKTNWTMSAFDVPLHYNLYQASNSSGNYDMRNLLNGTLVQRHPSHAVTFVDNHDTQPGEALESFVQGWFKPLAYATILTREQGYPQVFYGDYYGIPSDGVPSYRQQIDPLLKARQQYAYGRQHDYFDHWDVIGWTREGNASHPNSGLATIMSDGPGGSKWMYVGRQKAGEVWHDMTGNRSGTVTINQDGTGHFFVNGRSVSVWVKR

SEQ ID NO: 32929 - protein, 485 aa, Bacillus sp.
HHDGTNGTIMQYFEWNVPNDGQHWNRLHNNAQNLKNAGITAIWIPPAWKGTSQNDVGYGAYDLYDLGEFNQKGTVRTKYGTKAELERAIRSLKANGIQVYGDVVMNHKGGADFTERVQAVEVNPQNRNQEVSGTYQIEAWTGFNFPGRGNQHSSFKWRWYHFDGTDWDQSRQLANRIYKFRGDGKAWDWEVDTENGNYDYLLIADVDMDHPEVINELNRWGVWYANTLNLDGFRLDAVKHIKFSFMRDWLGHVRGQTGKNLFAVAEYWKNDLGALENYLSKTNWTMSAFDVPLHYNLYQASNSSGNYDMRNLLNGTLVQRHPSHAVTFVDNHDTQPGEALESFVQGWFKPLAYATILTREQGYPQVFYGDYYGIPSDGVPSYRQQIDPLLKARQQYAYGRQHDYFDHWDVIGWTREGNASHPNSGLATIMSDGPGGSKWMYVGRQKAGEVWHDMTGNRSGTVTINQDGWGHFFVNGGSVSVWVKR

SEQ ID NO: 32930 - protein, 485 aa, Bacillus sp.
HHDGTNGTIMQYFEWNVPNDGQHWNRLHNNAQNLKNAGITAIWIPPAWKGTSQNDVGYGAYDLYDLGEFNQKGTVRTKYGTKAELERAIRSLKANGIQVYGDVVMNHKGGADFTERVQAVEVNPQNRNQEVSGTYQIEAWTGFNFPGRGNQHSSFKWRWYHFDGTDWDQSRQLANRIYKFRGDGKAWDWEVDTENGNYDYLMYADVDMDHPXVINELNRWGVWYANTLNLDGFRLDAVKHIKFSFMRDWLGHVRGQTGKNLFAVAEYWXNDLGALENYLSKTNWTMSAFDVPLHYNLYQASNSSGNYDMRNLLNGTLVQRHPSHAVTFVDNHDTQPGEALESFVQGWFKPLAYATILTREQGYPQVFYGDYYGIPSDGVPSYRQQIDPLLKARQQYAYGRQHDYFDHWDVIGWTREGNASHPNSGLATIMSDGPGGSKWMYVGRQKAGEVWHDMTGNRSGTVTINQDGWGHFFVNGGSVSVWVKR

SEQ ID NO: 32931 - protein, 485 aa, Bacillus sp.
HHDGTNGTIMQYFEWNVPNDGQHWNRLHNNAQNLKNAGITAIWIPPAWKGTSQNDVGYGAYDLYDLGEFNQKGTVRTKYGTKAELERAIRSLKANGIQVYGDVVMNHKGGADFTERVQAVEVNPQNRNQEVSGTYQIEAWTGFNFPGRGNQHSSFKWRWYHFDGTDWDQSRQLANRIYKFRGDGKAWDWEVDTENGNYDKLQYADVDMDHPEVINELNRWGVWYANTLNLDGFRLDAVKHIKFSFMRDWLGHVRGQTGKNLFAVAEYWKNDLGALENYLSKTNWTMSAFDVPLHYNLYQASNSSGNYDMRNLLNGTLVQRHPSHAVTFVDNHDTQPGEALESFVQGWFKPLAYATILTREQGYPQVFYGDYYGIPSDGVPSYRQQIDPLLKARQQYAYGRQHDYFDHWDVIGWTREGNASHPNSGLATIMSDGPGGSKWMYVGRQKAGEVWHDMTGNRSGTVTINQDGWGHFFVNGGSVSVWVKR

SEQ ID NO: 32932 - protein, 485 aa, Bacillus sp.
HHDGTNGTIMQYFEWNVPNDGQHWNRLHNNAQNLKNAGITAIWIPPAWKGTSQNDVGYGAYDLYDLGEFNQKGTVRTKYGTKAELERAIRSLKANGIQVYGDVVMNHKGGADFTERVQAVEVNPQNRNQEVSGTYQIEAWTGFNFPGRGNQHSSFKWRWYHFDGTDWDQSRQLANRIYKFRGDGKAWDWEVDTENGNYDILLYADVDMDHPEVINELNRWGVWYANTLNLDGFRLDAVKHIKFSFMRDWLGHVRGQTGKNLFAVAEYWKNDLGALENYLSKTNWTMSAFDVPLHYNLYQASNSSGNYDMRNLLNGTLVQRHPSHAVTFVDNHDTQPGEALESFVQGWFKPLAYATILTREQGYPQVFYGDYYGIPSDGVPSYRQQIDPLLKARQQYAYGRQHDYFDHWDVIGWTREGNASHPNSGLATIMSDGPGGSKWMYVGRQKAGEVWHDMTGNRSGTVTINQDGWGHFFVNGGSVSVWVKR

SEQ ID NO: 32933 - protein, 485 aa, Bacillus sp.
HHDGTNGTIMQYFEWNVPNDGQHWNRLHNNAQNLKNAGITAIWIPPAWKGTSQNDVGYGAYDLYDLGEFNQKGTVRTKYGTKAELERAIRSLKANGIQVYGDVVMNHKGGADFTERVQAVEVNPQNRNQEVSGTYQIEAWTGFNFPGRGNQHSSFKWRWYHFDGTDWDQSRQLANRIYKFRGDGKAWDWEVDTENGNYDQLPYADVDMDHPEVINELNRWGVWYANTLNLDGFRLDAVKHIKFSFMRDWLGHVRGQTGKNLFAVAEYWKNDLGALENYLSKTNWTMSAFDVPLHYNLYQASNSSGNYDMRNLLNGTLVQRHPSHAVTFVDNHDTQPGEALESFVQGWFKPLAYATILTREQGYPQVFYGDYYGIPSDGVPSYRQQIDPLLKARQQYAYGRQHDYFDHWDVIGWTREGNASHPNSGLATIMSDGPGGSKWMYVGRQKAGEVWHDMTGNRSGTVTINQDGWGHFFVNGGSVSVWVKR

SEQ ID NO: 32934 - protein, 485 aa, Bacillus sp.
HHDGTNGTIMQYFEWNVPNDGQHWNRLHNNAQNLKNAGITAIWIPPAWKGTSQNDVGYGAYDLYDLGEFNQKGTVRTKYGTKAELERAIRSLKANGIQVYGDVVMNHKGGADFTERVQAVEVNPQNRNQEVSGTYQIEAWTGFNFPGRGNQHSSFKWRWYHFDGTDWDQSRQLANRIYKFRGDGKAWDWEVDTENGNYDYLMYADXDMDHPEVINELNRWGVWYANTLNLDGFRLDAVKHIKFSFMRDWLGHVRGQTGKNLFAVAEYWXNDLGALENYLSKTNWTMSAFDVPLHYNLYQASNSSGNYDMRNLLNGTLVQRHPSHAVTFVDNHDTQPGEALESFVQGWFKPLAYATILTREQGYPQVFYGDYYGIPSDGVPSYRQQIDPLLKARQQYAYGRQHDYFDHWDVIGWTREGNASHPNSGLATIMSDGPGGSKWMYVGRQKAGEVWHDMTGNRSGTVTINQDGWGHFFVNGGSVSVWVKR

SEQ ID NO: 32935 - protein, 483 aa, Bacillus sp. (in: firmicutes)
HHDGTNGTIMQYFEWNVPNDGQHWNRLHNNAQNLKNAGITAIWIPPAWKGTSQNDVGYGAYDLYDLGEFNQKGTVRTKYGTKAELERAIRSLKANGIQVYGDVVMNHKGGADFTERVQAVEVNPQNRNQEVSGTYQIEAWTGFNFPGRGNQHSSFKWRWYHFDGTDWDQSRQLANRIYKFRGKAWDWEVDTENGNYDYLMYADVDMDHPEVINELNRWGVWYANTLNLDGFRLDAVKHIKFSFMRDWLGHVRGQTGKNLFAIGEYWKNDLGALENYLSKTNWTMSAFDVPLHYNLYQASNSSGNYDMRNLLNGTLVQRHPSHAVTFVDNHDTQPGEALESFVQGWFKPLAYATILTREQGYPCVFYGDYYGIPSDGVPSYRQQIDPLLKARQQYAYGRQHDYFDHWDVIGWTREGNASHPNSGLATIMSDGPGGSKWMYVGRQKAGEVWHDMTGNRSGTVTINQDGWGHFFVNGGSVSVWVKR

SEQ ID NO: 32936 - protein, 485 aa, Bacillus sp.
HHDGTNGTIMQYFEWNVPNDGQHWNRLHNNAQNLKNAGITAIWIPPAWKGTSQNDVGYGAYDLYDLGEFNQKGTVRTKYGTKAELERAIRSLKANGIQVYGDVVMNHKGGADFTERVQAVEVNPQNRNQEVSGTYQIEAWTGFNFPGRGNQHSSFKWRWYHFDGTDWDQSRQLANRIYKFRGDGKAWDWEVDTENGNYDYREYADVDMDHPEVINELNRWGVWYANTLNLDGFRLDAVKHIKFSFMRDWLGHVRGQTGKNLFAVAEYWKNDLGALENYLSKTNWTMSAFDVPLHYNLYQASNSSGNYDMRNLLNGTLVQRHPSHAVTFVDNHDTQPGEALESFVQGWFKPLAYATILTREQGYPQVFYGDYYGIPSDGVPSYRQQIDPLLKARQQYAYGRQHDYFDHWDVIGWTREGNASHPNSGLATIMSDGPGGSKWMYVGRQKAGEVWHDMTGNRSGTVTINQDGWGHFFVNGGSVSVWVKR

SEQ ID NO: 32937 - protein, 485 aa, Bacillus sp.
HHDGTNGTIMQYFEWNVPNDGQHWNRLHNNAQNLKNAGITAIWIPPAWKGTSQNDVGYGAYDLYDLGEFNQKGTVRTKYGTKAELERAIRSLKANGIQVYGDVVMNHKGGADFTERVQAVEVNPQNRNQEVSGTYQIEAWTGFNFPGRGNQHSSFKWRWYHFDGTDWDQSRQLANRIYKFRGDGKAWDWEVDTENGNYDVLLYADVDMDHPEVINELNRWGVWYANTLNLDGFRLDAVKHIKFSFMRDWLGHVRGQTGKNLFAVAEYWKNDLGALENYLSKTNWTMSAFDVPLHYNLYQASNSSGNYDMRNLLNGTLVQRHPSHAVTFVDNHDTQPGEALESFVQGWFKPLAYATILTREQGYPQVFYGDYYGIPSDGVPSYRQQIDPLLKARQQYAYGRQHDYFDHWDVIGWTREGNASHPNSGLATIMSDGPGGSKWMYVGRQKAGEVWHDMTGNRSGTVTINQDGWGHFFVNGGSVSVWVKR

SEQ ID NO: 32938 - protein, 485 aa, Bacillus sp.
HHDGTNGTIMQYFEWNVPNDGQHWNRLHNNAQNLKNAGITAIWIPPAWKGTSQNDVGYGAYDLYDLGEFNQKGTVRTKYGTKAELERAIRSLKANGIQVYGDVVMNHKGGADFTERVQAVEVNPQNRNQEVSGTYQIEAWTGFNFPGRGNQHSSFKWRWYHFDGTDWDQSRQLANRIYKFRGDGKAWDWEVDTENGNYDYLFTADVDMDHPEVINELNRWGVWYANTLNLDGFRLDAVKHIKFSFMRDWLGHVRGQTGKNLFAVAEYWKNDLGALENYLSKTNWTMSAFDVPLHYNLYQASNSSGNYDMRNLLNGTLVQRHPSHAVTFVDNHDTQPGEALESFVQGWFKPLAYATILTREQGYPQVFYGDYYGIPSDGVPSYRQQIDPLLKARQQYAYGRQHDYFDHWDVIGWTREGNASHPNSGLATIMSDGPGGSKWMYVGRQKAGEVWHDMTGNRSGTVTINQDGWGHFFVNGGSVSVWVKR

SEQ ID NO: 32939 - protein, 485 aa, Bacillus sp.
HHDGTNGTIMQYFEWNVPNDGQHWNRLHNNAQNLKNAGITAIWIPPAWKGTSQNDVGYGAYDLYDLGEFNQKGTVRTKYGTKAELERAIRSLKANGIQVYGDVVMNHKGGADFTERVQAVEVNPQNRNQEVSGTYQIEAWTGFNFPGRGNQHSSFKWRWYHFDGTDWDQSRQLANRIYKFRGDGKAWDWEVDTENGNYDWLGYADVDMDHPEVINELNRWGVWYANTLNLDGFRLDAVKHIKFSFMRDWLGHVRGQTGKNLFAVAEYWKNDLGALENYLSKTNWTMSAFDVPLHYNLYQASNSSGNYDMRNLLNGTLVQRHPSHAVTFVDNHDTQPGEALESFVQGWFKPLAYATILTREQGYPQVFYGDYYGIPSDGVPSYRQQIDPLLKARQQYAYGRQHDYFDHWDVIGWTREGNASHPNSGLATIMSDGPGGSKWMYVGRQKAGEVWHDMTGNRSGTVTINQDGWGHFFVNGGSVSVWVKR

SEQ ID NO: 32940 - protein, 485 aa, Bacillus sp.
HHDGTNGTIMQYFEWNVPNDGQHWNRLHNNAQNLKNAGITAIWIPPAWKGTSQNDVGYGAYDLYDLGEFNQKGTVRTKYGTKAELERAIRSLKANGIQVYGDVVMNHKGGADFTERVQAVEVNPQNRNQEVSGTYQIEAWTGFNFPGRGNQHSSFKWRWYHFDGTDWDQSRQLANRIYKFRGDGKAWDWEVDTENGNYDYLLYTDVDMDHPEVINELNRWGVWYANTLNLDGFRLDAVKHIKFSFMRDWLGHVRGQTGKNLFAVAEYWKNDLGALENYLSKTNWTMSAFDVPLHYNLYQASNSSGNYDMRNLLNGTLVQRHPSHAVTFVDNHDTQPGEALESFVQGWFKPLAYATILTREQGYPQVFYGDYYGIPSDGVPSYRQQIDPLLKARQQYAYGRQHDYFDHWDVIGWTREGNASHPNSGLATIMSDGPGGSKWMYVGRQKAGEVWHDMTGNRSGTVTINQDGWGHFFVNGGSVSVWVKR

SEQ ID NO: 32941 - protein, 485 aa, Bacillus sp.
HHDGTNGTIMQYFEWNVPNDGQHWNRLHNNAQNLKNAGITAIWIPPAWKGTSQNDVGYGAYDLYDLGEFNQKGTVRTKYGTKAELERAIRSLKANGIQVYGDVVMNHKGGADFTERVQAVEVNPQNRNQEVSGTYQIEAWTGFNFPGRGNQHSSFKWRWYHFDGTDWDQSRQLANRIYKFRGDGKAWDWEVDTENGNYDYLHLADVDMDHPEVINELNRWGVWYANTLNLDGFRLDAVKHIKFSFMRDWLGHVRGQTGKNLFAVAEYWKNDLGALENYLSKTNWTMSAFDVPLHYNLYQASNSSGNYDMRNLLNGTLVQRHPSHAVTFVDNHDTQPGEALESFVQGWFKPLAYATILTREQGYPQVFYGDYYGIPSDGVPSYRQQIDPLLKARQQYAYGRQHDYFDHWDVIGWTREGNASHPNSGLATIMSDGPGGSKWMYVGRQKAGEVWHDMTGNRSGTVTINQDGWGHFFVNGGSVSVWVKR

SEQ ID NO: 32942 - protein, 485 aa, Bacillus sp.
HHDGTNGTIMQYFEWNVPNDGQHWNRLHNNAQNLKNAGITAIWIPPAWKGTSQNDVGYGAYDLYDLGEFNQKGTVRTKYGTKAELERAIRSLKANGIQVYGDVVMNHKGGADFTERVQAVEVNPQNRNQEVSGTYQIEAWTGFNFPGRGNQHSSFKWRWSHFDGTDWDQSRQLANRIYKFRGDGKAWDWEVDTDNGNYDYLMYADVDMDHPEVINELNRWGVWYANTLNLDGFRLDAVKHIKFSFMRDWLGHVRGQTGKNLFAVAEYWKNDLGALENYLSKTNWTMSAFDVPLHYNLYQASNSSGNYDMRNLLNGTLVQRHPSHAVTFVDNHDTQPGEALESFVQGWFKPLAYATILTREQGYPQVFYGDYYGIPSDGVPSYRQQIDPLLKARQQYAYGRQHDYFDHWDVIGWTREGNASHPNSGLATIMSDGPGGSKWMYVGRQKAGEVWHDMTGNRSGTVTINQDGWGHFFVNGGSVSVWVKR

SEQ ID NO: 32943 - protein, 485 aa, Bacillus sp.
HHDGTNGTIMQYFEWNVPNDGQHWNRLHNNAQNLKNAGITAIWIPPAWKGTSQNDVGYGAYDLYDLGEFNQKGTVRTKYGTKAELERAIRSLKANGIQVYGDVVMNHKGGADFTERVQAVEVNPQNRNQEVSGTYEIEAWTGFNFPGRGNQHSSFKWRWYHFDGTDWDQSRQLSNRIYKFRGDGKAWDWEVDTENGNYDYLMYADVDMNHPXVINELNRWGVWYANTLNLDGFRLDAVKHIQFSFMRNWLGHVRGQTGKNLFAVAEYWKNDLGALENYLSKTNWTMSAFDVPLHYNLYQASNSGGNYDMRNLLNGTLVQRHPSHAVTFVDNHDTQPGEALESFVQGWFKPLAYATILTREQGYPQVFYGDYYGIPSDGVPSYRQQIDPLLKARQQYAYGRQHDYFDHWDVIGWTREGNASHPNSGLATIMSDGPGGSKWMYVGRQKAGEVWHDITGNRSGTVTINQDGWGQFFVNGGSVSVWVKR

SEQ ID NO: 32944 - protein, 485 aa, Bacillus sp.
HHDGTNGTIMQYFEWNVPNDGQHWNRLHNNAQNLKNAGITAIWIPPAWKGTSQNDVGYGAYDLYDLGEFNQKGTVRTKYGTKAELERAIRSLKANGIQVYGDVVMNHKGGADFTERVQAVEVNPQNRNQEVSGTYEIEAWTGFNFPGRGNQHSSFKWRWYHFDGTDWDQSRQLSNRIYKFRGDGKAWDWEVDTENGNYDYLMYADXDMNHPEVINELNRWGVWYANTLNLDGFRLDAVKHIQFSFMRNWLGHVRGQTGKNLFAVAEYWKNDLGALENYLSKTNWTMSAFDVPLHYNLYQASNSGGNYDMRNLLNGTLVQRHPSHAVTFVDNHDTQPGEALESFVQGWFKPLAYATILTREQGYPQVFYGDYYGIPSDGVPSYRQQIDPLLKARQQYAYGRQHDYFDHWDVIGWTREGNASHPNSGLATIMSDGPGGSKWMYVGRQKAGEVWHDITGNRSGTVTINQDGWGQFFVNGGSVSVWVKR

SEQ ID NO: 32945 - protein, 485 aa, Bacillus sp.
HHDGTNGTIMQYFEWNVPNDGQHWNRLHNNAQNLKNAGITAIWIPPAWKGTSQNDVGYGAYDLYDLGEFNQKGTVRTKYGTKAELERAIRSLKANGIQVYGDVVMNHKGGADFTERVQAVEVNPQNRNQEVSGTYQIEAWTGFNFPGRGNQHSSFKWRWYHFDGTDWDQSRQLANRIYKFRGDGKAWDWEVDTENGNYDYLMYADVDMDHPEVINELNRWGVWYANTLNLDGFRLDAVKHIKFSFMRDWLGHVRGQTGKNLFAVAEYWKNDLGALENYLSKTNGTMSAFDVPLHYNLYQASNSSGNYDMRNLLNGTLVQRHPSHAVTFVDNHDTQPGEALESFVQGWFKPLAYATILTREQGYPQVFYGDYYGIPSDGVPSYRQQIDPLLKARQQYAYGRQHDYFDHWDVIGWTREGNASHPNSGLATIMSDGPGGSKNMYVGRQKAGEVWHDMTGNRSGTVTINQDGWGHFFVNGGSVSVWVKR

SEQ ID NO: 32946 - protein, 485 aa, Bacillus sp.
HHDGTNGTIMQYFEWNVPNDGQHWNRLHNNAQNLKNAGITAIWIPPAWKGTSQNDVGYGAYDLYDLGEFNQKGTVRTKYGTKAELERAIRSLKANGIQVYGDVVMNHKGGADFTERVQAVEVNPQNRNQEVSGTYQIEAWTGFNFPGRGNQHSSFKWRWYHFDGTDWDQSRQLANRIYKFRGDGKAWDWEVDTENGNYDYLLKADVDMDHPEVINELNRWGVWYANTLNLDGFRLDAVKHIKFSFMRDWLGHVRGQTGKNLFAVAEYWKNDLGALENYLSKTNWTMSAFDVPLHYNLYQASNSSGNYDMRNLLNGTLVQRHPSHAVTFVDNHDTQPGEALESFVQGWFKPLAYATILTREQGYPQVFYGDYYGIPSDGVPSYRQQIDPLLKARQQYAYGRQHDYFDHWDVIGWTREGNASHPNSGLATIMSDGPGGSKWMYVGRQKAGEVWHDMTGNRSGTVTINQDGWGHFFVNGGSVSVWVKR

SEQ ID NO: 32947 - protein, 483 aa, Bacillus sp. (in: firmicutes)
HHDGTNGTIMQYFEWNVPNDGQHWNRLHNNAQNLKNAGITAIWIPPAWKGTSQNDVGYGAYDLYDLGEFNQKGTVRTKYGTKAELERAIRSLKANGIQVYGDVVMNHKGGADFTERVQAVEVNPQNRNQEVSGTYQIEAWTGFNFPGRGNQHSSFKWRWYHFDGTDWDQSRQLANRIYKFRGKAWDWEVDTENGNYDYLMYADVDMDHPEVINELNRWGVWYANTLNLDGFRLDAVKHIKFSFMRDWLGHVRGQTGKNLFATAEYWKNDLGALENYLSKTNWTMSAFDAPLHYNLYQASNSSGNYDMRNLLNGTLVQRHPSHAVTLVDNHDTQPGEALESFVQGWFKPLAYATILTREQGYPSVFYGDYYGIPSDGVPSYRQQIDPLLKARQQYAYGRQHDYFDHWDVIGWTREGNASHPNSGLATIMSDGPGGSKWMYVGRQKAGEVWHDMTGNRSGTVTINQDGWGHFFVNGGSVSVWVKR

SEQ ID NO: 32948 - protein, 483 aa, Bacillus sp.
HHDGTNGTIMQYFEWNVPNDGQHWNRLHNNAQNLKNAGITAIWIPPAWKGTSQNDVGYGAYDLYDLGEFNQKGTVRTKYGTKAELERAIRSLKANGIQVYGDVVMNHKGGADFTERVQAVEVNPQNRNQEVSGTYEIEAWTGFNFPGRGNQHSSFKWRWYHFDGTDWDQSRQLSNRIYKFRGKAWDWEVDTENGNYDYLMYADVDMNHPEVINXLNRWGVWYANTLNLDGFRLDAVKHIQFSFMRNWLGHVRGQTGKNLFAVAEYWKNDLGALENYLSKTNWTMSAFDVPLHYNLYQASNSGGNYDMRNLLNGTLVQRHPSHAVTFVDNHDTQPGEALESFVQGWFKPLAYATILTREQGYPQVFYGDYYGIPSDGVPSYRQQIDPLLKARQQYAYGRQHDYFDHWDVIGWTREGNASHPNSGLATIMSDGPGGSKWMYVGRQKAGEVWHDITGNRSGTVTINQDGWGQFFVNGGSVSVWVKR

SEQ ID NO: 32949 - protein, 485 aa, Bacillus sp. (in: firmicutes)
HHDGTNGTIMQYFEWNVPNDGQHWNRLHNNAQNLKNAGITAIWIPPAWKGTSQNDVGYGAYDLYDLGEFNQKGTVRTKYGTKAELERAIRSLKANGIQVYGDVVMNHKGGADFTERVQAVEVNPQNRNQEVSGTYQIEAWTGFNFPGRGNQHSSFKWRWYHFDGTDWDQSRQLANRIYKFRGDGKAWDWPVDTENGNYDYLMYADVDMDHPEVINELNRWGVWYANTLNLDGFRLDAVKHIKFSFMRDWLGHVRGQTGKNLFAVAEYWKNDLGALENYLSFTNWTMSAFDVPLHYNLYQASNSSGNYDMRNLLNGTLVQRHPSHAVTFVDNHDTQPGEALESFVQGWFKPLAYATILTREQGYPQVFYGDYYGIPSDGVPSYRQQIDPLLKARQQYAYGRQHDYFDHWDVIGWTREGNASHPNSGLATIMSDGPGGSKWMYVGRQKAGEVWHDMTGNRSGTVTINQDGWGHFFVNGGSVSVWVKR

SEQ ID NO: 32950 - protein, 485 aa, Bacillus sp.
HHDGTNGTIMQYFEWNVPNDGQHWNRLHNNAQNLKNAGITAIWIPPAWKGTSQNDVGYGAYDLYDLGEFNQKGTVRTKYGTKAELERAIRSLKANGIQVYGDVVMNHKGGADFTERVQAVEVNPQNRNQEVSGTYQIEAWTGFNFPGRGNQHSSFKWRWYHFDGTDWDQSRQLANRIYKFRGDGKAWDWEVDTENGNYDYLQNADVDMDHPEVINELNRWGVWYANTLNLDGFRLDAVKHIKFSFMRDWLGHVRGQTGKNLFAVAEYWKNDLGALENYLSKTNWTMSAFDVPLHYNLYQASNSSGNYDMRNLLNGTLVQRHPSHAVTFVDNHDTQPGEALESFVQGWFKPLAYATILTREQGYPQVFYGDYYGIPSDGVPSYRQQIDPLLKARQQYAYGRQHDYFDHWDVIGWTREGNASHPNSGLATIMSDGPGGSKWMYVGRQKAGEVWHDMTGNRSGTVTINQDGWGHFFVNGGSVSVWVKR

SEQ ID NO: 32951 - protein, 483 aa, Bacillus sp.
HHDGTNGTIMQYFEWNVPNDGQHWNRLHNNAQNLKNAGITAIWIPPAWKGTSQNDVGYGAYDLYDLGEFNQKGTVRTKYGTKAELERAIRSLKANGIQVYGDVVMNHKGGADFTERVQAVEVNPQNRNQEVSGTYEIEAWTGFNFPGRGNQHSSFKWRWYHFDGTDWDQSRQLSNRIYKFRGKAWDWEVDTEXGNYDYLMYADVDMNHPEVINELNRWGVWYANTLNLDGFRLDAVKHIQFSFMRNWLGHVRGQTGKNLFAVAEYWKNDLGALENYLSKTNWTMSAFDVPLHYNLYQASNSGGNYDMRNLLNGTLVQRHPSHAVTFVDNHDTQPGEALESFVQGWFKPLAYATILTREQGYPQVFYGDYYGIPSDGVPSYRQQIDPLLKARQQYAYGRQHDYFDHWDVIGWTREGNASHPNSGLATIMSDGPGGSKWMYVGRQKAGEVWHDITGNRSGTVTINQDGWGQFFVNGGSVSVWVKR

SEQ ID NO: 32952 - protein, 485 aa, Bacillus sp.
HHDGTNGTIMQYFEWNVPNDGQHWNRLHNNAQNLKNAGITAIWIPPAWKGTSQNDVGYGAYDLYDLGEFNQKGTVRTKYGTKAELERAIRSLKANGIQVYGDVVMNHKGGADFTERVQAVEVNPQNRNQEVSGTYQIEAYTGFNFPGRGNQHSSFKWRWSHFDGTDWDQSRQLANRIYKFRGDGKAWDWEVDTENGNYDYLMYADVDMDHPEVINELNRWGVWYANTLNLDGFRLDAVKHIKFSFMRDWLGHVRGQTGKNLFAVAEYWKNDLGALENYLSKTNWTMSAFDVPLHYNLYQASNSSGNYDMRNLLNGTLVQRHPSHAVTFVDNHDTQPGEALESFVQGWFKPLAYATILTREQGYPQVFYGDYYGIPSDGVPSYRQQIDPLLKARQQYAYGRQHDYFDHWDVIGWTREGNASHPNSGLATIMSDGPGGSKWMYVGRQKAGEVWHDMTGNRSGTVTINQDGWGHFFVNGGSVSVWVKR

SEQ ID NO: 32953 - protein, 483 aa, Bacillus sp. (in: firmicutes)
HHDGTNGTIMQYFEWNVPNDGQHWNRLHNNAQNLKNAGITAIWIPPAWKGTSQNDVGYGAYDLYDLGEFNQKGTVRTKYGTKAELERAIRSLKANGIQVYGDVVMNHKGGADFTERVQAVEVNPQNRNQEVSGTYQIEAWTGFNFPGRGNQHSSFKWRWYHFDGTDWDQSRQLANRIYKFRGKAWDWEVDTENGNYDYLMYADVDMDHPEVINELNRWGVWYANTLNLDGFRLDAVKHIKFSFMRDWLGHVRGQTGKNLFAIGEFWKNDLGALENYLSKTNWTMSAFDIPLHYNLYQASNSSGNYDMRNLLNGTLVQRHPSHAVTLVDNHDTQPGEALESFVQGWFKPLAYATILTREQGYPSVFYGDYYGIPSDGVPSYRQQIDPLLKARQQYAYGRQHDYFDHWDVIGWTREGNASHPNSGLATIMSDGPGGSKWMYVGRQKAGEVWHDMTGNRSGTVTINQDGWGHFFVNGGSVSVWVKR

SEQ ID NO: 32954 - protein, 485 aa, Bacillus sp.
HHDGTNGTIMQYFEWNVPNDGQHWNRLHNNAQNLKNAGITAIWIPPAWKGTSQNDVGYGAYDLYDLGEFNQKGTVRTKYGTKAELERAIRSLKANGIQVYGDVVMNHKGGADFTERVQAVEVNPQNRNQEVSGTYQIEAWTGFNFPGRGNQHSSFKWRWYHFDGTDWDQSRQLANRIYKFRGDGKAWDWEVDTENGNYDYLMYADVDMDHPEVINELNRWGVWYANTLNLDGFRLDAVKHIKFSFMRDWLGHVRGQTGKNLFAVAEYWKNDLGALENYLSKTNWTMSAFDVPLHYNLYQASNSSKNYDMRNLLNGTLVQRHPSHAVTFVDNHDTQPGEALESFVQGWFKPLAYATILTREQGYPQVFYGDYYGIPSDGVPSYRQQIDPLLKARQQYAYGRQHDYFDHWDVIGWTREGNASHPNSGLATIMSDGPGGSKWMYVGRQKAGEVWHDMTGNRSGTVTINQDGRGHFFVNGGSVSVWVKR

SEQ ID NO: 32955 - protein, 483 aa, Bacillus sp. (in: firmicutes)
HHDGTNGTIMQYFEWNVPNDGQHWNRLHNNAQNLKNAGITAIWIPPAWKGTSQNDVGYGAYDLYDLGEFNQKGTVRTKYGTKAELERAIRSLKANGIQVYGDVVMNHKGGADFTERVQAVEVNPQNNNQEVSGTYQIEAWTGFNFPGRGNQHSSFKWRWYHFDGTDWDQSYQLANRIYKFRGKAWDWEVDTENGNYDYLMYADVDMDHPEVINELNRWGVWYANTLNLDGFRLDAVKHIKFSFLRDWLGHVRGQTGKNLFAVAEYWKNDLGAVENYLSKTNWTMSAFDVPLHYNLYQASNSSGNYDMRNLLNGTLVQRHPSHAVTFVDNHDTQPGEALESFVQGWFKPLAYATILTREQGYPSVFYGDYYGIPSDGVPSYRQQIDPLLKARQQYAYGRQHDYFDHWDVIGWTREGNASHPNSGLATIMSDGPGGSKWMYVGRQKAGEVWHDMTGNRSGTVTINQDGWGHFFVNGGSVSVWVKR

SEQ ID NO: 32956 - protein, 485 aa, Bacillus sp.
HHDGTNGTIMQYFEWNVPNDGQHWNRLHNNAQNLKNAGITAIWIPPAWKGTSQNDVGYGAYDLYDLGEFNQKGTVRTKYGTKAELERAIRSLKANGIQVYGDVVMNHKGGADFTERVQAVEVNPQNRNQEVSGTYEIEAWTGFNFPGRGNQHSSFKWRWYHFDGTDWDQSRQLSNRIYKFXGDGKAWDWEVDTENGNYDYLMYADVDMNHPEVINELNRWGVWYANTLNLDGFRLDAVKHIQFSFMRNWLGHVRGQTGKNLFAVAEYWKNDLGALENYLSKTNWTMSAFDVPLHYNLYQASNSGGNYDMRNLLNGTLVQRHPSHAVTFVDNHDTQPGEALESFVQGWFKPLAYATILTREQGYPQVFYGDYYGIPSDGVPSYRQQIDPLLKARQQYAYGRQHDYFDHWDVIGWTREGNASHPNSGLATIMSDGPGGSKWMYVGRQKAGEVWHDITGNRSGTVTINQDGWGQFFVNGGSVSVWVKR

SEQ ID NO: 32957 - protein, 485 aa, Bacillus sp.
HHDGTNGTIMQYFEWNVPNDGQHWNRLHNNAQNLKNAGITAIWIPPAWKGTSQNDVGYGAYDLYDLGEFNQKGTVRTKYGTKAELERAIRSLKANGIQVYGDVVMNHKGGADFTERVQAVEVNPQNRNQEVSGTYQIEAWTGFNFPGRGNQHSSFKWRWYHFDGTDWDQSRQLANRIYKFRGDGKAWDWEVDTENGNYDYLMYADVDMDHPEVINELNRWGVWYANTLNLDGFRLDAVKHIKFSFMRDWLGHVRGQTGKNLFAVAEYWKNDLGALENYLSKTNWTMSAFDVPLHYNLYQASNSSKNYDMRNLLNGTLVQRHPSHAVTFVDNHDTQPGEALESFVQGWFKPLAYATILTREQGYPQVFYGDYYGIPSDGVPSYRQQIDPLLKARQQYAYGRQHDYFDHWDVIGWTREGNASHPNSGLATIMSDGPGGSKKMYVGRQKAGEVWHDMTGNRSGTVTINQDGWGHFFVNGGSVSVWVKR

SEQ ID NO: 32958 - protein, 485 aa, Bacillus sp.
HHDGTNGTIMQYFEWNVPNDGQHWNRLHNNAQNLKNAGITAIWIPPAWKGTSQNDVGYGAYDLYDLGEFNQKGTVRTKYGTKAELERAIRSLKANGIQVYGDVVMNHKGGADFTERVQAVEVNPQNRNQEVSGTYQIEAYTGFNFPGRGNQHSSFKWRWYHFDGTDWDQSRQLANRIYKFRGDGKAWDWEVDTENGNYDYLMYADVDMDHPEVINELNRWGVWYANTLNLDGFRLDAVKHIKFSFMRDWLGHVRGQTGKNLFAVAEYWKNDLGALENYLSKTNWTMSAFDVPLHYNLYQASNSSGNYDMRNLLNGTLVQRHPSHAVTFVDNHDTQPGEALESFVQGWFKPLAYATILTREQGYPQVFYGDYYGIPSDGVPSYRQQIDPLLKARQQYAYGRQHDYFDHWDVIGWTREGNASHPNSGLATIMSDGPGGSKWMYVGRQKAGEVWHDMTGNRSGTVTINQDGWGHFFVNKGSVSVWVKR

SEQ ID NO: 32959 - protein, 485 aa, Bacillus sp.
HHDGTNGTIMQYFEWNVPNDGQHWNRLHNNAQNLKNAGITAIWIPPAWKGTSQNDVGYGAYDLYDLGEFNQKGTVRTKYGTKAELERAIRSLKANGIQVYGDVVMNHKGGADFTERVQAVEVNPQNRNQEVSGTYQIEAWTGFNFPGRGNQHSSFKWRWSHFDGTDWDQSRQLANRIYKFRGDGKAWDWEVDTENGNYDYLMYADVDMDHPEVINELNRWGVWYANTLNLDGFRLDAVKHIKFSFMRDWLGHVRGQTGKNLFAVAEYWKNDLGALENYLSKTNWTMSAFDVPLHYNLYQASNSSGNYDMRNLLNGTLVQRHPSHAVTFVDNHDTQPGEALESFVQGWFKPLAYATILTREQGYPQVFYGDYYGIPSDGVPSYRQQIDPLLKARQQYAYGRQHDYFDHWDVIGWTREGNASHPNSGLATIMSDGPGGSKWMYVGRQKAGEVWHDMTGNRSGTVTINQDGWGHFFVNKGSVSVWVKR

SEQ ID NO: 32960 - protein, 485 aa, Bacillus sp.
HHDGTNGTIMQYFEWNVPNDGQHWNRLHNNAQNLKNAGITAIWIPPAWKGTSQNDVGYGAYDLYDLGEFNQKGTVRTKYGTKAELERAIRSLKANGIQVYGDVVMNHKGGADFTERVQAVEVNPQNRNQEVSGTYQIEAWTGFNFPGRGNQHSSFKWRWYHFDGTDWDQSRQLANRIYKFRGDGKAWDWEVDTENGNYDYQLYADVDMDHPEVINELNRWGVWYANTLNLDGFRLDAVKHIKFSFMRDWLGHVRGQTGKNLFAVAEYWKNDLGALENYLSKTNWTMSAFDVPLHYNLYQASNSSGNYDMRNLLNGTLVQRHPSHAVTFVDNHDTQPGEALESFVQGWFKPLAYATILTREQGYPQVFYGDYYGIPSDGVPSYRQQIDPLLKARQQYAYGRQHDYFDHWDVIGWTREGNASHPNSGLATIMSDGPGGSKWMYVGRQKAGEVWHDMTGNRSGTVTINQDGWGHFFVNGGSVSVWVKR

SEQ ID NO: 32961 - protein, 483 aa, Bacillus sp. (in: firmicutes)
HHDGTNGTIMQYFEWNVPNDGQHWNRLHNNAQNLKNAGITAIWIPPAWKGTSQNDVGYGAYDLYDLGEFNQKGTVRTKYGTKAELERAIRSLKANGIQVYGDVVMNHKGGADFTERVQAVEVNPQNRNQEVSGTYQIEAWTGFNFPGRGNQHSSFKWRWYHFDGTDWDQSRQLANRIYKFRGKAWDWEVDTENGNYDYLMYADVDMDHPEVINELNRWGVWYANTLNLDGFRLDAVKHIKFSFMRDWLGHVRGQTGKNLFAIAEFWKNDLGALENYLSKTNWTMSAFDAPLHYNLYQASNSSGNYDMRNLLNGTLVQRHPSHAVTLVDNHDTQPGEALESFVQGWFKPLAYATILTREQGYPCVFYGDYYGIPSDGVPSYRQQIDPLLKARQQYAYGRQHDYFDHWDVIGWTREGNASHPNSGLATIMSDGPGGSKWMYVGRQKAGEVWHDMTGNRSGTVTINQDGWGHFFVNGGSVSVWVKR

SEQ ID NO: 32962 - protein, 483 aa, Bacillus sp. (in: firmicutes)
HHDGTNGTIMQYFEWNVPNDGQHWNRLHNNAQNLKNAGITAIWIPPAWKGTSQNDVGYGAYDLYDLGEFNQKGTVRTKYGTKAELERAIRSLKANGIQVYGDVVMNHKGGADFTERVQAVEVNPQNRNQEVSGTYQIEAWTGFNFPGRGNQHSSFKWRWYHFDGTDWDQSRQLANRIYKFRGKAWDWEVDTENGNYDYLMYADVDMDHPEVINELNRWGVWYANTLNLDGFRLDAVKHIKFSFMRDWLGHVRGQTGKNLFATAELWKNDLGALENYLSKTNWTMSAFDVPLHYNLYQASNSSGNYDMRNLLNGTLVQRHPSHAVTLVDNHDTQPGEALESFVQGWFKPLAYATILTREQGYPCVFYGDYYGIPSDGVPSYRQQIDPLLKARQQYAYGRQHDYFDHWDVIGWTREGNASHPNSGLATIMSDGPGGSKWMYVGRQKAGEVWHDMTGNRSGTVTINQDGWGHFFVNGGSVSVWVKR

SEQ ID NO: 32963 - protein, 485 aa, Bacillus sp. (in: firmicutes)
HHDGTNGTIMQYFEWNVPNDGQHWNRLHNNAQNLKNAGITAIWIPPAWKGTSQNDVGYGAYDLYDLGEFNQKGTVRTKYGTKAELERAIRSLKANGIQVYGDVVMNHKGGADFTERVQAVEVNPQNRNQEVSGTYQIEAWTGFNFPGRGNQHSSFKWRWYHFDGTDWDQSRQLANRIYKFRGDGKAWDWPVDTENGNYDYLMYADVDMDHPEVINELNRWGVWYANTLNLDGFRLDAVKHIKFWFMRDWLGHVRGQTGKNLFAVAEYWKNDLGALENYLSKTNWTMSAFDVPLHYNLYQASNSSGNYDMRNLLNGTLVQRHPSHAVTFVDNHDTQPGEALESFVQGWFKPLAYATILTREQGYPQVFYGDYYGIPSDGVPSYRQQIDPLLKARQQYAYGRQHDYFDHWDVIGWTREGNASHPNSGLATIMSDGPGGSKWMYVGRQKAGEVWHDMTGNRSGTVTINQDGWGHFFVNGGSVSVWVKR

SEQ ID NO: 32964 - protein, 485 aa, Bacillus sp.
HHDGTNGTIMQYFEWNVPNDGQHWNRLHNNAQNLKNAGITAIWIPPAWKGTSQNDVGYGAYDLYDLGEFNQKGTVRTKYGTKAELERAIRSLKANGIQVYGDVVMNHKGGADFTERVQAVEVNPQNRNQEVSGTYQIEAWTGFNFPGRGNQHSSFKWRWYHFDGTDWDQSRQLANRIYKFRGDGKAWDWEVDTENGNYDYLMYADVDMDHPEVINELNRWGVWYANTLNLDGFRLDAVKHIKFSFMRDWLGHVRGQTGKNLFAVAEYWKNDLGALENYLSKTNGTMSAFDVPLHYNLYQASNSSGNYDMRNLLNGTLVQRHPSHAVTFVDNHDTQPGEALESFVQGWFKPLAYATILTREQGYPQVFYGDYYGIPSDGVPSYRQQIDPLLKARQQYAYGRQHDYFDHWDVIGWTREGNASHPNSGLATIMSDGPGGSKWMYVGRQKAGEVWHDMTGNRSGTVTINQDGTGHFFVNGGSVSVWVKR

SEQ ID NO: 32965 - protein, 485 aa, Bacillus sp.
HHDGTNGTIMQYFEWNVPNDGQHWNRLHNNAQNLKNAGITAIWIPPAWKGTSQNDVGYGAYDLYDLGEFNQKGTVRTKYGTKAELERAIRSLKANGIQVYGDVVMNHKGGADFTERVQAVEVNPQNRNQEVSGTYQIEAWTGFNFPGRGNQHSSFKWRWYHFDGTDWDQSRQLANRIYKFRGDGKAWDWEVDTENGNYDYQHYADVDMDHPEVINELNRWGVWYANTLNLDGFRLDAVKHIKFSFMRDWLGHVRGQTGKNLFAVAEYWKNDLGALENYLSKTNWTMSAFDVPLHYNLYQASNSSGNYDMRNLLNGTLVQRHPSHAVTFVDNHDTQPGEALESFVQGWFKPLAYATILTREQGYPQVFYGDYYGIPSDGVPSYRQQIDPLLKARQQYAYGRQHDYFDHWDVIGWTREGNASHPNSGLATIMSDGPGGSKWMYVGRQKAGEVWHDMTGNRSGTVTINQDGWGHFFVNGGSVSVWVKR

SEQ ID NO: 32966 - protein, 485 aa, Bacillus sp.
HHDGTNGTIMQYFEWNVPNDGQHWNRLHNNAQNLKNAGITAIWIPPAWKGTSQNDVGYGAYDLYDLGEFNQKGTVRTKYGTKAELERAIRSLKANGIQVYGDVVMNHKGGADFTERVQAVEVNPQNRNQEVSGTYQIEAWTGFNFPGRGNQHSSFKWRWYHFDGTDWDQSRQLANRIYKFRGDGKAWDWEVDTENGNYDWLWYADVDMDHPEVINELNRWGVWYANTLNLDGFRLDAVKHIKFSFMRDWLGHVRGQTGKNLFAVAEYWKNDLGALENYLSKTNWTMSAFDVPLHYNLYQASNSSGNYDMRNLLNGTLVQRHPSHAVTFVDNHDTQPGEALESFVQGWFKPLAYATILTREQGYPQVFYGDYYGIPSDGVPSYRQQIDPLLKARQQYAYGRQHDYFDHWDVIGWTREGNASHPNSGLATIMSDGPGGSKWMYVGRQKAGEVWHDMTGNRSGTVTINQDGWGHFFVNGGSVSVWVKR

SEQ ID NO: 32967 - protein, 485 aa, Bacillus sp.
HHDGTNGTIMQYFEWNVPNDGQHWNRLHNNAQNLKNAGITAIWIPPAWKGTSQNDVGYGAYDLYDLGEFNQKGTVRTKYGTKAELERAIRSLKANGIQVYGDVVMNHKGGADFTERVQAVEVNPQNRNQEVSGTYQIEAWTGFNFPGRGNQHSSFKWRWYHFDGTDWDQSRQLANRIYKFRGDGKAWDWEVDTENGNYDYLPWADVDMDHPEVINELNRWGVWYANTLNLDGFRLDAVKHIKFSFMRDWLGHVRGQTGKNLFAVAEYWKNDLGALENYLSKTNWTMSAFDVPLHYNLYQASNSSGNYDMRNLLNGTLVQRHPSHAVTFVDNHDTQPGEALESFVQGWFKPLAYATILTREQGYPQVFYGDYYGIPSDGVPSYRQQIDPLLKARQQYAYGRQHDYFDHWDVIGWTREGNASHPNSGLATIMSDGPGGSKWMYVGRQKAGEVWHDMTGNRSGTVTINQDGWGHFFVNGGSVSVWVKR

SEQ ID NO: 32968 - protein, 485 aa, Bacillus sp.
HHDGTNGTIMQYFEWNVPNDGQHWNRLHNNAQNLKNAGITAIWIPPAWKGTSQNDVGYGAYDLYDLGEFNQKGTVRTKYGTKAELERAIRSLKANGIQVYGDVVMNHKGGADFTERVQAVEVNPQNRNQEVSGTYQIEAWTGFNFPGRGNQHSSFKWRWYHFDGTDWDQSRQLANRIYKFRGDGKAWDWEVDTENGNYDYPGYADVDMDHPEVINELNRWGVWYANTLNLDGFRLDAVKHIKFSFMRDWLGHVRGQTGKNLFAVAEYWKNDLGALENYLSKTNWTMSAFDVPLHYNLYQASNSSGNYDMRNLLNGTLVQRHPSHAVTFVDNHDTQPGEALESFVQGWFKPLAYATILTREQGYPQVFYGDYYGIPSDGVPSYRQQIDPLLKARQQYAYGRQHDYFDHWDVIGWTREGNASHPNSGLATIMSDGPGGSKWMYVGRQKAGEVWHDMTGNRSGTVTINQDGWGHFFVNGGSVSVWVKR

SEQ ID NO: 32969 - protein, 483 aa, Bacillus sp. (in: firmicutes)
HHDGTNGTIMQYFEWNVPNDGQHWNRLHNNAQNLKNAGITAIWIPPAWKGTSQNDVGYGAYDLYDLGEFNQKGTVRTKYGTKAELERAIRSLKANGIQVYGDVVMNHKGGADFTERVQAVEVNPQNRNQEVSGTYQIEAWTGFNFPGRGNQHSSFKWRWYHFDGTDWDQSRQLANRIYKFRGKAWDWEVDTENGNYDYLMYADVDMDHPEVINELNRWGVWYANTLNLDGFRLDAVKHIKFSFMRDWLGHVRGQTGKNLFAIAEYWKNDLGALENYLSKTNWTMSAFDVPLHYNLYQASNSSGNYDMRNLLNGTLVQRHPSHAVTLVDNHDTQPGEALESFVQGWFKPLAYATILTREQGYPCVFYGDYYGIPSDGVPSYRQQIDPLLKARQQYAYGRQHDYFDHWDVIGWTREGNASHPNSGLATIMSDGPGGSKWMYVGRQKAGEVWHDMTGNRSGTVTINQDGWGHFFVNGGSVSVWVKR

SEQ ID NO: 32970 - protein, 483 aa, Bacillus sp. (in: firmicutes)
HHDGTNGTIMHYFEWNVPNDGQHWNRLHNNAQNLKNAGITAIWIPPAWKGTSQNDVGYGAYDLYDLGEFNQKGTVRTKYGTKAELERAIRSLKANGIQVYGDVVMNHKGGADFTERVQAVEVNPQNRNQEVSGTYQIEAWTGFNFPGRGNQHSSFKWRWYHFDGTDWDQSRQLANRIYKFRGKAWDWEVDTENGNYDYLMYADVDMDHPEVINELNRWGVWYANTLNLDGFRLDAVKHIKFSFMRDWLGHVRGQTGKNLFAIGEFWKNDLGALENYLSKTNWTMSAFDVPLHYNLYQASNSSGNYDMRNLLNGTLVQRHPSHAVTFVDNHDTQPGEALESFVQGWFKPLAYATILTREQGYPCVFYGDYYGIPSDGVPSYRQQIDPLLKARQQYAYGRQHDYFDHWDVIGWTREGNASHPNSGLATIMSDGPGGSKWMYVGRQKAGEVWHDMTGNRSGTVTINQDGWGHFFVNGGSVSVWVKR

SEQ ID NO: 32971 - protein, 483 aa, Bacillus sp. (in: firmicutes)
HHDGTNGTIMQYFEWNVPNDGQHWNRLHNNAQNLKNAGITAIWIPPAWKGTSQNDVGYGAYDLYDLGEFNQKGTVRTKYGTKAELERAIRSLKANGIQVYGDVVMNHKGGADFTERVQAVEVNPQNRNQEVSGTYQIEAWTGFNFPGRGNQHSSFKWRWYHFDGTDWDQSRQLANRIYKFRGKAWDWEVDTEFGNYDYLMYADVDMDHPEVINELNRWGVWYANTLNLDGFRLDAVKHIKFSFMRDWLGHVRGQTGKNLFAVAEYWKNDLGALENYLSKTNWTMSAFDVPLHYNLYQASNSSGNYDMRNLLNGTLVQRHPSHAVTFVDNHDTQPDEALESFVQGWFKPLAYATILTREQGYPSVFYGDYYGIKSNGVPSYRQQIDPLLKARQQYAYGRQHDYFDHWDVIGWTREGNASHPNSGLATIMSDGPGGSKWMYVGRQKAGEVWHDMTGNRSGTVTINQDGWGHFFVNGGSVSVWVKR

SEQ ID NO: 32972 - protein, 485 aa, Bacillus sp.
HHDGTNGTIMQYFEWNVPNDGQHWNRLHNNAQNLKNAGITAIWIPPAWKGTSQNDVGYGAYDLYDLGEFNQKGTVRTKYGTKAELERAIRSLKANGIQVYGDVVMNHKGGADFTERVQAVEVNPQNRNQEVSGTYQIEAWTGFNFPGRGNQHSSFKWRWYHFDGTDWDQSRQLANRIYKFRGDGKAWDWEVDTENGNYDYLPRADVDMDHPEVINELNRWGVWYANTLNLDGFRLDAVKHIKFSFMRDWLGHVRGQTGKNLFAVAEYWKNDLGALENYLSKTNWTMSAFDVPLHYNLYQASNSSGNYDMRNLLNGTLVQRHPSHAVTFVDNHDTQPGEALESFVQGWFKPLAYATILTREQGYPQVFYGDYYGIPSDGVPSYRQQIDPLLKARQQYAYGRQHDYFDHWDVIGWTREGNASHPNSGLATIMSDGPGGSKWMYVGRQKAGEVWHDMTGNRSGTVTINQDGWGHFFVNGGSVSVWVKR

SEQ ID NO: 32973 - protein, 485 aa, Bacillus sp.
HHDGTNGTIMQYFEWNVPNDGQHWNRLHNNAQNLKNAGITAIWIPPAWKGTSQNDVGYGAYDLYDLGEFNQKGTVRTKYGTKAELERAIRSLKANGIQVYGDVVMNHKGGADFTERVQAVEVNPQNRNQEVSGTYQIEAWTGFNFPGRGNQHSSFKWRWYHFDGTDWDQSRQLANRIYKFRGDGKAWDWEVDTENGNYDYLWLADVDMDHPEVINELNRWGVWYANTLNLDGFRLDAVKHIKFSFMRDWLGHVRGQTGKNLFAVAEYWKNDLGALENYLSKTNWTMSAFDVPLHYNLYQASNSSGNYDMRNLLNGTLVQRHPSHAVTFVDNHDTQPGEALESFVQGWFKPLAYATILTREQGYPQVFYGDYYGIPSDGVPSYRQQIDPLLKARQQYAYGRQHDYFDHWDVIGWTREGNASHPNSGLATIMSDGPGGSKWMYVGRQKAGEVWHDMTGNRSGTVTINQDGWGHFFVNGGSVSVWVKR

SEQ ID NO: 32974 - protein, 485 aa, Bacillus sp.
HHDGTNGTIMQYFEWNVPNDGQHWNRLHNNAQNLKNAGITAIWIPPAWKGTSQNDVGYGAYDLYDLGEFNQKGTVRTKYGTKAELERAIRSLKANGIQVYGDVVMNHKGGADFTERVQAVEVNPQNRNQEVSGTYQIEAWTGFNFPGRGNQHSSFKWRWYHFDGTDWDQSRQLANRIYKFRGDGKAWDWEVDTENGNYDYLMYADVDMDHPEVINELNRWGVWYANTLNLDGFRLDAVKHIKFSFMRDWLGHVRGQTGKNLFAVAEYWKNDLGALENYLSKTNWTMSAFDVPLHYNLYQASNSSGNYDMRNLLNGTLVQRHPSHAVTFVDNHDTQPGEALESFVQGWFKPLAYATILTREQGYPQVFYGDYYGIPSDGVPSYRQQIDPLLKARQQYAYGRQHDYFDHWDVIGWTREGNASHPNSGLATIMSDGPGGSKNMYVGRQKAGEVWHDMTGNRSGTVTINQDGWGHFFVNGRSVSVWVKR

SEQ ID NO: 32975 - protein, 485 aa, Bacillus sp.
HHDGTNGTIMQYFEWNVPNDGQHWNRLHNNAQNLKNAGITAIWIPPAWKGTSQNDVGYGAYDLYDLGEFNQKGTVRTKYGTKAELERAIRSLKANGIQVYGDVVMNHKGGADFTERVQAVEVNPQNRNQEVSGTYQIEAWTGFNFPGRGNQHSSFKWRWYHFDGTDWDQSRQLANRIYKFRGDGKAWDWEVDTENGNYDYQEYADVDMDHPEVINELNRWGVWYANTLNLDGFRLDAVKHIKFSFMRDWLGHVRGQTGKNLFAVAEYWKNDLGALENYLSKTNWTMSAFDVPLHYNLYQASNSSGNYDMRNLLNGTLVQRHPSHAVTFVDNHDTQPGEALESFVQGWFKPLAYATILTREQGYPQVFYGDYYGIPSDGVPSYRQQIDPLLKARQQYAYGRQHDYFDHWDVIGWTREGNASHPNSGLATIMSDGPGGSKWMYVGRQKAGEVWHDMTGNRSGTVTINQDGWGHFFVNGGSVSVWVKR

SEQ ID NO: 32976 - protein, 485 aa, Bacillus sp.
HHDGTNGTIMQYFEWNVPNDGQHWNRLHNNAQNLKNAGITAIWIPPAWKGTSQNDVGYGAYDLYDLGEFNQKGTVRTKYGTKAELERAIRSLKANGIQVYGDVVMNHKGGADFTERVQAVEVNPQNRNQEVSGTYQIEAWTGFNFPGRGNQHSSFKWRWYHFDGTDWDQSRQLANRIYKFRGDGKAWDWEVDTENGNYDQLWYADVDMDHPEVINELNRWGVWYANTLNLDGFRLDAVKHIKFSFMRDWLGHVRGQTGKNLFAVAEYWKNDLGALENYLSKTNWTMSAFDVPLHYNLYQASNSSGNYDMRNLLNGTLVQRHPSHAVTFVDNHDTQPGEALESFVQGWFKPLAYATILTREQGYPQVFYGDYYGIPSDGVPSYRQQIDPLLKARQQYAYGRQHDYFDHWDVIGWTREGNASHPNSGLATIMSDGPGGSKWMYVGRQKAGEVWHDMTGNRSGTVTINQDGWGHFFVNGGSVSVWVKR

SEQ ID NO: 32977 - protein, 485 aa, Bacillus sp.
HHDGTNGTIMQYFEWNVPNDGQHWNRLHNNAQNLKNAGITAIWIPPAWKGTSQNDVGYGAYDLYDLGEFNQKGTVRTKYGTKAELERAIRSLKANGIQVYGDVVMNHKGGADFTERVQAVEVNPQNRNQEVSGTYQIEAWTGFNFPGRGNQHSSFKWRWYHFDGTDWDQSRQLANRIYKFRGDGKAWDWEVDTENGNYDYHLYADVDMDHPEVINELNRWGVWYANTLNLDGFRLDAVKHIKFSFMRDWLGHVRGQTGKNLFAVAEYWKNDLGALENYLSKTNWTMSAFDVPLHYNLYQASNSSGNYDMRNLLNGTLVQRHPSHAVTFVDNHDTQPGEALESFVQGWFKPLAYATILTREQGYPQVFYGDYYGIPSDGVPSYRQQIDPLLKARQQYAYGRQHDYFDHWDVIGWTREGNASHPNSGLATIMSDGPGGSKWMYVGRQKAGEVWHDMTGNRSGTVTINQDGWGHFFVNGGSVSVWVKR

SEQ ID NO: 32978 - protein, 485 aa, Bacillus sp.
HHDGTNGTIMQYFEWNVPNDGQHWNRLHNNAQNLKNAGITAIWIPPAWKGTSQNDVGYGAYDLYDLGEFNQKGTVRTKYGTKAELERAIRSLKANGIQVYGDVVMNHKGGADFTERVQAVEVNPQNRNQEVSGTYQIEAWTGFNFPGRGNQHSSFKWRWYHFDGTDWDQSRQLANRIYKFRGDGKAWDWEVDTENGNYDWLNYADVDMDHPEVINELNRWGVWYANTLNLDGFRLDAVKHIKFSFMRDWLGHVRGQTGKNLFAVAEYWKNDLGALENYLSKTNWTMSAFDVPLHYNLYQASNSSGNYDMRNLLNGTLVQRHPSHAVTFVDNHDTQPGEALESFVQGWFKPLAYATILTREQGYPQVFYGDYYGIPSDGVPSYRQQIDPLLKARQQYAYGRQHDYFDHWDVIGWTREGNASHPNSGLATIMSDGPGGSKWMYVGRQKAGEVWHDMTGNRSGTVTINQDGWGHFFVNGGSVSVWVKR

SEQ ID NO: 32979 - protein, 485 aa, Bacillus sp. (in: firmicutes)
HHDGTNGTIMQYFEWNVPNDGQHWNRLHNNAQNLKNAGITAIWIPPAWKGTSQNDVGYGAYDLYDLGEFNQKGTVRTKYGTKAELERAIRSLKANGIQVYGDVVMNHKGGADFTERVQAVEVNPQNRNQEVSGTYQIEAWTGFNFPGRGNQHSSFKWRWYHFDGTDWDQSRQLANRIYKFRGDGKAWDWPVDTENGNYDYLMYADVDMDHPEVINELNRWGVWYANTLNLDGFRLDAVKHIKFHFMRDWLGHVRGQTGKNLFAVAEYWKNDLGALENYLSKTNWTMSAFDVPLHYNLYQASNSSGNYDMRNLLNGTLVQRHPSHAVTFVDNHDTQPGEALESFVQGWFKPLAYATILTREQGYPQVFYGDYYGIPSDGVPSYRQQIDPLLKARQQYAYGRQHDYFDHWDVIGWTREGNASHPNSGLATIMSDGPGGSKWMYVGRQKAGEVWHDMTGNRSGTVTINQDGWGHFFVNGGSVSVWVKR

SEQ ID NO: 32980 - protein, 485 aa, Bacillus sp.
HHDGTNGTIMQYFEWNVPNDGQHWNRLHNNAQNLKNAGITAIWIPPAWKGTSQNDVGYGAYDLYDLGEFNQKGTVRTKYGTKAELERAIRSLKANGIQVYGDVVMNHKGGADFTERVQAVEVNPQNRNQEVSGTYQIEAWTGFNFPGRGNQHSSFKWRWYHFDGTDWDQSRQLANRIYKFRGDGKAWDWEVDTENGNYDYPNYADVDMDHPEVINELNRWGVWYANTLNLDGFRLDAVKHIKFSFMRDWLGHVRGQTGKNLFAVAEYWKNDLGALENYLSKTNWTMSAFDVPLHYNLYQASNSSGNYDMRNLLNGTLVQRHPSHAVTFVDNHDTQPGEALESFVQGWFKPLAYATILTREQGYPQVFYGDYYGIPSDGVPSYRQQIDPLLKARQQYAYGRQHDYFDHWDVIGWTREGNASHPNSGLATIMSDGPGGSKWMYVGRQKAGEVWHDMTGNRSGTVTINQDGWGHFFVNGGSVSVWVKR

SEQ ID NO: 32981 - protein, 483 aa, Bacillus sp.
HHDGTNGTIMQYFEWNVPNDGQHWNRLHNNAQNLKNAGITAIWIPPAWKGTSQNDVGYGAYDLYDLGEFNQKGTVRTKYGTKAELERAIRSLKANGIQVYGDVVMNHKGGADFTERVQAVEVNPQNRNQEVSGTYQIEAWTGFNFPGRGNQHSSFKWRWYHFDGTDWDQSRQLANRIYKFDGKAWDWEVDTENGNYDYLMYADVDMDHPXVINELNRWGVWYANTLNLDGFRLDAVKHIKFSFMRDWLGHVRGQTGKNLFAVAEYWKNDLGALENYLSKTNWTMSAFDVPLHYNLYQASNSSGNYDMRNLLNGTLVQRHPSHAVTFVDNHDTQPGEALESFVQGWFKPLAYATILTREQGYPQVFYGDYYGIPSDGVPSYRQQIDPLLKARQQYAYGRQHDYFDHWDVIGWTREGNASHPNSGLATIMSDGPGGSKWMYVGRQKAGEVWHDMTGNRSGTVTINQDGWGHFFVNGGSVSVWVKR

SEQ ID NO: 32982 - protein, 483 aa, Bacillus sp. (in: firmicutes)
HHDGTNGTIMQYFEWNVPNDGQHWNRLHNNAQNLKNAGITAIWIPPAWKGTSQNDVGYGAYDLYDLGEFNQKGTVRTKYGTKAELERAIRSLKANGIQVYGDVVMNHKGGADFTERVQAVEVNPQNNNQEVSGTYQIEAWTGFNFPGRGNQHSSFKWRWYHFDGTDWDQSRQLANRIYKFRGKAWDWEVDTENGNYDYLMYADVDMDHPEVINELNRWGVWYANTLNLDGFRLDAVKHIKFSFLRDWLGHVRGQTGKNLFAVAEYWKNDLGAVENYLSKTNWTMSAFDVPLHYNLYQASNSSGRYDMRNLLNGTLVQRHPSHAVTFVDNHDTQPGEALESFVQGWFKPLAYATILTREQGYPSVFYGDYYGIPSDGVPSYRQQIDPLLKARQQYAYGRQHDYFDHWDVIGWTREGNASHPNSGLATIMSDGPGGSKWMYVGRQKAGEVWHDMTGNRSGTVTINQDGWGHFFVNGGSVSVWVKR

SEQ ID NO: 32983 - protein, 485 aa, Bacillus sp.
HHDGTNGTIMQYFEWNVPNDGQHWNRLHNNAQNLKNAGITAIWIPPAWKGTSQNDVGYGAYDLYDLGEFNQKGTVRTKYGTKAELERAIRSLKANGIQVYGDVVMNHKGGADFTERVQAVEVNPQNRNQEVSGTYQIEAWTGFNFPGRGNQHSSFKWRWYHFDGTDWDQSRQLANRIYKFRGDGKAWDWEVDTENGNYDNLGYADVDMDHPEVINELNRWGVWYANTLNLDGFRLDAVKHIKFSFMRDWLGHVRGQTGKNLFAVAEYWKNDLGALENYLSKTNWTMSAFDVPLHYNLYQASNSSGNYDMRNLLNGTLVQRHPSHAVTFVDNHDTQPGEALESFVQGWFKPLAYATILTREQGYPQVFYGDYYGIPSDGVPSYRQQIDPLLKARQQYAYGRQHDYFDHWDVIGWTREGNASHPNSGLATIMSDGPGGSKWMYVGRQKAGEVWHDMTGNRSGTVTINQDGWGHFFVNGGSVSVWVKR

SEQ ID NO: 32984 - protein, 485 aa, Bacillus sp.
HHDGTNGTIMQYFEWNVPNDGQHWNRLHNNAQNLKNAGITAIWIPPAWKGTSQNDVGYGAYDLYDLGEFNQKGTVRTKYGTKAELERAIRSLKANGIQVYGDVVMNHKGGADFTERVQAVEVNPQNRNQEVSGTYQIEAWTGFNFPGRGNQHSSFKWRWYHFDGTDWDQSRQLANRIYKFRGDGKAWDWEVDTENGNYDYLLVADVDMDHPEVINELNRWGVWYANTLNLDGFRLDAVKHIKFSFMRDWLGHVRGQTGKNLFAVAEYWKNDLGALENYLSKTNWTMSAFDVPLHYNLYQASNSSGNYDMRNLLNGTLVQRHPSHAVTFVDNHDTQPGEALESFVQGWFKPLAYATILTREQGYPQVFYGDYYGIPSDGVPSYRQQIDPLLKARQQYAYGRQHDYFDHWDVIGWTREGNASHPNSGLATIMSDGPGGSKWMYVGRQKAGEVWHDMTGNRSGTVTINQDGWGHFFVNGGSVSVWVKR

SEQ ID NO: 32985 - protein, 485 aa, Bacillus sp. (in: firmicutes)
HHDGTNGTIMQYFEWNVPNDGQHWNRLHNNAQNLKNAGITAIWIPPAWKGTSQNDVGYGAYDLYDLGEFNQKGTVRTKYGTKAELERAIRSLKANGIQVYGDVVMNHKGGADFTERVQAVEVNPQNRNQEVSGTYQIEAWTGFNFPGRGNQHSSFKWRWYHFDGTDWDQSRQLANRIYKFRGDGKAWDWPVDTENGNYDYLMYADVDMDHPEVINELNRWGVWYANTLNLDGFRLDAVKHIKFSFMRDWLGHVRGQTGKNLFAVAEYWKNDLGALENYLSYTNWTMSAFDVPLHYNLYQASNSSGNYDMRNLLNGTLVQRHPSHAVTFVDNHDTQPGEALESFVQGWFKPLAYATILTREQGYPQVFYGDYYGIPSDGVPSYRQQIDPLLKARQQYAYGRQHDYFDHWDVIGWTREGNASHPNSGLATIMSDGPGGSKWMYVGRQKAGEVWHDMTGNRSGTVTINQDGWGHFFVNGGSVSVWVKR

SEQ ID NO: 32986 - protein, 485 aa, Bacillus sp.
HHDGTNGTIMQYFEWNVPNDGQHWNRLHNNAQNLKNAGITAIWIPPAWKGTSQNDVGYGAYDLYDLGEFNQKGTVRTKYGTKAELERAIRSLKANGIQVYGDVVMNHKGGADFTERVQAVEVNPQNRNQEVSGTYQIEAYTGFNFPGRGNQHSSFKWRWYHFDGTDWDQSRQLANRIYKFRGDGKAWDWEVDTENGNYDYLMYADVDMDHPEVINELNRWGVWYANTLNLDGFRLDAVKHIKFSFMRDWLGHVRGQTGKNLFAVAEYWKNDLGALENYLSKTNWTMSAFDVPLHYNLYQASNSSGNYDMRNLLNGTLVQRHPSHAVTFVDNHDTQPGEALESFVQGWFKPLAYATILTREQGYPQVFYGDYYGIPSDGVPSYRQQIDPLLKARQQYAYGRQHDYFDHWDVIGWTREGNASHPNSGLATIMSDGPGGSKWMYVGRQKAGEVWHDMTGNRSGTVTINQDGTGHFFVNGGSVSVWVKR

SEQ ID NO: 32987 - protein, 485 aa, Bacillus sp.
HHDGTNGTIMQYFEWNVPNDGQHWNRLHNNAQNLKNAGITAIWIPPAWKGTSQNDVGYGAYDLYDLGEFNQKGTVRTKYGTKAELERAIRSLKANGIQVYGDVVMNHKGGADFTERVQAVEVNPQNRNQEVSGTYQIEAWTGFNFPGRGNQHSSFKWRWSHFDGTDWDQSRQLANRIYKFRGDGKAWDWEVDTENGNYDYLMYADVDMDHPEVINELNRWGVWYANTLNLDGFRLDAVKHIKFSFMRDWLGHVRGQTGKNLFAVAEYWKNDLGALENYLSKTNWTMSAFDVPLHYNLYQASNSSGNYDMRNLLNGTLVQRHPSHAVTFVDNHDTQPGEALESFVQGWFKPLAYATILTREQGYPQVFYGDYYGIPSDGVPSYRQQIDPLLKARQQYAYGRQHDYFDHWDVIGWTREGNASHPNSGLATIMSDGPGGSKWMYVGRQKAGEVWHDMTGNRSGTVTINQDGTGHFFVNGGSVSVWVKR

SEQ ID NO: 32988 - protein, 483 aa, Bacillus sp.
HHDGTNGTIMQYFEWNVPNDGQHWNRLHNNAQNLKNAGITAIWIPPAWKGTSQNDVGYGAYDLYDLGEFNQKGTVRTKYGTKAELERAIRSLKANGIQVYGDVVMNHKGGADFTERVQAVEVNPQNRNQEVSGTYQIEAWTGFNFPGRGNQHSSFKWRWYHFDGTDWDQSRQLANRIYKFDGKAWDWEVDTENGNYDYLMYADXDMDHPEVINELNRWGVWYANTLNLDGFRLDAVKHIKFSFMRDWLGHVRGQTGKNLFAVAEYWKNDLGALENYLSKTNWTMSAFDVPLHYNLYQASNSSGNYDMRNLLNGTLVQRHPSHAVTFVDNHDTQPGEALESFVQGWFKPLAYATILTREQGYPQVFYGDYYGIPSDGVPSYRQQIDPLLKARQQYAYGRQHDYFDHWDVIGWTREGNASHPNSGLATIMSDGPGGSKWMYVGRQKAGEVWHDMTGNRSGTVTINQDGWGHFFVNGGSVSVWVKR

SEQ ID NO: 32989 - protein, 485 aa, Bacillus sp. (in: firmicutes)
HHDGTNGTIMQYFEWNVPNDGQHWNRLHNNAQNLKNAGITAIWIPPAWKGTSQNDVGYGAYDLYDLGEFNQKGTVRTKYGTKAELERAIRSLKANGIQVYGDVVMNHKGGADFTERVQAVEVNPQNRNQEVSGTYQIEAWTGFNFPGRGNQHSSFKWRWYHFDGTDWDQSRQLANRIYKFRGDGKAWDWPVDTENGNYDYLMYADVDMDHPEVINELNRWGVWYANTLNLDGFRLDAVKHIKFYFMRDWLGHVRGQTGKNLFAVAEYWKNDLGALENYLSKTNWTMSAFDVPLHYNLYQASNSSGNYDMRNLLNGTLVQRHPSHAVTFVDNHDTQPGEALESFVQGWFKPLAYATILTREQGYPQVFYGDYYGIPSDGVPSYRQQIDPLLKARQQYAYGRQHDYFDHWDVIGWTREGNASHPNSGLATIMSDGPGGSKWMYVGRQKAGEVWHDMTGNRSGTVTINQDGWGHFFVNGGSVSVWVKR

SEQ ID NO: 32990 - protein, 483 aa, Synthetic construct
LNGTLMQYFEWYMPNDGQHWKRLQNDSAYLAEHGITAVWIPPAYKGTSQADVGYGAYDLYDLGEFHQKGTVRTKYGTKGELQSAIKSLHSRDINVYGDVVINHKAGADGTEFVDAVEVNPSNRNQETSGTYQIQAWTKFDFPGRGNTYSSFKWRWYHFDGTDWDESRKLNRVYKFRGTGKAWDWEVDTENGNYDYLMFADLDYDHPDVAAEIKRWGTWYANELQLDGFRLDAVKHIKFSFLRDWVNHVREKTGKEMFTVAEYWSYDLGALENYLNKTNFNHSVFDVPLHYQFHAASTQGGGYDMRKLLNGTVVSKHPLKSVTFVDNHDTQPGQSLESTVQTWFKPLAYAFILTRESGYPQVFYGDMYGTKGDSQREIPALKHKIEPILKARKQYAYGAQHDYFDHHDIVGWTREGDSSVANSGLAALITDGPGGAKRMYVGRQNAGETWHDITGNRSEPVVINSAGWGEFHVNGGSVSIYVQR

SEQ ID NO: 32991 - protein, 483 aa, Synthetic construct
LNGTLMQYFEWYMPNDGQHWKRLQNDSAYLAEHGITAVWIPPAYKGTSQADVGYGAYDLYDLGEFHQKGTVRTKYGTKGELQSAIKSLHSRDINVYGDVVINHKAGADGTELVDAVEVNPSDRNQEISGTYQIQAWTKFDFPGRGNTYSSFKWRWYHFDGTDWDESRKLNRIYKFRGTGKAWDWEVDTENGNYDYLMYADLDYDHPDVAAEIKRWGTWYANELQLDGFRLDAVKHIKFSFLRDWVNHVREKTGKEMFTVAEYWSYDLGALENYLNKTNFNHSVFDVPLHYQFHAASTQGGGYDMRKLLNGTVVSKHPLKSVTFVDNHDTQPGQSLESTVQTWFKPLAYAFILTRESGYPQVFYGDMYGTKGDSQREIPALKHKIEPILKARKQYAYGAQHDYFDHHDIVGWTREGDSSVANSGLAALITDGPGGAKRMYVGRQNAGETWHDITGNRSEPVVINSAGWGEFHVNGGSVSIYVQR

SEQ ID NO: 32992 - protein, 482 aa, Bacillus sp. (in: firmicutes)
HHDGTNGTIMQYFEWNVPNDGQHWNRLHNNAQNLKNAGITAIWIPPAWKGTSQNDVGYGAYDLYDLGEFNQKGTVRTKYGTKAELERAIRSLKANGIQVYGDVVMNHKGGADFTERVQAVEVNPQNRNQEVSGTYQIEAWTGFNFPGRGNQHSSFKWRWYHFDGTDWDQSRQLANRIYKFRGKAWDWEVDTENGNYDYLMYADVDMDHPEVINELNRWGVWYANTLNLDGFRLDAVKHIKFSFMRDWLGHVRGQTGKNLFAGEFWKNDLGALENYLSKTNWTMSAFDAPLHYNLYQASNSSGNYDMRNLLNGTLVQRHPSHAVTLVDNHDTQPGEALESFVQGWFKPLAYATILTREQGYPCVFYGDYYGIPSDGVPSYRQQIDPLLKARQQYAYGRQHDYFDHWDVIGWTREGNASHPNSGLATIMSDGPGGSKWMYVGRQKAGEVWHDMTGNRSGTVTINQDGWGHFFVNGGSVSVWVKR

SEQ ID NO: 32993 - protein, 484 aa, Synthetic construct
HHDGTNGTIMQYFEWNVPNDGQHWNRLHNNAQNLKNAGITAIWIPPAWKGTSQNDVGYGAYDLYDLGEFNQKGTVRTKYGTKAELERAIRSLKANGIQVYGDVVMNHKAGADGTEFVDAVEVNPSNRNQETSGTYQIQAWTKFDFPGRGNTYSSFKWRWYHFDGTDWDESRKLNRVYKFRGTGKAWDWEVDTENGNYDYLMFADLDMDHPEVINELNRWGVWYANTLNLDGFRLDAVKHIKFSFMRDWLGHVRGQTGKNLFAVAEYWKNDLGALENYLSKTNWTMSAFDVPLHYNLYQASNSSGNYDMRNLLNGTLVQRHPSHAVTFVDNHDTQPGEALESFVQGWFKPLAYATILTREQGYPQVFYGDYYGIPSDGVPSYRQQIDPLLKARQQYAYGRQHDYFDHWDVIGWTREGNASHPNSGLATIMSDGPGGSKWMYVGRQKAGEVWHDMTGNRSGTVTINQDGWGHFFVNGGSVSVWVKR

SEQ ID NO: 32994 - protein, 481 aa, Bacillus licheniformis
VNGTLMQYFEWYTPNDGQHWKRLQNDAEHLSDIGITAVWIPPAYKAISQADVGYGAYDLYDLGEFWQKGTVRTKYGTKGELQSAIKSLHSRDINVYGDVVINHKAGADATEDVQAVEVDPADRNRVISGEHLIKAWTHFHFPGRGSTYSDFKWYWYHFDGTDWDESRKLNRIYLFQGKTWDWPVSNEFGNYDYLMYADYDYDYPDVVAEITRWGTWYANELQLDGFRLDAVKHIKFSFLRDWVNHVREKTGKEMFTVAEYWSNDLGALENYLNQTNFNHSVFDVPLHYQFHAASTQGGGYDMRKLLNGTVVSKHPLKSVTFVDNHDTQPGQSLESTVQTWFKPLAYAFILTRESGYPSVFYGDMYGTKGDSQREIPALKHKIEPILKARKQYAYGAQHDYFDHHDIVGWTREGVSSVANSGLAALITDGPGGAKWMYVGRQNAGETWHDITGNRSEPVVINSEGWGEFHVNGGSVSIYVQR

SEQ ID NO: 32995 - protein, 481 aa, Bacillus licheniformis
VNGTLMQYFEWYTPNDGQHWKRLQNDAEHLSDIGITAVWIPPAYKAISQADVGYGAYDLYDLGEFWQKGTVRTKYGTKGELQSAIKSLHSRDINVYGDVVINHKAGADATEDVQAVEVDPADRNRVISGEHLIKAWTHFHFPGRGSTYSDFKWYWYHFDGTDWDESRKLNRIYLFQGKTWDWPVSNEFGNYDYLMYADYDYDYPDVVAEITRWGTWYANELQLDGFRLDAVKHIKFIFLRDWVNHVREKTGKEMFTVAEYWSNDLGALENYLNKTNFNHSVFDVPLHYQFHAASTQGGGYDMRKLLNGTVVSKHPLKSVTFVDNHDTQPGQSLESTVQTWFKPLAYAFILTRESGYPSVFYGDMYGTKGDSQREIPALKHKIEPILKARKQYAYGAQHDYFDHHDIVGWTREGVSSVANSGLAALITDGPGGAKWMYVGRQNAGETWHDITGNRSEPVVINSEGWGEFHVNGGSVSIYVQR

SEQ ID NO: 32996 - protein, 481 aa, Bacillus licheniformis
VNGTLMQYFEWYTPNDGQHWKRLQNDAEHLSDIGITAVWIPPAYKAISQADVGYGAYDLYDLGEFWQKGTVRTKYGTKGELQSAIKSLHSRDINVYGDVVINHKAGADATEDVQAVEVDPADRNRVISGEHLIKAWTHFHFPGRGSTYSDFKWYWYHFDGTDWDESRKLNRIYLFQGKTWDWPVSNEFGNYDYLMYADYDYDYPDVVAEITRWGTWYANELQLDGFRLDAVKHIKFTFLRDWVNHVREKTGKEMFTVAEYWSNDLGALENYLNKTNFNHSVFDVPLHYQFHAASTQGGGYDMRKLLNGTVVSKHPLKSVTFVDNHDTQPGQSLESTVQTWFKPLAYAFILTRESGYPSVFYGDMYGTKGDSQREIPALKHKIEPILKARKQYAYGAQHDYFDHHDIVGWTREGVSSVANSGLAALITDGPGGAKWMYVGRQNAGETWHDITGNRSEPVVINSEGWGEFHVNGGSVSIYVQR

SEQ ID NO: 32997 - protein, 481 aa, Bacillus licheniformis
VNGTLMQYFEWYTPNDGQHWKRLQNDAEHLSDIGITAVWIPPAYKAISQADVGYGAYDLYDLGEFWQKGTVRTKYGTKGELQSAIKSLHSRDINVYGDVVINHKAGADATEDVQAVEVDPADRNRVISGEHLIKAWTHFHFPGRGSTYSDFKWYWYHFDGTDWDESRKLNRIYLFQGKTWDWPVSNEFGNYDYLMYADYDYDYPDVVAEITRWGTWYANELQLDGFRLDAVKHIKFSFLRDWVNHVREKTGKEMFTVAEYWSNDLGALENYLNDTNFNHSVFDVPLHYQFHAASTQGGGYDMRKLLNGTVVSKHPLKSVTFVDNHDTQPGQSLESTVQTWFKPLAYAFILTRESGYPSVFYGDMYGTKGDSQREIPALKHKIEPILKARKQYAYGAQHDYFDHHDIVGWTREGVSSVANSGLAALITDGPGGAKWMYVGRQNAGETWHDITGNRSEPVVINSEGWGEFHVNGGSVSIYVQR

SEQ ID NO: 32998 - protein, 481 aa, Bacillus licheniformis
VNGTLMQYFEWYTPNDGQHWKRLQNDAEHLSDIGITAVWIPPAYKAISQADVGYGAYDLYDLGEFWQKGTVRTKYGTKGELQSAIKSLHSRDINVYGDVVINHKAGADATEDVQAVEVDPADRNRVISGEHLIKAWTHFHFPGRGSTYSDFKWYWYHFDGTDWDESRKLNRIYLFQGKTWDWPVSNEFGNYDYLMYADYDYDYPDVVAEITRWGTWYANELQLDGFRLDAVKHIKFLFLRDWVNHVREKTGKEMFTVAEYWSNDLGALENYLNKTNFNHSVFDVPLHYQFHAASTQGGGYDMRKLLNGTVVSKHPLKSVTFVDNHDTQPGQSLESTVQTWFKPLAYAFILTRESGYPSVFYGDMYGTKGDSQREIPALKHKIEPILKARKQYAYGAQHDYFDHHDIVGWTREGVSSVANSGLAALITDGPGGAKWMYVGRQNAGETWHDITGNRSEPVVINSEGWGEFHVNGGSVSIYVQR

SEQ ID NO: 32999 - protein, 481 aa, Bacillus amyloliquefaciens
VNGTLMQYFEWYTPNDGQHWKRLQNDAEHLSDIGITAVWIPPAYKAISQADVGYGAYDLYDLGEFHQKGTVRTKYGTKGELQSAIKSLHSRDINVYGDVVINHKAGADATEDVTAVEVDPADRNRVISGEHLIKAWTHFHFPGRGSTYSDFKWYWWHFDGTDWDESRKLNRIYLFQGKTWDWPVSNEFGNYDYLMYADYDYDYPDVVAEITRWGTWYANELQLDGFRLDAVKHIKFSFLRDWVNHVREKTGKEMFTVAEYWSNDLGALENYLNKTNFNHSVFDVPLHYQFHAASTQGGGYDMRKLLNGTVVSKWPWKSVTFVDNHDTQPGQSLESTVQTWFKPLAYAFILTRESGYPSVFYGDMYGTKGDSQREIPALKHKIEPILKARKQYAYGAQHDYFDHHDIVGWTREGVSSVANSGLAALITDGPGGAKWMYVGRQNAGETWHDITGNRSEPVVINSEGWGEFHVNGGSVSIYVQR

SEQ ID NO: 33000 - protein, 481 aa, Bacillus licheniformis
VNGTLMQYFEWYTPNDGQHWKRLQNDAEHLSDIGITAVWIPPAYKAISQADVGYGAYDLYDLGEFHQKGTVRTKYGTKGELQSAIKSLHSRDINVYGDVVINHKAGADATEDVTAVEVDPADRNRVISGEHLIKAWTHFHFPGRGSTYSDFKWYWWHFDGTDWDESRKLNRIYLFQGKTWDWPVSNEFGNYDYLMYADYDYDYPDVVAEITRWGTWYANELQLDGFRLDAVKHIKFSFLRDWVNHVREKTGKEMFTVAEYWSNDLGALENYLNKTNFNHSVFDVPLHYQFHAASTQGGGYDMRKLLNGTVVSKWPLKSVTFVDNHDTQPGQSLESTVQTWFKPLAYAFILTRESGYPSVFYGDMYGTKGDSQREIPALKHKIEPILKARKQYAYGAQHDYFDHHDIVGWTREGVSSVANSGLAALITDGPGGAKWMYVGRQNAGETWHDITGNRSEPVVINSEGWGEFHVNGGSVSIYVQR

SEQ ID NO: 33001 - protein, 481 aa, Bacillus licheniformis
VNGTLMQYFEWYTPNDGQHWKRLQNDAEHLSDIGITAVWIPPAYKAISQADVGYGAYDLYDLGEFWQKGTVRTKYGTKGELQSAIKSLHSRDINVYGDVVINHKAGADATEDVQAVEVDPADRNRVISGEHLIKAWTHFHFPGRGSTYSDFKWYWYHFDGTDWDESRKLNRIYLFQGKTWDWPVSNEFGNYDYLMYADYDYDYPDVVAEITRWGTWYANELQLDGFRLDAVKHIKFSFLRDWVNHVREKTGKEMFTVAEYWSNDLGALENYLNVTNFNHSVFDVPLHYQFHAASTQGGGYDMRKLLNGTVVSKHPLKSVTFVDNHDTQPGQSLESTVQTWFKPLAYAFILTRESGYPSVFYGDMYGTKGDSQREIPALKHKIEPILKARKQYAYGAQHDYFDHHDIVGWTREGVSSVANSGLAALITDGPGGAKWMYVGRQNAGETWHDITGNRSEPVVINSEGWGEFHVNGGSVSIYVQR

SEQ ID NO: 33002 - protein, 481 aa, Bacillus licheniformis
VNGTLMQYFEWYTPNDGQHWKRLQNDAEHLSDIGITAVWIPPAYKAISQADVGYGAYDLYDLGEFWQKGTVRTKYGTKGELQSAIKSLHSRDINVYGDVVINHKAGADATEDVQAVEVDPADRNRVISGEHLIKAWTHFHFPGRGSTYSDFKWYWYHFDGTDWDESRKLNRIYLFQGKTWDWPVSNEFGNYDYLMYADYDYDYPDVVAEITRWGTWYANELQLDGFRLDAVKHIKFSFLRDWVNHVREKTGKEMFTVAEYWSNDLGALENYLNTTNFNHSVFDVPLHYQFHAASTQGGGYDMRKLLNGTVVSKHPLKSVTFVDNHDTQPGQSLESTVQTWFKPLAYAFILTRESGYPSVFYGDMYGTKGDSQREIPALKHKIEPILKARKQYAYGAQHDYFDHHDIVGWTREGVSSVANSGLAALITDGPGGAKWMYVGRQNAGETWHDITGNRSEPVVINSEGWGEFHVNGGSVSIYVQR

SEQ ID NO: 33003 - protein, 481 aa, Bacillus licheniformis
VNGTLMQYFEWYTPNDGQHWKRLQNDAEHLSDIGITAVWIPPAYKAISQADVGYGAYDLYDLGEFWQKGTVRTKYGTKGELQSAIKSLHSRDINVYGDVVINHKAGADATEDVQAVEVDPADRNRVISGEHLIKAWTHFHFPGRGSTYSDFKWYWYHFDGTDWDESRKLNRIYLFQGKTWDWPVSNEFGNYDYLMYADYDYDYPDVVAEITRWGTWYANELQLDGFRLDAVKHIKFSFLRDWVNHVREKTGKEMFTVAEYWSNDLGALENYLNSTNFNHSVFDVPLHYQFHAASTQGGGYDMRKLLNGTVVSKHPLKSVTFVDNHDTQPGQSLESTVQTWFKPLAYAFILTRESGYPSVFYGDMYGTKGDSQREIPALKHKIEPILKARKQYAYGAQHDYFDHHDIVGWTREGVSSVANSGLAALITDGPGGAKWMYVGRQNAGETWHDITGNRSEPVVINSEGWGEFHVNGGSVSIYVQR

SEQ ID NO: 33004 - protein, 481 aa, Bacillus licheniformis
VNGTLMQYFEWYTPNDGQHWKRLQNDAEHLSDIGITAVWIPPAYKAISQADVGYGAYDLYDLGEFWQKGTVRTKYGTKGELQSAIKSLHSRDINVYGDVVINHKAGADATEDVQAVEVDPADRNRVISGEHLIKAWTHFHFPGRGSTYSDFKWYWYHFDGTDWDESRKLNRIYLFQGKTWDWPVSNEFGNYDYLMYADYDYDYPDVVAEITRWGTWYANELQLDGFRLDAVKHIKFYFLRDWVNHVREKTGKEMFTVAEYWSNDLGALENYLNKTNFNHSVFDVPLHYQFHAASTQGGGYDMRKLLNGTVVSKHPLKSVTFVDNHDTQPGQSLESTVQTWFKPLAYAFILTRESGYPSVFYGDMYGTKGDSQREIPALKHKIEPILKARKQYAYGAQHDYFDHHDIVGWTREGVSSVANSGLAALITDGPGGAKWMYVGRQNAGETWHDITGNRSEPVVINSEGWGEFHVNGGSVSIYVQR

SEQ ID NO: 33005 - protein, 481 aa, Bacillus licheniformis
VNGTLMQYFEWYTPNDGQHWKRLQNDAEHLSDIGITAVWIPPAYKAISQADVGYGAYDLYDLGEFWQKGTVRTKYGTKGELQSAIKSLHSRDINVYGDVVINHKAGADATEDVQAVEVDPADRNRVISGEHLIKAWTHFHFPGRGSTYSDFKWYWYHFDGTDWDESRKLNRIYLFQGKTWDWPVSNEFGNYDYLMYADYDYDYPDVVAEITRWGTWYANELQLDGFRLDAVKHIKFDFLRDWVNHVREKTGKEMFTVAEYWSNDLGALENYLNKTNFNHSVFDVPLHYQFHAASTQGGGYDMRKLLNGTVVSKHPLKSVTFVDNHDTQPGQSLESTVQTWFKPLAYAFILTRESGYPSVFYGDMYGTKGDSQREIPALKHKIEPILKARKQYAYGAQHDYFDHHDIVGWTREGVSSVANSGLAALITDGPGGAKWMYVGRQNAGETWHDITGNRSEPVVINSEGWGEFHVNGGSVSIYVQR

SEQ ID NO: 33006 - protein, 481 aa, Bacillus licheniformis
VNGTLMQYFEWYTPNDGQHWKRLQNDAEHLSDIGITAVWIPPAYKAISQADVGYGAYDLYDLGEFWQKGTVRTKYGTKGELQSAIKSLHSRDINVYGDVVINHKAGADATEDVQAVEVDPADRNRVISGEHLIKAWTHFHFPGRGSTYSDFKWYWYHFDGTDWDESRKLNRIYLFQGKTWDWPVSNEFGNYDYLMYADYDYDYPDVVAEITRWGTWYANELQLDGFRLDAVKHIKFSFLRDWVNHVREKTGKEMFTVAEYWSNDLGALENYLNYTNFNHSVFDVPLHYQFHAASTQGGGYDMRKLLNGTVVSKHPLKSVTFVDNHDTQPGQSLESTVQTWFKPLAYAFILTRESGYPSVFYGDMYGTKGDSQREIPALKHKIEPILKARKQYAYGAQHDYFDHHDIVGWTREGVSSVANSGLAALITDGPGGAKWMYVGRQNAGETWHDITGNRSEPVVINSEGWGEFHVNGGSVSIYVQR

SEQ ID NO: 33007 - protein, 481 aa, Bacillus licheniformis
VNGTLMQYFEWYTPNDGQHWKRLQNDAEHLSDIGITAVWIPPAYKAISQADVGYGAYDLYDLGEFWQKGTVRTKYGTKGELQSAIKSLHSRDINVYGDVVINHKAGADATEDVQAVEVDPADRNRVISGEHLIKAWTHFHFPGRGSTYSDFKWYWYHFDGTDWDESRKLNRIYLFQGKTWDWPVSNEFGNYDYLMYADYDYDYPDVVAEITRWGTWYANELQLDGFRLDAVKHIKFSFLRDWVNHVREKTGKEMFTVAEYWSNDLGALENYLNMTNFNHSVFDVPLHYQFHAASTQGGGYDMRKLLNGTVVSKHPLKSVTFVDNHDTQPGQSLESTVQTWFKPLAYAFILTRESGYPSVFYGDMYGTKGDSQREIPALKHKIEPILKARKQYAYGAQHDYFDHHDIVGWTREGVSSVANSGLAALITDGPGGAKWMYVGRQNAGETWHDITGNRSEPVVINSEGWGEFHVNGGSVSIYVQR

SEQ ID NO: 33008 - protein, 481 aa, Bacillus licheniformis
VNGTLMQYFEWYTPNDGQHWKRLQNDAEHLSDIGITAVWIPPAYKAISQADVGYGAYDLYDLGEFWQKGTVRTKYGTKGELQSAIKSLHSRDINVYGDVVINHKAGADATEDVQAVEVDPADRNRVISGEHLIKAWTHFHFPGRGSTYSDFKWYWYHFDGTDWDESRKLNRIYLFQGKTWDWPVSNEFGNYDYLMYADYDYDYPDVVAEITRWGTWYANELQLDGFRLDAVKHIKFSFLRDWVNHVREKTGKEMFTVAEYWSNDLGALENYLNNTNFNHSVFDVPLHYQFHAASTQGGGYDMRKLLNGTVVSKHPLKSVTFVDNHDTQPGQSLESTVQTWFKPLAYAFILTRESGYPSVFYGDMYGTKGDSQREIPALKHKIEPILKARKQYAYGAQHDYFDHHDIVGWTREGVSSVANSGLAALITDGPGGAKWMYVGRQNAGETWHDITGNRSEPVVINSEGWGEFHVNGGSVSIYVQR

SEQ ID NO: 33009 - protein, 481 aa, Bacillus licheniformis
VNGTLMQYFEWYTPNDGQHWKRLQNDAEHLSDIGITAVWIPPAYKAISQADVGYGAYDLYDLGEFWQKGTVRTKYGTKGELQSAIKSLHSRDINVYGDVVINHKAGADATEDVQAVEVDPADRNRVISGEHLIKAWTHFHFPGRGSTYSDFKWYWYHFDGTDWDESRKLNRIYLFQGKTWDWPVSNEFGNYDYLMYADYDYDYPDVVAEITRWGTWYANELQLDGFRLDAVKHIKFSFLRDWVNHVREKTGKEMFTVAEYWSNDLGALENYLNATNFNHSVFDVPLHYQFHAASTQGGGYDMRKLLNGTVVSKHPLKSVTFVDNHDTQPGQSLESTVQTWFKPLAYAFILTRESGYPSVFYGDMYGTKGDSQREIPALKHKIEPILKARKQYAYGAQHDYFDHHDIVGWTREGVSSVANSGLAALITDGPGGAKWMYVGRQNAGETWHDITGNRSEPVVINSEGWGEFHVNGGSVSIYVQR

SEQ ID NO: 33010 - protein, 481 aa, Bacillus licheniformis
VNGTLMQYFEWYTPNDGQHWKRLQNDAEHLSDIGITAVWIPPAYKAISQADVGYGAYDLYDLGEFWQKGTVRTKYGTKGELQSAIKSLHSRDINVYGDVVINHKAGADATEDVQAVEVDPADRNRVISGEHLIKAWTHFHFPGRGSTYSDFKWYWYHFDGTDWDESRKLNRIYLFQGKTWDWPVSNEFGNYDYLMYADYDYDYPDVVAEITRWGTWYANELQLDGFRLDAVKHIKFSFLRDWVNHVREKTGKEMFTVAEYWSNDLGALENYLNITNFNHSVFDVPLHYQFHAASTQGGGYDMRKLLNGTVVSKHPLKSVTFVDNHDTQPGQSLESTVQTWFKPLAYAFILTRESGYPSVFYGDMYGTKGDSQREIPALKHKIEPILKARKQYAYGAQHDYFDHHDIVGWTREGVSSVANSGLAALITDGPGGAKWMYVGRQNAGETWHDITGNRSEPVVINSEGWGEFHVNGGSVSIYVQR

SEQ ID NO: 33011 - protein, 481 aa, Bacillus licheniformis
VNGTLMQYFEWYTPNDGQHWKRLQNDAEHLSDIGITAVWIPPAYKAISQADVGYGAYDLYDLGEFWQKGTVRTKYGTKGELQSAIKSLHSRDINVYGDVVINHKAGADATEDVQAVEVDPADRNRVISGEHLIKAWTHFHFPGRGSTYSDFKWYWYHFDGTDWDESRKLNRIYLFQGKTWDWPVSNEFGNYDYLMYADYDYDYPDVVAEITRWGTWYANELQLDGFRLDAVKHIKFPFLRDWVNHVREKTGKEMFTVAEYWSNDLGALENYLNKTNFNHSVFDVPLHYQFHAASTQGGGYDMRKLLNGTVVSKHPLKSVTFVDNHDTQPGQSLESTVQTWFKPLAYAFILTRESGYPSVFYGDMYGTKGDSQREIPALKHKIEPILKARKQYAYGAQHDYFDHHDIVGWTREGVSSVANSGLAALITDGPGGAKWMYVGRQNAGETWHDITGNRSEPVVINSEGWGEFHVNGGSVSIYVQR

SEQ ID NO: 33012 - protein, 481 aa, Bacillus licheniformis
VNGTLMQYFEWYTPNDGQHWKRLQNDAEHLSDIGITAVWIPPAYKAISQADVGYGAYDLYDLGEFWQKGTVRTKYGTKGELQSAIKSLHSRDINVYGDVVINHKAGADATEDVQAVEVDPADRNRVISGEHLIKAWTHFHFPGRGSTYSDFKWYWYHFDGTDWDESRKLNRIYLFQGKTWDWPVSNEFGNYDYLMYADYDYDYPDVVAEITRWGTWYANELQLDGFRLDAVKHIKFSFLRDWVNHVREKTGKEMFTVAEYWSNDLGALENYLNLTNFNHSVFDVPLHYQFHAASTQGGGYDMRKLLNGTVVSKHPLKSVTFVDNHDTQPGQSLESTVQTWFKPLAYAFILTRESGYPSVFYGDMYGTKGDSQREIPALKHKIEPILKARKQYAYGAQHDYFDHHDIVGWTREGVSSVANSGLAALITDGPGGAKWMYVGRQNAGETWHDITGNRSEPVVINSEGWGEFHVNGGSVSIYVQR

SEQ ID NO: 33013 - protein, 481 aa, Bacillus licheniformis
VNGTLMQYFEWYTPNDGQHWKRLQNDAEHLSDIGITAVWIPPAYKAISQADVGYGAYDLYDLGEFWQKGTVRTKYGTKGELQSAIKSLHSRDINVYGDVVINHKAGADATEDVQAVEVDPADRNRVISGEHLIKAWTHFHFPGRGSTYSDFKWYWYHFDGTDWDESRKLNRIYLFQGKTWDWPVSNEFGNYDYLMYADYDYDYPDVVAEITRWGTWYANELQLDGFRLDAVKHIKFFFLRDWVNHVREKTGKEMFTVAEYWSNDLGALENYLNKTNFNHSVFDVPLHYQFHAASTQGGGYDMRKLLNGTVVSKHPLKSVTFVDNHDTQPGQSLESTVQTWFKPLAYAFILTRESGYPSVFYGDMYGTKGDSQREIPALKHKIEPILKARKQYAYGAQHDYFDHHDIVGWTREGVSSVANSGLAALITDGPGGAKWMYVGRQNAGETWHDITGNRSEPVVINSEGWGEFHVNGGSVSIYVQR

SEQ ID NO: 33014 - protein, 481 aa, Bacillus licheniformis
VNGTLMQYFEWYTPNDGQHWKRLQNDAEHLSDIGITAVWIPPAYKAISQADVGYGAYDLYDLGEFWQKGTVRTKYGTKGELQSAIKSLHSRDINVYGDVVINHKAGADATEDVQAVEVDPADRNRVISGEHLIKAWTHFHFPGRGSTYSDFKWYWYHFDGTDWDESRKLNRIYLFQGKTWDWPVSNEFGNYDYLMYADYDYDYPDVVAEITRWGTWYANELQLDGFRLDAVKHIKFSFLRDWVNHVREKTGKEMFTVAEYWSNDLGALENYLNWTNFNHSVFDVPLHYQFHAASTQGGGYDMRKLLNGTVVSKHPLKSVTFVDNHDTQPGQSLESTVQTWFKPLAYAFILTRESGYPSVFYGDMYGTKGDSQREIPALKHKIEPILKARKQYAYGAQHDYFDHHDIVGWTREGVSSVANSGLAALITDGPGGAKWMYVGRQNAGETWHDITGNRSEPVVINSEGWGEFHVNGGSVSIYVQR

SEQ ID NO: 33015 - protein, 481 aa, Bacillus licheniformis
VNGTLMQYFEWYTPNDGQHWKRLQNDAEHLSDIGITAVWIPPAYKAISQADVGYGAYDLYDLGEFWQKGTVRTKYGTKGELQSAIKSLHSRDINVYGDVVINHKAGADATEDVQAVEVDPADRNRVISGEHLIKAWTHFHFPGRGSTYSDFKWYWYHFDGTDWDESRKLNRIYLFQGKTWDWPVSNEFGNYDYLMYADYDYDYPDVVAEITRWGTWYANELQLDGFRLDAVKHIKFSFLRDWVNHVREKTGKEMFTVAEYWSNDLGALENYLNFTNFNHSVFDVPLHYQFHAASTQGGGYDMRKLLNGTVVSKHPLKSVTFVDNHDTQPGQSLESTVQTWFKPLAYAFILTRESGYPSVFYGDMYGTKGDSQREIPALKHKIEPILKARKQYAYGAQHDYFDHHDIVGWTREGVSSVANSGLAALITDGPGGAKWMYVGRQNAGETWHDITGNRSEPVVINSEGWGEFHVNGGSVSIYVQR

SEQ ID NO: 33016 - protein, 481 aa, Bacillus licheniformis
VNGTLMQYFEWYTPNDGQHWKRLQNDAEHLSDIGITAVWIPPAYKAISQADVGYGAYDLYDLGEFWQKGTVRTKYGTKGELQSAIKSLHSRDINVYGDVVINHKAGADATEDVQAVEVDPADRNRVISGEHLIKAWTHFHFPGRGSTYSDFKWYWYHFDGTDWDESRKLNRIYLFQGKTWDWPVSNEFGNYDYLMYADYDYDYPDVVAEITRWGTWYANELQLDGFRLDAVKHIKFSFLRDWVNHVREKTGKEMFTVAEYWSNDLGALENYLNHTNFNHSVFDVPLHYQFHAASTQGGGYDMRKLLNGTVVSKHPLKSVTFVDNHDTQPGQSLESTVQTWFKPLAYAFILTRESGYPSVFYGDMYGTKGDSQREIPALKHKIEPILKARKQYAYGAQHDYFDHHDIVGWTREGVSSVANSGLAALITDGPGGAKWMYVGRQNAGETWHDITGNRSEPVVINSEGWGEFHVNGGSVSIYVQR

SEQ ID NO: 33017 - protein, 481 aa, Bacillus licheniformis
LNGTLMQYFEWYMPNDGQHWRRLQNDSAYLAEHGITAVWIPPAYKGTSQADVGYGAYDLYDLGEFHQKGTVRTKYGTKGELQSAIKSLHSRDINVYGDVVINHKGGADATEDVTAVEVDPADRNRVISGEHLIKAWTHFHFPGRGSTYSDFKWYWYHFDGTDWDESRKLNRIYKFQGKTWDWEVSNEFGNYDYLMYADIDYDHPDVVAEIKRWGTWYANELQLDGFRLDAVKHIKFSFLRDWVNHVREKTGKEMFTVAEYWSNDLGALENYLNKTNFNHSVFDVPLHYQFHAASTQGGGYDMRKLLNGTVVSKHPLKSVTFVDNHDTQPGQSLESTVQTWFKPLAYAFILTRESGYPQVFYGDMYGTKGDSQREIPALKHKIEPILKARKQYAYGAQHDYFDHHDIVGWTREGDSSVANSGLAALITDGPGGAKRMYVGRQNAGETWHDITGNRSEPVVINSEGWGEFHVNGGSVSIYVQR

SEQ ID NO: 33018 - protein, 481 aa, Bacillus licheniformis
LNGTLMQYFEWYMPNDGQHWRRLQNDSAYLAEHGITAVWIPPAYKGTSQADVGYGAYDLYDLGEFHQKGTVRTKYGTKGELQSAIKSLHSRDINVYGDVVINHKGGADATEDVTAVEVDPADRNRVISGEHLIKAWTHFHFPGRGSTYSDFKWHWYHFDGTDWDESRKLNRIYKFQGKAWDWPVSNENGNYDYLMYADIDYDHPDVAAEIKRWGTWYANELQLDGFRLDAVKHIKFHFLRDWVNHVREKTGKEMFTVAEYWQNDLGALENYLNWTNFNHSVFDVPLHYQFHAASTQGGGYDMRKLLNGTVVSKHPLKSVTFVDNHDTQPGQSLESTVQTWFKPLAYAFILTRESGYPQVFYGDMYGTKGDSQREIPALKHKIEPILKARKQYAYGAQHDYFDHHDIVGWTREGDSSVANSGLAALITDGPGGAKRMYVGRQNAGETWHDITGNRSEPVVINSEGWGEFHVNGGSVSIYVQR

SEQ ID NO: 33019 - protein, 481 aa, Bacillus licheniformis
LNGTLMQYFEWYMPNDGQHWRRLQNDSAYLAEHGITAVWIPPAYKGTSQADVGYGAYDLYDLGEFHQKGTVRTKYGTKGELQSAIKSLHSRDINVYGDVVINHKGGADATEDVTAVEVDPADRNRVISGEHLIKAWTHFHFPGRGSTYSDFKWHWYHFDGTDWDESRKLNRIYKFQGKAWDWPVSNENGNYDYLMYADIDYDHPDVAAEIKRWGTWYANELQLDGFRLDAVKHIKFYFLRDWVNHVREKTGKEMFTVAEYWQNDLGALENYLNWTNFNHSVFDVPLHYQFHAASTQGGGYDMRKLLNGTVVSKHPLKSVTFVDNHDTQPGQSLESTVQTWFKPLAYAFILTRESGYPQVFYGDMYGTKGDSQREIPALKHKIEPILKARKQYAYGAQHDYFDHHDIVGWTREGDSSVANSGLAALITDGPGGAKRMYVGRQNAGETWHDITGNRSEPVVINSEGWGEFHVNGGSVSIYVQR

SEQ ID NO: 33020 - protein, 481 aa, Bacillus licheniformis
LNGTLMQYFEWYMPNDGQHWRRLQNDSAYLAEHGITAVWIPPAYKGTSQADVGYGAYDLYDLGEFHQKGTVRTKYGTKGELQSAIKSLHSRDINVYGDVVINHKGGADATEDVTAVEVDPADRNRVISGEHLIKAWTHFHFPGRGSTYSDFKWHWYHFDGTDWDESRKLNRIYKFQGKAWDWPVSNENGNYDYLMYADIDYDHPDVAAEIKRWGTWYANELQLDGFRLDAVKHIKFYFLRDWVNHVREKTGKEMFTVAEYWQNDLGALENYLNYTNFNHSVFDVPLHYQFHAASTQGGGYDMRKLLNGTVVSKHPLKSVTFVDNHDTQPGQSLESTVQTWFKPLAYAFILTRESGYPQVFYGDMYGTKGDSQREIPALKHKIEPILKARKQYAYGAQHDYFDHHDIVGWTREGDSSVANSGLAALITDGPGGAKRMYVGRQNAGETWHDITGNRSEPVVINSEGWGEFHVNGGSVSIYVQR

SEQ ID NO: 33021 - protein, 481 aa, Bacillus licheniformis
LNGTLMQYFEWYMPNDGQHWRRLQNDSAYLAEHGITAVWIPPAYKGTSQADVGYGAYDLYDLGEFHQKGTVRTKYGTKGELQSAIKSLHSRDINVYGDVVINHKGGADATEDVTAVEVDPADRNRVISGEHLIKAWTHFHFPGRGSTYSDFKWHWYHFDGTDWDESRKLNRIYKFQGKAWDWEVSNENGNYDYLMYADIDYDHPDVAAEIKRWGTWYANELQLDGFRLDAVKHIKFSFLRDWVNHVREKTGKEMFTVAEYWQNDLGALENYLNKTNFNHSVFDVPLHYQFHAASTQGGGYDMRKLLNGTVVSKHPLKSVTFVDNHDTQPGQSLESTVQTWFKPLAYAFILTRESGYPQVFYGDMYGTKGDSQREIPALKHKIEPILKARKQYAYGAQHDYFDHHDIVGWTREGDSSVANSGLAALITDGPGGAKRMYVGRQKAGKTWHDITGNRSEPVVINSEGWGEFHVNGGSVSIYVKR

SEQ ID NO: 33022 - protein, 481 aa, Bacillus licheniformis
LNGTLMQYFEWYMPNDGQHWRRLQNDSAYLAEHGITAVWIPPAYKGTSQADVGYGAYDLYDLGEFHQKGTVRTKYGTKGELQSAIKSLHSRDINVYGDVVINHKGGADATEDVTAVEVDPADRNRVISGEHLIKAWTHFHFPGRGSTYSDFKWHWYHFDGTDWDESRKLNRIYKFQGKAWDWPVSNENGNYDYLMYADIDYDHPDVAAEIKRWGTWYANELQLDGFRLDAVKHIKFYFLRDWVNHVREKTGKEMFTVAEYWQNDLGALENYLNHTNFNHSVFDVPLHYQFHAASTQGGGYDMRKLLNGTVVSKHPLKSVTFVDNHDTQPGQSLESTVQTWFKPLAYAFILTRESGYPQVFYGDMYGTKGDSQREIPALKHKIEPILKARKQYAYGAQHDYFDHHDIVGWTREGDSSVANSGLAALITDGPGGAKRMYVGRQNAGETWHDITGNRSEPVVINSEGWGEFHVNGGSVSIYVQR

SEQ ID NO: 33023 - protein, 481 aa, Bacillus licheniformis
LNGTLMQYFEWYMPNDGQHWRRLQNDSAYLAEHGITAVWIPPAYKGTSQADVGYGAYDLYDLGEFHQKGTVRTKYGTKGELQSAIKSLHSRDINVYGDVVINHKGGADATEDVTAVEVDPADRNRVISGEHLIKAWTHFHFPGRGSTYSDFKWHWYHFDGTDWDESRKLNRIYKFQGKAWDWPVSNENGNYDYLMYADIDYDHPDVAAEIKRWGTWYANELQLDGFRLDAVKHIKFYFLRDWVNHVREKTGKEMFTVAEYWQNDLGALENYLNITNFNHSVFDVPLHYQFHAASTQGGGYDMRKLLNGTVVSKHPLKSVTFVDNHDTQPGQSLESTVQTWFKPLAYAFILTRESGYPQVFYGDMYGTKGDSQREIPALKHKIEPILKARKQYAYGAQHDYFDHHDIVGWTREGDSSVANSGLAALITDGPGGAKRMYVGRQNAGETWHDITGNRSEPVVINSEGWGEFHVNGGSVSIYVQR

SEQ ID NO: 33024 - protein, 481 aa, Bacillus licheniformis
LNGTLMQYFEWYMPNDGQHWRRLQNDSAYLAEHGITAVWIPPAYKGTSQADVGYGAYDLYDLGEFHQKGTVRTKYGTKGELQSAIKSLHSRDINVYGDVVINHKGGADATEDVTAVEVDPADRNRVISGEHLIKAWTHFHFPGRGSTYSDFKWHWYHFDGTDWDESRKLNRIYKFQGKAWDWPVSNENGNYDYLMYADIDYDHPDVAAEIKRWGTWYANELQLDGFRLDAVKHIKFYFLRDWVNHVREKTGKEMFTVAEYWQNDLGALENYLNFTNFNHSVFDVPLHYQFHAASTQGGGYDMRKLLNGTVVSKHPLKSVTFVDNHDTQPGQSLESTVQTWFKPLAYAFILTRESGYPQVFYGDMYGTKGDSQREIPALKHKIEPILKARKQYAYGAQHDYFDHHDIVGWTREGDSSVANSGLAALITDGPGGAKRMYVGRQNAGETWHDITGNRSEPVVINSEGWGEFHVNGGSVSIYVQR

SEQ ID NO: 33025 - protein, 481 aa, Bacillus licheniformis
LNGTLMQYFEWYMPNDGQHWRRLQNDSAYLAEHGITAVWIPPAYKGTSQADVGYGAYDLYDLGEFHQKGTVRTKYGTKGELQSAIKSLHSRDINVYGDVVINHKGGADATEDVTAVEVDPADRNRVISGEHLIKAWTHFHFPGRGSTYSDFKWHWYHFDGTDWDESRKLNRIYKFQGKAWDWEVSNENGNYDYLMYADFDYDNPDVAAEIKRWGTWYANELQLDGFRLDAVKHIKFSFLRDWVNHVREKTGKEMFTVAEYWQNDLGALENYLNKTNFNHSVFDVPLHYQFHAASTQGGGYDMRKLLNGTVVSKHPLKSVTFVDNHDTQPGQSLESTVQTWFKPLAYAFILTRESGYPQVFYGDMYGTKGDSQRKIPALKHKIEPILKARKQYAYGAQHDYFDHHDIVGWTREGDSSVRNSGLAALITDGPGGAKRMYVGRQNAGETWHDITGNRSEPVVINSEGWGEFHVNGGSVSIYVQR

SEQ ID NO: 33026 - protein, 481 aa, Bacillus licheniformis
LNGTLMQYFEWYMPNDGQHWRRLQNDSAYLAEHGITAVWIPPAYKGTSQADVGYGAYDLYDLGEFHQKGTVRTKYGTKGELQSAIKSLHSRDINVYGDVVINHKGGADATEDVTAVEVDPADRNRVISGEHLIKAWTHFHFPGRGSTYSDFKWHWYHFDGTDWDESRKLNRIYKFQGKAWDWEVSNENGNYDYLMYADIDYDHPDVAAEIKRWGTWYANELQLDGFRLDAVKHIKFSFLRDWVNHVREKTGKEMFTVAEYWQNDLGALENYLNKTNFNHSVFDVPLHYQFHAASTQGGGYDMRKLLNGTVVSKHPLKSVTFVDNHDTQPGQSLESTVQTWFKPLAYAFILTRESGYPQVFYGDMYGTKGDSQREIPALKHKIEPILKARKQYAYGAQHDYFDHHDIVGWTREGDSSVANSGLAALITDGPGGAKRMYVGRQKAGQTWHDITGNRSEPVVINSEGWGEFHVNGGSVSIYVKR

SEQ ID NO: 33027 - protein, 481 aa, Bacillus licheniformis
LNGTLMQYFEWYMPNDGQHWRRLQNDSAYLAEHGITAVWIPPAYKGTSQADVGYGAYDLYDLGEFHQKGTVRTKYGTKGELQSAIKSLHSRDINVYGDVVINHKGGADATEDVTAVEVDPADRNRVISGEHLIKAWTHFHFPGRGSTYSDFKWHWYHFDGTDWDESRKLNRIYKFQGKAWDWPVSNENGNYDYLMYADIDYDHPDVAAEIKRWGTWYANELQLDGFRLDAVKHIKFFFLRDWVNHVREKTGKEMFTVAEYWQNDLGALENYLNWTNFNHSVFDVPLHYQFHAASTQGGGYDMRKLLNGTVVSKHPLKSVTFVDNHDTQPGQSLESTVQTWFKPLAYAFILTRESGYPQVFYGDMYGTKGDSQREIPALKHKIEPILKARKQYAYGAQHDYFDHHDIVGWTREGDSSVANSGLAALITDGPGGAKRMYVGRQNAGETWHDITGNRSEPVVINSEGWGEFHVNGGSVSIYVQR

SEQ ID NO: 33028 - protein, 481 aa, Bacillus licheniformis
LNGTLMQYFEWYMPNDGQHWRRLQNDSAYLAEHGITAVWIPPAYKGTSQADVGYGAYDLYDLGEFHQKGTVRTKYGTKGELQSAIKSLHSRDINVYGDVVINHKGGADATEDVGAVEVDPADRNRVISGEHLIKAWTHFHFPGRGSTYSDFKWHWYHFDGTDWDESRKLNRIYLFQGKAWDWPVSNENGNYDYLMYADIDYDHPDVAAEIKRWGTWYANELQLDGFRLDAVKHIKFSFLRDWVNHVREKTGKEMFTVAEYWQNDLGALENYLNKTNFNHSVFDVPLHYQFHAASTQGGGYDMRKLLNGTVVSKHPLKSVTFVDNHDTQPGQSLESTVQTWFKPLAYAFILTRESGYPQVFYGDMYGTKGDSQREIPALKHKIEPILKARKQYAYGAQHDYFDHHDIVGWTREGDSSVANSGLAALITDGPGGAKRMYVGRQNAGETWHDITGNRSEPVVINSEGWGEFHVNGGSVSIYVQR

SEQ ID NO: 33029 - protein, 481 aa, Bacillus licheniformis
LNGTLMQYFEWYMPNDGQHWRRLQNDSAYLAEHGITAVWIPPAYKGISQADVGYGAYDLYDLGEFHQKGTVRTKYGTKGELQSAIKSLHSRDINVYGDVVINHKGGADATEDVTAVEVDPADRNRVISGEHLIKAWTHFHFPGRGSTYSDFKWHWYHFDGTDWDESRKLNRIYRFQGKAWDWEVSNENGNYDYLMYADIDYDHPVVAAEIKRWGTWYANELQLDGFRLDAVKHIKFSFLRDWVNHVREKTGKEMFTVAEYWQNDLGALENYLNKTNFNHSVFDVPLHYQFHAASTQGGGYDMRKLLNGTVVSKHPLKSVTFVDNHDTQPGQSLESTVQTWFKPLAYAFILTRESGYPQVFYGDMYGTKGDSQREIPALKHKIEPILKARKQYAYGAQHDFFDHHDIVGWTREGDSSVANSGLAALITDGPGGAKRMYVGRQNAGETWHDITGNRSEPVVINSEGWGEFHVNGGSVSIYVQR

SEQ ID NO: 33030 - protein, 481 aa, Bacillus licheniformis
LNGTLMQYFEWYMPNDGQHWRRLQNDSAYLAEHGITAVWIPPAYKGTSQADVGYGAYDLYDLGEFHQKGTVRTKYGTKGELQSAIKSLHSRDINVYGDVVINHKGGADATEDVTAVEVDPADRNRVISGEHLIKAWTHFHFPGRGSTYSDFKWHWYHFDGTDWDESRKLNRIYKFQGKAWDWPVSNENGNYDYLMYADIDYDHPDVAAEIKRWGTWYANELQLDGFRLDAVKHIKFYFLRDWVNHVREKTGKEMFTVAEYWQNDLGALENYLNLTNFNHSVFDVPLHYQFHAASTQGGGYDMRKLLNGTVVSKHPLKSVTFVDNHDTQPGQSLESTVQTWFKPLAYAFILTRESGYPQVFYGDMYGTKGDSQREIPALKHKIEPILKARKQYAYGAQHDYFDHHDIVGWTREGDSSVANSGLAALITDGPGGAKRMYVGRQNAGETWHDITGNRSEPVVINSEGWGEFHVNGGSVSIYVQR

SEQ ID NO: 33031 - protein, 481 aa, Bacillus licheniformis
LNGTLMQYFEWYMPNDGQHWRRLQNDSAYLAEHGITAVWIPPAYKGTSQADVGYGAYDLYDLGEFHQKGTVRTKYGTKGELQSAIKSLHSRDINVYGDVVINHKGGADATEDVTAVEVDPADRNRVISGEHLIKAWTHFHFPGRGSTYSDFKWHWYHFDGTDWDESRKLNRIYKFQGQAWDWEVSNENGNYDYLMYADIDYDHPVVAAEIKRWGTWYANELQLDGFRLDAVKHIKFSFLRDWVNHVREKTGKEMFTVAEYWQNDLGALENYLNKTNFSHSVFDVPLHYQFHAASTQGGGYDMRKLLNGTVVSKHPLKSVTFVDNHDTQPGQSLESTVQTWFKPLAYAFILTRESGYPQVFYGDMYGTKGDSQREIPALKHKIEPILKARKQYAYGAQHDYFDHHDIVGWTREGDSSVANSGLAALITDGPGGAKRMYVGRQNAGETWHDITGNRSEPVVINSEGWGEFHVNGGSVSIYVQR

SEQ ID NO: 33032 - protein, 481 aa, Bacillus licheniformis
LNGTLMQYFEWYMPNDGQHWRRLQNDSAYLAEHGITAVWIPPAYKGTSQADVGYGAYDLYDLGEFHQKGTVRTKYGTKGELQSAIKSLHSRDINVYGDVVINHKGGADATEDVTAVEVDPADRNRVISGEHLIKAWTHFHFPGRGSTYSDFKWHWYHFDGTDWDESRKLNRIYLFQGKAWDWPVSNENGNYDYLMYADIDYDHPDVAAEIKRWGTWYANELQLDGFRLDAVKHIKFSFDRDWVNHVREKTGKEMFTVAEYWQNDLGALENYLNKTNFNHSVFDVPLHYQFHAASTQGGGYDMRKLLNGTVVSKHPLKSVTFVDNHDTQPGQSLESTVQTWFKPLAYAFILTRESGYPQVFYGDMYGTKGDSQREIPALKHKIEPILKARKQYAYGAQHDYFDHHDIVGWTREGDSSVANSGLAALITDGPGGAKRMYVGRQNAGETWHDITGNRSEPVVINSEGWGEFHVNGGSVSIYVQR

SEQ ID NO: 33033 - protein, 481 aa, Bacillus sp. SCSIO 15121
LNGTLMQYFEWYMPNDGQHWKRLQNDSAYLAEHGITAVWIPPAYKGTSQDDVGYGAYDLYDLGEFHQKGTVRTKYGTKGELQSAINSLHSRDINVYGDVVINHKGGADATEDVTAVEVDPADRNRVTSGEQRIKAWTHFQFPGRGSTYSDFKWHWEHFDGTDWDESRKLNRIYLFQGKAWDWEVSNENGNYDYLMYADIDYDHPDVTAEIKRWGTWYANELQLDGFRLDAVKHIKFSFLRDWVNHVREKTGKEMFTVAEYWQNDLGALENYLNKTNFNHSVFDVPLHYQFHAASTQGGGYDMRKLLNGTVVSKHPVKAVTFVDNHDTQPGQSLESTVQTWFKPLAYAFILTREAGYPQIFYGDMYGTKGASQREIPALKHKIEPILKARKQYAYGAQHDYFDHHNIVGWTREGDSSVANSGLAALITDGPSGTKRMYVGRQNAGETWHDITGNRSDSVVINAEGWGEFHVNGGSVSIYVQR

SEQ ID NO: 33034 - protein, 485 aa, Bacillus sp.
HHDGTNGTIMQYFEWNVPNDGQHWNRLHNNAQNLKNAGITAIWIPPAWKGTSQNDVGYGAYDLYDLGEFNQKGTVRTKYGTKAELERAIRSLKANGIQVYGDVVMNHKGGADFTERVQAVEVNPQNRNQEVSGTYQIEAWTGFNFPGRGNQHSSFKWRWYHFDGTDWDQSRQLANRIYKFRGDGKAWDWEVDTENGNYDWLLSADVDMDHPEVINELNRWGVWYANTLNLDGFRLDAVKHIKFSFMRDWLGHVRGQTGKNLFAVAEYWKNDLGALENYLSKTNWTMSAFDVPLHYNLYQASNSSGNYDMRNLLNGTLVQRHPSHAVTFVDNHDTQPGEALESFVQGWFKPLAYATILTREQGYPQVFYGDYYGIPSDGVPSYRQQIDPLLKARQQYAYGRQHDYFDHWDVIGWTREGNASHPNSGLATIMSDGPGGSKWMYVGRQKAGEVWHDMTGNRSGTVTINQDGWGHFFVNGGSVSVWVKR

SEQ ID NO: 33035 - protein, 485 aa, Bacillus sp.
HHDGTNGTIMQYFEWNVPNDGQHWNRLHNNAQNLKNAGITAIWIPPAWKGTSQNDVGYGAYDLYDLGEFNQKGTVRTKYGTKAELERAIRSLKANGIQVYGDVVMNHKGGADFTERVQAVEVNPQNRNQEVSGTYQIEAWTGFNFPGRGNQHSSFKWRWYHFDGTDWDQSRQLANRIYKFRGDGKAWDWEVDTENGNYDTWKYADVDMDHPEVINELNRWGVWYANTLNLDGFRLDAVKHIKFSFMRDWLGHVRGQTGKNLFAVAEYWKNDLGALENYLSKTNWTMSAFDVPLHYNLYQASNSSGNYDMRNLLNGTLVQRHPSHAVTFVDNHDTQPGEALESFVQGWFKPLAYATILTREQGYPQVFYGDYYGIPSDGVPSYRQQIDPLLKARQQYAYGRQHDYFDHWDVIGWTREGNASHPNSGLATIMSDGPGGSKWMYVGRQKAGEVWHDMTGNRSGTVTINQDGWGHFFVNGGSVSVWVKR

SEQ ID NO: 33036 - protein, 485 aa, Bacillus sp.
HHDGTNGTIMQYFEWNVPNDGQHWNRLHNNAQNLKNAGITAIWIPPAWKGTSQNDVGYGAYDLYDLGEFNQKGTVRTKYGTKAELERAIRSLKANGIQVYGDVVMNHKGGADFTERVQAVEVNPQNRNQEVSGTYQIEAWTGFNFPGRGNQHSSFKWRWYHFDGTDWDQSRQLANRIYKFRGDGKAWDWEVDTENGNYDYQLIADVDMDHPEVINELNRWGVWYANTLNLDGFRLDAVKHIKFSFMRDWLGHVRGQTGKNLFAVAEYWKNDLGALENYLSKTNWTMSAFDVPLHYNLYQASNSSGNYDMRNLLNGTLVQRHPSHAVTFVDNHDTQPGEALESFVQGWFKPLAYATILTREQGYPQVFYGDYYGIPSDGVPSYRQQIDPLLKARQQYAYGRQHDYFDHWDVIGWTREGNASHPNSGLATIMSDGPGGSKWMYVGRQKAGEVWHDMTGNRSGTVTINQDGWGHFFVNGGSVSVWVKR

SEQ ID NO: 33037 - protein, 485 aa, Bacillus sp.
HHDGTNGTIMQYFEWNVPNDGQHWNRLHNNAQNLKNAGITAIWIPPAWKGTSQNDVGYGAYDLYDLGEFNQKGTVRTKYGTKAELERAIRSLKANGIQVYGDVVMNHKGGADFTERVQAVEVNPQNRNQEVSGTYQIEAWTGFNFPGRGNQHSSFKWRWYHFDGTDWDQSRQLANRIYKFRGDGKAWDWEVDTENGNYDWLLWADVDMDHPEVINELNRWGVWYANTLNLDGFRLDAVKHIKFSFMRDWLGHVRGQTGKNLFAVAEYWKNDLGALENYLSKTNWTMSAFDVPLHYNLYQASNSSGNYDMRNLLNGTLVQRHPSHAVTFVDNHDTQPGEALESFVQGWFKPLAYATILTREQGYPQVFYGDYYGIPSDGVPSYRQQIDPLLKARQQYAYGRQHDYFDHWDVIGWTREGNASHPNSGLATIMSDGPGGSKWMYVGRQKAGEVWHDMTGNRSGTVTINQDGWGHFFVNGGSVSVWVKR

SEQ ID NO: 33038 - protein, 485 aa, Bacillus sp.
HHDGTNGTIMQYFEWNVPNDGQHWNRLHNNAQNLKNAGITAIWIPPAWKGTSQNDVGYGAYDLYDLGEFNQKGTVRTKYGTKAELERAIRSLKANGIQVYGDVVMNHKGGADFTERVQAVEVNPQNRNQEVSGTYQIEAWTGFNFPGRGNQHSSFKWRWYHFDGTDWDQSRQLANRIYKFRGDGKAWDWEVDTENGNYDPLLDADVDMDHPEVINELNRWGVWYANTLNLDGFRLDAVKHIKFSFMRDWLGHVRGQTGKNLFAVAEYWKNDLGALENYLSKTNWTMSAFDVPLHYNLYQASNSSGNYDMRNLLNGTLVQRHPSHAVTFVDNHDTQPGEALESFVQGWFKPLAYATILTREQGYPQVFYGDYYGIPSDGVPSYRQQIDPLLKARQQYAYGRQHDYFDHWDVIGWTREGNASHPNSGLATIMSDGPGGSKWMYVGRQKAGEVWHDMTGNRSGTVTINQDGWGHFFVNGGSVSVWVKR

SEQ ID NO: 33039 - protein, 485 aa, Bacillus sp.
HHDGTNGTIMQYFEWNVPNDGQHWNRLHNNAQNLKNAGITAIWIPPAWKGTSQNDVGYGAYDLYDLGEFNQKGTVRTKYGTKAELERAIRSLKANGIQVYGDVVMNHKGGADFTERVQAVEVNPQNRNQEVSGTYQIEAWTGFNFPGRGNQHSSFKWRWYHFDGTDWDQSRQLANRIYKFRGDGKAWDWEVDTENGNYDQLPFADVDMDHPEVINELNRWGVWYANTLNLDGFRLDAVKHIKFSFMRDWLGHVRGQTGKNLFAVAEYWKNDLGALENYLSKTNWTMSAFDVPLHYNLYQASNSSGNYDMRNLLNGTLVQRHPSHAVTFVDNHDTQPGEALESFVQGWFKPLAYATILTREQGYPQVFYGDYYGIPSDGVPSYRQQIDPLLKARQQYAYGRQHDYFDHWDVIGWTREGNASHPNSGLATIMSDGPGGSKWMYVGRQKAGEVWHDMTGNRSGTVTINQDGWGHFFVNGGSVSVWVKR

SEQ ID NO: 33040 - protein, 485 aa, Bacillus sp.
HHDGTNGTIMQYFEWNVPNDGQHWNRLHNNAQNLKNAGITAIWIPPAWKGTSQNDVGYGAYDLYDLGEFNQKGTVRTKYGTKAELERAIRSLKANGIQVYGDVVMNHKGGADFTERVQAVEVNPQNRNQEVSGTYQIEAWTGFNFPGRGNQHSSFKWRWYHFDGTDWDQSRQLANRIYKFRGDGKAWDWEVDTENGNYDYHLPADVDMDHPEVINELNRWGVWYANTLNLDGFRLDAVKHIKFSFMRDWLGHVRGQTGKNLFAVAEYWKNDLGALENYLSKTNWTMSAFDVPLHYNLYQASNSSGNYDMRNLLNGTLVQRHPSHAVTFVDNHDTQPGEALESFVQGWFKPLAYATILTREQGYPQVFYGDYYGIPSDGVPSYRQQIDPLLKARQQYAYGRQHDYFDHWDVIGWTREGNASHPNSGLATIMSDGPGGSKWMYVGRQKAGEVWHDMTGNRSGTVTINQDGWGHFFVNGGSVSVWVKR

SEQ ID NO: 33041 - protein, 485 aa, Bacillus sp.
HHDGTNGTIMQYFEWNVPNDGQHWNRLHNNAQNLKNAGITAIWIPPAWKGTSQNDVGYGAYDLYDLGEFNQKGTVRTKYGTKAELERAIRSLKANGIQVYGDVVMNHKGGADFTERVQAVEVNPQNRNQEVSGTYQIEAWTGFNFPGRGNQHSSFKWRWYHFDGTDWDQSRQLANRIYKFRGDGKAWDWEVDTENGNYDYHLFADVDMDHPEVINELNRWGVWYANTLNLDGFRLDAVKHIKFSFMRDWLGHVRGQTGKNLFAVAEYWKNDLGALENYLSKTNWTMSAFDVPLHYNLYQASNSSGNYDMRNLLNGTLVQRHPSHAVTFVDNHDTQPGEALESFVQGWFKPLAYATILTREQGYPQVFYGDYYGIPSDGVPSYRQQIDPLLKARQQYAYGRQHDYFDHWDVIGWTREGNASHPNSGLATIMSDGPGGSKWMYVGRQKAGEVWHDMTGNRSGTVTINQDGWGHFFVNGGSVSVWVKR

SEQ ID NO: 33042 - protein, 485 aa, Bacillus sp.
HHDGTNGTIMQYFEWNVPNDGQHWNRLHNNAQNLKNAGITAIWIPPAWKGTSQNDVGYGAYDLYDLGEFNQKGTVRTKYGTKAELERAIRSLKANGIQVYGDVVMNHKGGADFTERVQAVEVNPQNRNQEVSGTYQIEAWTGFNFPGRGNQHSSFKWRWYHFDGTDWDQSRQLANRIYKFRGDGKAWDWEVDTENGNYDYQPRADVDMDHPEVINELNRWGVWYANTLNLDGFRLDAVKHIKFSFMRDWLGHVRGQTGKNLFAVAEYWKNDLGALENYLSKTNWTMSAFDVPLHYNLYQASNSSGNYDMRNLLNGTLVQRHPSHAVTFVDNHDTQPGEALESFVQGWFKPLAYATILTREQGYPQVFYGDYYGIPSDGVPSYRQQIDPLLKARQQYAYGRQHDYFDHWDVIGWTREGNASHPNSGLATIMSDGPGGSKWMYVGRQKAGEVWHDMTGNRSGTVTINQDGWGHFFVNGGSVSVWVKR

SEQ ID NO: 33043 - protein, 485 aa, Bacillus sp.
HHDGTNGTIMQYFEWNVPNDGQHWNRLHNNAQNLKNAGITAIWIPPAWKGTSQNDVGYGAYDLYDLGEFNQKGTVRTKYGTKAELERAIRSLKANGIQVYGDVVMNHKGGADFTERVQAVEVNPQNRNQEVSGTYQIEAWTGFNFPGRGNQHSSFKWRWYHFDGTDWDQSRQLANRIYKFRGDGKAWDWEVDTENGNYDKLLWADVDMDHPEVINELNRWGVWYANTLNLDGFRLDAVKHIKFSFMRDWLGHVRGQTGKNLFAVAEYWKNDLGALENYLSKTNWTMSAFDVPLHYNLYQASNSSGNYDMRNLLNGTLVQRHPSHAVTFVDNHDTQPGEALESFVQGWFKPLAYATILTREQGYPQVFYGDYYGIPSDGVPSYRQQIDPLLKARQQYAYGRQHDYFDHWDVIGWTREGNASHPNSGLATIMSDGPGGSKWMYVGRQKAGEVWHDMTGNRSGTVTINQDGWGHFFVNGGSVSVWVKR

SEQ ID NO: 33044 - protein, 485 aa, Bacillus sp.
HHDGTNGTIMQYFEWNVPNDGQHWNRLHNNAQNLKNAGITAIWIPPAWKGTSQNDVGYGAYDLYDLGEFNQKGTVRTKYGTKAELERAIRSLKANGIQVYGDVVMNHKGGADFTERVQAVEVNPQNRNQEVSGTYQIEAWTGFNFPGRGNQHSSFKWRWYHFDGTDWDQSRQLANRIYKFRGDGKAWDWEVDTENGNYDYELPADVDMDHPEVINELNRWGVWYANTLNLDGFRLDAVKHIKFSFMRDWLGHVRGQTGKNLFAVAEYWKNDLGALENYLSKTNWTMSAFDVPLHYNLYQASNSSGNYDMRNLLNGTLVQRHPSHAVTFVDNHDTQPGEALESFVQGWFKPLAYATILTREQGYPQVFYGDYYGIPSDGVPSYRQQIDPLLKARQQYAYGRQHDYFDHWDVIGWTREGNASHPNSGLATIMSDGPGGSKWMYVGRQKAGEVWHDMTGNRSGTVTINQDGWGHFFVNGGSVSVWVKR

SEQ ID NO: 33045 - protein, 485 aa, Bacillus sp.
HHDGTNGTIMQYFEWNVPNDGQHWNRLHNNAQNLKNAGITAIWIPPAWKGTSQNDVGYGAYDLYDLGEFNQKGTVRTKYGTKAELERAIRSLKANGIQVYGDVVMNHKGGADFTERVQAVEVNPQNRNQEVSGTYEIEAWTGFNFPGRGNQHSSFKWRWYHFDGTDWDQSRQLSNRIYKFRGDGKAWDWEVDTEXGNYDYLMYADVDMNHPEVINXLNRWGVWYANTLNLDGFRLDAVKHIQFSFMRNWLGHVRGQTGKNLFAVAEYWKNDLGALENYLSKTNWTMSAFDVPLHYNLYQASNSGGNYDMRNLLNGTLVQRHPSHAVTFVDNHDTQPGEALESFVQGWFKPLAYATILTREQGYPQVFYGDYYGIPSDGVPSYRQQIDPLLKARQQYAYGRQHDYFDHWDVIGWTREGNASHPNSGLATIMSDGPGGSKWMYVGRQKAGEVWHDITGNRSGTVTINQDGWGQFFVNGGSVSVWVKR

SEQ ID NO: 33046 - protein, 485 aa, Bacillus sp.
HHDGTNGTIMQYFEWNVPNDGQHWNRLHNNAQNLKNAGITAIWIPPAWKGTSQNDVGYGAYDLYDLGEFNQKGTVRTKYGTKAELERAIRSLKANGIQVYGDVVMNHKGGADFTERVQAVEVNPQNRNQEVSGTYQIEAWTGFNFPGRGNQHSSFKWRWYHFDGTDWDQSRQLANRIYKFRGDGKAWDWEVDTENGNYDYTLSADVDMDHPEVINELNRWGVWYANTLNLDGFRLDAVKHIKFSFMRDWLGHVRGQTGKNLFAVAEYWKNDLGALENYLSKTNWTMSAFDVPLHYNLYQASNSSGNYDMRNLLNGTLVQRHPSHAVTFVDNHDTQPGEALESFVQGWFKPLAYATILTREQGYPQVFYGDYYGIPSDGVPSYRQQIDPLLKARQQYAYGRQHDYFDHWDVIGWTREGNASHPNSGLATIMSDGPGGSKWMYVGRQKAGEVWHDMTGNRSGTVTINQDGWGHFFVNGGSVSVWVKR

SEQ ID NO: 33047 - protein, 485 aa, Bacillus sp.
HHDGTNGTIMQYFEWNVPNDGQHWNRLHNNAQNLKNAGITAIWIPPAWKGTSQNDVGYGAYDLYDLGEFNQKGTVRTKYGTKAELERAIRSLKANGIQVYGDVVMNHKGGADFTERVQAVEVNPQNRNQEVSGTYQIEAWTGFNFPGRGNQHSSFKWRWYHFDGTDWDQSRQLANRIYKFRGDGKAWDWEVDTENGNYDWHLYADVDMDHPEVINELNRWGVWYANTLNLDGFRLDAVKHIKFSFMRDWLGHVRGQTGKNLFAVAEYWKNDLGALENYLSKTNWTMSAFDVPLHYNLYQASNSSGNYDMRNLLNGTLVQRHPSHAVTFVDNHDTQPGEALESFVQGWFKPLAYATILTREQGYPQVFYGDYYGIPSDGVPSYRQQIDPLLKARQQYAYGRQHDYFDHWDVIGWTREGNASHPNSGLATIMSDGPGGSKWMYVGRQKAGEVWHDMTGNRSGTVTINQDGWGHFFVNGGSVSVWVKR

SEQ ID NO: 33048 - protein, 485 aa, Bacillus sp.
HHDGTNGTIMQYFEWNVPNDGQHWNRLHNNAQNLKNAGITAIWIPPAWKGTSQNDVGYGAYDLYDLGEFNQKGTVRTKYGTKAELERAIRSLKANGIQVYGDVVMNHKGGADFTERVQAVEVNPQNRNQEVSGTYQIEAWTGFNFPGRGNQHSSFKWRWYHFDGTDWDQSRQLANRIYKFRGDGKAWDWEVDTENGNYDPLLLADVDMDHPEVINELNRWGVWYANTLNLDGFRLDAVKHIKFSFMRDWLGHVRGQTGKNLFAVAEYWKNDLGALENYLSKTNWTMSAFDVPLHYNLYQASNSSGNYDMRNLLNGTLVQRHPSHAVTFVDNHDTQPGEALESFVQGWFKPLAYATILTREQGYPQVFYGDYYGIPSDGVPSYRQQIDPLLKARQQYAYGRQHDYFDHWDVIGWTREGNASHPNSGLATIMSDGPGGSKWMYVGRQKAGEVWHDMTGNRSGTVTINQDGWGHFFVNGGSVSVWVKR

SEQ ID NO: 33049 - protein, 485 aa, Bacillus sp.
HHDGTNGTIMQYFEWNVPNDGQHWNRLHNNAQNLKNAGITAIWIPPAWKGTSQNDVGYGAYDLYDLGEFNQKGTVRTKYGTKAELERAIRSLKANGIQVYGDVVMNHKGGADFTERVQAVEVNPQNRNQEVSGTYQIEAWTGFNFPGRGNQHSSFKWRWYHFDGTDWDQSRQLANRIYKFRGDGKAWDWEVDTENGNYDYPLNADVDMDHPEVINELNRWGVWYANTLNLDGFRLDAVKHIKFSFMRDWLGHVRGQTGKNLFAVAEYWKNDLGALENYLSKTNWTMSAFDVPLHYNLYQASNSSGNYDMRNLLNGTLVQRHPSHAVTFVDNHDTQPGEALESFVQGWFKPLAYATILTREQGYPQVFYGDYYGIPSDGVPSYRQQIDPLLKARQQYAYGRQHDYFDHWDVIGWTREGNASHPNSGLATIMSDGPGGSKWMYVGRQKAGEVWHDMTGNRSGTVTINQDGWGHFFVNGGSVSVWVKR

SEQ ID NO: 33050 - protein, 485 aa, Bacillus sp.
HHDGTNGTIMQYFEWNVPNDGQHWNRLHNNAQNLKNAGITAIWIPPAWKGTSQNDVGYGAYDLYDLGEFNQKGTVRTKYGTKAELERAIRSLKANGIQVYGDVVMNHKGGADFTERVQAVEVNPQNRNQEVSGTYQIEAWTGFNFPGRGNQHSSFKWRWYHFDGTDWDQSRQLANRIYKFRGDGKAWDWEVDTENGNYDYRLFADVDMDHPEVINELNRWGVWYANTLNLDGFRLDAVKHIKFSFMRDWLGHVRGQTGKNLFAVAEYWKNDLGALENYLSKTNWTMSAFDVPLHYNLYQASNSSGNYDMRNLLNGTLVQRHPSHAVTFVDNHDTQPGEALESFVQGWFKPLAYATILTREQGYPQVFYGDYYGIPSDGVPSYRQQIDPLLKARQQYAYGRQHDYFDHWDVIGWTREGNASHPNSGLATIMSDGPGGSKWMYVGRQKAGEVWHDMTGNRSGTVTINQDGWGHFFVNGGSVSVWVKR

SEQ ID NO: 33051 - protein, 485 aa, Bacillus sp.
HHDGTNGTIMQYFEWNVPNDGQHWNRLHNNAQNLKNAGITAIWIPPAWKGTSQNDVGYGAYDLYDLGEFNQKGTVRTKYGTKAELERAIRSLKANGIQVYGDVVMNHKGGADFTERVQAVEVNPQNRNQEVSGTYQIEAWTGFNFPGRGNQHSSFKWRWYHFDGTDWDQSRQLANRIYKFRGDGKAWDWEVDTENGNYDIRNYADVDMDHPEVINELNRWGVWYANTLNLDGFRLDAVKHIKFSFMRDWLGHVRGQTGKNLFAVAEYWKNDLGALENYLSKTNWTMSAFDVPLHYNLYQASNSSGNYDMRNLLNGTLVQRHPSHAVTFVDNHDTQPGEALESFVQGWFKPLAYATILTREQGYPQVFYGDYYGIPSDGVPSYRQQIDPLLKARQQYAYGRQHDYFDHWDVIGWTREGNASHPNSGLATIMSDGPGGSKWMYVGRQKAGEVWHDMTGNRSGTVTINQDGWGHFFVNGGSVSVWVKR

SEQ ID NO: 33052 - protein, 483 aa, Bacillus sp.
HHDGTNGTIMQYFEWNVPNDGQHWNRLHNNAQNLKNAGITAIWIPPAWKGTSQNDVGYGAYDLYDLGEFNQKGTVRTKYGTKAELERAIRSLKANGIQVYGDVVMNHKGGADFTERVQAVEVNPQNRNQEVSGTYQIEAWTGFNFPGRGNQHSSFKWRWYHFDGTDWDQSRQLANRIYKFDGKAWDWEVDTEFGNYDYLMYADVDMDHPEVINQLNRWGVWYANTLNLDGFRLDAVKHIKFSFMRDWLGHVRGQTGKNLFAVAEYWKNDLGALENYLSKTNWTMSAFDVPLHYNLYQASNSSGNYDMRNLLNGTLVQRHPSHAVTFVDNHDTQPGEALESFVQGWFKPLAYATILTREQGYPQVFYGDYYGIPSDGVPSYRQQIDPLLKARQQYAYGRQHDYFDHWDVIGWTREGNASHPNSGLATIMSDGPGGSKWMYVGRQKAGEVWHDMTGNRSGTVTINQDGWGHFFVNGGSVSVWVKR

SEQ ID NO: 33053 - protein, 485 aa, Bacillus sp.
HHDGTNGTIMQYFEWNVPNDGQHWNRLHNNAQNLKNAGITAIWIPPAWKGTSQNDVGYGAYDLYDLGEFNQKGTVRTKYGTKAELERAIRSLKANGIQVYGDVVMNHKGGADFTERVQAVEVNPQNRNQEVSGTYQIEAWTGFNFPGRGNQHSSFKWRWYHFDGTDWDQSRQLANRIYKFRGDGKAWDWEVDTENGNYDQLLQADVDMDHPEVINELNRWGVWYANTLNLDGFRLDAVKHIKFSFMRDWLGHVRGQTGKNLFAVAEYWKNDLGALENYLSKTNWTMSAFDVPLHYNLYQASNSSGNYDMRNLLNGTLVQRHPSHAVTFVDNHDTQPGEALESFVQGWFKPLAYATILTREQGYPQVFYGDYYGIPSDGVPSYRQQIDPLLKARQQYAYGRQHDYFDHWDVIGWTREGNASHPNSGLATIMSDGPGGSKWMYVGRQKAGEVWHDMTGNRSGTVTINQDGWGHFFVNGGSVSVWVKR

SEQ ID NO: 33054 - protein, 485 aa, Bacillus sp.
HHDGTNGTIMQYFEWNVPNDGQHWNRLHNNAQNLKNAGITAIWIPPAWKGTSQNDVGYGAYDLYDLGEFNQKGTVRTKYGTKAELERAIRSLKANGIQVYGDVVMNHKGGADFTERVQAVEVNPQNRNQEVSGTYQIEAWTGFNFPGRGNQHSSFKWRWYHFDGTDWDQSRQLANRIYKFRGDGKAWDWEVDTENGNYDYWLEADVDMDHPEVINELNRWGVWYANTLNLDGFRLDAVKHIKFSFMRDWLGHVRGQTGKNLFAVAEYWKNDLGALENYLSKTNWTMSAFDVPLHYNLYQASNSSGNYDMRNLLNGTLVQRHPSHAVTFVDNHDTQPGEALESFVQGWFKPLAYATILTREQGYPQVFYGDYYGIPSDGVPSYRQQIDPLLKARQQYAYGRQHDYFDHWDVIGWTREGNASHPNSGLATIMSDGPGGSKWMYVGRQKAGEVWHDMTGNRSGTVTINQDGWGHFFVNGGSVSVWVKR

SEQ ID NO: 33055 - protein, 485 aa, Bacillus sp.
HHDGTNGTIMQYFEWNVPNDGQHWNRLHNNAQNLKNAGITAIWIPPAWKGTSQNDVGYGAYDLYDLGEFNQKGTVRTKYGTKAELERAIRSLKANGIQVYGDVVMNHKGGADFTERVQAVEVNPQNRNQEVSGTYQIEAWTGFNFPGRGNQHSSFKWRWYHFDGTDWDQSRQLANRIYKFRGDGKAWDWEVDTENGNYDQLLVADVDMDHPEVINELNRWGVWYANTLNLDGFRLDAVKHIKFSFMRDWLGHVRGQTGKNLFAVAEYWKNDLGALENYLSKTNWTMSAFDVPLHYNLYQASNSSGNYDMRNLLNGTLVQRHPSHAVTFVDNHDTQPGEALESFVQGWFKPLAYATILTREQGYPQVFYGDYYGIPSDGVPSYRQQIDPLLKARQQYAYGRQHDYFDHWDVIGWTREGNASHPNSGLATIMSDGPGGSKWMYVGRQKAGEVWHDMTGNRSGTVTINQDGWGHFFVNGGSVSVWVKR

SEQ ID NO: 33056 - protein, 485 aa, Bacillus sp.
HHDGTNGTIMQYFEWNVPNDGQHWNRLHNNAQNLKNAGITAIWIPPAWKGTSQNDVGYGAYDLYDLGEFNQKGTVRTKYGTKAELERAIRSLKANGIQVYGDVVMNHKGGADFTERVQAVEVNPQNRNQEVSGTYQIEAWTGFNFPGRGNQHSSFKWRWYHFDGTDWDQSRQLANRIYKFRGDGKAWDWEVDTENGNYDELQIADVDMDHPEVINELNRWGVWYANTLNLDGFRLDAVKHIKFSFMRDWLGHVRGQTGKNLFAVAEYWKNDLGALENYLSKTNWTMSAFDVPLHYNLYQASNSSGNYDMRNLLNGTLVQRHPSHAVTFVDNHDTQPGEALESFVQGWFKPLAYATILTREQGYPQVFYGDYYGIPSDGVPSYRQQIDPLLKARQQYAYGRQHDYFDHWDVIGWTREGNASHPNSGLATIMSDGPGGSKWMYVGRQKAGEVWHDMTGNRSGTVTINQDGWGHFFVNGGSVSVWVKR

SEQ ID NO: 33057 - protein, 485 aa, Bacillus sp.
HHDGTNGTIMQYFEWNVPNDGQHWNRLHNNAQNLKNAGITAIWIPPAWKGTSQNDVGYGAYDLYDLGEFNQKGTVRTKYGTKAELERAIRSLKANGIQVYGDVVMNHKGGADFTERVQAVEVNPQNRNQEVSGTYQIEAWTGFNFPGRGNQHSSFKWRWYHFDGTDWDQSRQLANRIYKFRGDGKAWDWEVDTENGNYDPTQYADVDMDHPEVINELNRWGVWYANTLNLDGFRLDAVKHIKFSFMRDWLGHVRGQTGKNLFAVAEYWKNDLGALENYLSKTNWTMSAFDVPLHYNLYQASNSSGNYDMRNLLNGTLVQRHPSHAVTFVDNHDTQPGEALESFVQGWFKPLAYATILTREQGYPQVFYGDYYGIPSDGVPSYRQQIDPLLKARQQYAYGRQHDYFDHWDVIGWTREGNASHPNSGLATIMSDGPGGSKWMYVGRQKAGEVWHDMTGNRSGTVTINQDGWGHFFVNGGSVSVWVKR

SEQ ID NO: 33058 - protein, 485 aa, Bacillus sp.
HHDGTNGTIMQYFEWNVPNDGQHWNRLHNNAQNLKNAGITAIWIPPAWKGTSQNDVGYGAYDLYDLGEFNQKGTVRTKYGTKAELERAIRSLKANGIQVYGDVVMNHKGGADFTERVQAVEVNPQNRNQEVSGTYQIEAWTGFNFPGRGNQHSSFKWRWYHFDGTDWDQSRQLANRIYKFRGDGKAWDWEVDTENGNYDWLLIADVDMDHPEVINELNRWGVWYANTLNLDGFRLDAVKHIKFSFMRDWLGHVRGQTGKNLFAVAEYWKNDLGALENYLSKTNWTMSAFDVPLHYNLYQASNSSGNYDMRNLLNGTLVQRHPSHAVTFVDNHDTQPGEALESFVQGWFKPLAYATILTREQGYPQVFYGDYYGIPSDGVPSYRQQIDPLLKARQQYAYGRQHDYFDHWDVIGWTREGNASHPNSGLATIMSDGPGGSKWMYVGRQKAGEVWHDMTGNRSGTVTINQDGWGHFFVNGGSVSVWVKR

SEQ ID NO: 33059 - protein, 485 aa, Bacillus sp.
HHDGTNGTIMQYFEWNVPNDGQHWNRLHNNAQNLKNAGITAIWIPPAWKGTSQNDVGYGAYDLYDLGEFNQKGTVRTKYGTKAELERAIRSLKANGIQVYGDVVMNHKGGADFTERVQAVEVNPQNRNQEVSGTYQIEAWTGFNFPGRGNQHSSFKWRWYHFDGTDWDQSRQLANRIYKFRGDGKAWDWEVDTENGNYDYWLLADVDMDHPEVINELNRWGVWYANTLNLDGFRLDAVKHIKFSFMRDWLGHVRGQTGKNLFAVAEYWKNDLGALENYLSKTNWTMSAFDVPLHYNLYQASNSSGNYDMRNLLNGTLVQRHPSHAVTFVDNHDTQPGEALESFVQGWFKPLAYATILTREQGYPQVFYGDYYGIPSDGVPSYRQQIDPLLKARQQYAYGRQHDYFDHWDVIGWTREGNASHPNSGLATIMSDGPGGSKWMYVGRQKAGEVWHDMTGNRSGTVTINQDGWGHFFVNGGSVSVWVKR

SEQ ID NO: 33060 - protein, 483 aa, Bacillus sp. (in: firmicutes)
HHDGTNGTIMQYFEWNVPNDGQHWNRLHNNAQNLKNAGITAIWIPPAWKGTSQNDVGYGAYDLYDLGEFNQKGTVRTKYGTKAELERAIRSLKANGIQVYGDVVMNHKGGADFTERVQAVEVNPQNRNQNVSGCYQIEAWTGFNFPGRGNQHSSFKWRWYHFDGTDWDQSRQLANRIYKFQGKNWDWEVDTEFGNYDYLMYADVDMDHPEVINELNRWGVWYANTLNLDGFRLDAVKHIKFSFMRDWLGHVRGQTGKNLFAVAEYWKNDLGALENYLSKTNWTMSAFDVPLHYNLYQASNSSGNYDMRNLLNGTLVQRHPSHAVTFVDNHDTQPGEALESFVQGWFKPLAYATILTREQGYPSVFYGDYYGIPSDGVPSYRQQIDPLLKARQQYAYGRQHDYFDHWDVIGWTREGNASHPNSGLATIMSDGPGGSKWMYVGRQKAGEVWHDMTGNRSGTVTINQDGWGHFFVNGGSVSVWVKR

SEQ ID NO: 33061 - protein, 485 aa, Bacillus sp.
HHDGTNGTIMQYFEWNVPNDGQHWNRLHNNAQNLKNAGITAIWIPPAWKGTSQNDVGYGAYDLYDLGEFNQKGTVRTKYGTKAELERAIRSLKANGIQVYGDVVMNHKGGADFTERVQAVEVNPQNRNQEVSGTYEIEAWTGFNFPGRGNQHSSFKWRWYHFDGTDWDQSRQLSNRIYKFRGDGKAWDWEVDTENGNYDYLMYADXDMNHPXVINELNRWGVWYANTLNLDGFRLDAVKHIQFSFMRNWLGHVRGQTGKNLFAVAEYWKNDLGALENYLSKTNWTMSAFDVPLHYNLYQASNSGGNYDMRNLLNGTLVQRHPSHAVTFVDNHDTQPGEALESFVQGWFKPLAYATILTREQGYPQVFYGDYYGIPSDGVPSYRQQIDPLLKARQQYAYGRQHDYFDHWDVIGWTREGNASHPNSGLATIMSDGPGGSKWMYVGRQKAGEVWHDITGNRSGTVTINQDGWGQFFVNGGSVSVWVKR

SEQ ID NO: 33062 - protein, 485 aa, Bacillus sp.
HHDGTNGTIMQYFEWNVPNDGQHWNRLHNNAQNLKNAGITAIWIPPAWKGTSQNDVGYGAYDLYDLGEFNQKGTVRTKYGTKAELERAIRSLKANGIQVYGDVVMNHKGGADFTERVQAVEVNPQNRNQEVSGTYQIEAWTGFNFPGRGNQHSSFKWRWYHFDGTDWDQSRQLANRIYKFRGDGKAWDWEVDTENGNYDDLPFADVDMDHPEVINELNRWGVWYANTLNLDGFRLDAVKHIKFSFMRDWLGHVRGQTGKNLFAVAEYWKNDLGALENYLSKTNWTMSAFDVPLHYNLYQASNSSGNYDMRNLLNGTLVQRHPSHAVTFVDNHDTQPGEALESFVQGWFKPLAYATILTREQGYPQVFYGDYYGIPSDGVPSYRQQIDPLLKARQQYAYGRQHDYFDHWDVIGWTREGNASHPNSGLATIMSDGPGGSKWMYVGRQKAGEVWHDMTGNRSGTVTINQDGWGHFFVNGGSVSVWVKR

SEQ ID NO: 33063 - protein, 485 aa, Bacillus sp.
HHDGTNGTIMQYFEWNVPNDGQHWNRLHNNAQNLKNAGITAIWIPPAWKGTSQNDVGYGAYDLYDLGEFNQKGTVRTKYGTKAELERAIRSLKANGIQVYGDVVMNHKGGADFTERVQAVEVNPQNRNQEVSGTYQIEAWTGFNFPGRGNQHSSFKWRWYHFDGTDWDQSRQLANRIYKFRGDGKAWDWEVDTENGNYDYQWPADVDMDHPEVINELNRWGVWYANTLNLDGFRLDAVKHIKFSFMRDWLGHVRGQTGKNLFAVAEYWKNDLGALENYLSKTNWTMSAFDVPLHYNLYQASNSSGNYDMRNLLNGTLVQRHPSHAVTFVDNHDTQPGEALESFVQGWFKPLAYATILTREQGYPQVFYGDYYGIPSDGVPSYRQQIDPLLKARQQYAYGRQHDYFDHWDVIGWTREGNASHPNSGLATIMSDGPGGSKWMYVGRQKAGEVWHDMTGNRSGTVTINQDGWGHFFVNGGSVSVWVKR

SEQ ID NO: 33064 - protein, 485 aa, Bacillus sp.
HHDGTNGTIMQYFEWNVPNDGQHWNRLHNNAQNLKNAGITAIWIPPAWKGTSQNDVGYGAYDLYDLGEFNQKGTVRTKYGTKAELERAIRSLKANGIQVYGDVVMNHKGGADFTERVQAVEVNPQNRNQEVSGTYQIEAWTGFNFPGRGNQHSSFKWRWYHFDGTDWDQSRQLANRIYKFRGDGKAWDWEVDTENGNYDWPGYADVDMDHPEVINELNRWGVWYANTLNLDGFRLDAVKHIKFSFMRDWLGHVRGQTGKNLFAVAEYWKNDLGALENYLSKTNWTMSAFDVPLHYNLYQASNSSGNYDMRNLLNGTLVQRHPSHAVTFVDNHDTQPGEALESFVQGWFKPLAYATILTREQGYPQVFYGDYYGIPSDGVPSYRQQIDPLLKARQQYAYGRQHDYFDHWDVIGWTREGNASHPNSGLATIMSDGPGGSKWMYVGRQKAGEVWHDMTGNRSGTVTINQDGWGHFFVNGGSVSVWVKR

SEQ ID NO: 33065 - protein, 485 aa, Bacillus sp.
HHDGTNGTIMQYFEWNVPNDGQHWNRLHNNAQNLKNAGITAIWIPPAWKGTSQNDVGYGAYDLYDLGEFNQKGTVRTKYGTKAELERAIRSLKANGIQVYGDVVMNHKGGADFTERVQAVEVNPQNRNQEVSGTYQIEAWTGFNFPGRGNQHSSFKWRWYHFDGTDWDQSRQLANRIYKFRGDGKAWDWEVDTENGNYDYPEPADVDMDHPEVINELNRWGVWYANTLNLDGFRLDAVKHIKFSFMRDWLGHVRGQTGKNLFAVAEYWKNDLGALENYLSKTNWTMSAFDVPLHYNLYQASNSSGNYDMRNLLNGTLVQRHPSHAVTFVDNHDTQPGEALESFVQGWFKPLAYATILTREQGYPQVFYGDYYGIPSDGVPSYRQQIDPLLKARQQYAYGRQHDYFDHWDVIGWTREGNASHPNSGLATIMSDGPGGSKWMYVGRQKAGEVWHDMTGNRSGTVTINQDGWGHFFVNGGSVSVWVKR

SEQ ID NO: 33066 - protein, 485 aa, Bacillus sp.
HHDGTNGTIMQYFEWNVPNDGQHWNRLHNNAQNLKNAGITAIWIPPAWKGTSQNDVGYGAYDLYDLGEFNQKGTVRTKYGTKAELERAIRSLKANGIQVYGDVVMNHKGGADFTERVQAVEVNPQNRNQEVSGTYQIEAWTGFNFPGRGNQHSSFKWRWYHFDGTDWDQSRQLANRIYKFRGDGKAWDWEVDTENGNYDLLLFADVDMDHPEVINELNRWGVWYANTLNLDGFRLDAVKHIKFSFMRDWLGHVRGQTGKNLFAVAEYWKNDLGALENYLSKTNWTMSAFDVPLHYNLYQASNSSGNYDMRNLLNGTLVQRHPSHAVTFVDNHDTQPGEALESFVQGWFKPLAYATILTREQGYPQVFYGDYYGIPSDGVPSYRQQIDPLLKARQQYAYGRQHDYFDHWDVIGWTREGNASHPNSGLATIMSDGPGGSKWMYVGRQKAGEVWHDMTGNRSGTVTINQDGWGHFFVNGGSVSVWVKR

SEQ ID NO: 33067 - protein, 485 aa, Bacillus sp.
HHDGTNGTIMQYFEWNVPNDGQHWNRLHNNAQNLKNAGITAIWIPPAWKGTSQNDVGYGAYDLYDLGEFNQKGTVRTKYGTKAELERAIRSLKANGIQVYGDVVMNHKGGADFTERVQAVEVNPQNRNQEVSGTYQIEAWTGFNFPGRGNQHSSFKWRWYHFDGTDWDQSRQLANRIYKFRGDGKAWDWEVDTENGNYDGLLSADVDMDHPEVINELNRWGVWYANTLNLDGFRLDAVKHIKFSFMRDWLGHVRGQTGKNLFAVAEYWKNDLGALENYLSKTNWTMSAFDVPLHYNLYQASNSSGNYDMRNLLNGTLVQRHPSHAVTFVDNHDTQPGEALESFVQGWFKPLAYATILTREQGYPQVFYGDYYGIPSDGVPSYRQQIDPLLKARQQYAYGRQHDYFDHWDVIGWTREGNASHPNSGLATIMSDGPGGSKWMYVGRQKAGEVWHDMTGNRSGTVTINQDGWGHFFVNGGSVSVWVKR

SEQ ID NO: 33068 - protein, 485 aa, Bacillus sp.
HHDGTNGTIMQYFEWNVPNDGQHWNRLHNNAQNLKNAGITAIWIPPAWKGTSQNDVGYGAYDLYDLGEFNQKGTVRTKYGTKAELERAIRSLKANGIQVYGDVVMNHKGGADFTERVQAVEVNPQNRNQEVSGTYQIEAWTGFNFPGRGNQHSSFKWRWYHFDGTDWDQSRQLANRIYKFRGDGKAWDWEVDTENGNYDIRGYADVDMDHPEVINELNRWGVWYANTLNLDGFRLDAVKHIKFSFMRDWLGHVRGQTGKNLFAVAEYWKNDLGALENYLSKTNWTMSAFDVPLHYNLYQASNSSGNYDMRNLLNGTLVQRHPSHAVTFVDNHDTQPGEALESFVQGWFKPLAYATILTREQGYPQVFYGDYYGIPSDGVPSYRQQIDPLLKARQQYAYGRQHDYFDHWDVIGWTREGNASHPNSGLATIMSDGPGGSKWMYVGRQKAGEVWHDMTGNRSGTVTINQDGWGHFFVNGGSVSVWVKR

SEQ ID NO: 33069 - protein, 485 aa, Bacillus sp.
HHDGTNGTIMQYFEWNVPNDGQHWNRLHNNAQNLKNAGITAIWIPPAWKGTSQNDVGYGAYDLYDLGEFNQKGTVRTKYGTKAELERAIRSLKANGIQVYGDVVMNHKGGADFTERVQAVEVNPQNRNQEVSGTYQIEAWTGFNFPGRGNQHSSFKWRWYHFDGTDWDQSRQLANRIYKFRGDGKAWDWEVDTENGNYDNRLYADVDMDHPEVINELNRWGVWYANTLNLDGFRLDAVKHIKFSFMRDWLGHVRGQTGKNLFAVAEYWKNDLGALENYLSKTNWTMSAFDVPLHYNLYQASNSSGNYDMRNLLNGTLVQRHPSHAVTFVDNHDTQPGEALESFVQGWFKPLAYATILTREQGYPQVFYGDYYGIPSDGVPSYRQQIDPLLKARQQYAYGRQHDYFDHWDVIGWTREGNASHPNSGLATIMSDGPGGSKWMYVGRQKAGEVWHDMTGNRSGTVTINQDGWGHFFVNGGSVSVWVKR

SEQ ID NO: 33070 - protein, 485 aa, Bacillus sp.
HHDGTNGTIMQYFEWNVPNDGQHWNRLHNNAQNLKNAGITAIWIPPAWKGTSQNDVGYGAYDLYDLGEFNQKGTVRTKYGTKAELERAIRSLKANGIQVYGDVVMNHKGGADFTERVQAVEVNPQNRNQEVSGTYQIEAWTGFNFPGRGNQHSSFKWRWYHFDGTDWDQSRQLANRIYKFRGDGKAWDWEVDTENGNYDYHLQADVDMDHPEVINELNRWGVWYANTLNLDGFRLDAVKHIKFSFMRDWLGHVRGQTGKNLFAVAEYWKNDLGALENYLSKTNWTMSAFDVPLHYNLYQASNSSGNYDMRNLLNGTLVQRHPSHAVTFVDNHDTQPGEALESFVQGWFKPLAYATILTREQGYPQVFYGDYYGIPSDGVPSYRQQIDPLLKARQQYAYGRQHDYFDHWDVIGWTREGNASHPNSGLATIMSDGPGGSKWMYVGRQKAGEVWHDMTGNRSGTVTINQDGWGHFFVNGGSVSVWVKR

SEQ ID NO: 33071 - protein, 485 aa, Bacillus sp.
HHDGTNGTIMQYFEWNVPNDGQHWNRLHNNAQNLKNAGITAIWIPPAWKGTSQNDVGYGAYDLYDLGEFNQKGTVRTKYGTKAELERAIRSLKANGIQVYGDVVMNHKGGADFTERVQAVEVNPQNRNQEVSGTYQIEAWTGFNFPGRGNQHSSFKWRWYHFDGTDWDQSRQLANRIYKFRGDGKAWDWEVDTENGNYDQTLYADVDMDHPEVINELNRWGVWYANTLNLDGFRLDAVKHIKFSFMRDWLGHVRGQTGKNLFAVAEYWKNDLGALENYLSKTNWTMSAFDVPLHYNLYQASNSSGNYDMRNLLNGTLVQRHPSHAVTFVDNHDTQPGEALESFVQGWFKPLAYATILTREQGYPQVFYGDYYGIPSDGVPSYRQQIDPLLKARQQYAYGRQHDYFDHWDVIGWTREGNASHPNSGLATIMSDGPGGSKWMYVGRQKAGEVWHDMTGNRSGTVTINQDGWGHFFVNGGSVSVWVKR

SEQ ID NO: 33072 - protein, 485 aa, Bacillus sp.
HHDGTNGTIMQYFEWNVPNDGQHWNRLHNNAQNLKNAGITAIWIPPAWKGTSQNDVGYGAYDLYDLGEFNQKGTVRTKYGTKAELERAIRSLKANGIQVYGDVVMNHKGGADFTERVQAVEVNPQNRNQEVSGTYQIEAWTGFNFPGRGNQHSSFKWRWYHFDGTDWDQSRQLANRIYKFRGDGKAWDWEVDTENGNYDWHQYADVDMDHPEVINELNRWGVWYANTLNLDGFRLDAVKHIKFSFMRDWLGHVRGQTGKNLFAVAEYWKNDLGALENYLSKTNWTMSAFDVPLHYNLYQASNSSGNYDMRNLLNGTLVQRHPSHAVTFVDNHDTQPGEALESFVQGWFKPLAYATILTREQGYPQVFYGDYYGIPSDGVPSYRQQIDPLLKARQQYAYGRQHDYFDHWDVIGWTREGNASHPNSGLATIMSDGPGGSKWMYVGRQKAGEVWHDMTGNRSGTVTINQDGWGHFFVNGGSVSVWVKR

SEQ ID NO: 33073 - protein, 485 aa, Bacillus sp.
HHDGTNGTIMQYFEWNVPNDGQHWNRLHNNAQNLKNAGITAIWIPPAWKGTSQNDVGYGAYDLYDLGEFNQKGTVRTKYGTKAELERAIRSLKANGIQVYGDVVMNHKGGADFTERVQAVEVNPQNRNQEVSGTYQIEAWTGFNFPGRGNQHSSFKWRWYHFDGTDWDQSRQLANRIYKFRGDGKAWDWEVDTENGNYDYPLAADVDMDHPEVINELNRWGVWYANTLNLDGFRLDAVKHIKFSFMRDWLGHVRGQTGKNLFAVAEYWKNDLGALENYLSKTNWTMSAFDVPLHYNLYQASNSSGNYDMRNLLNGTLVQRHPSHAVTFVDNHDTQPGEALESFVQGWFKPLAYATILTREQGYPQVFYGDYYGIPSDGVPSYRQQIDPLLKARQQYAYGRQHDYFDHWDVIGWTREGNASHPNSGLATIMSDGPGGSKWMYVGRQKAGEVWHDMTGNRSGTVTINQDGWGHFFVNGGSVSVWVKR

SEQ ID NO: 33074 - protein, 485 aa, Bacillus sp.
HHDGTNGTIMQYFEWNVPNDGQHWNRLHNNAQNLKNAGITAIWIPPAWKGTSQNDVGYGAYDLYDLGEFNQKGTVRTKYGTKAELERAIRSLKANGIQVYGDVVMNHKGGADFTERVQAVEVNPQNRNQEVSGTYQIEAWTGFNFPGRGNQHSSFKWRWYHFDGTDWDQSRQLANRIYKFRGDGKAWDWEVDTENGNYDYPLFADVDMDHPEVINELNRWGVWYANTLNLDGFRLDAVKHIKFSFMRDWLGHVRGQTGKNLFAVAEYWKNDLGALENYLSKTNWTMSAFDVPLHYNLYQASNSSGNYDMRNLLNGTLVQRHPSHAVTFVDNHDTQPGEALESFVQGWFKPLAYATILTREQGYPQVFYGDYYGIPSDGVPSYRQQIDPLLKARQQYAYGRQHDYFDHWDVIGWTREGNASHPNSGLATIMSDGPGGSKWMYVGRQKAGEVWHDMTGNRSGTVTINQDGWGHFFVNGGSVSVWVKR

SEQ ID NO: 33075 - protein, 483 aa, Bacillus sp.
HHDGTNGTIMQYFEWNVPNDGQHWNRLHNNAQNLKNAGITAIWIPPAWKGTSQNDVGYGAYDLYDLGEFNQKGTVRTKYGTKAELERAIRSLKANGIQVYGDVVMNHKGGADFTERVQAVEVNPQNRNQEVSGTYEIEAWTGFNFPGRGNQHSSFKWRWYHFDGTDWDQSRQLSNRIYKFDGKAWDWEVDTENGNYDYLMYADVDMNHPEVINELNRWGVWYANTLNLDGFRLDAVKHIQFSFMRNWLGHVRGQTGKNLFAVAEYWXNDLGALENYLSKTNWTMSAFDVPLHYNLYQASNSGGNYDMRNLLNGTLVQRHPSHAVTFVDNHDTQPGEALESFVQGWFKPLAYATILTREQGYPQVFYGDYYGIPSDGVPSYRQQIDPLLKARQQYAYGRQHDYFDHWDVIGWTREGNASHPNSGLATIMSDGPGGSKWMYVGRQKAGEVWHDITGNRSGTVTINQDGWGQFFVNGGSVSVWVKR

SEQ ID NO: 33076 - protein, 485 aa, Bacillus sp.
HHDGTNGTIMQYFEWNVPNDGQHWNRLHNNAQNLKNAGITAIWIPPAWKGTSQNDVGYGAYDLYDLGEFNQKGTVRTKYGTKAELERAIRSLKANGIQVYGDVVMNHKGGADFTERVQAVEVNPQNRNQEVSGTYQIEAWTGFNFPGRGNQHSSFKWRWYHFDGTDWDQSRQLANRIYKFRGDGKAWDWEVDTENGNYDYPLPADVDMDHPEVINELNRWGVWYANTLNLDGFRLDAVKHIKFSFMRDWLGHVRGQTGKNLFAVAEYWKNDLGALENYLSKTNWTMSAFDVPLHYNLYQASNSSGNYDMRNLLNGTLVQRHPSHAVTFVDNHDTQPGEALESFVQGWFKPLAYATILTREQGYPQVFYGDYYGIPSDGVPSYRQQIDPLLKARQQYAYGRQHDYFDHWDVIGWTREGNASHPNSGLATIMSDGPGGSKWMYVGRQKAGEVWHDMTGNRSGTVTINQDGWGHFFVNGGSVSVWVKR

SEQ ID NO: 33077 - protein, 485 aa, Bacillus sp.
HHDGTNGTIMQYFEWNVPNDGQHWNRLHNNAQNLKNAGITAIWIPPAWKGTSQNDVGYGAYDLYDLGEFNQKGTVRTKYGTKAELERAIRSLKANGIQVYGDVVMNHKGGADFTERVQAVEVNPQNRNQEVSGTYQIEAWTGFNFPGRGNQHSSFKWRWYHFDGTDWDQSRQLANRIYKFRGDGKAWDWEVDTENGNYDYSTFADVDMDHPEVINELNRWGVWYANTLNLDGFRLDAVKHIKFSFMRDWLGHVRGQTGKNLFAVAEYWKNDLGALENYLSKTNWTMSAFDVPLHYNLYQASNSSGNYDMRNLLNGTLVQRHPSHAVTFVDNHDTQPGEALESFVQGWFKPLAYATILTREQGYPQVFYGDYYGIPSDGVPSYRQQIDPLLKARQQYAYGRQHDYFDHWDVIGWTREGNASHPNSGLATIMSDGPGGSKWMYVGRQKAGEVWHDMTGNRSGTVTINQDGWGHFFVNGGSVSVWVKR

SEQ ID NO: 33078 - protein, 485 aa, Bacillus sp.
HHDGTNGTIMQYFEWNVPNDGQHWNRLHNNAQNLKNAGITAIWIPPAWKGTSQNDVGYGAYDLYDLGEFNQKGTVRTKYGTKAELERAIRSLKANGIQVYGDVVMNHKGGADFTERVQAVEVNPQNRNQEVSGTYQIEAWTGFNFPGRGNQHSSFKWRWYHFDGTDWDQSRQLANRIYKFRGDGKAWDWEVDTENGNYDYQLFADVDMDHPEVINELNRWGVWYANTLNLDGFRLDAVKHIKFSFMRDWLGHVRGQTGKNLFAVAEYWKNDLGALENYLSKTNWTMSAFDVPLHYNLYQASNSSGNYDMRNLLNGTLVQRHPSHAVTFVDNHDTQPGEALESFVQGWFKPLAYATILTREQGYPQVFYGDYYGIPSDGVPSYRQQIDPLLKARQQYAYGRQHDYFDHWDVIGWTREGNASHPNSGLATIMSDGPGGSKWMYVGRQKAGEVWHDMTGNRSGTVTINQDGWGHFFVNGGSVSVWVKR

SEQ ID NO: 33079 - protein, 485 aa, Bacillus sp.
HHDGTNGTIMQYFEWNVPNDGQHWNRLHNNAQNLKNAGITAIWIPPAWKGTSQNDVGYGAYDLYDLGEFNQKGTVRTKYGTKAELERAIRSLKANGIQVYGDVVMNHKGGADFTERVQAVEVNPQNRNQEVSGTYQIEAWTGFNFPGRGNQHSSFKWRWYHFDGTDWDQSRQLANRIYKFRGDGKAWDWEVDTENGNYDQLLYSDVDMDHPEVINELNRWGVWYANTLNLDGFRLDAVKHIKFSFMRDWLGHVRGQTGKNLFAVAEYWKNDLGALENYLSKTNWTMSAFDVPLHYNLYQASNSSGNYDMRNLLNGTLVQRHPSHAVTFVDNHDTQPGEALESFVQGWFKPLAYATILTREQGYPQVFYGDYYGIPSDGVPSYRQQIDPLLKARQQYAYGRQHDYFDHWDVIGWTREGNASHPNSGLATIMSDGPGGSKWMYVGRQKAGEVWHDMTGNRSGTVTINQDGWGHFFVNGGSVSVWVKR

SEQ ID NO: 33080 - protein, 483 aa, Bacillus sp.
HHDGTNGTIMQYFEWNVPNDGQHWNRLHNNAQNLKNAGITAIWIPPAWKGTSQNDVGYGAYDLYDLGEFNQKGTVRTKYGTKAELERAIRSLKANGIQVYGDVVMNHKGGADFTERVQAVEVNPQNRNQEVSGTYEIEAWTGFNFPGRGNQHSSFKWRWYHFDGTDWDQSRQLSNRIYKFDGKAWDWEVDTENGNYDYLMYADVDMNHPEVINXLNRWGVWYANTLNLDGFRLDAVKHIQFSFMRNWLGHVRGQTGKNLFAVAEYWKNDLGALENYLSKTNWTMSAFDVPLHYNLYQASNSGGNYDMRNLLNGTLVQRHPSHAVTFVDNHDTQPGEALESFVQGWFKPLAYATILTREQGYPQVFYGDYYGIPSDGVPSYRQQIDPLLKARQQYAYGRQHDYFDHWDVIGWTREGNASHPNSGLATIMSDGPGGSKWMYVGRQKAGEVWHDITGNRSGTVTINQDGWGQFFVNGGSVSVWVKR

SEQ ID NO: 33081 - protein, 485 aa, Bacillus sp.
HHDGTNGTIMQYFEWNVPNDGQHWNRLHNNAQNLKNAGITAIWIPPAWKGTSQNDVGYGAYDLYDLGEFNQKGTVRTKYGTKAELERAIRSLKANGIQVYGDVVMNHKGGADFTERVQAVEVNPQNRNQEVSGTYQIEAWTGFNFPGRGNQHSSFKWRWYHFDGTDWDQSRQLANRIYKFRGDGKAWDWEVDTENGNYDYELWADVDMDHPEVINELNRWGVWYANTLNLDGFRLDAVKHIKFSFMRDWLGHVRGQTGKNLFAVAEYWKNDLGALENYLSKTNWTMSAFDVPLHYNLYQASNSSGNYDMRNLLNGTLVQRHPSHAVTFVDNHDTQPGEALESFVQGWFKPLAYATILTREQGYPQVFYGDYYGIPSDGVPSYRQQIDPLLKARQQYAYGRQHDYFDHWDVIGWTREGNASHPNSGLATIMSDGPGGSKWMYVGRQKAGEVWHDMTGNRSGTVTINQDGWGHFFVNGGSVSVWVKR

SEQ ID NO: 33082 - protein, 485 aa, Bacillus sp.
HHDGTNGTIMQYFEWNVPNDGQHWNRLHNNAQNLKNAGITAIWIPPAWKGTSQNDVGYGAYDLYDLGEFNQKGTVRTKYGTKAELERAIRSLKANGIQVYGDVVMNHKGGADFTERVQAVEVNPQNRNQEVSGTYQIEAWTGFNFPGRGNQHSSFKWRWYHFDGTDWDQSRQLANRIYKFRGDGKAWDWEVDTENGNYDWLLNADVDMDHPEVINELNRWGVWYANTLNLDGFRLDAVKHIKFSFMRDWLGHVRGQTGKNLFAVAEYWKNDLGALENYLSKTNWTMSAFDVPLHYNLYQASNSSGNYDMRNLLNGTLVQRHPSHAVTFVDNHDTQPGEALESFVQGWFKPLAYATILTREQGYPQVFYGDYYGIPSDGVPSYRQQIDPLLKARQQYAYGRQHDYFDHWDVIGWTREGNASHPNSGLATIMSDGPGGSKWMYVGRQKAGEVWHDMTGNRSGTVTINQDGWGHFFVNGGSVSVWVKR

SEQ ID NO: 33083 - protein, 485 aa, Bacillus sp.
HHDGTNGTIMQYFEWNVPNDGQHWNRLHNNAQNLKNAGITAIWIPPAWKGTSQNDVGYGAYDLYDLGEFNQKGTVRTKYGTKAELERAIRSLKANGIQVYGDVVMNHKGGADFTERVQAVEVNPQNRNQEVSGTYQIEAWTGFNFPGRGNQHSSFKWRWYHFDGTDWDQSRQLANRIYKFRGDGKAWDWEVDTENGNYDPLLPADVDMDHPEVINELNRWGVWYANTLNLDGFRLDAVKHIKFSFMRDWLGHVRGQTGKNLFAVAEYWKNDLGALENYLSKTNWTMSAFDVPLHYNLYQASNSSGNYDMRNLLNGTLVQRHPSHAVTFVDNHDTQPGEALESFVQGWFKPLAYATILTREQGYPQVFYGDYYGIPSDGVPSYRQQIDPLLKARQQYAYGRQHDYFDHWDVIGWTREGNASHPNSGLATIMSDGPGGSKWMYVGRQKAGEVWHDMTGNRSGTVTINQDGWGHFFVNGGSVSVWVKR

SEQ ID NO: 33084 - protein, 485 aa, Bacillus sp.
HHDGTNGTIMQYFEWNVPNDGQHWNRLHNNAQNLKNAGITAIWIPPAWKGTSQNDVGYGAYDLYDLGEFNQKGTVRTKYGTKAELERAIRSLKANGIQVYGDVVMNHKGGADFTERVQAVEVNPQNRNQEVSGTYQIEAWTGFNFPGRGNQHSSFKWRWYHFDGTDWDQSRQLANRIYKFRGDGKAWDWEVDTENGNYDYQLTADVDMDHPEVINELNRWGVWYANTLNLDGFRLDAVKHIKFSFMRDWLGHVRGQTGKNLFAVAEYWKNDLGALENYLSKTNWTMSAFDVPLHYNLYQASNSSGNYDMRNLLNGTLVQRHPSHAVTFVDNHDTQPGEALESFVQGWFKPLAYATILTREQGYPQVFYGDYYGIPSDGVPSYRQQIDPLLKARQQYAYGRQHDYFDHWDVIGWTREGNASHPNSGLATIMSDGPGGSKWMYVGRQKAGEVWHDMTGNRSGTVTINQDGWGHFFVNGGSVSVWVKR

SEQ ID NO: 33085 - protein, 483 aa, Bacillus sp. (in: firmicutes)
HHDGTNGTMMQYFEWNVPNDGQHWNRLHNNAQNLKNAGITAIWIPPAWKGTSQNDVGYGAYDLYDLGEFNQKGTVRTKYGTKAELERAIRSLKANGIQVYGDVVMNHKGGADFTERVQAVEVNPQNRNQEVSGTYQIEAWTGFNFPGRGNQHSSFKWRWYHFDGTDWDQSLQLANRIYKFRGKAWDWEVDTEFGNYDYLMYADVDMDHPEVINELNRWGVWYANTLNLDGFRLDAVKHIKFSFLRDWLGHVRGQTGKNLFAVAEYWMNDLGALENYLSKTNRTMSAFDVPLHYNLNQASNSSGNYDMRNLLNGTLVQRHPSHAVTFVDNHDTQPGEALESFVQGWFKPLAYATILTREQGYPSVFYGDYYGIPSDGVPSYRQQIDPLLKARQQYAYGRQHDYFDHWDVIGWTREGNASHPNSGLATIMSDGPGGSKWMYVGRQKAGEVWHDMTGNRSGTVTINQDGWGHFFVNGGSVSVWVKR

SEQ ID NO: 33086 - protein, 485 aa, Bacillus sp.
HHDGTNGTIMQYFEWNVPNDGQHWNRLHNNAQNLKNAGITAIWIPPAWKGTSQNDVGYGAYDLYDLGEFNQKGTVRTKYGTKAELERAIRSLKANGIQVYGDVVMNHKGGADFTERVQAVEVNPQNRNQEVSGTYEIEAWTGFNFPGRGNQHSSFKWRWYHFDGTDWDQSRQLSNRIYKFRGDGKAWDWEVDTENGNYDYLMYADVDMNHPEVINXLNRWGVWYANTLNLDGFRLDAVKHIQFSFMRNWLGHVRGQTGKNLFAVAEYWXNDLGALENYLSKTNWTMSAFDVPLHYNLYQASNSGGNYDMRNLLNGTLVQRHPSHAVTFVDNHDTQPGEALESFVQGWFKPLAYATILTREQGYPQVFYGDYYGIPSDGVPSYRQQIDPLLKARQQYAYGRQHDYFDHWDVIGWTREGNASHPNSGLATIMSDGPGGSKWMYVGRQKAGEVWHDITGNRSGTVTINQDGWGQFFVNGGSVSVWVKR

SEQ ID NO: 33087 - protein, 485 aa, Bacillus sp.
HHDGTNGTIMQYFEWNVPNDGQHWNRLHNNAQNLKNAGITAIWIPPAWKGTSQNDVGYGAYDLYDLGEFNQKGTVRTKYGTKAELERAIRSLKANGIQVYGDVVMNHKGGADFTERVQAVEVNPQNRNQEVSGTYQIEAWTGFNFPGRGNQHSSFKWRWYHFDGTDWDQSRQLANRIYKFRGDGKAWDWEVDTENGNYDYQLGADVDMDHPEVINELNRWGVWYANTLNLDGFRLDAVKHIKFSFMRDWLGHVRGQTGKNLFAVAEYWKNDLGALENYLSKTNWTMSAFDVPLHYNLYQASNSSGNYDMRNLLNGTLVQRHPSHAVTFVDNHDTQPGEALESFVQGWFKPLAYATILTREQGYPQVFYGDYYGIPSDGVPSYRQQIDPLLKARQQYAYGRQHDYFDHWDVIGWTREGNASHPNSGLATIMSDGPGGSKWMYVGRQKAGEVWHDMTGNRSGTVTINQDGWGHFFVNGGSVSVWVKR

SEQ ID NO: 33088 - protein, 485 aa, Bacillus sp.
HHDGTNGTIMQYFEWNVPNDGQHWNRLHNNAQNLKNAGITAIWIPPAWKGTSQNDVGYGAYDLYDLGEFNQKGTVRTKYGTKAELERAIRSLKANGIQVYGDVVMNHKGGADFTERVQAVEVNPQNRNQEVSGTYQIEAWTGFNFPGRGNQHSSFKWRWYHFDGTDWDQSRQLANRIYKFRGDGKAWDWEVDTENGNYDELLWADVDMDHPEVINELNRWGVWYANTLNLDGFRLDAVKHIKFSFMRDWLGHVRGQTGKNLFAVAEYWKNDLGALENYLSKTNWTMSAFDVPLHYNLYQASNSSGNYDMRNLLNGTLVQRHPSHAVTFVDNHDTQPGEALESFVQGWFKPLAYATILTREQGYPQVFYGDYYGIPSDGVPSYRQQIDPLLKARQQYAYGRQHDYFDHWDVIGWTREGNASHPNSGLATIMSDGPGGSKWMYVGRQKAGEVWHDMTGNRSGTVTINQDGWGHFFVNGGSVSVWVKR

SEQ ID NO: 33089 - protein, 485 aa, Bacillus sp.
HHDGTNGTIMQYFEWNVPNDGQHWNRLHNNAQNLKNAGITAIWIPPAWKGTSQNDVGYGAYDLYDLGEFNQKGTVRTKYGTKAELERAIRSLKANGIQVYGDVVMNHKGGADFTERVQAVEVNPQNRNQEVSGTYQIEAWTGFNFPGRGNQHSSFKWRWYHFDGTDWDQSRQLANRIYKFRGDGKAWDWEVDTENGNYDYQPAADVDMDHPEVINELNRWGVWYANTLNLDGFRLDAVKHIKFSFMRDWLGHVRGQTGKNLFAVAEYWKNDLGALENYLSKTNWTMSAFDVPLHYNLYQASNSSGNYDMRNLLNGTLVQRHPSHAVTFVDNHDTQPGEALESFVQGWFKPLAYATILTREQGYPQVFYGDYYGIPSDGVPSYRQQIDPLLKARQQYAYGRQHDYFDHWDVIGWTREGNASHPNSGLATIMSDGPGGSKWMYVGRQKAGEVWHDMTGNRSGTVTINQDGWGHFFVNGGSVSVWVKR

SEQ ID NO: 33090 - protein, 485 aa, Bacillus sp.
HHDGTNGTIMQYFEWNVPNDGQHWNRLHNNAQNLKNAGITAIWIPPAWKGTSQNDVGYGAYDLYDLGEFNQKGTVRTKYGTKAELERAIRSLKANGIQVYGDVVMNHKGGADFTERVQAVEVNPQNRNQEVSGTYEIEAWTGFNFPGRGNQHSSFKWRWYHFDGTDWDQSRQLSNRIYKFRGDGKAWDWEVDTENGNYDYLMYADXDMNHPEVINXLNRWGVWYANTLNLDGFRLDAVKHIQFSFMRNWLGHVRGQTGKNLFAVAEYWKNDLGALENYLSKTNWTMSAFDVPLHYNLYQASNSGGNYDMRNLLNGTLVQRHPSHAVTFVDNHDTQPGEALESFVQGWFKPLAYATILTREQGYPQVFYGDYYGIPSDGVPSYRQQIDPLLKARQQYAYGRQHDYFDHWDVIGWTREGNASHPNSGLATIMSDGPGGSKWMYVGRQKAGEVWHDITGNRSGTVTINQDGWGQFFVNGGSVSVWVKR

SEQ ID NO: 33091 - protein, 485 aa, Bacillus sp.
HHDGTNGTIMQYFEWNVPNDGQHWNRLHNNAQNLKNAGITAIWIPPAWKGTSQNDVGYGAYDLYDLGEFNQKGTVRTKYGTKAELERAIRSLKANGIQVYGDVVMNHKGGADFTERVQAVEVNPQNRNQEVSGTYQIEAWTGFNFPGRGNQHSSFKWRWYHFDGTDWDQSRQLANRIYKFRGDGKAWDWEVDTENGNYDQLWPADVDMDHPEVINELNRWGVWYANTLNLDGFRLDAVKHIKFSFMRDWLGHVRGQTGKNLFAVAEYWKNDLGALENYLSKTNWTMSAFDVPLHYNLYQASNSSGNYDMRNLLNGTLVQRHPSHAVTFVDNHDTQPGEALESFVQGWFKPLAYATILTREQGYPQVFYGDYYGIPSDGVPSYRQQIDPLLKARQQYAYGRQHDYFDHWDVIGWTREGNASHPNSGLATIMSDGPGGSKWMYVGRQKAGEVWHDMTGNRSGTVTINQDGWGHFFVNGGSVSVWVKR

SEQ ID NO: 33092 - protein, 485 aa, Bacillus sp.
HHDGTNGTIMQYFEWNVPNDGQHWNRLHNNAQNLKNAGITAIWIPPAWKGTSQNDVGYGAYDLYDLGEFNQKGTVRTKYGTKAELERAIRSLKANGIQVYGDVVMNHKGGADFTERVQAVEVNPQNRNQEVSGTYQIEAWTGFNFPGRGNQHSSFKWRWYHFDGTDWDQSRQLANRIYKFRGDGKAWDWEVDTENGNYDELLPADVDMDHPEVINELNRWGVWYANTLNLDGFRLDAVKHIKFSFMRDWLGHVRGQTGKNLFAVAEYWKNDLGALENYLSKTNWTMSAFDVPLHYNLYQASNSSGNYDMRNLLNGTLVQRHPSHAVTFVDNHDTQPGEALESFVQGWFKPLAYATILTREQGYPQVFYGDYYGIPSDGVPSYRQQIDPLLKARQQYAYGRQHDYFDHWDVIGWTREGNASHPNSGLATIMSDGPGGSKWMYVGRQKAGEVWHDMTGNRSGTVTINQDGWGHFFVNGGSVSVWVKR

SEQ ID NO: 33093 - protein, 485 aa, Bacillus sp.
HHDGTNGTIMQYFEWNVPNDGQHWNRLHNNAQNLKNAGITAIWIPPAWKGTSQNDVGYGAYDLYDLGEFNQKGTVRTKYGTKAELERAIRSLKANGIQVYGDVVMNHKGGADFTERVQAVEVNPQNRNQEVSGTYQIEAWTGFNFPGRGNQHSSFKWRWYHFDGTDWDQSRQLANRIYKFRGDGKAWDWEVDTENGNYDQLFSADVDMDHPEVINELNRWGVWYANTLNLDGFRLDAVKHIKFSFMRDWLGHVRGQTGKNLFAVAEYWKNDLGALENYLSKTNWTMSAFDVPLHYNLYQASNSSGNYDMRNLLNGTLVQRHPSHAVTFVDNHDTQPGEALESFVQGWFKPLAYATILTREQGYPQVFYGDYYGIPSDGVPSYRQQIDPLLKARQQYAYGRQHDYFDHWDVIGWTREGNASHPNSGLATIMSDGPGGSKWMYVGRQKAGEVWHDMTGNRSGTVTINQDGWGHFFVNGGSVSVWVKR

SEQ ID NO: 33094 - protein, 483 aa, Bacillus sp. (in: firmicutes)
HHDGTNGTIMQYFEWNVPNDGQHWNRLHNNAQNLKNAGITAIWIPPAWKGTSQNDVGYGAYDLYDLGEFNQKGTVRTKYGTKAELERAIRSLKANGIQVYGDVVMNHKGGADFTERVQAVEVNPQNRNQEVSGTYQIEAWTGFNFPGRGNQHSSFKWRWYHFDGTDWDQSRQLANRIYKFRGKAWDWEVDTENGNYDYLMYADVDMDHPEVINELNRWGVWYANTLNLDGFRLDAVKHIKFSFMRDWLGHVRGQTGKNLFATGELWKNDLGALENYLSKTNWTMSAFDVPLHYNLYQASNSSGNYDMRNLLNGTLVQRHPSHAVTLVDNHDTQPGEALESFVQGWFKPLAYATILTREQGYPCVFYGDYYGIPSDGVPSYRQQIDPLLKARQQYAYGRQHDYFDHWDVIGWTREGNASHPNSGLATIMSDGPGGSKWMYVGRQKAGEVWHDMTGNRSGTVTINQDGWGHFFVNGGSVSVWVKR

SEQ ID NO: 33095 - protein, 485 aa, Bacillus sp.
HHDGTNGTIMQYFEWNVPNDGQHWNRLHNNAQNLKNAGITAIWIPPAWKGTSQNDVGYGAYDLYDLGEFNQKGTVRTKYGTKAELERAIRSLKANGIQVYGDVVMNHKGGADFTERVQAVEVNPQNRNQEVSGTYQIEAWTGFNFPGRGNQHSSFKWRWYHFDGTDWDQSRQLANRIYKFRGDGKAWDWEVDTENGNYDTLLNADVDMDHPEVINELNRWGVWYANTLNLDGFRLDAVKHIKFSFMRDWLGHVRGQTGKNLFAVAEYWKNDLGALENYLSKTNWTMSAFDVPLHYNLYQASNSSGNYDMRNLLNGTLVQRHPSHAVTFVDNHDTQPGEALESFVQGWFKPLAYATILTREQGYPQVFYGDYYGIPSDGVPSYRQQIDPLLKARQQYAYGRQHDYFDHWDVIGWTREGNASHPNSGLATIMSDGPGGSKWMYVGRQKAGEVWHDMTGNRSGTVTINQDGWGHFFVNGGSVSVWVKR

SEQ ID NO: 33096 - protein, 485 aa, Bacillus sp.
HHDGTNGTIMQYFEWNVPNDGQHWNRLHNNAQNLKNAGITAIWIPPAWKGTSQNDVGYGAYDLYDLGEFNQKGTVRTKYGTKAELERAIRSLKANGIQVYGDVVMNHKGGADFTERVQAVEVNPQNRNQEVSGTYQIEAWTGFNFPGRGNQHSSFKWRWYHFDGTDWDQSRQLANRIYKFRGDGKAWDWEVDTENGNYDWLHSADVDMDHPEVINELNRWGVWYANTLNLDGFRLDAVKHIKFSFMRDWLGHVRGQTGKNLFAVAEYWKNDLGALENYLSKTNWTMSAFDVPLHYNLYQASNSSGNYDMRNLLNGTLVQRHPSHAVTFVDNHDTQPGEALESFVQGWFKPLAYATILTREQGYPQVFYGDYYGIPSDGVPSYRQQIDPLLKARQQYAYGRQHDYFDHWDVIGWTREGNASHPNSGLATIMSDGPGGSKWMYVGRQKAGEVWHDMTGNRSGTVTINQDGWGHFFVNGGSVSVWVKR

SEQ ID NO: 33097 - protein, 485 aa, Bacillus sp.
HHDGTNGTIMQYFEWNVPNDGQHWNRLHNNAQNLKNAGITAIWIPPAWKGTSQNDVGYGAYDLYDLGEFNQKGTVRTKYGTKAELERAIRSLKANGIQVYGDVVMNHKGGADFTERVQAVEVNPQNRNQEVSGTYQIEAWTGFNFPGRGNQHSSFKWRWYHFDGTDWDQSRQLANRIYKFRGDGKAWDWEVDTENGNYDNLLVADVDMDHPEVINELNRWGVWYANTLNLDGFRLDAVKHIKFSFMRDWLGHVRGQTGKNLFAVAEYWKNDLGALENYLSKTNWTMSAFDVPLHYNLYQASNSSGNYDMRNLLNGTLVQRHPSHAVTFVDNHDTQPGEALESFVQGWFKPLAYATILTREQGYPQVFYGDYYGIPSDGVPSYRQQIDPLLKARQQYAYGRQHDYFDHWDVIGWTREGNASHPNSGLATIMSDGPGGSKWMYVGRQKAGEVWHDMTGNRSGTVTINQDGWGHFFVNGGSVSVWVKR

SEQ ID NO: 33098 - protein, 485 aa, Bacillus sp.
HHDGTNGTIMQYFEWNVPNDGQHWNRLHNNAQNLKNAGITAIWIPPAWKGTSQNDVGYGAYDLYDLGEFNQKGTVRTKYGTKAELERAIRSLKANGIQVYGDVVMNHKGGADFTERVQAVEVNPQNRNQEVSGTYQIEAWTGFNFPGRGNQHSSFKWRWYHFDGTDWDQSRQLANRIYKFRGDGKAWDWEVDTENGNYDQLLFADVDMDHPEVINELNRWGVWYANTLNLDGFRLDAVKHIKFSFMRDWLGHVRGQTGKNLFAVAEYWKNDLGALENYLSKTNWTMSAFDVPLHYNLYQASNSSGNYDMRNLLNGTLVQRHPSHAVTFVDNHDTQPGEALESFVQGWFKPLAYATILTREQGYPQVFYGDYYGIPSDGVPSYRQQIDPLLKARQQYAYGRQHDYFDHWDVIGWTREGNASHPNSGLATIMSDGPGGSKWMYVGRQKAGEVWHDMTGNRSGTVTINQDGWGHFFVNGGSVSVWVKR

SEQ ID NO: 33099 - protein, 485 aa, Bacillus sp.
HHDGTNGTIMQYFEWNVPNDGQHWNRLHNNAQNLKNAGITAIWIPPAWKGTSQNDVGYGAYDLYDLGEFNQKGTVRTKYGTKAELERAIRSLKANGIQVYGDVVMNHKGGADFTERVQAVEVNPQNRNQEVSGTYQIEAWTGFNFPGRGNQHSSFKWRWYHFDGTDWDQSRQLANRIYKFRGDGKAWDWEVDTENGNYDQLLLADVDMDHPEVINELNRWGVWYANTLNLDGFRLDAVKHIKFSFMRDWLGHVRGQTGKNLFAVAEYWKNDLGALENYLSKTNWTMSAFDVPLHYNLYQASNSSGNYDMRNLLNGTLVQRHPSHAVTFVDNHDTQPGEALESFVQGWFKPLAYATILTREQGYPQVFYGDYYGIPSDGVPSYRQQIDPLLKARQQYAYGRQHDYFDHWDVIGWTREGNASHPNSGLATIMSDGPGGSKWMYVGRQKAGEVWHDMTGNRSGTVTINQDGWGHFFVNGGSVSVWVKR

SEQ ID NO: 33100 - protein, 485 aa, Bacillus sp.
HHDGTNGTIMQYFEWNVPNDGQHWNRLHNNAQNLKNAGITAIWIPPAWKGTSQNDVGYGAYDLYDLGEFNQKGTVRTKYGTKAELERAIRSLKANGIQVYGDVVMNHKGGADFTERVQAVEVNPQNRNQEVSGTYQIEAYTGFNFPGRGNQHSSFKWRWYHFDGTDWDQSRQLANRIYKFRGDGKAWDWEVDTENGNYDYLMYADVDMDHPEVINELNRWGVWYANTLNLDGFRLDAVKHIKFSFMRDWLGHVRGQTGKNLFAVAEYWKNDLGALENYLSKTNWTMSAFDVPLHYNLYQASNSRGNYDMRNLLNGTLVQRHPSHAVTFVDNHDTQPGEALESFVQGWFKPLAYATILTREQGYPQVFYGDYYGIPSDGVPSYRQQIDPLLKARQQYAYGRQHDYFDHWDVIGWTREGNASHPNSGLATIMSDGPGGSKWMYVGRQKAGEVWHDMTGNRSGTVTINQDTWGHFFVKGGSVSVWVKR

SEQ ID NO: 33101 - protein, 485 aa, Bacillus sp.
HHDGTNGTIMQYFEWNVPNDGQHWNRLHNNAQNLKNAGITAIWIPPAWKGTSQNDVGYGAYDLYDLGEFNQKGTVRTKYGTKAELERAIRSLKANGIQVYGDVVMNHKGGADFTERVQAVEVNPQNRNQEVSGTYQIEAWTGFNFPGRGNQHSSFKWRWYHFDGTDWDQSRQLANRIYKFRGDGKAWDWEVDTENGNYDYLMYADVDMDHPEVINELNRWGVWYANTLNLDGFRLDAVKHIKFSFMRDWLGHVRGQTGKNLFAVAEYWKNDLGALENYTSKTNGTMSAFDVPLHYNLYQASNSKGNYDMRNLLNGTLVQRHPSNAVTFVDNHDTQPGEALESFVQGWFKPLAYATILTREQGYPQVFYGDYYGIPSDGVPSYRQQIDPLLKARQQYAYGRQHDYFDHWDVIGWTREGNASHPNSGLATIMSDGPGGSKWMYVGRQKAGEVWHDMTGNRSGTVTINQDGWGHFFVNGGSVSVWVKR

SEQ ID NO: 33102 - protein, 483 aa, Bacillus sp. (in: firmicutes)
HHDGTNGTIMQYFEWNVPNDGQHWNRLHNNAQNLKNAGITAIWIPPAWKGTSQNDVGYGAYDLYDLGEFNQKGTVRTKYGTKAELERAIRSLKANGIQVYGDVVMNHKGGADFTERVQAVEVNPQNRNQLVSGNYQIEAWTGFNFPGRGNQHSSFKWRWYHFDGTDWDQSRQLANRIYKFWGKTWDWEVDTEFGNYDYLMYADVDMDHPEVINELNRWGVWYANTLNLDGFRLDAVKHIKFSFMRDWLGHVRGQTGKNLFAVAEYWKNDLGALENYLSKTNWTMSAFDVPLHYNLYQASNSSGNYDMRNLLNGTLVQRHPSHAVTFVDNHDTQPGEALESFVQGWFKPLAYATILTREQGYPSVFYGDYYGIPSDGVPSYRQQIDPLLKARQQYAYGRQHDYFDHWDVIGWTREGNASHPNSGLATIMSDGPGGSKWMYVGRQKAGEVWHDMTGNRSGTVTINQDGWGHFFVNGGSVSVWVKR

SEQ ID NO: 33103 - protein, 485 aa, Bacillus sp.
HHDGTNGTIMQYFEWNVPNDGQHWNRLHNNAQNLKNAGITAIWIPPAWKGTSQNDVGYGAYDLYDLGEFNQKGTVRTKYGTKAELERAIRSLKANGIQVYGDVVMNHKGGADFTERVQAVEVNPQNRNQEVSGTYQIEAWTGFNFPGRGNQHSSFKWRWYHFDGTDWDQSRQLANRIYKFRGDGKAWDWEVDTENGNYDQLNNADVDMDHPEVINELNRWGVWYANTLNLDGFRLDAVKHIKFSFMRDWLGHVRGQTGKNLFAVAEYWKNDLGALENYLSKTNWTMSAFDVPLHYNLYQASNSSGNYDMRNLLNGTLVQRHPSHAVTFVDNHDTQPGEALESFVQGWFKPLAYATILTREQGYPQVFYGDYYGIPSDGVPSYRQQIDPLLKARQQYAYGRQHDYFDHWDVIGWTREGNASHPNSGLATIMSDGPGGSKWMYVGRQKAGEVWHDMTGNRSGTVTINQDGWGHFFVNGGSVSVWVKR

SEQ ID NO: 33104 - protein, 485 aa, Bacillus sp.
HHDGTNGTIMQYFEWNVPNDGQHWNRLHNNAQNLKNAGITAIWIPPAWKGTSQNDVGYGAYDLYDLGEFNQKGTVRTKYGTKAELERAIRSLKANGIQVYGDVVMNHKGGADFTERVQAVEVNPQNRNQEVSGTYQIEAWTGFNFPGRGNQHSSFKWRWYHFDGTDWDQSRQLANRIYKFRGDGKAWDWEVDTENGNYDQLLPADVDMDHPEVINELNRWGVWYANTLNLDGFRLDAVKHIKFSFMRDWLGHVRGQTGKNLFAVAEYWKNDLGALENYLSKTNWTMSAFDVPLHYNLYQASNSSGNYDMRNLLNGTLVQRHPSHAVTFVDNHDTQPGEALESFVQGWFKPLAYATILTREQGYPQVFYGDYYGIPSDGVPSYRQQIDPLLKARQQYAYGRQHDYFDHWDVIGWTREGNASHPNSGLATIMSDGPGGSKWMYVGRQKAGEVWHDMTGNRSGTVTINQDGWGHFFVNGGSVSVWVKR

SEQ ID NO: 33105 - protein, 485 aa, Bacillus sp.
HHDGTNGTIMQYFEWNVPNDGQHWNRLHNNAQNLKNAGITAIWIPPAWKGTSQNDVGYGAYDLYDLGEFNQKGTVRTKYGTKAELERAIRSLKANGIQVYGDVVMNHKGGADFTERVQAVEVNPQNRNQEVSGTYQIEAWTGFNFPGRGNQHSSFKWRWYHFDGTDWDQSRQLANRIYKFRGDGKAWDWEVDTENGNYDYPSRADVDMDHPEVINELNRWGVWYANTLNLDGFRLDAVKHIKFSFMRDWLGHVRGQTGKNLFAVAEYWKNDLGALENYLSKTNWTMSAFDVPLHYNLYQASNSSGNYDMRNLLNGTLVQRHPSHAVTFVDNHDTQPGEALESFVQGWFKPLAYATILTREQGYPQVFYGDYYGIPSDGVPSYRQQIDPLLKARQQYAYGRQHDYFDHWDVIGWTREGNASHPNSGLATIMSDGPGGSKWMYVGRQKAGEVWHDMTGNRSGTVTINQDGWGHFFVNGGSVSVWVKR

SEQ ID NO: 33106 - protein, 485 aa, Bacillus sp.
HHDGTNGTIMQYFEWNVPNDGQHWNRLHNNAQNLKNAGITAIWIPPAWKGTSQNDVGYGAYDLYDLGEFNQKGTVRTKYGTKAELERAIRSLKANGIQVYGDVVMNHKGGADFTERVQAVEVNPQNRNQEVSGTYQIEAWTGFNFPGRGNQHSSFKWRWYHFDGTDWDQSRQLANRIYKFRGDGKAWDWEVDTENGNYDWNWYADVDMDHPEVINELNRWGVWYANTLNLDGFRLDAVKHIKFSFMRDWLGHVRGQTGKNLFAVAEYWKNDLGALENYLSKTNWTMSAFDVPLHYNLYQASNSSGNYDMRNLLNGTLVQRHPSHAVTFVDNHDTQPGEALESFVQGWFKPLAYATILTREQGYPQVFYGDYYGIPSDGVPSYRQQIDPLLKARQQYAYGRQHDYFDHWDVIGWTREGNASHPNSGLATIMSDGPGGSKWMYVGRQKAGEVWHDMTGNRSGTVTINQDGWGHFFVNGGSVSVWVKR

SEQ ID NO: 33107 - protein, 485 aa, Bacillus sp.
HHDGTNGTIMQYFEWNVPNDGQHWNRLHNNAQNLKNAGITAIWIPPAWKGTSQNDVGYGAYDLYDLGEFNQKGTVRTKYGTKAELERAIRSLKANGIQVYGDVVMNHKGGADFTERVQAVEVNPQNRNQEVSGTYQIEAWTGFNFPGRGNQHSSFKWRWYHFDGTDWDQSRQLANRIYKFRGDGKAWDWEVDTENGNYDYPLTADVDMDHPEVINELNRWGVWYANTLNLDGFRLDAVKHIKFSFMRDWLGHVRGQTGKNLFAVAEYWKNDLGALENYLSKTNWTMSAFDVPLHYNLYQASNSSGNYDMRNLLNGTLVQRHPSHAVTFVDNHDTQPGEALESFVQGWFKPLAYATILTREQGYPQVFYGDYYGIPSDGVPSYRQQIDPLLKARQQYAYGRQHDYFDHWDVIGWTREGNASHPNSGLATIMSDGPGGSKWMYVGRQKAGEVWHDMTGNRSGTVTINQDGWGHFFVNGGSVSVWVKR

SEQ ID NO: 33108 - protein, 485 aa, Bacillus sp.
HHDGTNGTIMQYFEWNVPNDGQHWNRLHNNAQNLKNAGITAIWIPPAWKGTSQNDVGYGAYDLYDLGEFNQKGTVRTKYGTKAELERAIRSLKANGIQVYGDVVMNHKGGADFTERVQAVEVNPQNRNQEVSGTYQIEAWTGFNFPGRGNQHSSFKWRWYHFDGTDWDQSRQLANRIYKFRGDGKAWDWEVDTENGNYDYPIRADVDMDHPEVINELNRWGVWYANTLNLDGFRLDAVKHIKFSFMRDWLGHVRGQTGKNLFAVAEYWKNDLGALENYLSKTNWTMSAFDVPLHYNLYQASNSSGNYDMRNLLNGTLVQRHPSHAVTFVDNHDTQPGEALESFVQGWFKPLAYATILTREQGYPQVFYGDYYGIPSDGVPSYRQQIDPLLKARQQYAYGRQHDYFDHWDVIGWTREGNASHPNSGLATIMSDGPGGSKWMYVGRQKAGEVWHDMTGNRSGTVTINQDGWGHFFVNGGSVSVWVKR

SEQ ID NO: 33109 - protein, 485 aa, Bacillus sp.
HHDGTNGTIMQYFEWNVPNDGQHWNRLHNNAQNLKNAGITAIWIPPAWKGTSQNDVGYGAYDLYDLGEFNQKGTVRTKYGTKAELERAIRSLKANGIQVYGDVVMNHKGGADFTERVQAVEVNPQNRNQEVSGTYQIEAWTGFNFPGRGNQHSSFKWRWYHFDGTDWDQSRQLANRIYKFRGDGKAWDWEVDTENGNYDYQQNADVDMDHPEVINELNRWGVWYANTLNLDGFRLDAVKHIKFSFMRDWLGHVRGQTGKNLFAVAEYWKNDLGALENYLSKTNWTMSAFDVPLHYNLYQASNSSGNYDMRNLLNGTLVQRHPSHAVTFVDNHDTQPGEALESFVQGWFKPLAYATILTREQGYPQVFYGDYYGIPSDGVPSYRQQIDPLLKARQQYAYGRQHDYFDHWDVIGWTREGNASHPNSGLATIMSDGPGGSKWMYVGRQKAGEVWHDMTGNRSGTVTINQDGWGHFFVNGGSVSVWVKR

SEQ ID NO: 33110 - protein, 485 aa, Bacillus sp.
HHDGTNGTIMQYFEWNVPNDGQHWNRLHNNAQNLKNAGITAIWIPPAWKGTSQNDVGYGAYDLYDLGEFNQKGTVRTKYGTKAELERAIRSLKANGIQVYGDVVMNHKGGADFTERVQAVEVNPQNRNQEVSGTYQIEAWTGFNFPGRGNQHSSFKWRWYHFDGTDWDQSRQLANRIYKFRGDGKAWDWEVDTENGNYDWLTQADVDMDHPEVINELNRWGVWYANTLNLDGFRLDAVKHIKFSFMRDWLGHVRGQTGKNLFAVAEYWKNDLGALENYLSKTNWTMSAFDVPLHYNLYQASNSSGNYDMRNLLNGTLVQRHPSHAVTFVDNHDTQPGEALESFVQGWFKPLAYATILTREQGYPQVFYGDYYGIPSDGVPSYRQQIDPLLKARQQYAYGRQHDYFDHWDVIGWTREGNASHPNSGLATIMSDGPGGSKWMYVGRQKAGEVWHDMTGNRSGTVTINQDGWGHFFVNGGSVSVWVKR

SEQ ID NO: 33111 - protein, 485 aa, Bacillus sp.
HHDGTNGTIMQYFEWNVPNDGQHWNRLHNNAQNLKNAGITAIWIPPAWKGTSQNDVGYGAYDLYDLGEFNQKGTVRTKYGTKAELERAIRSLKANGIQVYGDVVMNHKGGADFTERVQAVEVNPQNRNQEVSGTYQIEAWTGFNFPGRGNQHSSFKWRWYHFDGTDWDQSRQLANRIYKFRGDGKAWDWEVDTENGNYDQLLNADVDMDHPEVINELNRWGVWYANTLNLDGFRLDAVKHIKFSFMRDWLGHVRGQTGKNLFAVAEYWKNDLGALENYLSKTNWTMSAFDVPLHYNLYQASNSSGNYDMRNLLNGTLVQRHPSHAVTFVDNHDTQPGEALESFVQGWFKPLAYATILTREQGYPQVFYGDYYGIPSDGVPSYRQQIDPLLKARQQYAYGRQHDYFDHWDVIGWTREGNASHPNSGLATIMSDGPGGSKWMYVGRQKAGEVWHDMTGNRSGTVTINQDGWGHFFVNGGSVSVWVKR

SEQ ID NO: 33112 - protein, 485 aa, Bacillus sp.
HHDGTNGTIMQYFEWNVPNDGQHWNRLHNNAQNLKNAGITAIWIPPAWKGTSQNDVGYGAYDLYDLGEFNQKGTVRTKYGTKAELERAIRSLKANGIQVYGDVVMNHKGGADFTERVQAVEVNPQNRNQEVSGTYQIEAWTGFNFPGRGNQHSSFKWRWYHFDGTDWDQSRQLANRIYKFRGDGKAWDWEVDTENGNYDPPLYADVDMDHPEVINELNRWGVWYANTLNLDGFRLDAVKHIKFSFMRDWLGHVRGQTGKNLFAVAEYWKNDLGALENYLSKTNWTMSAFDVPLHYNLYQASNSSGNYDMRNLLNGTLVQRHPSHAVTFVDNHDTQPGEALESFVQGWFKPLAYATILTREQGYPQVFYGDYYGIPSDGVPSYRQQIDPLLKARQQYAYGRQHDYFDHWDVIGWTREGNASHPNSGLATIMSDGPGGSKWMYVGRQKAGEVWHDMTGNRSGTVTINQDGWGHFFVNGGSVSVWVKR

SEQ ID NO: 33113 - protein, 485 aa, Bacillus sp.
HHDGTNGTIMQYFEWNVPNDGQHWNRLHNNAQNLKNAGITAIWIPPAWKGTSQNDVGYGAYDLYDLGEFNQKGTVRTKYGTKAELERAIRSLKANGIQVYGDVVMNHKGGADFTERVQAVEVNPQNRNQEVSGTYQIEAWTGFNFPGRGNQHSSFKWRWYHFDGTDWDQSRQLANRIYKFRGDGKAWDWEVDTENGNYDTLLWADVDMDHPEVINELNRWGVWYANTLNLDGFRLDAVKHIKFSFMRDWLGHVRGQTGKNLFAVAEYWKNDLGALENYLSKTNWTMSAFDVPLHYNLYQASNSSGNYDMRNLLNGTLVQRHPSHAVTFVDNHDTQPGEALESFVQGWFKPLAYATILTREQGYPQVFYGDYYGIPSDGVPSYRQQIDPLLKARQQYAYGRQHDYFDHWDVIGWTREGNASHPNSGLATIMSDGPGGSKWMYVGRQKAGEVWHDMTGNRSGTVTINQDGWGHFFVNGGSVSVWVKR

SEQ ID NO: 33114 - protein, 483 aa, Bacillus sp. (in: firmicutes)
HHDGTNGTIMQYFEWNVPNDGQHWNRLHNNAQNLKNAGITAIWIPPAWKGTSQQDVGYGAYDLYDLGEFNQKGTVRTKYGTKAELERAIRSLKANGIQVYGDVVMNHKGGADTTERVQAVEVNPQNRNQEVSGTYQIEAWTGFNFPGRGNQHSSFKWRWYHFDGTDWDQSHQLANRIYKFRGKAWDWEVDTENGNYDYLMYADVDMDHPEVINELNRWGVWYANTLNLDGFRLDAVKHIKFSFMRDWLGHVRGQTGKNLFAVAEYWKNDLGALENYLSKTNWTMSAFDVPLHYNLYQASASSGNYDMRNLLNGTLVQRHPSHAVTFVDNHDTQPGEALESFVQGWFKPLAYATILTREQGYPCVFYGDYYGIPSDGVPSYRQQIDPLLKARQQYAYGRQHDYFDHWDVIGWTREGNASHPNSGLATIMSDGPGGSKWMYVGRQKAGEVWHDMTGNRSGTVTINQDGWGHFFVNGGSVSVWVKR

SEQ ID NO: 33115 - protein, 485 aa, Bacillus sp.
HHDGTNGTIMQYFEWNVPNDGQHWNRLHNNAQNLKNAGITAIWIPPAWKGTSQNDVGYGAYDLYDLGEFNQKGTVRTKYGTKAELERAIRSLKANGIQVYGDVVMNHKGGADFTERVQAVEVNPQNRNQEVSGTYQIEAWTGFNFPGRGNQHSSFKWRWYHFDGTDWDQSRQLANRIYKFRGDGKAWDWEVDTENGNYDPLHVADVDMDHPEVINELNRWGVWYANTLNLDGFRLDAVKHIKFSFMRDWLGHVRGQTGKNLFAVAEYWKNDLGALENYLSKTNWTMSAFDVPLHYNLYQASNSSGNYDMRNLLNGTLVQRHPSHAVTFVDNHDTQPGEALESFVQGWFKPLAYATILTREQGYPQVFYGDYYGIPSDGVPSYRQQIDPLLKARQQYAYGRQHDYFDHWDVIGWTREGNASHPNSGLATIMSDGPGGSKWMYVGRQKAGEVWHDMTGNRSGTVTINQDGWGHFFVNGGSVSVWVKR

SEQ ID NO: 33116 - protein, 485 aa, Bacillus sp.
HHDGTNGTIMQYFEWNVPNDGQHWNRLHNNAQNLKNAGITAIWIPPAWKGTSQNDVGYGAYDLYDLGEFNQKGTVRTKYGTKAELERAIRSLKANGIQVYGDVVMNHKGGADFTERVQAVEVNPQNRNQEVSGTYQIEAYTGFNFPGRGNQHSSFKWRWYHFDGTDWDQSRQLANRIYKFRGDGKAWDWEVDTENGNYDYLMYADVDMDHPEVINELNRWGVWYANTLNLDGFRLDAVKHIKFSFMRDWLGHVRGQTGKNLFAVAEYWKNDLGALENYLSKTNWTMSAFDVPLHYNLYQASNSSKNYDMRNLLNGTLVQRHPSHAVTFVDNHDTQPGEALESFVQGWFKPLAYATILTREQGYPQVFYGDYYGIPSDGVPSYRQQIDPLLKARQQYAYGRQHDYFDHWDVIGWTREGNASHPNSGLATIMSDGPGGSKWMYVGRQKAGEVWHDMTGNRSGTVTINQDGWGHFFVKGGSVSVWVKR

SEQ ID NO: 33117 - protein, 485 aa, Bacillus sp.
HHDGTNGTIMQYFEWNVPNDGQHWNRLHNNAQNLKNAGITAIWIPPAWKGTSQNDVGYGAYDLYDLGEFNQKGTVRTKYGTKAELERAIRSLKANGIQVYGDVVMNHKGGADFTERVQAVEVNPQNRNQEVSGTYQIEAWTGFNFPGRGNQHSSFKWRWYHFDGTDWDQSRQLANRIYKFRGDGKAWDWEVDTENGNYDNLLKADVDMDHPEVINELNRWGVWYANTLNLDGFRLDAVKHIKFSFMRDWLGHVRGQTGKNLFAVAEYWKNDLGALENYLSKTNWTMSAFDVPLHYNLYQASNSSGNYDMRNLLNGTLVQRHPSHAVTFVDNHDTQPGEALESFVQGWFKPLAYATILTREQGYPQVFYGDYYGIPSDGVPSYRQQIDPLLKARQQYAYGRQHDYFDHWDVIGWTREGNASHPNSGLATIMSDGPGGSKWMYVGRQKAGEVWHDMTGNRSGTVTINQDGWGHFFVNGGSVSVWVKR

SEQ ID NO: 33118 - protein, 485 aa, Bacillus sp.
HHDGTNGTIMQYFEWNVPNDGQHWNRLHNNAQNLKNAGITAIWIPPAWKGTSQNDVGYGAYDLYDLGEFNQKGTVRTKYGTKAELERAIRSLKANGIQVYGDVVMNHKGGADFTERVQAVEVNPQNRNQEVSGTYQIEAWTGFNFPGRGNQHSSFKWRWYHFDGTDWDQSRQLANRIYKFRGDGKAWDWEVDTENGNYDWLLLADVDMDHPEVINELNRWGVWYANTLNLDGFRLDAVKHIKFSFMRDWLGHVRGQTGKNLFAVAEYWKNDLGALENYLSKTNWTMSAFDVPLHYNLYQASNSSGNYDMRNLLNGTLVQRHPSHAVTFVDNHDTQPGEALESFVQGWFKPLAYATILTREQGYPQVFYGDYYGIPSDGVPSYRQQIDPLLKARQQYAYGRQHDYFDHWDVIGWTREGNASHPNSGLATIMSDGPGGSKWMYVGRQKAGEVWHDMTGNRSGTVTINQDGWGHFFVNGGSVSVWVKR

SEQ ID NO: 33119 - protein, 485 aa, Bacillus sp.
HHDGTNGTIMQYFEWNVPNDGQHWNRLHNNAQNLKNAGITAIWIPPAWKGTSQNDVGYGAYDLYDLGEFNQKGTVRTKYGTKAELERAIRSLKANGIQVYGDVVMNHKGGADFTERVQAVEVNPQNRNQEVSGTYQIEAWTGFNFPGRGNQHSSFKWRWYHFDGTDWDQSRQLANRIYKFRGDGKAWDWEVDTENGNYDYQLKADVDMDHPEVINELNRWGVWYANTLNLDGFRLDAVKHIKFSFMRDWLGHVRGQTGKNLFAVAEYWKNDLGALENYLSKTNWTMSAFDVPLHYNLYQASNSSGNYDMRNLLNGTLVQRHPSHAVTFVDNHDTQPGEALESFVQGWFKPLAYATILTREQGYPQVFYGDYYGIPSDGVPSYRQQIDPLLKARQQYAYGRQHDYFDHWDVIGWTREGNASHPNSGLATIMSDGPGGSKWMYVGRQKAGEVWHDMTGNRSGTVTINQDGWGHFFVNGGSVSVWVKR

SEQ ID NO: 33120 - protein, 485 aa, Bacillus sp.
HHDGTNGTIMQYFEWNVPNDGQHWNRLHNNAQNLKNAGITAIWIPPAWKGTSQNDVGYGAYDLYDLGEFNQKGTVRTKYGTKAELERAIRSLKANGIQVYGDVVMNHKGGADFTERVQAVEVNPQNRNQEVSGTYQIEAWTGFNFPGRGNQHSSFKWRWYHFDGTDWDQSRQLANRIYKFRGDGKAWDWEVDTENGNYDWPLYADVDMDHPEVINELNRWGVWYANTLNLDGFRLDAVKHIKFSFMRDWLGHVRGQTGKNLFAVAEYWKNDLGALENYLSKTNWTMSAFDVPLHYNLYQASNSSGNYDMRNLLNGTLVQRHPSHAVTFVDNHDTQPGEALESFVQGWFKPLAYATILTREQGYPQVFYGDYYGIPSDGVPSYRQQIDPLLKARQQYAYGRQHDYFDHWDVIGWTREGNASHPNSGLATIMSDGPGGSKWMYVGRQKAGEVWHDMTGNRSGTVTINQDGWGHFFVNGGSVSVWVKR

SEQ ID NO: 33121 - protein, 485 aa, Bacillus sp.
HHDGTNGTIMQYFEWNVPNDGQHWNRLHNNAQNLKNAGITAIWIPPAWKGTSQNDVGYGAYDLYDLGEFNQKGTVRTKYGTKAELERAIRSLKANGIQVYGDVVMNHKGGADFTERVQAVEVNPQNRNQEVSGTYQIEAWTGFNFPGRGNQHSSFKWRWYHFDGTDWDQSRQLANRIYKFRGDGKAWDWEVDTENGNYDLLLVADVDMDHPEVINELNRWGVWYANTLNLDGFRLDAVKHIKFSFMRDWLGHVRGQTGKNLFAVAEYWKNDLGALENYLSKTNWTMSAFDVPLHYNLYQASNSSGNYDMRNLLNGTLVQRHPSHAVTFVDNHDTQPGEALESFVQGWFKPLAYATILTREQGYPQVFYGDYYGIPSDGVPSYRQQIDPLLKARQQYAYGRQHDYFDHWDVIGWTREGNASHPNSGLATIMSDGPGGSKWMYVGRQKAGEVWHDMTGNRSGTVTINQDGWGHFFVNGGSVSVWVKR

SEQ ID NO: 33122 - protein, 485 aa, Bacillus sp.
HHDGTNGTIMQYFEWNVPNDGQHWNRLHNNAQNLKNAGITAIWIPPAWKGTSQNDVGYGAYDLYDLGEFNQKGTVRTKYGTKAELERAIRSLKANGIQVYGDVVMNHKGGADFTERVQAVEVNPQNRNQEVSGTYQIEAWTGFNFPGRGNQHSSFKWRWYHFDGTDWDQSRQLANRIYKFRGDGKAWDWEVDTENGNYDYRSDADVDMDHPEVINELNRWGVWYANTLNLDGFRLDAVKHIKFSFMRDWLGHVRGQTGKNLFAVAEYWKNDLGALENYLSKTNWTMSAFDVPLHYNLYQASNSSGNYDMRNLLNGTLVQRHPSHAVTFVDNHDTQPGEALESFVQGWFKPLAYATILTREQGYPQVFYGDYYGIPSDGVPSYRQQIDPLLKARQQYAYGRQHDYFDHWDVIGWTREGNASHPNSGLATIMSDGPGGSKWMYVGRQKAGEVWHDMTGNRSGTVTINQDGWGHFFVNGGSVSVWVKR

SEQ ID NO: 33123 - protein, 485 aa, Bacillus sp.
HHDGTNGTIMQYFEWNVPNDGQHWNRLHNNAQNLKNAGITAIWIPPAWKGTSQNDVGYGAYDLYDLGEFNQKGTVRTKYGTKAELERAIRSLKANGIQVYGDVVMNHKGGADFTERVQAVEVNPQNRNQEVSGTYQIEAWTGFNFPGRGNQHSSFKWRWYHFDGTDWDQSRQLANRIYKFRGDGKAWDWEVDTENGNYDWLTPADVDMDHPEVINELNRWGVWYANTLNLDGFRLDAVKHIKFSFMRDWLGHVRGQTGKNLFAVAEYWKNDLGALENYLSKTNWTMSAFDVPLHYNLYQASNSSGNYDMRNLLNGTLVQRHPSHAVTFVDNHDTQPGEALESFVQGWFKPLAYATILTREQGYPQVFYGDYYGIPSDGVPSYRQQIDPLLKARQQYAYGRQHDYFDHWDVIGWTREGNASHPNSGLATIMSDGPGGSKWMYVGRQKAGEVWHDMTGNRSGTVTINQDGWGHFFVNGGSVSVWVKR

SEQ ID NO: 33124 - protein, 483 aa, Bacillus sp. (in: firmicutes)
HHDGTNGTIMQYFEWNVPNDGQHWNRLHNNAQNLKNAGITAIWIPPAWKGTSQNDVGYGAYDLYDLGEFNQKGTVRTKYGTKAELERAIRSLKANGIQVYGDVVMNHKGGADFTERVQAVEVNPQNRNQDVSGWYQIEAWTGFNFPGRGNQHSSFKWRWYHFDGTDWDQSRQLANRIYKFKGKEWDWEVDTEFGNYDYLMYADVDMDHPEVINELNRWGVWYANTLNLDGFRLDAVKHIKFSFMRDWLGHVRGQTGKNLFAVAEYWKNDLGALENYLSKTNWTMSAFDVPLHYNLYQASNSSGNYDMRNLLNGTLVQRHPSHAVTFVDNHDTQPGEALESFVQGWFKPLAYATILTREQGYPSVFYGDYYGIPSDGVPSYRQQIDPLLKARQQYAYGRQHDYFDHWDVIGWTREGNASHPNSGLATIMSDGPGGSKWMYVGRQKAGEVWHDMTGNRSGTVTINQDGWGHFFVNGGSVSVWVKR

SEQ ID NO: 33125 - protein, 485 aa, Bacillus sp.
HHDGTNGTIMQYFEWNVPNDGQHWNRLHNNAQNLKNAGITAIWIPPAWKGTSQNDVGYGAYDLYDLGEFNQKGTVRTKYGTKAELERAIRSLKANGIQVYGDVVMNHKGGADFTERVQAVEVNPQNRNQEVSGTYQIEAYTGFNFPGRGNQHSSFKWRWYHFDGTDWDQSRQLANRIYKFRGDGKAWDWEVDTENGNYDYLMYADVDMDHPEVINELNRWGVWYANTLNLDGFRLDAVKHIKFSFMRDWLGHVRGQTGKNLFAVAEYWKNDLGALENYLSKTNWTMSAFDVPLHYNLYQASNSRGNYDMRNLLNGTLVQRHPSHAVTFVDNHDTQPGEALESFVQGWFKPLAYATILTREQGYPQVFYGDYYGIPSDGVPSYRQQIDPLLKARQQYAYGRQHDYFDHWDVIGWTREGNASHPNSGLATIMSDGPGGSKWMYVGRQKAGEVWHDMTGNRSGTVTINQDGTGHFFVNGKSVSVWVKR

SEQ ID NO: 33126 - protein, 485 aa, Bacillus sp.
HHDGTNGTIMQYFEWNVPNDGQHWNRLHNNAQNLKNAGITAIWIPPAWKGTSQNDVGYGAYDLYDLGEFNQKGTVRTKYGTKAELERAIRSLKANGIQVYGDVVMNHKGGADFTERVQAVEVNPQNRNQEVSGTYQIEAWTGFNFPGRGNQHSSFKWRWYHFDGTDWDQSRQLANRIYKFRGDGKAWDWEVDTENGNYDNLLPADVDMDHPEVINELNRWGVWYANTLNLDGFRLDAVKHIKFSFMRDWLGHVRGQTGKNLFAVAEYWKNDLGALENYLSKTNWTMSAFDVPLHYNLYQASNSSGNYDMRNLLNGTLVQRHPSHAVTFVDNHDTQPGEALESFVQGWFKPLAYATILTREQGYPQVFYGDYYGIPSDGVPSYRQQIDPLLKARQQYAYGRQHDYFDHWDVIGWTREGNASHPNSGLATIMSDGPGGSKWMYVGRQKAGEVWHDMTGNRSGTVTINQDGWGHFFVNGGSVSVWVKR

SEQ ID NO: 33127 - protein, 485 aa, Bacillus sp.
HHDGTNGTIMQYFEWNVPNDGQHWNRLHNNAQNLKNAGITAIWIPPAWKGTSQNDVGYGAYDLYDLGEFNQKGTVRTKYGTKAELERAIRSLKANGIQVYGDVVMNHKGGADFTERVQAVEVNPQNRNQEVSGTYQIEAWTGFNFPGRGNQHSSFKWRWYHFDGTDWDQSRQLANRIYKFRGDGKAWDWEVDTENGNYDYRLPADVDMDHPEVINELNRWGVWYANTLNLDGFRLDAVKHIKFSFMRDWLGHVRGQTGKNLFAVAEYWKNDLGALENYLSKTNWTMSAFDVPLHYNLYQASNSSGNYDMRNLLNGTLVQRHPSHAVTFVDNHDTQPGEALESFVQGWFKPLAYATILTREQGYPQVFYGDYYGIPSDGVPSYRQQIDPLLKARQQYAYGRQHDYFDHWDVIGWTREGNASHPNSGLATIMSDGPGGSKWMYVGRQKAGEVWHDMTGNRSGTVTINQDGWGHFFVNGGSVSVWVKR

SEQ ID NO: 33128 - protein, 485 aa, Bacillus sp.
HHDGTNGTIMQYFEWNVPNDGQHWNRLHNNAQNLKNAGITAIWIPPAWKGTSQNDVGYGAYDLYDLGEFNQKGTVRTKYGTKAELERAIRSLKANGIQVYGDVVMNHKGGADFTERVQAVEVNPQNRNQEVSGTYQIEAWTGFNFPGRGNQHSSFKWRWYHFDGTDWDQSRQLANRIYKFRGDGKAWDWEVDTENGNYDYHPRADVDMDHPEVINELNRWGVWYANTLNLDGFRLDAVKHIKFSFMRDWLGHVRGQTGKNLFAVAEYWKNDLGALENYLSKTNWTMSAFDVPLHYNLYQASNSSGNYDMRNLLNGTLVQRHPSHAVTFVDNHDTQPGEALESFVQGWFKPLAYATILTREQGYPQVFYGDYYGIPSDGVPSYRQQIDPLLKARQQYAYGRQHDYFDHWDVIGWTREGNASHPNSGLATIMSDGPGGSKWMYVGRQKAGEVWHDMTGNRSGTVTINQDGWGHFFVNGGSVSVWVKR

SEQ ID NO: 33129 - protein, 485 aa, Bacillus sp.
HHDGTNGTIMQYFEWNVPNDGQHWNRLHNNAQNLKNAGITAIWIPPAWKGTSQNDVGYGAYDLYDLGEFNQKGTVRTKYGTKAELERAIRSLKANGIQVYGDVVMNHKGGADFTERVQAVEVNPQNRNQEVSGTYQIEAWTGFNFPGRGNQHSSFKWRWYHFDGTDWDQSRQLANRIYKFRGDGKAWDWEVDTENGNYDWLLFADVDMDHPEVINELNRWGVWYANTLNLDGFRLDAVKHIKFSFMRDWLGHVRGQTGKNLFAVAEYWKNDLGALENYLSKTNWTMSAFDVPLHYNLYQASNSSGNYDMRNLLNGTLVQRHPSHAVTFVDNHDTQPGEALESFVQGWFKPLAYATILTREQGYPQVFYGDYYGIPSDGVPSYRQQIDPLLKARQQYAYGRQHDYFDHWDVIGWTREGNASHPNSGLATIMSDGPGGSKWMYVGRQKAGEVWHDMTGNRSGTVTINQDGWGHFFVNGGSVSVWVKR

SEQ ID NO: 33130 - protein, 485 aa, Bacillus sp.
HHDGTNGTIMQYFEWNVPNDGQHWNRLHNNAQNLKNAGITAIWIPPAWKGTSQNDVGYGAYDLYDLGEFNQKGTVRTKYGTKAELERAIRSLKANGIQVYGDVVMNHKGGADFTERVQAVEVNPQNRNQEVSGTYQIEAWTGFNFPGRGNQHSSFKWRWYHFDGTDWDQSRQLANRIYKFRGDGKAWDWEVDTENGNYDQLLSADVDMDHPEVINELNRWGVWYANTLNLDGFRLDAVKHIKFSFMRDWLGHVRGQTGKNLFAVAEYWKNDLGALENYLSKTNWTMSAFDVPLHYNLYQASNSSGNYDMRNLLNGTLVQRHPSHAVTFVDNHDTQPGEALESFVQGWFKPLAYATILTREQGYPQVFYGDYYGIPSDGVPSYRQQIDPLLKARQQYAYGRQHDYFDHWDVIGWTREGNASHPNSGLATIMSDGPGGSKWMYVGRQKAGEVWHDMTGNRSGTVTINQDGWGHFFVNGGSVSVWVKR

SEQ ID NO: 33131 - protein, 485 aa, Bacillus sp.
HHDGTNGTIMQYFEWNVPNDGQHWNRLHNNAQNLKNAGITAIWIPPAWKGTSQNDVGYGAYDLYDLGEFNQKGTVRTKYGTKAELERAIRSLKANGIQVYGDVVMNHKGGADFTERVQAVEVNPQNRNQEVSGTYQIEAWTGFNFPGRGNQHSSFKWRWYHFDGTDWDQSRQLANRIYKFRGDGKAWDWEVDTENGNYDVLLPADVDMDHPEVINELNRWGVWYANTLNLDGFRLDAVKHIKFSFMRDWLGHVRGQTGKNLFAVAEYWKNDLGALENYLSKTNWTMSAFDVPLHYNLYQASNSSGNYDMRNLLNGTLVQRHPSHAVTFVDNHDTQPGEALESFVQGWFKPLAYATILTREQGYPQVFYGDYYGIPSDGVPSYRQQIDPLLKARQQYAYGRQHDYFDHWDVIGWTREGNASHPNSGLATIMSDGPGGSKWMYVGRQKAGEVWHDMTGNRSGTVTINQDGWGHFFVNGGSVSVWVKR

SEQ ID NO: 33132 - protein, 485 aa, Bacillus sp.
HHDGTNGTIMQYFEWNVPNDGQHWNRLHNNAQNLKNAGITAIWIPPAWKGTSQNDVGYGAYDLYDLGEFNQKGTVRTKYGTKAELERAIRSLKANGIQVYGDVVMNHKGGADFTERVQAVEVNPQNRNQEVSGTYQIEAWTGFNFPGRGNQHSSFKWRWYHFDGTDWDQSRQLANRIYKFRGDGKAWDWEVDTENGNYDYQLLADVDMDHPEVINELNRWGVWYANTLNLDGFRLDAVKHIKFSFMRDWLGHVRGQTGKNLFAVAEYWKNDLGALENYLSKTNWTMSAFDVPLHYNLYQASNSSGNYDMRNLLNGTLVQRHPSHAVTFVDNHDTQPGEALESFVQGWFKPLAYATILTREQGYPQVFYGDYYGIPSDGVPSYRQQIDPLLKARQQYAYGRQHDYFDHWDVIGWTREGNASHPNSGLATIMSDGPGGSKWMYVGRQKAGEVWHDMTGNRSGTVTINQDGWGHFFVNGGSVSVWVKR

SEQ ID NO: 33133 - protein, 485 aa, Bacillus sp.
HHDGTNGTIMQYFEWNVPNDGQHWNRLHNNAQNLKNAGITAIWIPPAWKGTSQNDVGYGAYDLYDLGEFNQKGTVRTKYGTKAELERAIRSLKANGIQVYGDVVMNHKGGADFTERVQAVEVNPQNRNQEVSGTYQIEAWTGFNFPGRGNQHSSFKWRWYHFDGTDWDQSRQLANRIYKFRGDGKAWDWEVDTENGNYDWLLEADVDMDHPEVINELNRWGVWYANTLNLDGFRLDAVKHIKFSFMRDWLGHVRGQTGKNLFAVAEYWKNDLGALENYLSKTNWTMSAFDVPLHYNLYQASNSSGNYDMRNLLNGTLVQRHPSHAVTFVDNHDTQPGEALESFVQGWFKPLAYATILTREQGYPQVFYGDYYGIPSDGVPSYRQQIDPLLKARQQYAYGRQHDYFDHWDVIGWTREGNASHPNSGLATIMSDGPGGSKWMYVGRQKAGEVWHDMTGNRSGTVTINQDGWGHFFVNGGSVSVWVKR

SEQ ID NO: 33134 - protein, 485 aa, Bacillus sp.
HHDGTNGTIMQYFEWNVPNDGQHWNRLHNNAQNLKNAGITAIWIPPAWKGTSQNDVGYGAYDLYDLGEFNQKGTVRTKYGTKAELERAIRSLKANGIQVYGDVVMNHKGGADFTERVQAVEVNPQNRNQEVSGTYQIEAWTGFNFPGRGNQHSSFKWRWYHFDGTDWDQSRQLANRIYKFRGDGKAWDWEVDTENGNYDNLPRADVDMDHPEVINELNRWGVWYANTLNLDGFRLDAVKHIKFSFMRDWLGHVRGQTGKNLFAVAEYWKNDLGALENYLSKTNWTMSAFDVPLHYNLYQASNSSGNYDMRNLLNGTLVQRHPSHAVTFVDNHDTQPGEALESFVQGWFKPLAYATILTREQGYPQVFYGDYYGIPSDGVPSYRQQIDPLLKARQQYAYGRQHDYFDHWDVIGWTREGNASHPNSGLATIMSDGPGGSKWMYVGRQKAGEVWHDMTGNRSGTVTINQDGWGHFFVNGGSVSVWVKR

SEQ ID NO: 33135 - protein, 485 aa, Bacillus sp.
HHDGTNGTIMQYFEWNVPNDGQHWNRLHNNAQNLKNAGITAIWIPPAWKGTSQNDVGYGAYDLYDLGEFNQKGTVRTKYGTKAELERAIRSLKANGIQVYGDVVMNHKGGADFTERVQAVEVNPQNRNQEVSGTYQIEAWTGFNFPGRGNQHSSFKWRWYHFDGTDWDQSRQLANRIYKFRGDGKAWDWEVDTENGNYDNLLWADVDMDHPEVINELNRWGVWYANTLNLDGFRLDAVKHIKFSFMRDWLGHVRGQTGKNLFAVAEYWKNDLGALENYLSKTNWTMSAFDVPLHYNLYQASNSSGNYDMRNLLNGTLVQRHPSHAVTFVDNHDTQPGEALESFVQGWFKPLAYATILTREQGYPQVFYGDYYGIPSDGVPSYRQQIDPLLKARQQYAYGRQHDYFDHWDVIGWTREGNASHPNSGLATIMSDGPGGSKWMYVGRQKAGEVWHDMTGNRSGTVTINQDGWGHFFVNGGSVSVWVKR

SEQ ID NO: 33136 - protein, 485 aa, Bacillus sp.
HHDGTNGTIMQYFEWNVPNDGQHWNRLHNNAQNLKNAGITAIWIPPAWKGTSQNDVGYGAYDLYDLGEFNQKGTVRTKYGTKAELERAIRSLKANGIQVYGDVVMNHKGGADFTERVQAVEVNPQNRNQEVSGTYQIEAWTGFNFPGRGNQHSSFKWRWYHFDGTDWDQSRQLANRIYKFRGDGKAWDWEVDTENGNYDYRNSADVDMDHPEVINELNRWGVWYANTLNLDGFRLDAVKHIKFSFMRDWLGHVRGQTGKNLFAVAEYWKNDLGALENYLSKTNWTMSAFDVPLHYNLYQASNSSGNYDMRNLLNGTLVQRHPSHAVTFVDNHDTQPGEALESFVQGWFKPLAYATILTREQGYPQVFYGDYYGIPSDGVPSYRQQIDPLLKARQQYAYGRQHDYFDHWDVIGWTREGNASHPNSGLATIMSDGPGGSKWMYVGRQKAGEVWHDMTGNRSGTVTINQDGWGHFFVNGGSVSVWVKR

SEQ ID NO: 33137 - protein, 485 aa, Bacillus sp.
HHDGTNGTIMQYFEWNVPNDGQHWNRLHNNAQNLKNAGITAIWIPPAWKGTSQNDVGYGAYDLYDLGEFNQKGTVRTKYGTKAELERAIRSLKANGIQVYGDVVMNHKGGADFTERVQAVEVNPQNRNQEVSGTYQIEAWTGFNFPGRGNQHSSFKWRWYHFDGTDWDQSRQLANRIYKFRGDGKAWDWEVDTENGNYDYYLRADVDMDHPEVINELNRWGVWYANTLNLDGFRLDAVKHIKFSFMRDWLGHVRGQTGKNLFAVAEYWKNDLGALENYLSKTNWTMSAFDVPLHYNLYQASNSSGNYDMRNLLNGTLVQRHPSHAVTFVDNHDTQPGEALESFVQGWFKPLAYATILTREQGYPQVFYGDYYGIPSDGVPSYRQQIDPLLKARQQYAYGRQHDYFDHWDVIGWTREGNASHPNSGLATIMSDGPGGSKWMYVGRQKAGEVWHDMTGNRSGTVTINQDGWGHFFVNGGSVSVWVKR

SEQ ID NO: 33138 - protein, 485 aa, Bacillus sp.
HHDGTNGTIMQYFEWNVPNDGQHWNRLHNNAQNLKNAGITAIWIPPAWKGTSQNDVGYGAYDLYDLGEFNQKGTVRTKYGTKAELERAIRSLKANGIQVYGDVVMNHKGGADFTERVQAVEVNPQNRNQEVSGTYQIEAWTGFNFPGRGNQHSSFKWRWYHFDGTDWDQSRQLANRIYKFRGDGKAWDWEVDTENGNYDYRLNADVDMDHPEVINELNRWGVWYANTLNLDGFRLDAVKHIKFSFMRDWLGHVRGQTGKNLFAVAEYWKNDLGALENYLSKTNWTMSAFDVPLHYNLYQASNSSGNYDMRNLLNGTLVQRHPSHAVTFVDNHDTQPGEALESFVQGWFKPLAYATILTREQGYPQVFYGDYYGIPSDGVPSYRQQIDPLLKARQQYAYGRQHDYFDHWDVIGWTREGNASHPNSGLATIMSDGPGGSKWMYVGRQKAGEVWHDMTGNRSGTVTINQDGWGHFFVNGGSVSVWVKR

SEQ ID NO: 33139 - protein, 485 aa, Bacillus sp.
HHDGTNGTIMQYFEWNVPNDGQHWNRLHNNAQNLKNAGITAIWIPPAWKGTSQNDVGYGAYDLYDLGEFNQKGTVRTKYGTKAELERAIRSLKANGIQVYGDVVMNHKGGADFTERVQAVEVNPQNRNQEVSGTYQIEAWTGFNFPGRGNQHSSFKWRWYHFDGTDWDQSRQLANRIYKFRGDGKAWDWEVDTENGNYDYQLAADVDMDHPEVINELNRWGVWYANTLNLDGFRLDAVKHIKFSFMRDWLGHVRGQTGKNLFAVAEYWKNDLGALENYLSKTNWTMSAFDVPLHYNLYQASNSSGNYDMRNLLNGTLVQRHPSHAVTFVDNHDTQPGEALESFVQGWFKPLAYATILTREQGYPQVFYGDYYGIPSDGVPSYRQQIDPLLKARQQYAYGRQHDYFDHWDVIGWTREGNASHPNSGLATIMSDGPGGSKWMYVGRQKAGEVWHDMTGNRSGTVTINQDGWGHFFVNGGSVSVWVKR

SEQ ID NO: 33140 - protein, 483 aa, Bacillus sp.
HHDGTNGTIMQYFEWNVPNDGQHWNRLHNNAQNLKNAGITAIWIPPAWKGTSQNDVGYGAYDLYDLGEFNQKGTVRTKYGTKAELERAIRSLKANGIQVYGDVVMNHKGGADFTERVQAVEVNPQNRNQEVSGTYEIEAWTGFNFPGRGNQHSSFKWRWYHFDGTDWDQSRQLSNRIYKFDGKAWDWEVDTENGNYDYLMYADXDMNHPEVINELNRWGVWYANTLNLDGFRLDAVKHIQFSFMRNWLGHVRGQTGKNLFAVAEYWKNDLGALENYLSKTNWTMSAFDVPLHYNLYQASNSGGNYDMRNLLNGTLVQRHPSHAVTFVDNHDTQPGEALESFVQGWFKPLAYATILTREQGYPQVFYGDYYGIPSDGVPSYRQQIDPLLKARQQYAYGRQHDYFDHWDVIGWTREGNASHPNSGLATIMSDGPGGSKWMYVGRQKAGEVWHDITGNRSGTVTINQDGWGQFFVNGGSVSVWVKR

SEQ ID NO: 33141 - protein, 485 aa, Bacillus sp.
HHDGTNGTIMQYFEWNVPNDGQHWNRLHNNAQNLKNAGITAIWIPPAWKGTSQNDVGYGAYDLYDLGEFNQKGTVRTKYGTKAELERAIRSLKANGIQVYGDVVMNHKGGADFTERVQAVEVNPQNRNQEVSGTYQIEAWTGFNFPGRGNQHSSFKWRWYHFDGTDWDQSRQLANRIYKFRGDGKAWDWEVDTENGNYDPLKFADVDMDHPEVINELNRWGVWYANTLNLDGFRLDAVKHIKFSFMRDWLGHVRGQTGKNLFAVAEYWKNDLGALENYLSKTNWTMSAFDVPLHYNLYQASNSSGNYDMRNLLNGTLVQRHPSHAVTFVDNHDTQPGEALESFVQGWFKPLAYATILTREQGYPQVFYGDYYGIPSDGVPSYRQQIDPLLKARQQYAYGRQHDYFDHWDVIGWTREGNASHPNSGLATIMSDGPGGSKWMYVGRQKAGEVWHDMTGNRSGTVTINQDGWGHFFVNGGSVSVWVKR

SEQ ID NO: 33142 - protein, 485 aa, Bacillus sp.
HHDGTNGTIMQYFEWNVPNDGQHWNRLHNNAQNLKNAGITAIWIPPAWKGTSQNDVGYGAYDLYDLGEFNQKGTVRTKYGTKAELERAIRSLKANGIQVYGDVVMNHKGGADFTERVQAVEVNPQNRNQEVSGTYQIEAWTGFNFPGRGNQHSSFKWRWYHFDGTDWDQSRQLANRIYKFRGDGKAWDWEVDTENGNYDYHHEADVDMDHPEVINELNRWGVWYANTLNLDGFRLDAVKHIKFSFMRDWLGHVRGQTGKNLFAVAEYWKNDLGALENYLSKTNWTMSAFDVPLHYNLYQASNSSGNYDMRNLLNGTLVQRHPSHAVTFVDNHDTQPGEALESFVQGWFKPLAYATILTREQGYPQVFYGDYYGIPSDGVPSYRQQIDPLLKARQQYAYGRQHDYFDHWDVIGWTREGNASHPNSGLATIMSDGPGGSKWMYVGRQKAGEVWHDMTGNRSGTVTINQDGWGHFFVNGGSVSVWVKR

SEQ ID NO: 33143 - protein, 485 aa, Bacillus sp.
HHDGTNGTIMQYFEWNVPNDGQHWNRLHNNAQNLKNAGITAIWIPPAWKGTSQNDVGYGAYDLYDLGEFNQKGTVRTKYGTKAELERAIRSLKANGIQVYGDVVMNHKGGADFTERVQAVEVNPQNRNQEVSGTYQIEAWTGFNFPGRGNQHSSFKWRWYHFDGTDWDQSRQLANRIYKFRGDGKAWDWEVDTENGNYDWLLKADVDMDHPEVINELNRWGVWYANTLNLDGFRLDAVKHIKFSFMRDWLGHVRGQTGKNLFAVAEYWKNDLGALENYLSKTNWTMSAFDVPLHYNLYQASNSSGNYDMRNLLNGTLVQRHPSHAVTFVDNHDTQPGEALESFVQGWFKPLAYATILTREQGYPQVFYGDYYGIPSDGVPSYRQQIDPLLKARQQYAYGRQHDYFDHWDVIGWTREGNASHPNSGLATIMSDGPGGSKWMYVGRQKAGEVWHDMTGNRSGTVTINQDGWGHFFVNGGSVSVWVKR

SEQ ID NO: 33144 - protein, 485 aa, Bacillus sp.
HHDGTNGTIMQYFEWNVPNDGQHWNRLHNNAQNLKNAGITAIWIPPAWKGTSQNDVGYGAYDLYDLGEFNQKGTVRTKYGTKAELERAIRSLKANGIQVYGDVVMNHKGGADFTERVQAVEVNPQNRNQEVSGTYQIEAWTGFNFPGRGNQHSSFKWRWYHFDGTDWDQSRQLANRIYKFRGDGKAWDWEVDTENGNYDPLLHADVDMDHPEVINELNRWGVWYANTLNLDGFRLDAVKHIKFSFMRDWLGHVRGQTGKNLFAVAEYWKNDLGALENYLSKTNWTMSAFDVPLHYNLYQASNSSGNYDMRNLLNGTLVQRHPSHAVTFVDNHDTQPGEALESFVQGWFKPLAYATILTREQGYPQVFYGDYYGIPSDGVPSYRQQIDPLLKARQQYAYGRQHDYFDHWDVIGWTREGNASHPNSGLATIMSDGPGGSKWMYVGRQKAGEVWHDMTGNRSGTVTINQDGWGHFFVNGGSVSVWVKR

SEQ ID NO: 33145 - protein, 485 aa, Bacillus sp.
HHDGTNGTIMQYFEWNVPNDGQHWNRLHNNAQNLKNAGITAIWIPPAWKGTSQNDVGYGAYDLYDLGEFNQKGTVRTKYGTKAELERAIRSLKANGIQVYGDVVMNHKGGADFTERVQAVEVNPQNRNQEVSGTYQIEAWTGFNFPGRGNQHSSFKWRWYHFDGTDWDQSRQLANRIYKFRGDGKAWDWEVDTENGNYDQLYPADVDMDHPEVINELNRWGVWYANTLNLDGFRLDAVKHIKFSFMRDWLGHVRGQTGKNLFAVAEYWKNDLGALENYLSKTNWTMSAFDVPLHYNLYQASNSSGNYDMRNLLNGTLVQRHPSHAVTFVDNHDTQPGEALESFVQGWFKPLAYATILTREQGYPQVFYGDYYGIPSDGVPSYRQQIDPLLKARQQYAYGRQHDYFDHWDVIGWTREGNASHPNSGLATIMSDGPGGSKWMYVGRQKAGEVWHDMTGNRSGTVTINQDGWGHFFVNGGSVSVWVKR

SEQ ID NO: 33146 - protein, 485 aa, Bacillus sp.
HHDGTNGTIMQYFEWNVPNDGQHWNRLHNNAQNLKNAGITAIWIPPAWKGTSQNDVGYGAYDLYDLGEFNQKGTVRTKYGTKAELERAIRSLKANGIQVYGDVVMNHKGGADFTERVQAVEVNPQNRNQEVSGTYQIEAWTGFNFPGRGNQHSSFKWRWYHFDGTDWDQSRQLANRIYKFRGDGKAWDWEVDTENGNYDIELYADVDMDHPEVINELNRWGVWYANTLNLDGFRLDAVKHIKFSFMRDWLGHVRGQTGKNLFAVAEYWKNDLGALENYLSKTNWTMSAFDVPLHYNLYQASNSSGNYDMRNLLNGTLVQRHPSHAVTFVDNHDTQPGEALESFVQGWFKPLAYATILTREQGYPQVFYGDYYGIPSDGVPSYRQQIDPLLKARQQYAYGRQHDYFDHWDVIGWTREGNASHPNSGLATIMSDGPGGSKWMYVGRQKAGEVWHDMTGNRSGTVTINQDGWGHFFVNGGSVSVWVKR

SEQ ID NO: 33147 - protein, 485 aa, Bacillus sp.
HHDGTNGTIMQYFEWNVPNDGQHWNRLHNNAQNLKNAGITAIWIPPAWKGTSQNDVGYGAYDLYDLGEFNQKGTVRTKYGTKAELERAIRSLKANGIQVYGDVVMNHKGGADFTERVQAVEVNPQNRNQEVSGTYQIEAWTGFNFPGRGNQHSSFKWRWYHFDGTDWDQSRQLANRIYKFRGDGKAWDWEVDTENGNYDYHLSADVDMDHPEVINELNRWGVWYANTLNLDGFRLDAVKHIKFSFMRDWLGHVRGQTGKNLFAVAEYWKNDLGALENYLSKTNWTMSAFDVPLHYNLYQASNSSGNYDMRNLLNGTLVQRHPSHAVTFVDNHDTQPGEALESFVQGWFKPLAYATILTREQGYPQVFYGDYYGIPSDGVPSYRQQIDPLLKARQQYAYGRQHDYFDHWDVIGWTREGNASHPNSGLATIMSDGPGGSKWMYVGRQKAGEVWHDMTGNRSGTVTINQDGWGHFFVNGGSVSVWVKR

SEQ ID NO: 33148 - protein, 485 aa, Bacillus sp.
HHDGTNGTIMQYFEWNVPNDGQHWNRLHNNAQNLKNAGITAIWIPPAWKGTSQNDVGYGAYDLYDLGEFNQKGTVRTKYGTKAELERAIRSLKANGIQVYGDVVMNHKGGADFTERVQAVEVNPQNRNQEVSGTYQIEAWTGFNFPGRGNQHSSFKWRWYHFDGTDWDQSRQLANRIYKFRGDGKAWDWEVDTENGNYDQLDHADVDMDHPEVINELNRWGVWYANTLNLDGFRLDAVKHIKFSFMRDWLGHVRGQTGKNLFAVAEYWKNDLGALENYLSKTNWTMSAFDVPLHYNLYQASNSSGNYDMRNLLNGTLVQRHPSHAVTFVDNHDTQPGEALESFVQGWFKPLAYATILTREQGYPQVFYGDYYGIPSDGVPSYRQQIDPLLKARQQYAYGRQHDYFDHWDVIGWTREGNASHPNSGLATIMSDGPGGSKWMYVGRQKAGEVWHDMTGNRSGTVTINQDGWGHFFVNGGSVSVWVKR

SEQ ID NO: 33149 - protein, 485 aa, Bacillus sp.
HHDGTNGTIMQYFEWNVPNDGQHWNRLHNNAQNLKNAGITAIWIPPAWKGTSQNDVGYGAYDLYDLGEFNQKGTVRTKYGTKAELERAIRSLKANGIQVYGDVVMNHKGGADFTERVQAVEVNPQNRNQEVSGTYEIEAWTGFNFPGRGNQHSSFKWRWYHFDGTDWDQSRQLSNRIYKFRGDGKAWDWEVDTENGNYDYLMYADVDMNHPXVINELNRWGVWYANTLNLDGFRLDAVKHIQFSFMRNWLGHVRGQTGKNLFAVAEYWXNDLGALENYLSKTNWTMSAFDVPLHYNLYQASNSGGNYDMRNLLNGTLVQRHPSHAVTFVDNHDTQPGEALESFVQGWFKPLAYATILTREQGYPQVFYGDYYGIPSDGVPSYRQQIDPLLKARQQYAYGRQHDYFDHWDVIGWTREGNASHPNSGLATIMSDGPGGSKWMYVGRQKAGEVWHDITGNRSGTVTINQDGWGQFFVNGGSVSVWVKR

SEQ ID NO: 33150 - protein, 485 aa, Bacillus sp.
HHDGTNGTIMQYFEWNVPNDGQHWNRLHNNAQNLKNAGITAIWIPPAWKGTSQNDVGYGAYDLYDLGEFNQKGTVRTKYGTKAELERAIRSLKANGIQVYGDVVMNHKGGADFTERVQAVEVNPQNRNQEVSGTYQIEAWTGFNFPGRGNQHSSFKWRWYHFDGTDWDQSRQLANRIYKFRGDGKAWDWEVDTENGNYDTRLYADVDMDHPEVINELNRWGVWYANTLNLDGFRLDAVKHIKFSFMRDWLGHVRGQTGKNLFAVAEYWKNDLGALENYLSKTNWTMSAFDVPLHYNLYQASNSSGNYDMRNLLNGTLVQRHPSHAVTFVDNHDTQPGEALESFVQGWFKPLAYATILTREQGYPQVFYGDYYGIPSDGVPSYRQQIDPLLKARQQYAYGRQHDYFDHWDVIGWTREGNASHPNSGLATIMSDGPGGSKWMYVGRQKAGEVWHDMTGNRSGTVTINQDGWGHFFVNGGSVSVWVKR

SEQ ID NO: 33151 - protein, 485 aa, Bacillus sp.
HHDGTNGTIMQYFEWNVPNDGQHWNRLHNNAQNLKNAGITAIWIPPAWKGTSQNDVGYGAYDLYDLGEFNQKGTVRTKYGTKAELERAIRSLKANGIQVYGDVVMNHKGGADFTERVQAVEVNPQNRNQEVSGTYQIEAWTGFNFPGRGNQHSSFKWRWYHFDGTDWDQSRQLANRIYKFRGDGKAWDWEVDTENGNYDYRPSADVDMDHPEVINELNRWGVWYANTLNLDGFRLDAVKHIKFSFMRDWLGHVRGQTGKNLFAVAEYWKNDLGALENYLSKTNWTMSAFDVPLHYNLYQASNSSGNYDMRNLLNGTLVQRHPSHAVTFVDNHDTQPGEALESFVQGWFKPLAYATILTREQGYPQVFYGDYYGIPSDGVPSYRQQIDPLLKARQQYAYGRQHDYFDHWDVIGWTREGNASHPNSGLATIMSDGPGGSKWMYVGRQKAGEVWHDMTGNRSGTVTINQDGWGHFFVNGGSVSVWVKR

SEQ ID NO: 33152 - protein, 485 aa, Bacillus sp.
HHDGTNGTIMQYFEWNVPNDGQHWNRLHNNAQNLKNAGITAIWIPPAWKGTSQNDVGYGAYDLYDLGEFNQKGTVRTKYGTKAELERAIRSLKANGIQVYGDVVMNHKGGADFTERVQAVEVNPQNRNQEVSGTYQIEAWTGFNFPGRGNQHSSFKWRWYHFDGTDWDQSRQLANRIYKFRGDGKAWDWEVDTENGNYDIWLYADVDMDHPEVINELNRWGVWYANTLNLDGFRLDAVKHIKFSFMRDWLGHVRGQTGKNLFAVAEYWKNDLGALENYLSKTNWTMSAFDVPLHYNLYQASNSSGNYDMRNLLNGTLVQRHPSHAVTFVDNHDTQPGEALESFVQGWFKPLAYATILTREQGYPQVFYGDYYGIPSDGVPSYRQQIDPLLKARQQYAYGRQHDYFDHWDVIGWTREGNASHPNSGLATIMSDGPGGSKWMYVGRQKAGEVWHDMTGNRSGTVTINQDGWGHFFVNGGSVSVWVKR

SEQ ID NO: 33153 - protein, 485 aa, Bacillus sp.
HHDGTNGTIMQYFEWNVPNDGQHWNRLHNNAQNLKNAGITAIWIPPAWKGTSQNDVGYGAYDLYDLGEFNQKGTVRTKYGTKAELERAIRSLKANGIQVYGDVVMNHKGGADFTERVQAVEVNPQNRNQEVSGTYEIEAWTGFNFPGRGNQHSSFKWRWYHFDGTDWDQSRQLSNRIYKFRGDGKAWDWEVDTEXGNYDYLMYADVDMNHPXVINELNRWGVWYANTLNLDGFRLDAVKHIQFSFMRNWLGHVRGQTGKNLFAVAEYWKNDLGALENYLSKTNWTMSAFDVPLHYNLYQASNSGGNYDMRNLLNGTLVQRHPSHAVTFVDNHDTQPGEALESFVQGWFKPLAYATILTREQGYPQVFYGDYYGIPSDGVPSYRQQIDPLLKARQQYAYGRQHDYFDHWDVIGWTREGNASHPNSGLATIMSDGPGGSKWMYVGRQKAGEVWHDITGNRSGTVTINQDGWGQFFVNGGSVSVWVKR

SEQ ID NO: 33154 - protein, 485 aa, Bacillus sp.
HHDGTNGTIMQYFEWNVPNDGQHWNRLHNNAQNLKNAGITAIWIPPAWKGTSQNDVGYGAYDLYDLGEFNQKGTVRTKYGTKAELERAIRSLKANGIQVYGDVVMNHKGGADFTERVQAVEVNPQNRNQEVSGTYQIEAWTGFNFPGRGNQHSSFKWRWYHFDGTDWDQSRQLANRIYKFRGDGKAWDWEVDTENGNYDPLLFADVDMDHPEVINELNRWGVWYANTLNLDGFRLDAVKHIKFSFMRDWLGHVRGQTGKNLFAVAEYWKNDLGALENYLSKTNWTMSAFDVPLHYNLYQASNSSGNYDMRNLLNGTLVQRHPSHAVTFVDNHDTQPGEALESFVQGWFKPLAYATILTREQGYPQVFYGDYYGIPSDGVPSYRQQIDPLLKARQQYAYGRQHDYFDHWDVIGWTREGNASHPNSGLATIMSDGPGGSKWMYVGRQKAGEVWHDMTGNRSGTVTINQDGWGHFFVNGGSVSVWVKR

SEQ ID NO: 33155 - protein, 485 aa, Bacillus sp.
HHDGTNGTIMQYFEWNVPNDGQHWNRLHNNAQNLKNAGITAIWIPPAWKGTSQNDVGYGAYDLYDLGEFNQKGTVRTKYGTKAELERAIRSLKANGIQVYGDVVMNHKGGADFTERVQAVEVNPQNRNQEVSGTYQIEAWTGFNFPGRGNQHSSFKWRWYHFDGTDWDQSRQLANRIYKFRGDGKAWDWEVDTENGNYDYQNPADVDMDHPEVINELNRWGVWYANTLNLDGFRLDAVKHIKFSFMRDWLGHVRGQTGKNLFAVAEYWKNDLGALENYLSKTNWTMSAFDVPLHYNLYQASNSSGNYDMRNLLNGTLVQRHPSHAVTFVDNHDTQPGEALESFVQGWFKPLAYATILTREQGYPQVFYGDYYGIPSDGVPSYRQQIDPLLKARQQYAYGRQHDYFDHWDVIGWTREGNASHPNSGLATIMSDGPGGSKWMYVGRQKAGEVWHDMTGNRSGTVTINQDGWGHFFVNGGSVSVWVKR

SEQ ID NO: 33156 - protein, 485 aa, Bacillus sp.
HHDGTNGTIMQYFEWNVPNDGQHWNRLHNNAQNLKNAGITAIWIPPAWKGTSQNDVGYGAYDLYDLGEFNQKGTVRTKYGTKAELERAIRSLKANGIQVYGDVVMNHKGGADFTERVQAVEVNPQNRNQEVSGTYQIEAWTGFNFPGRGNQHSSFKWRWYHFDGTDWDQSRQLANRIYKFRGDGKAWDWEVDTENGNYDYELLADVDMDHPEVINELNRWGVWYANTLNLDGFRLDAVKHIKFSFMRDWLGHVRGQTGKNLFAVAEYWKNDLGALENYLSKTNWTMSAFDVPLHYNLYQASNSSGNYDMRNLLNGTLVQRHPSHAVTFVDNHDTQPGEALESFVQGWFKPLAYATILTREQGYPQVFYGDYYGIPSDGVPSYRQQIDPLLKARQQYAYGRQHDYFDHWDVIGWTREGNASHPNSGLATIMSDGPGGSKWMYVGRQKAGEVWHDMTGNRSGTVTINQDGWGHFFVNGGSVSVWVKR

SEQ ID NO: 33157 - protein, 485 aa, Bacillus sp.
HHDGTNGTIMQYFEWNVPNDGQHWNRLHNNAQNLKNAGITAIWIPPAWKGTSQNDVGYGAYDLYDLGEFNQKGTVRTKYGTKAELERAIRSLKANGIQVYGDVVMNHKGGADFTERVQAVEVNPQNRNQEVSGTYEIEAWTGFNFPGRGNQHSSFKWRWYHFDGTDWDQSRQLSNRIYKFRGDGKAWDWEVDTENGNYDYLMYADVDMNHPXVINXLNRWGVWYANTLNLDGFRLDAVKHIQFSFMRNWLGHVRGQTGKNLFAVAEYWKNDLGALENYLSKTNWTMSAFDVPLHYNLYQASNSGGNYDMRNLLNGTLVQRHPSHAVTFVDNHDTQPGEALESFVQGWFKPLAYATILTREQGYPQVFYGDYYGIPSDGVPSYRQQIDPLLKARQQYAYGRQHDYFDHWDVIGWTREGNASHPNSGLATIMSDGPGGSKWMYVGRQKAGEVWHDITGNRSGTVTINQDGWGQFFVNGGSVSVWVKR

SEQ ID NO: 33158 - protein, 485 aa, Bacillus sp.
HHDGTNGTIMQYFEWNVPNDGQHWNRLHNNAQNLKNAGITAIWIPPAWKGTSQNDVGYGAYDLYDLGEFNQKGTVRTKYGTKAELERAIRSLKANGIQVYGDVVMNHKGGADFTERVQAVEVNPQNRNQEVSGTYQIEAWTGFNFPGRGNQHSSFKWRWYHFDGTDWDQSRQLANRIYKFRGDGKAWDWEVDTENGNYDWLPSADVDMDHPEVINELNRWGVWYANTLNLDGFRLDAVKHIKFSFMRDWLGHVRGQTGKNLFAVAEYWKNDLGALENYLSKTNWTMSAFDVPLHYNLYQASNSSGNYDMRNLLNGTLVQRHPSHAVTFVDNHDTQPGEALESFVQGWFKPLAYATILTREQGYPQVFYGDYYGIPSDGVPSYRQQIDPLLKARQQYAYGRQHDYFDHWDVIGWTREGNASHPNSGLATIMSDGPGGSKWMYVGRQKAGEVWHDMTGNRSGTVTINQDGWGHFFVNGGSVSVWVKR

SEQ ID NO: 33159 - protein, 483 aa, Bacillus sp. (in: firmicutes)
HHDGTNGTIMQYFEWNVPNDGQHWNRLHNNAQNLKNAGITAIWIPPAWKGTSQNDVGYGAYDLYDLGEFNQKGTVRTKYGTKAELERAIRSLKANGIQVYGDVVMNHKGGADFTERVQAVEVNPQNRNQEVSGTYQIEAWTGFNFPGRGNQHSSFKWRWYHFDGTDWDQSRQLANRIYKFRGKAWDWEVDTENGNYDYLMYADVDMDHPEVINELNRWGVWYANTLNLDGFRLDAVKHIKFSFMRDWLGHVRGQTGKNLFATGEFWKNDLGALENYLSKTNWTMSAFDAPLHYNLYQASNSSGNYDMRNLLNGTLVQRHPSHAVTLVDNHDTQPGEALESFVQGWFKPLAYATILTREQGYPCVFYGDYYGIPSDGVPSYRQQIDPLLKARQQYAYGRQHDYFDHWDVIGWTREGNASHPNSGLATIMSDGPGGSKWMYVGRQKAGEVWHDMTGNRSGTVTINQDGWGHFFVNGGSVSVWVKR

SEQ ID NO: 33160 - protein, 485 aa, Bacillus sp.
HHDGTNGTIMQYFEWNVPNDGQHWNRLHNNAQNLKNAGITAIWIPPAWKGTSQNDVGYGAYDLYDLGEFNQKGTVRTKYGTKAELERAIRSLKANGIQVYGDVVMNHKGGADFTERVQAVEVNPQNRNQEVSGTYQIEAWTGFNFPGRGNQHSSFKWRWYHFDGTDWDQSRQLANRIYKFRGDGKAWDWEVDTENGNYDKLPHADVDMDHPEVINELNRWGVWYANTLNLDGFRLDAVKHIKFSFMRDWLGHVRGQTGKNLFAVAEYWKNDLGALENYLSKTNWTMSAFDVPLHYNLYQASNSSGNYDMRNLLNGTLVQRHPSHAVTFVDNHDTQPGEALESFVQGWFKPLAYATILTREQGYPQVFYGDYYGIPSDGVPSYRQQIDPLLKARQQYAYGRQHDYFDHWDVIGWTREGNASHPNSGLATIMSDGPGGSKWMYVGRQKAGEVWHDMTGNRSGTVTINQDGWGHFFVNGGSVSVWVKR

SEQ ID NO: 33161 - protein, 485 aa, Bacillus sp.
HHDGTNGTIMQYFEWNVPNDGQHWNRLHNNAQNLKNAGITAIWIPPAWKGTSQNDVGYGAYDLYDLGEFNQKGTVRTKYGTKAELERAIRSLKANGIQVYGDVVMNHKGGADFTERVQAVEVNPQNRNQEVSGTYQIEAWTGFNFPGRGNQHSSFKWRWYHFDGTDWDQSRQLANRIYKFRGDGKAWDWEVDTENGNYDYWPEADVDMDHPEVINELNRWGVWYANTLNLDGFRLDAVKHIKFSFMRDWLGHVRGQTGKNLFAVAEYWKNDLGALENYLSKTNWTMSAFDVPLHYNLYQASNSSGNYDMRNLLNGTLVQRHPSHAVTFVDNHDTQPGEALESFVQGWFKPLAYATILTREQGYPQVFYGDYYGIPSDGVPSYRQQIDPLLKARQQYAYGRQHDYFDHWDVIGWTREGNASHPNSGLATIMSDGPGGSKWMYVGRQKAGEVWHDMTGNRSGTVTINQDGWGHFFVNGGSVSVWVKR

SEQ ID NO: 33162 - protein, 485 aa, Bacillus sp.
HHDGTNGTIMQYFEWNVPNDGQHWNRLHNNAQNLKNAGITAIWIPPAWKGTSQNDVGYGAYDLYDLGEFNQKGTVRTKYGTKAELERAIRSLKANGIQVYGDVVMNHKGGADFTERVQAVEVNPQNRNQEVSGTYQIEAWTGFNFPGRGNQHSSFKWRWYHFDGTDWDQSRQLANRIYKFRGDGKAWDWEVDTENGNYDWLPFADVDMDHPEVINELNRWGVWYANTLNLDGFRLDAVKHIKFSFMRDWLGHVRGQTGKNLFAVAEYWKNDLGALENYLSKTNWTMSAFDVPLHYNLYQASNSSGNYDMRNLLNGTLVQRHPSHAVTFVDNHDTQPGEALESFVQGWFKPLAYATILTREQGYPQVFYGDYYGIPSDGVPSYRQQIDPLLKARQQYAYGRQHDYFDHWDVIGWTREGNASHPNSGLATIMSDGPGGSKWMYVGRQKAGEVWHDMTGNRSGTVTINQDGWGHFFVNGGSVSVWVKR

SEQ ID NO: 33163 - protein, 485 aa, Bacillus sp.
HHDGTNGTIMQYFEWNVPNDGQHWNRLHNNAQNLKNAGITAIWIPPAWKGTSQNDVGYGAYDLYDLGEFNQKGTVRTKYGTKAELERAIRSLKANGIQVYGDVVMNHKGGADFTERVQAVEVNPQNRNQEVSGTYQIEAWTGFNFPGRGNQHSSFKWRWYHFDGTDWDQSRQLANRIYKFRGDGKAWDWEVDTENGNYDQLPNADVDMDHPEVINELNRWGVWYANTLNLDGFRLDAVKHIKFSFMRDWLGHVRGQTGKNLFAVAEYWKNDLGALENYLSKTNWTMSAFDVPLHYNLYQASNSSGNYDMRNLLNGTLVQRHPSHAVTFVDNHDTQPGEALESFVQGWFKPLAYATILTREQGYPQVFYGDYYGIPSDGVPSYRQQIDPLLKARQQYAYGRQHDYFDHWDVIGWTREGNASHPNSGLATIMSDGPGGSKWMYVGRQKAGEVWHDMTGNRSGTVTINQDGWGHFFVNGGSVSVWVKR

SEQ ID NO: 33164 - protein, 485 aa, Bacillus sp.
HHDGTNGTIMQYFEWNVPNDGQHWNRLHNNAQNLKNAGITAIWIPPAWKGTSQNDVGYGAYDLYDLGEFNQKGTVRTKYGTKAELERAIRSLKANGIQVYGDVVMNHKGGADFTERVQAVEVNPQNRNQEVSGTYQIEAWTGFNFPGRGNQHSSFKWRWYHFDGTDWDQSRQLANRIYKFRGDGKAWDWEVDTENGNYDYWLTADVDMDHPEVINELNRWGVWYANTLNLDGFRLDAVKHIKFSFMRDWLGHVRGQTGKNLFAVAEYWKNDLGALENYLSKTNWTMSAFDVPLHYNLYQASNSSGNYDMRNLLNGTLVQRHPSHAVTFVDNHDTQPGEALESFVQGWFKPLAYATILTREQGYPQVFYGDYYGIPSDGVPSYRQQIDPLLKARQQYAYGRQHDYFDHWDVIGWTREGNASHPNSGLATIMSDGPGGSKWMYVGRQKAGEVWHDMTGNRSGTVTINQDGWGHFFVNGGSVSVWVKR

SEQ ID NO: 33165 - protein, 485 aa, Bacillus sp.
HHDGTNGTIMQYFEWNVPNDGQHWNRLHNNAQNLKNAGITAIWIPPAWKGTSQNDVGYGAYDLYDLGEFNQKGTVRTKYGTKAELERAIRSLKANGIQVYGDVVMNHKGGADFTERVQAVEVNPQNRNQEVSGTYQIEAWTGFNFPGRGNQHSSFKWRWYHFDGTDWDQSRQLANRIYKFRGDGKAWDWEVDTENGNYDPLLWADVDMDHPEVINELNRWGVWYANTLNLDGFRLDAVKHIKFSFMRDWLGHVRGQTGKNLFAVAEYWKNDLGALENYLSKTNWTMSAFDVPLHYNLYQASNSSGNYDMRNLLNGTLVQRHPSHAVTFVDNHDTQPGEALESFVQGWFKPLAYATILTREQGYPQVFYGDYYGIPSDGVPSYRQQIDPLLKARQQYAYGRQHDYFDHWDVIGWTREGNASHPNSGLATIMSDGPGGSKWMYVGRQKAGEVWHDMTGNRSGTVTINQDGWGHFFVNGGSVSVWVKR

SEQ ID NO: 33166 - protein, 485 aa, Bacillus sp.
HHDGTNGTIMQYFEWNVPNDGQHWNRLHNNAQNLKNAGITAIWIPPAWKGTSQNDVGYGAYDLYDLGEFNQKGTVRTKYGTKAELERAIRSLKANGIQVYGDVVMNHKGGADFTERVQAVEVNPQNRNQEVSGTYQIEAWTGFNFPGRGNQHSSFKWRWYHFDGTDWDQSRQLANRIYKFRGDGKAWDWEVDTENGNYDYELNADVDMDHPEVINELNRWGVWYANTLNLDGFRLDAVKHIKFSFMRDWLGHVRGQTGKNLFAVAEYWKNDLGALENYLSKTNWTMSAFDVPLHYNLYQASNSSGNYDMRNLLNGTLVQRHPSHAVTFVDNHDTQPGEALESFVQGWFKPLAYATILTREQGYPQVFYGDYYGIPSDGVPSYRQQIDPLLKARQQYAYGRQHDYFDHWDVIGWTREGNASHPNSGLATIMSDGPGGSKWMYVGRQKAGEVWHDMTGNRSGTVTINQDGWGHFFVNGGSVSVWVKR

SEQ ID NO: 33167 - protein, 485 aa, Bacillus sp.
HHDGTNGTIMQYFEWNVPNDGQHWNRLHNNAQNLKNAGITAIWIPPAWKGTSQNDVGYGAYDLYDLGEFNQKGTVRTKYGTKAELERAIRSLKANGIQVYGDVVMNHKGGADFTERVQAVEVNPQNRNQEVSGTYQIEAWTGFNFPGRGNQHSSFKWRWYHFDGTDWDQSRQLANRIYKFRGDGKAWDWEVDTENGNYDYLLFTDVDMDHPEVINELNRWGVWYANTLNLDGFRLDAVKHIKFSFMRDWLGHVRGQTGKNLFAVAEYWKNDLGALENYLSKTNWTMSAFDVPLHYNLYQASNSSGNYDMRNLLNGTLVQRHPSHAVTFVDNHDTQPGEALESFVQGWFKPLAYATILTREQGYPQVFYGDYYGIPSDGVPSYRQQIDPLLKARQQYAYGRQHDYFDHWDVIGWTREGNASHPNSGLATIMSDGPGGSKWMYVGRQKAGEVWHDMTGNRSGTVTINQDGWGHFFVNGGSVSVWVKR

SEQ ID NO: 33168 - protein, 485 aa, Bacillus sp.
HHDGTNGTIMQYFEWNVPNDGQHWNRLHNNAQNLKNAGITAIWIPPAWKGTSQNDVGYGAYDLYDLGEFNQKGTVRTKYGTKAELERAIRSLKANGIQVYGDVVMNHKGGADFTERVQAVEVNPQNRNQEVSGTYQIEAWTGFNFPGRGNQHSSFKWRWYHFDGTDWDQSRQLANRIYKFRGDGKAWDWEVDTENGNYDYELEADVDMDHPEVINELNRWGVWYANTLNLDGFRLDAVKHIKFSFMRDWLGHVRGQTGKNLFAVAEYWKNDLGALENYLSKTNWTMSAFDVPLHYNLYQASNSSGNYDMRNLLNGTLVQRHPSHAVTFVDNHDTQPGEALESFVQGWFKPLAYATILTREQGYPQVFYGDYYGIPSDGVPSYRQQIDPLLKARQQYAYGRQHDYFDHWDVIGWTREGNASHPNSGLATIMSDGPGGSKWMYVGRQKAGEVWHDMTGNRSGTVTINQDGWGHFFVNGGSVSVWVKR

SEQ ID NO: 33169 - protein, 483 aa, Bacillus sp.
HHDGTNGTIMQYFEWNVPNDGQHWNRLHNNAQNLKNAGITAIWIPPAWKGTSQNDVGYGAYDLYDLGEFNQKGTVRTKYGTKAELERAIRSLKANGIQVYGDVVMNHKGGADFTERVQAVEVNPQNRNQEVSGTYEIEAWTGFNFPGRGNQHSSFKWRWYHFDGTDWDQSRQLSNRIYKFDGKAWDWEVDTEXGNYDYLMYADVDMNHPEVINELNRWGVWYANTLNLDGFRLDAVKHIQFSFMRNWLGHVRGQTGKNLFAVAEYWKNDLGALENYLSKTNWTMSAFDVPLHYNLYQASNSGGNYDMRNLLNGTLVQRHPSHAVTFVDNHDTQPGEALESFVQGWFKPLAYATILTREQGYPQVFYGDYYGIPSDGVPSYRQQIDPLLKARQQYAYGRQHDYFDHWDVIGWTREGNASHPNSGLATIMSDGPGGSKWMYVGRQKAGEVWHDITGNRSGTVTINQDGWGQFFVNGGSVSVWVKR

SEQ ID NO: 33170 - protein, 485 aa, Bacillus sp.
HHDGTNGTIMQYFEWNVPNDGQHWNRLHNNAQNLKNAGITAIWIPPAWKGTSQNDVGYGAYDLYDLGEFNQKGTVRTKYGTKAELERAIRSLKANGIQVYGDVVMNHKGGADFTERVQAVEVNPQNRNQEVSGTYQIEAWTGFNFPGRGNQHSSFKWRWYHFDGTDWDQSRQLANRIYKFRGDGKAWDWEVDTENGNYDKLLNADVDMDHPEVINELNRWGVWYANTLNLDGFRLDAVKHIKFSFMRDWLGHVRGQTGKNLFAVAEYWKNDLGALENYLSKTNWTMSAFDVPLHYNLYQASNSSGNYDMRNLLNGTLVQRHPSHAVTFVDNHDTQPGEALESFVQGWFKPLAYATILTREQGYPQVFYGDYYGIPSDGVPSYRQQIDPLLKARQQYAYGRQHDYFDHWDVIGWTREGNASHPNSGLATIMSDGPGGSKWMYVGRQKAGEVWHDMTGNRSGTVTINQDGWGHFFVNGGSVSVWVKR

SEQ ID NO: 33171 - protein, 485 aa, Bacillus sp.
HHDGTNGTIMQYFEWNVPNDGQHWNRLHNNAQNLKNAGITAIWIPPAWKGTSQNDVGYGAYDLYDLGEFNQKGTVRTKYGTKAELERAIRSLKANGIQVYGDVVMNHKGGADFTERVQAVEVNPQNRNQEVSGTYQIEAWTGFNFPGRGNQHSSFKWRWYHFDGTDWDQSRQLANRIYKFRGDGKAWDWEVDTENGNYDYTQSADVDMDHPEVINELNRWGVWYANTLNLDGFRLDAVKHIKFSFMRDWLGHVRGQTGKNLFAVAEYWKNDLGALENYLSKTNWTMSAFDVPLHYNLYQASNSSGNYDMRNLLNGTLVQRHPSHAVTFVDNHDTQPGEALESFVQGWFKPLAYATILTREQGYPQVFYGDYYGIPSDGVPSYRQQIDPLLKARQQYAYGRQHDYFDHWDVIGWTREGNASHPNSGLATIMSDGPGGSKWMYVGRQKAGEVWHDMTGNRSGTVTINQDGWGHFFVNGGSVSVWVKR

SEQ ID NO: 33172 - protein, 485 aa, Bacillus sp.
HHDGTNGTIMQYFEWNVPNDGQHWNRLHNNAQNLKNAGITAIWIPPAWKGTSQNDVGYGAYDLYDLGEFNQKGTVRTKYGTKAELERAIRSLKANGIQVYGDVVMNHKGGADFTERVQAVEVNPQNRNQEVSGTYQIEAWTGFNFPGRGNQHSSFKWRWYHFDGTDWDQSRQLANRIYKFRGDGKAWDWEVDTENGNYDELLDADVDMDHPEVINELNRWGVWYANTLNLDGFRLDAVKHIKFSFMRDWLGHVRGQTGKNLFAVAEYWKNDLGALENYLSKTNWTMSAFDVPLHYNLYQASNSSGNYDMRNLLNGTLVQRHPSHAVTFVDNHDTQPGEALESFVQGWFKPLAYATILTREQGYPQVFYGDYYGIPSDGVPSYRQQIDPLLKARQQYAYGRQHDYFDHWDVIGWTREGNASHPNSGLATIMSDGPGGSKWMYVGRQKAGEVWHDMTGNRSGTVTINQDGWGHFFVNGGSVSVWVKR

SEQ ID NO: 33173 - protein, 485 aa, Bacillus sp.
HHDGTNGTIMQYFEWNVPNDGQHWNRLHNNAQNLKNAGITAIWIPPAWKGTSQNDVGYGAYDLYDLGEFNQKGTVRTKYGTKAELERAIRSLKANGIQVYGDVVMNHKGGADFTERVQAVEVNPQNRNQEVSGTYQIEAWTGFNFPGRGNQHSSFKWRWYHFDGTDWDQSRQLANRIYKFRGDGKAWDWEVDTENGNYDQLPAADVDMDHPEVINELNRWGVWYANTLNLDGFRLDAVKHIKFSFMRDWLGHVRGQTGKNLFAVAEYWKNDLGALENYLSKTNWTMSAFDVPLHYNLYQASNSSGNYDMRNLLNGTLVQRHPSHAVTFVDNHDTQPGEALESFVQGWFKPLAYATILTREQGYPQVFYGDYYGIPSDGVPSYRQQIDPLLKARQQYAYGRQHDYFDHWDVIGWTREGNASHPNSGLATIMSDGPGGSKWMYVGRQKAGEVWHDMTGNRSGTVTINQDGWGHFFVNGGSVSVWVKR

SEQ ID NO: 33174 - protein, 483 aa, Bacillus sp. (in: firmicutes)
HHDGTNGTIMQYFEWNVPNDGQHWNRLHNNAQNLKNAGITAIWIPPAWKGTSQNDVGYGAYDLYDLGEFNQKGTVRTKYGTKAELERAIRSLKANGIQVYGDVVMNHKGGADFTERVQAVEVNPQNRNQFVSGRYQIEAWTGFNFPGRGNQHSSFKWRWYHFDGTDWDQSRQLANRIYKFSGKDWDWEVDTEFGNYDYLMYADVDMDHPEVINELNRWGVWYANTLNLDGFRLDAVKHIKFSFMRDWLGHVRGQTGKNLFAVAEYWKNDLGALENYLSKTNWTMSAFDVPLHYNLYQASNSSGNYDMRNLLNGTLVQRHPSHAVTFVDNHDTQPGEALESFVQGWFKPLAYATILTREQGYPSVFYGDYYGIPSDGVPSYRQQIDPLLKARQQYAYGRQHDYFDHWDVIGWTREGNASHPNSGLATIMSDGPGGSKWMYVGRQKAGEVWHDMTGNRSGTVTINQDGWGHFFVNGGSVSVWVKR

SEQ ID NO: 33175 - protein, 485 aa, Bacillus sp.
HHDGTNGTIMQYFEWNVPNDGQHWNRLHNNAQNLKNAGITAIWIPPAWKGTSQNDVGYGAYDLYDLGEFNQKGTVRTKYGTKAELERAIRSLKANGIQVYGDVVMNHKGGADFTERVQAVEVNPQNRNQEVSGTYQIEAWTGFNFPGRGNQHSSFKWRWYHFDGTDWDQSRQLANRIYKFRGDGKAWDWEVDTENGNYDLPLYADVDMDHPEVINELNRWGVWYANTLNLDGFRLDAVKHIKFSFMRDWLGHVRGQTGKNLFAVAEYWKNDLGALENYLSKTNWTMSAFDVPLHYNLYQASNSSGNYDMRNLLNGTLVQRHPSHAVTFVDNHDTQPGEALESFVQGWFKPLAYATILTREQGYPQVFYGDYYGIPSDGVPSYRQQIDPLLKARQQYAYGRQHDYFDHWDVIGWTREGNASHPNSGLATIMSDGPGGSKWMYVGRQKAGEVWHDMTGNRSGTVTINQDGWGHFFVNGGSVSVWVKR

SEQ ID NO: 33176 - protein, 485 aa, Bacillus sp.
HHDGTNGTIMQYFEWNVPNDGQHWNRLHNNAQNLKNAGITAIWIPPAWKGTSQNDVGYGAYDLYDLGEFNQKGTVRTKYGTKAELERAIRSLKANGIQVYGDVVMNHKGGADFTERVQAVEVNPQNRNQEVSGTYQIEAWTGFNFPGRGNQHSSFKWRWYHFDGTDWDQSRQLANRIYKFRGDGKAWDWEVDTENGNYDWLPPADVDMDHPEVINELNRWGVWYANTLNLDGFRLDAVKHIKFSFMRDWLGHVRGQTGKNLFAVAEYWKNDLGALENYLSKTNWTMSAFDVPLHYNLYQASNSSGNYDMRNLLNGTLVQRHPSHAVTFVDNHDTQPGEALESFVQGWFKPLAYATILTREQGYPQVFYGDYYGIPSDGVPSYRQQIDPLLKARQQYAYGRQHDYFDHWDVIGWTREGNASHPNSGLATIMSDGPGGSKWMYVGRQKAGEVWHDMTGNRSGTVTINQDGWGHFFVNGGSVSVWVKR

SEQ ID NO: 33177 - protein, 485 aa, Bacillus sp.
HHDGTNGTIMQYFEWNVPNDGQHWNRLHNNAQNLKNAGITAIWIPPAWKGTSQNDVGYGAYDLYDLGEFNQKGTVRTKYGTKAELERAIRSLKANGIQVYGDVVMNHKGGADFTERVQAVEVNPQNRNQEVSGTYQIEAWTGFNFPGRGNQHSSFKWRWYHFDGTDWDQSRQLANRIYKFRGDGKAWDWEVDTENGNYDYHPSADVDMDHPEVINELNRWGVWYANTLNLDGFRLDAVKHIKFSFMRDWLGHVRGQTGKNLFAVAEYWKNDLGALENYLSKTNWTMSAFDVPLHYNLYQASNSSGNYDMRNLLNGTLVQRHPSHAVTFVDNHDTQPGEALESFVQGWFKPLAYATILTREQGYPQVFYGDYYGIPSDGVPSYRQQIDPLLKARQQYAYGRQHDYFDHWDVIGWTREGNASHPNSGLATIMSDGPGGSKWMYVGRQKAGEVWHDMTGNRSGTVTINQDGWGHFFVNGGSVSVWVKR

SEQ ID NO: 33178 - protein, 485 aa, Bacillus sp.
HHDGTNGTIMQYFEWNVPNDGQHWNRLHNNAQNLKNAGITAIWIPPAWKGTSQNDVGYGAYDLYDLGEFNQKGTVRTKYGTKAELERAIRSLKANGIQVYGDVVMNHKGGADFTERVQAVEVNPQNRNQEVSGTYQIEAWTGFNFPGRGNQHSSFKWRWYHFDGTDWDQSRQLANRIYKFRGDGKAWDWEVDTENGNYDYRTSADVDMDHPEVINELNRWGVWYANTLNLDGFRLDAVKHIKFSFMRDWLGHVRGQTGKNLFAVAEYWKNDLGALENYLSKTNWTMSAFDVPLHYNLYQASNSSGNYDMRNLLNGTLVQRHPSHAVTFVDNHDTQPGEALESFVQGWFKPLAYATILTREQGYPQVFYGDYYGIPSDGVPSYRQQIDPLLKARQQYAYGRQHDYFDHWDVIGWTREGNASHPNSGLATIMSDGPGGSKWMYVGRQKAGEVWHDMTGNRSGTVTINQDGWGHFFVNGGSVSVWVKR

SEQ ID NO: 33179 - protein, 485 aa, Bacillus sp.
HHDGTNGTIMQYFEWNVPNDGQHWNRLHNNAQNLKNAGITAIWIPPAWKGTSQNDVGYGAYDLYDLGEFNQKGTVRTKYGTKAELERAIRSLKANGIQVYGDVVMNHKGGADFTERVQAVEVNPQNRNQEVSGTYQIEAWTGFNFPGRGNQHSSFKWRWYHFDGTDWDQSRQLANRIYKFRGDGKAWDWEVDTENGNYDQLPPADVDMDHPEVINELNRWGVWYANTLNLDGFRLDAVKHIKFSFMRDWLGHVRGQTGKNLFAVAEYWKNDLGALENYLSKTNWTMSAFDVPLHYNLYQASNSSGNYDMRNLLNGTLVQRHPSHAVTFVDNHDTQPGEALESFVQGWFKPLAYATILTREQGYPQVFYGDYYGIPSDGVPSYRQQIDPLLKARQQYAYGRQHDYFDHWDVIGWTREGNASHPNSGLATIMSDGPGGSKWMYVGRQKAGEVWHDMTGNRSGTVTINQDGWGHFFVNGGSVSVWVKR

SEQ ID NO: 33180 - protein, 483 aa, Bacillus sp. (in: firmicutes)
HHDGTNGTIMQYFEWNVPNDGQHWNRLHNNAQNLKNAGITAIWIPPAWKGTSQNDVGYGAYDLYDLGEFNQKGTVRTKYGTKAELERAIRSLKANGIQVYGDVVMNHKGGADFTERVQAVEVNPQNRNQNVSGSYQIEAWTGFNFPGRGNQHSSFKWRWYHFDGTDWDQSRQLANRIYKFNGKKWDWEVDTEFGNYDYLMYADVDMDHPEVINELNRWGVWYANTLNLDGFRLDAVKHIKFSFMRDWLGHVRGQTGKNLFAVAEYWKNDLGALENYLSKTNWTMSAFDVPLHYNLYQASNSSGNYDMRNLLNGTLVQRHPSHAVTFVDNHDTQPGEALESFVQGWFKPLAYATILTREQGYPSVFYGDYYGIPSDGVPSYRQQIDPLLKARQQYAYGRQHDYFDHWDVIGWTREGNASHPNSGLATIMSDGPGGSKWMYVGRQKAGEVWHDMTGNRSGTVTINQDGWGHFFVNGGSVSVWVKR

SEQ ID NO: 33181 - protein, 485 aa, Bacillus sp.
HHDGTNGTIMQYFEWNVPNDGQHWNRLHNNAQNLKNAGITAIWIPPAWKGTSQNDVGYGAYDLYDLGEFNQKGTVRTKYGTKAELERAIRSLKANGIQVYGDVVMNHKGGADFTERVQAVEVNPQNRNQEVSGTYQIEAWTGFNFPGRGNQHSSFKWRWYHFDGTDWDQSRQLANRIYKFRGDGKAWDWEVDTENGNYDYHENADVDMDHPEVINELNRWGVWYANTLNLDGFRLDAVKHIKFSFMRDWLGHVRGQTGKNLFAVAEYWKNDLGALENYLSKTNWTMSAFDVPLHYNLYQASNSSGNYDMRNLLNGTLVQRHPSHAVTFVDNHDTQPGEALESFVQGWFKPLAYATILTREQGYPQVFYGDYYGIPSDGVPSYRQQIDPLLKARQQYAYGRQHDYFDHWDVIGWTREGNASHPNSGLATIMSDGPGGSKWMYVGRQKAGEVWHDMTGNRSGTVTINQDGWGHFFVNGGSVSVWVKR

SEQ ID NO: 33182 - protein, 485 aa, Bacillus sp.
HHDGTNGTIMQYFEWNVPNDGQHWNRLHNNAQNLKNAGITAIWIPPAWKGTSQNDVGYGAYDLYDLGEFNQKGTVRTKYGTKAELERAIRSLKANGIQVYGDVVMNHKGGADFTERVQAVEVNPQNRNQEVSGTYQIEAWTGFNFPGRGNQHSSFKWRWYHFDGTDWDQSRQLANRIYKFRGDGKAWDWEVDTENGNYDQLLWADVDMDHPEVINELNRWGVWYANTLNLDGFRLDAVKHIKFSFMRDWLGHVRGQTGKNLFAVAEYWKNDLGALENYLSKTNWTMSAFDVPLHYNLYQASNSSGNYDMRNLLNGTLVQRHPSHAVTFVDNHDTQPGEALESFVQGWFKPLAYATILTREQGYPQVFYGDYYGIPSDGVPSYRQQIDPLLKARQQYAYGRQHDYFDHWDVIGWTREGNASHPNSGLATIMSDGPGGSKWMYVGRQKAGEVWHDMTGNRSGTVTINQDGWGHFFVNGGSVSVWVKR

SEQ ID NO: 33183 - protein, 485 aa, Bacillus sp.
HHDGTNGTIMQYFEWNVPNDGQHWNRLHNNAQNLKNAGITAIWIPPAWKGTSQNDVGYGAYDLYDLGEFNQKGTVRTKYGTKAELERAIRSLKANGIQVYGDVVMNHKGGADFTERVQAVEVNPQNRNQEVSGTYQIEAWTGFNFPGRGNQHSSFKWRWYHFDGTDWDQSRQLANRIYKFRGDGKAWDWEVDTENGNYDYQHRADVDMDHPEVINELNRWGVWYANTLNLDGFRLDAVKHIKFSFMRDWLGHVRGQTGKNLFAVAEYWKNDLGALENYLSKTNWTMSAFDVPLHYNLYQASNSSGNYDMRNLLNGTLVQRHPSHAVTFVDNHDTQPGEALESFVQGWFKPLAYATILTREQGYPQVFYGDYYGIPSDGVPSYRQQIDPLLKARQQYAYGRQHDYFDHWDVIGWTREGNASHPNSGLATIMSDGPGGSKWMYVGRQKAGEVWHDMTGNRSGTVTINQDGWGHFFVNGGSVSVWVKR

SEQ ID NO: 33184 - protein, 485 aa, Bacillus sp.
HHDGTNGTIMQYFEWNVPNDGQHWNRLHNNAQNLKNAGITAIWIPPAWKGTSQNDVGYGAYDLYDLGEFNQKGTVRTKYGTKAELERAIRSLKANGIQVYGDVVMNHKGGADFTERVQAVEVNPQNRNQEVSGTYQIEAWTGFNFPGRGNQHSSFKWRWYHFDGTDWDQSRQLANRIYKFRGDGKAWDWEVDTENGNYDEWPYADVDMDHPEVINELNRWGVWYANTLNLDGFRLDAVKHIKFSFMRDWLGHVRGQTGKNLFAVAEYWKNDLGALENYLSKTNWTMSAFDVPLHYNLYQASNSSGNYDMRNLLNGTLVQRHPSHAVTFVDNHDTQPGEALESFVQGWFKPLAYATILTREQGYPQVFYGDYYGIPSDGVPSYRQQIDPLLKARQQYAYGRQHDYFDHWDVIGWTREGNASHPNSGLATIMSDGPGGSKWMYVGRQKAGEVWHDMTGNRSGTVTINQDGWGHFFVNGGSVSVWVKR

SEQ ID NO: 33185 - protein, 483 aa, Bacillus sp.
HHDGTNGTIMQYFEWNVPNDGQHWNRLHNNAQNLKNAGITAIWIPPAWKGTSQNDVGYGAYDLYDLGEFNQKGTVRTKYGTKAELERAIRSLKANGIQVYGDVVMNHKGGADFTERVQAVEVNPQNRNQEVSGTYEIEAWTGFNFPGRGNQHSSFKWRWYHFDGTDWDQSRQLSNRIYKFDGKAWDWEVDTEFGNYDYLMYADVDMNHPEVINELNRWGVWYANTLNLDGFRLDAVKHIQFSFMRNWLGHVRGQTGKNLFAVAEYWKNDLGALENYLSKTNWTMSAFDVPLHYNLYQASNSGGNYDMRNLLNGTLVQRHPSHAVTFVDNHDTQPGEALESFVQGWFKPLAYATILTREQGYPQVFYGDYYGIPSDGVPSYRQQIDPLLKARQQYAYGRQHDYFDHWDVIGWTREGNASHPNSGLATIMSDGPGGSKWMYVGRQKAGEVWHDITGNRSGTVTINQDGWGQFFVNGGSVSVWVKR

SEQ ID NO: 33186 - protein, 485 aa, Bacillus sp.
HHDGTNGTIMQYFEWNVPNDGQHWNRLHNNAQNLKNAGITAIWIPPAWKGTSQNDVGYGAYDLYDLGEFNQKGTVRTKYGTKAELERAIRSLKANGIQVYGDVVMNHKGGADFTERVQAVEVNPQNRNQEVSGTYQIEAWTGFNFPGRGNQHSSFKWRWYHFDGTDWDQSRQLANRIYKFRGDGKAWDWEVDTENGNYDYQTVADVDMDHPEVINELNRWGVWYANTLNLDGFRLDAVKHIKFSFMRDWLGHVRGQTGKNLFAVAEYWKNDLGALENYLSKTNWTMSAFDVPLHYNLYQASNSSGNYDMRNLLNGTLVQRHPSHAVTFVDNHDTQPGEALESFVQGWFKPLAYATILTREQGYPQVFYGDYYGIPSDGVPSYRQQIDPLLKARQQYAYGRQHDYFDHWDVIGWTREGNASHPNSGLATIMSDGPGGSKWMYVGRQKAGEVWHDMTGNRSGTVTINQDGWGHFFVNGGSVSVWVKR

SEQ ID NO: 33187 - protein, 485 aa, Bacillus sp.
HHDGTNGTIMQYFEWNVPNDGQHWNRLHNNAQNLKNAGITAIWIPPAWKGTSQNDVGYGAYDLYDLGEFNQKGTVRTKYGTKAELERAIRSLKANGIQVYGDVVMNHKGGADFTERVQAVEVNPQNRNQEVSGTYQIEAWTGFNFPGRGNQHSSFKWRWYHFDGTDWDQSRQLANRIYKFRGDGKAWDWEVDTENGNYDTLLKADVDMDHPEVINELNRWGVWYANTLNLDGFRLDAVKHIKFSFMRDWLGHVRGQTGKNLFAVAEYWKNDLGALENYLSKTNWTMSAFDVPLHYNLYQASNSSGNYDMRNLLNGTLVQRHPSHAVTFVDNHDTQPGEALESFVQGWFKPLAYATILTREQGYPQVFYGDYYGIPSDGVPSYRQQIDPLLKARQQYAYGRQHDYFDHWDVIGWTREGNASHPNSGLATIMSDGPGGSKWMYVGRQKAGEVWHDMTGNRSGTVTINQDGWGHFFVNGGSVSVWVKR

SEQ ID NO: 33188 - protein, 485 aa, Bacillus sp.
HHDGTNGTIMQYFEWNVPNDGQHWNRLHNNAQNLKNAGITAIWIPPAWKGTSQNDVGYGAYDLYDLGEFNQKGTVRTKYGTKAELERAIRSLKANGIQVYGDVVMNHKGGADFTERVQAVEVNPQNRNQEVSGTYQIEAWTGFNFPGRGNQHSSFKWRWYHFDGTDWDQSRQLANRIYKFRGDGKAWDWEVDTENGNYDWLLQADVDMDHPEVINELNRWGVWYANTLNLDGFRLDAVKHIKFSFMRDWLGHVRGQTGKNLFAVAEYWKNDLGALENYLSKTNWTMSAFDVPLHYNLYQASNSSGNYDMRNLLNGTLVQRHPSHAVTFVDNHDTQPGEALESFVQGWFKPLAYATILTREQGYPQVFYGDYYGIPSDGVPSYRQQIDPLLKARQQYAYGRQHDYFDHWDVIGWTREGNASHPNSGLATIMSDGPGGSKWMYVGRQKAGEVWHDMTGNRSGTVTINQDGWGHFFVNGGSVSVWVKR

SEQ ID NO: 33189 - protein, 485 aa, Bacillus sp.
HHDGTNGTIMQYFEWNVPNDGQHWNRLHNNAQNLKNAGITAIWIPPAWKGTSQNDVGYGAYDLYDLGEFNQKGTVRTKYGTKAELERAIRSLKANGIQVYGDVVMNHKGGADFTERVQAVEVNPQNRNQEVSGTYQIEAWTGFNFPGRGNQHSSFKWRWYHFDGTDWDQSRQLANRIYKFRGDGKAWDWEVDTENGNYDYQLQADVDMDHPEVINELNRWGVWYANTLNLDGFRLDAVKHIKFSFMRDWLGHVRGQTGKNLFAVAEYWKNDLGALENYLSKTNWTMSAFDVPLHYNLYQASNSSGNYDMRNLLNGTLVQRHPSHAVTFVDNHDTQPGEALESFVQGWFKPLAYATILTREQGYPQVFYGDYYGIPSDGVPSYRQQIDPLLKARQQYAYGRQHDYFDHWDVIGWTREGNASHPNSGLATIMSDGPGGSKWMYVGRQKAGEVWHDMTGNRSGTVTINQDGWGHFFVNGGSVSVWVKR

SEQ ID NO: 33190 - protein, 485 aa, Bacillus sp.
HHDGTNGTIMQYFEWNVPNDGQHWNRLHNNAQNLKNAGITAIWIPPAWKGTSQNDVGYGAYDLYDLGEFNQKGTVRTKYGTKAELERAIRSLKANGIQVYGDVVMNHKGGADFTERVQAVEVNPQNRNQEVSGTYQIEAWTGFNFPGRGNQHSSFKWRWYHFDGTDWDQSRQLANRIYKFRGDGKAWDWEVDTENGNYDWLLTADVDMDHPEVINELNRWGVWYANTLNLDGFRLDAVKHIKFSFMRDWLGHVRGQTGKNLFAVAEYWKNDLGALENYLSKTNWTMSAFDVPLHYNLYQASNSSGNYDMRNLLNGTLVQRHPSHAVTFVDNHDTQPGEALESFVQGWFKPLAYATILTREQGYPQVFYGDYYGIPSDGVPSYRQQIDPLLKARQQYAYGRQHDYFDHWDVIGWTREGNASHPNSGLATIMSDGPGGSKWMYVGRQKAGEVWHDMTGNRSGTVTINQDGWGHFFVNGGSVSVWVKR

SEQ ID NO: 33191 - protein, 485 aa, Bacillus sp.
HHDGTNGTIMQYFEWNVPNDGQHWNRLHNNAQNLKNAGITAIWIPPAWKGTSQNDVGYGAYDLYDLGEFNQKGTVRTKYGTKAELERAIRSLKANGIQVYGDVVMNHKGGADFTERVQAVEVNPQNRNQEVSGTYQIEAWTGFNFPGRGNQHSSFKWRWYHFDGTDWDQSRQLANRIYKFRGDGKAWDWEVDTENGNYDYWLPADVDMDHPEVINELNRWGVWYANTLNLDGFRLDAVKHIKFSFMRDWLGHVRGQTGKNLFAVAEYWKNDLGALENYLSKTNWTMSAFDVPLHYNLYQASNSSGNYDMRNLLNGTLVQRHPSHAVTFVDNHDTQPGEALESFVQGWFKPLAYATILTREQGYPQVFYGDYYGIPSDGVPSYRQQIDPLLKARQQYAYGRQHDYFDHWDVIGWTREGNASHPNSGLATIMSDGPGGSKWMYVGRQKAGEVWHDMTGNRSGTVTINQDGWGHFFVNGGSVSVWVKR

SEQ ID NO: 33192 - protein, 485 aa, Bacillus sp.
HHDGTNGTIMQYFEWNVPNDGQHWNRLHNNAQNLKNAGITAIWIPPAWKGTSQNDVGYGAYDLYDLGEFNQKGTVRTKYGTKAELERAIRSLKANGIQVYGDVVMNHKGGADFTERVQAVEVNPQNRNQEVSGTYQIEAWTGFNFPGRGNQHSSFKWRWYHFDGTDWDQSRQLANRIYKFRGDGKAWDWEVDTENGNYDSELYADVDMDHPEVINELNRWGVWYANTLNLDGFRLDAVKHIKFSFMRDWLGHVRGQTGKNLFAVAEYWKNDLGALENYLSKTNWTMSAFDVPLHYNLYQASNSSGNYDMRNLLNGTLVQRHPSHAVTFVDNHDTQPGEALESFVQGWFKPLAYATILTREQGYPQVFYGDYYGIPSDGVPSYRQQIDPLLKARQQYAYGRQHDYFDHWDVIGWTREGNASHPNSGLATIMSDGPGGSKWMYVGRQKAGEVWHDMTGNRSGTVTINQDGWGHFFVNGGSVSVWVKR

SEQ ID NO: 33193 - protein, 485 aa, Bacillus sp.
HHDGTNGTIMQYFEWNVPNDGQHWNRLHNNAQNLKNAGITAIWIPPAWKGTSQNDVGYGAYDLYDLGEFNQKGTVRTKYGTKAELERAIRSLKANGIQVYGDVVMNHKGGADFTERVQAVEVNPQNRNQEVSGTYQIEAWTGFNFPGRGNQHSSFKWRWYHFDGTDWDQSRQLANRIYKFRGDGKAWDWEVDTENGNYDTLLLADVDMDHPEVINELNRWGVWYANTLNLDGFRLDAVKHIKFSFMRDWLGHVRGQTGKNLFAVAEYWKNDLGALENYLSKTNWTMSAFDVPLHYNLYQASNSSGNYDMRNLLNGTLVQRHPSHAVTFVDNHDTQPGEALESFVQGWFKPLAYATILTREQGYPQVFYGDYYGIPSDGVPSYRQQIDPLLKARQQYAYGRQHDYFDHWDVIGWTREGNASHPNSGLATIMSDGPGGSKWMYVGRQKAGEVWHDMTGNRSGTVTINQDGWGHFFVNGGSVSVWVKR

SEQ ID NO: 33194 - protein, 485 aa, Bacillus sp.
HHDGTNGTIMQYFEWNVPNDGQHWNRLHNNAQNLKNAGITAIWIPPAWKGTSQNDVGYGAYDLYDLGEFNQKGTVRTKYGTKAELERAIRSLKANGIQVYGDVVMNHKGGADFTERVQAVEVNPQNRNQEVSGTYQIEAWTGFNFPGRGNQHSSFKWRWYHFDGTDWDQSRQLANRIYKFRGDGKAWDWEVDTENGNYDWLLAADVDMDHPEVINELNRWGVWYANTLNLDGFRLDAVKHIKFSFMRDWLGHVRGQTGKNLFAVAEYWKNDLGALENYLSKTNWTMSAFDVPLHYNLYQASNSSGNYDMRNLLNGTLVQRHPSHAVTFVDNHDTQPGEALESFVQGWFKPLAYATILTREQGYPQVFYGDYYGIPSDGVPSYRQQIDPLLKARQQYAYGRQHDYFDHWDVIGWTREGNASHPNSGLATIMSDGPGGSKWMYVGRQKAGEVWHDMTGNRSGTVTINQDGWGHFFVNGGSVSVWVKR

SEQ ID NO: 33195 - protein, 485 aa, Bacillus sp.
HHDGTNGTIMQYFEWNVPNDGQHWNRLHNNAQNLKNAGITAIWIPPAWKGTSQNDVGYGAYDLYDLGEFNQKGTVRTKYGTKAELERAIRSLKANGIQVYGDVVMNHKGGADFTERVQAVEVNPQNRNQEVSGTYQIEAYTGFNFPGRGNQHSSFKWRWYHFDGTDWDQSRQLANRIYKFRGDGKAWDWEVDTENGNYDYLMYADVDMDHPEVINELNRWGVWYANTLNLDGFRLDAVKHIKFSFMRDWLGHVRGQTGKNLFAVAEYWKNDLGALENYLSKTNWTMSAFDVPLHYNLYQASNSRGNYDMRNLLNGTLVQRHPSHAVTFVDNHDTQPGEALESFVQGWFKPLAYATILTREQGYPQVFYGDYYGIPSDGVPSYRQQIDPLLKARQQYAYGRQHDYFDHWDVIGWTREGNASHPNSGLATIMSDGPGGSKNMYVGRQKAGEVWHDMTGNRSGTVTINQDGWGHFFVNGKSVSVWVKR

SEQ ID NO: 33196 - protein, 485 aa, Bacillus sp.
HHDGTNGTIMQYFEWNVPNDGQHWNRLHNNAQNLKNAGITAIWIPPAWKGTSQNDVGYGAYDLYDLGEFNQKGTVRTKYGTKAELERAIRSLKANGIQVYGDVVMNHKGGADFTERVQAVEVNPQNRNQEVSGTYQIEAWTGFNFPGRGNQHSSFKWRWYHFDGTDWDQSRQLANRIYKFRGDGKAWDWEVDTENGNYDPLLEADVDMDHPEVINELNRWGVWYANTLNLDGFRLDAVKHIKFSFMRDWLGHVRGQTGKNLFAVAEYWKNDLGALENYLSKTNWTMSAFDVPLHYNLYQASNSSGNYDMRNLLNGTLVQRHPSHAVTFVDNHDTQPGEALESFVQGWFKPLAYATILTREQGYPQVFYGDYYGIPSDGVPSYRQQIDPLLKARQQYAYGRQHDYFDHWDVIGWTREGNASHPNSGLATIMSDGPGGSKWMYVGRQKAGEVWHDMTGNRSGTVTINQDGWGHFFVNGGSVSVWVKR

SEQ ID NO: 33197 - protein, 483 aa, Bacillus sp. (in: firmicutes)
HHDGTNGTIMQYFEWNVPNDGQHWNRLHNNAQNLKNAGITAIWIPPAWKGTSQNDVGYGAYDLYDLGEFNQKGTVRTKYGTKAELERAIRSLKANGIQVYGDVVMNHKGGADFTERVQAVEVNPQNRNQEVSGTYQIEAWTGFNFPGRGNQHSSFKWQWNHFDGTDWDQSRQLANRIYKFRGKAMDWEVDTEFGNYDYLMYADVDMDHPEVINELNRWGVWYANTLNLDGFRLDAVKHIKFSFMRDWLGHVRGQTGKNLFAVAEYWKNDLGALENYLSKTNWTMSAFDVPLHYNLYQASNSSGNYDMRNLLNGTLVQRHPSHAVTFVDNHDTQPGEALESFVQGWFKPLAYATILTREQGYPSVFYGDYYGIPSDGVPSYRQQIDPLLKARQQYAYGRQHDYFDHWDVIGWTREGNASHPNSGLATIMSDGPGGSKWMYVGRQKAGEVWHDMTGNRSGTVTINQDGWGHFFVNGGSVSVWVKR

SEQ ID NO: 33198 - protein, 485 aa, Bacillus sp.
HHDGTNGTIMQYFEWNVPNDGQHWNRLHNNAQNLKNAGITAIWIPPAWKGTSQNDVGYGAYDLYDLGEFNQKGTVRTKYGTKAELERAIRSLKANGIQVYGDVVMNHKGGADFTERVQAVEVNPQNRNQEVSGTYQIEAYTGFNFPGRGNQHSSFKWRWYHFDGTDWDQSRQLANRIYKFRGDGKAWDWEVDTENGNYDYLMYADVDMDHPEVINELNRWGVWYANTLNLDGFRLDAVKHIKFSFMRDWLGHVRGQTGKNLFAVAEYWKNDLGALENYLSKTNWTMSAFDVPLHYNLYQASNSRGNYDMRNLLNGTLVQRHPSHAVTFVDNHDTQPGEALESFVQGWFKPLAYATILTREQGYPQVFYGDYYGIPSDGVPSYRQQIDPLLKARQQYAYGRQHDYFDHWDVIGWTREGNASHPNSGLATIMSDGPGGSRWMYVGRQKAGEVWHDMTGNRSGTVTINQDGWGHFFVKGGSVSVWVKR

SEQ ID NO: 33199 - protein, 485 aa, Bacillus sp.
HHDGTNGTIMQYFEWNVPNDGQHWNRLHNNAQNLKNAGITAIWIPPAWKGTSQNDVGYGAYDLYDLGEFNQKGTVRTKYGTKAELERAIRSLKANGIQVYGDVVMNHKGGADFTERVQAVEVNPQNRNQEVSGTYQIEAWTGFNFPGRGNQHSSFKWRWYHFDGTDWDQSRQLANRIYKFRGDGKAWDWEVDTENGNYDYPQHADVDMDHPEVINELNRWGVWYANTLNLDGFRLDAVKHIKFSFMRDWLGHVRGQTGKNLFAVAEYWKNDLGALENYLSKTNWTMSAFDVPLHYNLYQASNSSGNYDMRNLLNGTLVQRHPSHAVTFVDNHDTQPGEALESFVQGWFKPLAYATILTREQGYPQVFYGDYYGIPSDGVPSYRQQIDPLLKARQQYAYGRQHDYFDHWDVIGWTREGNASHPNSGLATIMSDGPGGSKWMYVGRQKAGEVWHDMTGNRSGTVTINQDGWGHFFVNGGSVSVWVKR

SEQ ID NO: 33200 - protein, 485 aa, Bacillus sp.
HHDGTNGTIMQYFEWNVPNDGQHWNRLHNNAQNLKNAGITAIWIPPAWKGTSQNDVGYGAYDLYDLGEFNQKGTVRTKYGTKAELERAIRSLKANGIQVYGDVVMNHKGGADFTERVQAVEVNPQNRNQEVSGTYQIEAWTGFNFPGRGNQHSSFKWRWYHFDGTDWDQSRQLANRIYKFRGDGKAWDWEVDTENGNYDYWLFADVDMDHPEVINELNRWGVWYANTLNLDGFRLDAVKHIKFSFMRDWLGHVRGQTGKNLFAVAEYWKNDLGALENYLSKTNWTMSAFDVPLHYNLYQASNSSGNYDMRNLLNGTLVQRHPSHAVTFVDNHDTQPGEALESFVQGWFKPLAYATILTREQGYPQVFYGDYYGIPSDGVPSYRQQIDPLLKARQQYAYGRQHDYFDHWDVIGWTREGNASHPNSGLATIMSDGPGGSKWMYVGRQKAGEVWHDMTGNRSGTVTINQDGWGHFFVNGGSVSVWVKR

SEQ ID NO: 33201 - protein, 483 aa, Bacillus sp. (in: firmicutes)
HHDGTNGTIMQYFEWNVPNDGQHWNRLHNNAQNLKNAGITAIWIPPAWKGTSQNDVGYGAYDLYDLGEFNQKGTVRTKYGTKAELERAIRSLKANGIQVYGDVVMNHKGGADFTERVQAVEVNPQNRNQSVSGEYQIEAWTGFNFPGRGNQHSSFKWRWYHFDGTDWDQSRQLANRIYKFSGKTWDWEVDTEFGNYDYLMYADVDMDHPEVINELNRWGVWYANTLNLDGFRLDAVKHIKFSFMRDWLGHVRGQTGKNLFAVAEYWKNDLGALENYLSKTNWTMSAFDVPLHYNLYQASNSSGNYDMRNLLNGTLVQRHPSHAVTFVDNHDTQPGEALESFVQGWFKPLAYATILTREQGYPSVFYGDYYGIPSDGVPSYRQQIDPLLKARQQYAYGRQHDYFDHWDVIGWTREGNASHPNSGLATIMSDGPGGSKWMYVGRQKAGEVWHDMTGNRSGTVTINQDGWGHFFVNGGSVSVWVKR

SEQ ID NO: 33202 - protein, 485 aa, Bacillus sp.
HHDGTNGTIMQYFEWNVPNDGQHWNRLHNNAQNLKNAGITAIWIPPAWKGTSQNDVGYGAYDLYDLGEFNQKGTVRTKYGTKAELERAIRSLKANGIQVYGDVVMNHKGGADFTERVQAVEVNPQNRNQEVSGTYQIEAWTGFNFPGRGNQHSSFKWRWYHFDGTDWDQSRQLANRIYKFRGDGKAWDWEVDTENGNYDDLLSADVDMDHPEVINELNRWGVWYANTLNLDGFRLDAVKHIKFSFMRDWLGHVRGQTGKNLFAVAEYWKNDLGALENYLSKTNWTMSAFDVPLHYNLYQASNSSGNYDMRNLLNGTLVQRHPSHAVTFVDNHDTQPGEALESFVQGWFKPLAYATILTREQGYPQVFYGDYYGIPSDGVPSYRQQIDPLLKARQQYAYGRQHDYFDHWDVIGWTREGNASHPNSGLATIMSDGPGGSKWMYVGRQKAGEVWHDMTGNRSGTVTINQDGWGHFFVNGGSVSVWVKR

SEQ ID NO: 33203 - protein, 485 aa, Bacillus sp.
HHDGTNGTIMQYFEWNVPNDGQHWNRLHNNAQNLKNAGITAIWIPPAWKGTSQNDVGYGAYDLYDLGEFNQKGTVRTKYGTKAELERAIRSLKANGIQVYGDVVMNHKGGADFTERVQAVEVNPQNRNQEVSGTYEIEAWTGFNFPGRGNQHSSFKWRWYHFDGTDWDQSRQLSNRIYKFRGDGKAWDWEVDTEXGNYDYLMYADXDMNHPEVINELNRWGVWYANTLNLDGFRLDAVKHIQFSFMRNWLGHVRGQTGKNLFAVAEYWKNDLGALENYLSKTNWTMSAFDVPLHYNLYQASNSGGNYDMRNLLNGTLVQRHPSHAVTFVDNHDTQPGEALESFVQGWFKPLAYATILTREQGYPQVFYGDYYGIPSDGVPSYRQQIDPLLKARQQYAYGRQHDYFDHWDVIGWTREGNASHPNSGLATIMSDGPGGSKWMYVGRQKAGEVWHDITGNRSGTVTINQDGWGQFFVNGGSVSVWVKR

SEQ ID NO: 33204 - protein, 485 aa, Bacillus sp.
HHDGTNGTIMQYFEWNVPNDGQHWNRLHNNAQNLKNAGITAIWIPPAWKGTSQNDVGYGAYDLYDLGEFNQKGTVRTKYGTKAELERAIRSLKANGIQVYGDVVMNHKGGADFTERVQAVEVNPQNRNQEVSGTYQIEAWTGFNFPGRGNQHSSFKWRWYHFDGTDWDQSRQLANRIYKFRGDGKAWDWEVDTENGNYDYGLAADVDMDHPEVINELNRWGVWYANTLNLDGFRLDAVKHIKFSFMRDWLGHVRGQTGKNLFAVAEYWKNDLGALENYLSKTNWTMSAFDVPLHYNLYQASNSSGNYDMRNLLNGTLVQRHPSHAVTFVDNHDTQPGEALESFVQGWFKPLAYATILTREQGYPQVFYGDYYGIPSDGVPSYRQQIDPLLKARQQYAYGRQHDYFDHWDVIGWTREGNASHPNSGLATIMSDGPGGSKWMYVGRQKAGEVWHDMTGNRSGTVTINQDGWGHFFVNGGSVSVWVKR

SEQ ID NO: 33205 - protein, 485 aa, Bacillus sp.
HHDGTNGTIMQYFEWNVPNDGQHWNRLHNNAQNLKNAGITAIWIPPAWKGTSQNDVGYGAYDLYDLGEFNQKGTVRTKYGTKAELERAIRSLKANGIQVYGDVVMNHKGGADFTERVQAVEVNPQNRNQEVSGTYQIEAWTGFNFPGRGNQHSSFKWRWYHFDGTDWDQSRQLANRIYKFRGDGKAWDWEVDTENGNYDYPTAADVDMDHPEVINELNRWGVWYANTLNLDGFRLDAVKHIKFSFMRDWLGHVRGQTGKNLFAVAEYWKNDLGALENYLSKTNWTMSAFDVPLHYNLYQASNSSGNYDMRNLLNGTLVQRHPSHAVTFVDNHDTQPGEALESFVQGWFKPLAYATILTREQGYPQVFYGDYYGIPSDGVPSYRQQIDPLLKARQQYAYGRQHDYFDHWDVIGWTREGNASHPNSGLATIMSDGPGGSKWMYVGRQKAGEVWHDMTGNRSGTVTINQDGWGHFFVNGGSVSVWVKR

SEQ ID NO: 33206 - protein, 485 aa, Bacillus sp.
HHDGTNGTIMQYFEWNVPNDGQHWNRLHNNAQNLKNAGITAIWIPPAWKGTSQNDVGYGAYDLYDLGEFNQKGTVRTKYGTKAELERAIRSLKANGIQVYGDVVMNHKGGADFTERVQAVEVNPQNRNQEVSGTYQIEAWTGFNFPGRGNQHSSFKWRWYHFDGTDWDQSRQLANRIYKFRGDGKAWDWEVDTENGNYDDLLNADVDMDHPEVINELNRWGVWYANTLNLDGFRLDAVKHIKFSFMRDWLGHVRGQTGKNLFAVAEYWKNDLGALENYLSKTNWTMSAFDVPLHYNLYQASNSSGNYDMRNLLNGTLVQRHPSHAVTFVDNHDTQPGEALESFVQGWFKPLAYATILTREQGYPQVFYGDYYGIPSDGVPSYRQQIDPLLKARQQYAYGRQHDYFDHWDVIGWTREGNASHPNSGLATIMSDGPGGSKWMYVGRQKAGEVWHDMTGNRSGTVTINQDGWGHFFVNGGSVSVWVKR

SEQ ID NO: 33207 - protein, 483 aa, Bacillus sp. (in: firmicutes)
HHDGTNGTIMQYFEWNVPNDGQHWNRLHNNAQNLKNAGITAIWIPPAWKGTSQNDVGYGAYDLYDLGEFNQKGTVRTKYGTKAELERAIRSLKANGIQVYGDVVMNHKGGADFTERVQAVEVNPQNHNQEVSGTYQIEAWTGFNFPGRGNQHSSFKWRWYHFDGTDWDQSHQLANRIYKFRGKAWDWEVDTENGNYDYLMYADVDMDHPEVINELNRWGVWYANTLNLDGFRLDAVKHIKFSFLRDWLGHVRGQTGKNLFAVAEYWKNDLGAVENYLSKTNWTMSAFDVPLHYNLYQASNSSGRYDMRNLLNGTLVQRHPSHAVTFVDNHDTQPGEALESFVQGWFKPLAYATILTREQGYPSVFYGDYYGIPSDGVPSYRQQIDPLLKARQQYAYGRQHDYFDHWDVIGWTREGNASHPNSGLATIMSDGPGGSKWMYVGRQKAGEVWHDMTGNRSGTVTINQDGWGHFFVNGGSVSVWVKR

SEQ ID NO: 33208 - protein, 485 aa, Bacillus sp.
HHDGTNGTIMQYFEWNVPNDGQHWNRLHNNAQNLKNAGITAIWIPPAWKGTSQNDVGYGAYDLYDLGEFNQKGTVRTKYGTKAELERAIRSLKANGIQVYGDVVMNHKGGADFTERVQAVEVNPQNRNQEVSGTYQIEAWTGFNFPGRGNQHSSFKWRWYHFDGTDWDQSRQLANRIYKFRGDGKAWDWEVDTENGNYDYRTFADVDMDHPEVINELNRWGVWYANTLNLDGFRLDAVKHIKFSFMRDWLGHVRGQTGKNLFAVAEYWKNDLGALENYLSKTNWTMSAFDVPLHYNLYQASNSSGNYDMRNLLNGTLVQRHPSHAVTFVDNHDTQPGEALESFVQGWFKPLAYATILTREQGYPQVFYGDYYGIPSDGVPSYRQQIDPLLKARQQYAYGRQHDYFDHWDVIGWTREGNASHPNSGLATIMSDGPGGSKWMYVGRQKAGEVWHDMTGNRSGTVTINQDGWGHFFVNGGSVSVWVKR

SEQ ID NO: 33209 - protein, 485 aa, Bacillus sp.
HHDGTNGTIMQYFEWNVPNDGQHWNRLHNNAQNLKNAGITAIWIPPAWKGTSQNDVGYGAYDLYDLGEFNQKGTVRTKYGTKAELERAIRSLKANGIQVYGDVVMNHKGGADFTERVQAVEVNPQNRNQEVSGTYQIEAWTGFNFPGRGNQHSSFKWRWYHFDGTDWDQSRQLANRIYKFRGDGKAWDWEVDTENGNYDYHTIADVDMDHPEVINELNRWGVWYANTLNLDGFRLDAVKHIKFSFMRDWLGHVRGQTGKNLFAVAEYWKNDLGALENYLSKTNWTMSAFDVPLHYNLYQASNSSGNYDMRNLLNGTLVQRHPSHAVTFVDNHDTQPGEALESFVQGWFKPLAYATILTREQGYPQVFYGDYYGIPSDGVPSYRQQIDPLLKARQQYAYGRQHDYFDHWDVIGWTREGNASHPNSGLATIMSDGPGGSKWMYVGRQKAGEVWHDMTGNRSGTVTINQDGWGHFFVNGGSVSVWVKR

SEQ ID NO: 33210 - protein, 485 aa, Bacillus sp.
HHDGTNGTIMQYFEWNVPNDGQHWNRLHNNAQNLKNAGITAIWIPPAWKGTSQNDVGYGAYDLYDLGEFNQKGTVRTKYGTKAELERAIRSLKANGIQVYGDVVMNHKGGADFTERVQAVEVNPQNRNQEVSGTYQIEAWTGFNFPGRGNQHSSFKWRWYHFDGTDWDQSRQLANRIYKFRGDGKAWDWEVDTENGNYDQLQNADVDMDHPEVINELNRWGVWYANTLNLDGFRLDAVKHIKFSFMRDWLGHVRGQTGKNLFAVAEYWKNDLGALENYLSKTNWTMSAFDVPLHYNLYQASNSSGNYDMRNLLNGTLVQRHPSHAVTFVDNHDTQPGEALESFVQGWFKPLAYATILTREQGYPQVFYGDYYGIPSDGVPSYRQQIDPLLKARQQYAYGRQHDYFDHWDVIGWTREGNASHPNSGLATIMSDGPGGSKWMYVGRQKAGEVWHDMTGNRSGTVTINQDGWGHFFVNGGSVSVWVKR

SEQ ID NO: 33211 - protein, 485 aa, Bacillus sp.
HHDGTNGTIMQYFEWNVPNDGQHWNRLHNNAQNLKNAGITAIWIPPAWKGTSQNDVGYGAYDLYDLGEFNQKGTVRTKYGTKAELERAIRSLKANGIQVYGDVVMNHKGGADFTERVQAVEVNPQNRNQEVSGTYQIEAWTGFNFPGRGNQHSSFKWRWYHFDGTDWDQSRQLANRIYKFRGDGKAWDWEVDTENGNYDYWLGADVDMDHPEVINELNRWGVWYANTLNLDGFRLDAVKHIKFSFMRDWLGHVRGQTGKNLFAVAEYWKNDLGALENYLSKTNWTMSAFDVPLHYNLYQASNSSGNYDMRNLLNGTLVQRHPSHAVTFVDNHDTQPGEALESFVQGWFKPLAYATILTREQGYPQVFYGDYYGIPSDGVPSYRQQIDPLLKARQQYAYGRQHDYFDHWDVIGWTREGNASHPNSGLATIMSDGPGGSKWMYVGRQKAGEVWHDMTGNRSGTVTINQDGWGHFFVNGGSVSVWVKR

SEQ ID NO: 33212 - protein, 483 aa, Bacillus sp. (in: firmicutes)
HHDGTNGTIMQYFEWNVPNDGQHWNRLHNNAQNLKNAGITAIWIPPAWKGTSQNDVGYGAYDLYDLGEFNQKGTVRTKYGTKAELERAIRSLKANGIQVYGDVVMNHKGGADFTERVQAVEVNPQNRNQEVSGTYQIEAWTGFNFPGRGNQHSSFKWRWYHFDGTDWDQSRQLANRIYKFRGKAWDWEVDTENGNYDYLMYADVDMDHPEVINELNRWGVWYANTLNLDGFRLDAVKHIKFSFMRDWLGHVRGQTGKNLFAIGEFWKNDLGALENYLSKTNWTMSAFDAPLHYNLYQASNSSGNYDMRNLLNGTLVQRHPSHAVTLVDNHDTQPGEALESFVQGWFKPLAYATILTREQGYPCVFYGDYYGIPSDGVPSYRQQIDPLLKARQQYAYGRQHDYFDHWDVIGWTREGNASHPNSGLATIMSDGPGGSKWMYVGRQKAGEVWHDMTGNRSGTVTINQDGWGHFFVNGGSVSVWVKR

SEQ ID NO: 33213 - protein, 485 aa, Bacillus sp.
HHDGTNGTIMQYFEWNVPNDGQHWNRLHNNAQNLKNAGITAIWIPPAWKGTSQNDVGYGAYDLYDLGEFNQKGTVRTKYGTKAELERAIRSLKANGIQVYGDVVMNHKGGADFTERVQAVEVNPQNRNQEVSGTYQIEAWTGFNFPGRGNQHSSFKWRWYHFDGTDWDQSRQLANRIYKFRGDGKAWDWEVDTENGNYDPLLAADVDMDHPEVINELNRWGVWYANTLNLDGFRLDAVKHIKFSFMRDWLGHVRGQTGKNLFAVAEYWKNDLGALENYLSKTNWTMSAFDVPLHYNLYQASNSSGNYDMRNLLNGTLVQRHPSHAVTFVDNHDTQPGEALESFVQGWFKPLAYATILTREQGYPQVFYGDYYGIPSDGVPSYRQQIDPLLKARQQYAYGRQHDYFDHWDVIGWTREGNASHPNSGLATIMSDGPGGSKWMYVGRQKAGEVWHDMTGNRSGTVTINQDGWGHFFVNGGSVSVWVKR

SEQ ID NO: 33214 - protein, 485 aa, Bacillus sp.
HHDGTNGTIMQYFEWNVPNDGQHWNRLHNNAQNLKNAGITAIWIPPAWKGTSQNDVGYGAYDLYDLGEFNQKGTVRTKYGTKAELERAIRSLKANGIQVYGDVVMNHKGGADFTERVQAVEVNPQNRNQEVSGTYQIEAWTGFNFPGRGNQHSSFKWRWYHFDGTDWDQSRQLANRIYKFRGDGKAWDWEVDTENGNYDIPLYADVDMDHPEVINELNRWGVWYANTLNLDGFRLDAVKHIKFSFMRDWLGHVRGQTGKNLFAVAEYWKNDLGALENYLSKTNWTMSAFDVPLHYNLYQASNSSGNYDMRNLLNGTLVQRHPSHAVTFVDNHDTQPGEALESFVQGWFKPLAYATILTREQGYPQVFYGDYYGIPSDGVPSYRQQIDPLLKARQQYAYGRQHDYFDHWDVIGWTREGNASHPNSGLATIMSDGPGGSKWMYVGRQKAGEVWHDMTGNRSGTVTINQDGWGHFFVNGGSVSVWVKR

SEQ ID NO: 33215 - protein, 485 aa, Bacillus sp.
HHDGTNGTIMQYFEWNVPNDGQHWNRLHNNAQNLKNAGITAIWIPPAWKGTSQNDVGYGAYDLYDLGEFNQKGTVRTKYGTKAELERAIRSLKANGIQVYGDVVMNHKGGADFTERVQAVEVNPQNRNQEVSGTYQIEAWTGFNFPGRGNQHSSFKWRWYHFDGTDWDQSRQLANRIYKFRGDGKAWDWEVDTENGNYDTPLYADVDMDHPEVINELNRWGVWYANTLNLDGFRLDAVKHIKFSFMRDWLGHVRGQTGKNLFAVAEYWKNDLGALENYLSKTNWTMSAFDVPLHYNLYQASNSSGNYDMRNLLNGTLVQRHPSHAVTFVDNHDTQPGEALESFVQGWFKPLAYATILTREQGYPQVFYGDYYGIPSDGVPSYRQQIDPLLKARQQYAYGRQHDYFDHWDVIGWTREGNASHPNSGLATIMSDGPGGSKWMYVGRQKAGEVWHDMTGNRSGTVTINQDGWGHFFVNGGSVSVWVKR

SEQ ID NO: 33216 - protein, 485 aa, Bacillus sp.
HHDGTNGTIMQYFEWNVPNDGQHWNRLHNNAQNLKNAGITAIWIPPAWKGTSQNDVGYGAYDLYDLGEFNQKGTVRTKYGTKAELERAIRSLKANGIQVYGDVVMNHKGGADFTERVQAVEVNPQNRNQEVSGTYQIEAWTGFNFPGRGNQHSSFKWRWYHFDGTDWDQSRQLANRIYKFRGDGKAWDWEVDTENGNYDYPLLADVDMDHPEVINELNRWGVWYANTLNLDGFRLDAVKHIKFSFMRDWLGHVRGQTGKNLFAVAEYWKNDLGALENYLSKTNWTMSAFDVPLHYNLYQASNSSGNYDMRNLLNGTLVQRHPSHAVTFVDNHDTQPGEALESFVQGWFKPLAYATILTREQGYPQVFYGDYYGIPSDGVPSYRQQIDPLLKARQQYAYGRQHDYFDHWDVIGWTREGNASHPNSGLATIMSDGPGGSKWMYVGRQKAGEVWHDMTGNRSGTVTINQDGWGHFFVNGGSVSVWVKR

SEQ ID NO: 33217 - protein, 485 aa, Bacillus sp.
HHDGTNGTIMQYFEWNVPNDGQHWNRLHNNAQNLKNAGITAIWIPPAWKGTSQNDVGYGAYDLYDLGEFNQKGTVRTKYGTKAELERAIRSLKANGIQVYGDVVMNHKGGADFTERVQAVEVNPQNRNQEVSGTYQIEAWTGFNFPGRGNQHSSFKWRWYHFDGTDWDQSRQLANRIYKFRGDGKAWDWEVDTENGNYDWLPGADVDMDHPEVINELNRWGVWYANTLNLDGFRLDAVKHIKFSFMRDWLGHVRGQTGKNLFAVAEYWKNDLGALENYLSKTNWTMSAFDVPLHYNLYQASNSSGNYDMRNLLNGTLVQRHPSHAVTFVDNHDTQPGEALESFVQGWFKPLAYATILTREQGYPQVFYGDYYGIPSDGVPSYRQQIDPLLKARQQYAYGRQHDYFDHWDVIGWTREGNASHPNSGLATIMSDGPGGSKWMYVGRQKAGEVWHDMTGNRSGTVTINQDGWGHFFVNGGSVSVWVKR

SEQ ID NO: 33218 - protein, 485 aa, Bacillus sp.
HHDGTNGTIMQYFEWNVPNDGQHWNRLHNNAQNLKNAGITAIWIPPAWKGTSQNDVGYGAYDLYDLGEFNQKGTVRTKYGTKAELERAIRSLKANGIQVYGDVVMNHKGGADFTERVQAVEVNPQNRNQEVSGTYQIEAWTGFNFPGRGNQHSSFKWRWYHFDGTDWDQSRQLANRIYKFRGDGKAWDWEVDTENGNYDWLQPADVDMDHPEVINELNRWGVWYANTLNLDGFRLDAVKHIKFSFMRDWLGHVRGQTGKNLFAVAEYWKNDLGALENYLSKTNWTMSAFDVPLHYNLYQASNSSGNYDMRNLLNGTLVQRHPSHAVTFVDNHDTQPGEALESFVQGWFKPLAYATILTREQGYPQVFYGDYYGIPSDGVPSYRQQIDPLLKARQQYAYGRQHDYFDHWDVIGWTREGNASHPNSGLATIMSDGPGGSKWMYVGRQKAGEVWHDMTGNRSGTVTINQDGWGHFFVNGGSVSVWVKR

SEQ ID NO: 33219 - protein, 485 aa, Bacillus sp.
HHDGTNGTIMQYFEWNVPNDGQHWNRLHNNAQNLKNAGITAIWIPPAWKGTSQNDVGYGAYDLYDLGEFNQKGTVRTKYGTKAELERAIRSLKANGIQVYGDVVMNHKGGADFTERVQAVEVNPQNRNQEVSGTYQIEAWTGFNFPGRGNQHSSFKWRWYHFDGTDWDQSRQLANRIYKFRGDGKAWDWEVDTENGNYDWLLVADVDMDHPEVINELNRWGVWYANTLNLDGFRLDAVKHIKFSFMRDWLGHVRGQTGKNLFAVAEYWKNDLGALENYLSKTNWTMSAFDVPLHYNLYQASNSSGNYDMRNLLNGTLVQRHPSHAVTFVDNHDTQPGEALESFVQGWFKPLAYATILTREQGYPQVFYGDYYGIPSDGVPSYRQQIDPLLKARQQYAYGRQHDYFDHWDVIGWTREGNASHPNSGLATIMSDGPGGSKWMYVGRQKAGEVWHDMTGNRSGTVTINQDGWGHFFVNGGSVSVWVKR

SEQ ID NO: 33220 - protein, 485 aa, Bacillus sp.
HHDGTNGTIMQYFEWNVPNDGQHWNRLHNNAQNLKNAGITAIWIPPAWKGTSQNDVGYGAYDLYDLGEFNQKGTVRTKYGTKAELERAIRSLKANGIQVYGDVVMNHKGGADFTERVQAVEVNPQNRNQEVSGTYQIEAWTGFNFPGRGNQHSSFKWRWYHFDGTDWDQSRQLANRIYKFRGDGKAWDWEVDTENGNYDYPPRADVDMDHPEVINELNRWGVWYANTLNLDGFRLDAVKHIKFSFMRDWLGHVRGQTGKNLFAVAEYWKNDLGALENYLSKTNWTMSAFDVPLHYNLYQASNSSGNYDMRNLLNGTLVQRHPSHAVTFVDNHDTQPGEALESFVQGWFKPLAYATILTREQGYPQVFYGDYYGIPSDGVPSYRQQIDPLLKARQQYAYGRQHDYFDHWDVIGWTREGNASHPNSGLATIMSDGPGGSKWMYVGRQKAGEVWHDMTGNRSGTVTINQDGWGHFFVNGGSVSVWVKR

SEQ ID NO: 33221 - protein, 485 aa, Bacillus sp.
HHDGTNGTIMQYFEWNVPNDGQHWNRLHNNAQNLKNAGITAIWIPPAWKGTSQNDVGYGAYDLYDLGEFNQKGTVRTKYGTKAELERAIRSLKANGIQVYGDVVMNHKGGADFTERVQAVEVNPQNRNQEVSGTYQIEAWTGFNFPGRGNQHSSFKWRWYHFDGTDWDQSRQLANRIYKFRGDGKAWDWEVDTENGNYDQELYADVDMDHPEVINELNRWGVWYANTLNLDGFRLDAVKHIKFSFMRDWLGHVRGQTGKNLFAVAEYWKNDLGALENYLSKTNWTMSAFDVPLHYNLYQASNSSGNYDMRNLLNGTLVQRHPSHAVTFVDNHDTQPGEALESFVQGWFKPLAYATILTREQGYPQVFYGDYYGIPSDGVPSYRQQIDPLLKARQQYAYGRQHDYFDHWDVIGWTREGNASHPNSGLATIMSDGPGGSKWMYVGRQKAGEVWHDMTGNRSGTVTINQDGWGHFFVNGGSVSVWVKR

SEQ ID NO: 33222 - protein, 485 aa, Bacillus sp.
HHDGTNGTIMQYFEWNVPNDGQHWNRLHNNAQNLKNAGITAIWIPPAWKGTSQNDVGYGAYDLYDLGEFNQKGTVRTKYGTKAELERAIRSLKANGIQVYGDVVMNHKGGADFTERVQAVEVNPQNRNQEVSGTYQIEAYTGFNFPGRGNQHSSFKWRWYHFDGTDWDQSRQLANRIYKFRGDGKAWDWEVDTENGNYDYLMYADVDMDHPEVINELNRWGVWYANTLNLDGFRLDAVKHIKFSFMRDWLGHVRGQTGKPLFAVAEYWKNDLGALENYLSKTNWTMSAFDVPLHYNLYQASNSSKNYDMRNLLNGTLVQRHPSHAVTFVDNHDTQPGEALESFVQGWFKPLAYATILTREQGYPQVFYGDYYGIPSDGVPSYRQQIDPLLKARQQYAYGRQHDYFDHWDVIGWTREGNASHPNSGLATIMSDGPGGSKWMYVGRQKAGEVWHDMTGNRSGTVTINQDGWGHFFVNGKSVSVWVKR

SEQ ID NO: 33223 - protein, 485 aa, Bacillus sp.
HHDGTNGTIMQYFEWNVPNDGQHWNRLHNNAQNLKNAGITAIWIPPAWKGTSQNDVGYGAYDLYDLGEFNQKGTVRTKYGTKAELERAIRSLKANGIQVYGDVVMNHKGGADFTERVQAVEVNPQNRNQEVSGTYQIEAYTGFNFPGRGNQHSSFKWRWYHFDGTDWDQSRQLANRIYKFRGDGKAWDWEVDTENGNYDYLMYADVDMDHPEVINELNRWGVWYANTLNLDGFRLDAVKHIKFSFMRDWLGHVRGQTGKPLFAVAEYWKNDLGALENYLSKTNWTMSAFDVPLHYNLYQASNSSKNYDMRNLLNGTLVQRHPSHAVTFVDNHDTQPGEALESFVQGWFKPLAYATILTREQGYPQVFYGDYYGIPSDGVPSYRQQIDPLLKARQQYAYGRQHDYFDHWDVIGWTREGNASHPNSGLATIMSDGPGGSKWMYVGRQKAGEVWHDMTGNRSGTVTINQDGWGHFFVNKGSVSVWVKR

SEQ ID NO: 33224 - protein, 485 aa, Bacillus sp.
HHDGTNGTIMQYFEWNVPNDGQHWNRLHNNAQNLKNAGITAIWIPPAWKGTSQNDVGYGAYDLYDLGEFNQKGTVRTKYGTKAELERAIRSLKANGIQVYGDVVMNHKGGADFTERVQAVEVNPQNRNQEVSGTYQIEAWTGFNFPGRGNQHSSFKWRWYHFDGTDWDQSRQLANRIYKFRGDGKAWDWEVDTENGNYDQLPRADVDMDHPEVINELNRWGVWYANTLNLDGFRLDAVKHIKFSFMRDWLGHVRGQTGKNLFAVAEYWKNDLGALENYLSKTNWTMSAFDVPLHYNLYQASNSSGNYDMRNLLNGTLVQRHPSHAVTFVDNHDTQPGEALESFVQGWFKPLAYATILTREQGYPQVFYGDYYGIPSDGVPSYRQQIDPLLKARQQYAYGRQHDYFDHWDVIGWTREGNASHPNSGLATIMSDGPGGSKWMYVGRQKAGEVWHDMTGNRSGTVTINQDGWGHFFVNGGSVSVWVKR

SEQ ID NO: 33225 - protein, 485 aa, Bacillus sp.
HHDGTNGTIMQYFEWNVPNDGQHWNRLHNNAQNLKNAGITAIWIPPAWKGTSQNDVGYGAYDLYDLGEFNQKGTVRTKYGTKAELERAIRSLKANGIQVYGDVVMNHKGGADFTERVQAVEVNPQNRNQEVSGTYQIEAYTGFNFPGRGNQHSSFKWRWYHFDGTDWDQSRQLANRIYKFRGDGKAWDWEVDTENGNYDYLMYADVDMDHPEVINELNRWGVWYANTLNLDGFRLDAVKHIKFSFMRDWLGHVRGQTGKNLFAVAEYWKNDLGALENYLSKTNWTMSAFDVPLHYNLYQASNSSKNYDMRNLLNGTLVQRHPSHAVTFVDNHDTQPGEALESFVQGWFKPLAYATILTREQGYPQVFYGDYYGIPSDGVPSYRQQIDPLLKARQQYAYGRQHDYFDHWDVIGWTREGNASHPNSGLATIMSDGPGGSKWMYVGRQKAGEVWHDMTGNRSGTVTINQDGWGHFFVNGKSVSVWVKR

SEQ ID NO: 33226 - protein, 485 aa, Bacillus sp.
HHDGTNGTIMQYFEWNVPNDGQHWNRLHNNAQNLKNAGITAIWIPPAWKGTSQNDVGYGAYDLYDLGEFNQKGTVRTKYGTKAELERAIRSLKANGIQVYGDVVMNHKGGADFTERVQAVEVNPQNRNQEVSGTYQIEAWTGFNFPGRGNQHSSFKWRWYHFDGTDWDQSRQLANRIYKFRGDGKAWDWEVDTENGNYDQLLYTDVDMDHPEVINELNRWGVWYANTLNLDGFRLDAVKHIKFSFMRDWLGHVRGQTGKNLFAVAEYWKNDLGALENYLSKTNWTMSAFDVPLHYNLYQASNSSGNYDMRNLLNGTLVQRHPSHAVTFVDNHDTQPGEALESFVQGWFKPLAYATILTREQGYPQVFYGDYYGIPSDGVPSYRQQIDPLLKARQQYAYGRQHDYFDHWDVIGWTREGNASHPNSGLATIMSDGPGGSKWMYVGRQKAGEVWHDMTGNRSGTVTINQDGWGHFFVNGGSVSVWVKR

SEQ ID NO: 33227 - protein, 485 aa, Bacillus sp.
HHDGTNGTIMQYFEWNVPNDGQHWNRLHNNAQNLKNAGITAIWIPPAWKGTSQNDVGYGAYDLYDLGEFNQKGTVRTKYGTKAELERAIRSLKANGIQVYGDVVMNHKGGADFTERVQAVEVNPQNRNQEVSGTYQIEAWTGFNFPGRGNQHSSFKWRWYHFDGTDWDQSRQLANRIYKFRGDGKAWDWEVDTENGNYDYWLHADVDMDHPEVINELNRWGVWYANTLNLDGFRLDAVKHIKFSFMRDWLGHVRGQTGKNLFAVAEYWKNDLGALENYLSKTNWTMSAFDVPLHYNLYQASNSSGNYDMRNLLNGTLVQRHPSHAVTFVDNHDTQPGEALESFVQGWFKPLAYATILTREQGYPQVFYGDYYGIPSDGVPSYRQQIDPLLKARQQYAYGRQHDYFDHWDVIGWTREGNASHPNSGLATIMSDGPGGSKWMYVGRQKAGEVWHDMTGNRSGTVTINQDGWGHFFVNGGSVSVWVKR

SEQ ID NO: 33228 - protein, 485 aa, Bacillus sp.
HHDGTNGTIMQYFEWNVPNDGQHWNRLHNNAQNLKNAGITAIWIPPAWKGTSQNDVGYGAYDLYDLGEFNQKGTVRTKYGTKAELERAIRSLKANGIQVYGDVVMNHKGGADFTERVQAVEVNPQNRNQEVSGTYQIEAWTGFNFPGRGNQHSSFKWRWYHFDGTDWDQSRQLANRIYKFRGDGKAWDWEVDTENGNYDYWLWADVDMDHPEVINELNRWGVWYANTLNLDGFRLDAVKHIKFSFMRDWLGHVRGQTGKNLFAVAEYWKNDLGALENYLSKTNWTMSAFDVPLHYNLYQASNSSGNYDMRNLLNGTLVQRHPSHAVTFVDNHDTQPGEALESFVQGWFKPLAYATILTREQGYPQVFYGDYYGIPSDGVPSYRQQIDPLLKARQQYAYGRQHDYFDHWDVIGWTREGNASHPNSGLATIMSDGPGGSKWMYVGRQKAGEVWHDMTGNRSGTVTINQDGWGHFFVNGGSVSVWVKR

SEQ ID NO: 33229 - protein, 485 aa, Bacillus sp.
HHDGTNGTIMQYFEWNVPNDGQHWNRLHNNAQNLKNAGITAIWIPPAWKGTSQNDVGYGAYDLYDLGEFNQKGTVRTKYGTKAELERAIRSLKANGIQVYGDVVMNHKGGADFTERVQAVEVNPQNRNQEVSGTYQIEAWTGFNFPGRGNQHSSFKWRWYHFDGTDWDQSRQLANRIYKFRGDGKAWDWEVDTENGNYDYHLIADVDMDHPEVINELNRWGVWYANTLNLDGFRLDAVKHIKFSFMRDWLGHVRGQTGKNLFAVAEYWKNDLGALENYLSKTNWTMSAFDVPLHYNLYQASNSSGNYDMRNLLNGTLVQRHPSHAVTFVDNHDTQPGEALESFVQGWFKPLAYATILTREQGYPQVFYGDYYGIPSDGVPSYRQQIDPLLKARQQYAYGRQHDYFDHWDVIGWTREGNASHPNSGLATIMSDGPGGSKWMYVGRQKAGEVWHDMTGNRSGTVTINQDGWGHFFVNGGSVSVWVKR

SEQ ID NO: 33230 - protein, 485 aa, Bacillus sp.
HHDGTNGTIMQYFEWNVPNDGQHWNRLHNNAQNLKNAGITAIWIPPAWKGTSQNDVGYGAYDLYDLGEFNQKGTVRTKYGTKAELERAIRSLKANGIQVYGDVVMNHKGGADFTERVQAVEVNPQNRNQEVSGTYQIEAWTGFNFPGRGNQHSSFKWRWYHFDGTDWDQSRQLANRIYKFRGDGKAWDWEVDTENGNYDQLLAADVDMDHPEVINELNRWGVWYANTLNLDGFRLDAVKHIKFSFMRDWLGHVRGQTGKNLFAVAEYWKNDLGALENYLSKTNWTMSAFDVPLHYNLYQASNSSGNYDMRNLLNGTLVQRHPSHAVTFVDNHDTQPGEALESFVQGWFKPLAYATILTREQGYPQVFYGDYYGIPSDGVPSYRQQIDPLLKARQQYAYGRQHDYFDHWDVIGWTREGNASHPNSGLATIMSDGPGGSKWMYVGRQKAGEVWHDMTGNRSGTVTINQDGWGHFFVNGGSVSVWVKR

SEQ ID NO: 33231 - protein, 485 aa, Bacillus sp.
HHDGTNGTIMQYFEWNVPNDGQHWNRLHNNAQNLKNAGITAIWIPPAWKGTSQNDVGYGAYDLYDLGEFNQKGTVRTKYGTKAELERAIRSLKANGIQVYGDVVMNHKGGADFTERVQAVEVNPQNRNQEVSGTYQIEAWTGFNFPGRGNQHSSFKWRWYHFDGTDWDQSRQLANRIYKFRGDGKAWDWEVDTENGNYDQLPSADVDMDHPEVINELNRWGVWYANTLNLDGFRLDAVKHIKFSFMRDWLGHVRGQTGKNLFAVAEYWKNDLGALENYLSKTNWTMSAFDVPLHYNLYQASNSSGNYDMRNLLNGTLVQRHPSHAVTFVDNHDTQPGEALESFVQGWFKPLAYATILTREQGYPQVFYGDYYGIPSDGVPSYRQQIDPLLKARQQYAYGRQHDYFDHWDVIGWTREGNASHPNSGLATIMSDGPGGSKWMYVGRQKAGEVWHDMTGNRSGTVTINQDGWGHFFVNGGSVSVWVKR

SEQ ID NO: 33232 - protein, 485 aa, Bacillus sp.
HHDGTNGTIMQYFEWNVPNDGQHWNRLHNNAQNLKNAGITAIWIPPAWKGTSQNDVGYGAYDLYDLGEFNQKGTVRTKYGTKAELERAIRSLKANGIQVYGDVVMNHKGGADFTERVQAVEVNPQNRNQEVSGTYQIEAWTGFNFPGRGNQHSSFKWRWYHFDGTDWDQSRQLANRIYKFRGDGKAWDWEVDTENGNYDVLNTADVDMDHPEVINELNRWGVWYANTLNLDGFRLDAVKHIKFSFMRDWLGHVRGQTGKNLFAVAEYWKNDLGALENYLSKTNWTMSAFDVPLHYNLYQASNSSGNYDMRNLLNGTLVQRHPSHAVTFVDNHDTQPGEALESFVQGWFKPLAYATILTREQGYPQVFYGDYYGIPSDGVPSYRQQIDPLLKARQQYAYGRQHDYFDHWDVIGWTREGNASHPNSGLATIMSDGPGGSKWMYVGRQKAGEVWHDMTGNRSGTVTINQDGWGHFFVNGGSVSVWVKR

SEQ ID NO: 33233 - protein, 485 aa, Bacillus sp.
HHDGTNGTIMQYFEWNVPNDGQHWNRLHNNAQNLKNAGITAIWIPPAWKGTSQNDVGYGAYDLYDLGEFNQKGTVRTKYGTKAELERAIRSLKANGIQVYGDVVMNHKGGADFTERVQAVEVNPQNRNQEVSGTYQIEAWTGFNFPGRGNQHSSFKWRWYHFDGTDWDQSRQLANRIYKFRGDGKAWDWEVDTENGNYDWLPIADVDMDHPEVINELNRWGVWYANTLNLDGFRLDAVKHIKFSFMRDWLGHVRGQTGKNLFAVAEYWKNDLGALENYLSKTNWTMSAFDVPLHYNLYQASNSSGNYDMRNLLNGTLVQRHPSHAVTFVDNHDTQPGEALESFVQGWFKPLAYATILTREQGYPQVFYGDYYGIPSDGVPSYRQQIDPLLKARQQYAYGRQHDYFDHWDVIGWTREGNASHPNSGLATIMSDGPGGSKWMYVGRQKAGEVWHDMTGNRSGTVTINQDGWGHFFVNGGSVSVWVKR

SEQ ID NO: 33234 - protein, 485 aa, Bacillus sp.
HHDGTNGTIMQYFEWNVPNDGQHWNRLHNNAQNLKNAGITAIWIPPAWKGTSQNDVGYGAYDLYDLGEFNQKGTVRTKYGTKAELERAIRSLKANGIQVYGDVVMNHKGGADFTERVQAVEVNPQNRNQEVSGTYQIEAWTGFNFPGRGNQHSSFKWRWYHFDGTDWDQSRQLANRIYKFRGDGKAWDWEVDTENGNYDYELTADVDMDHPEVINELNRWGVWYANTLNLDGFRLDAVKHIKFSFMRDWLGHVRGQTGKNLFAVAEYWKNDLGALENYLSKTNWTMSAFDVPLHYNLYQASNSSGNYDMRNLLNGTLVQRHPSHAVTFVDNHDTQPGEALESFVQGWFKPLAYATILTREQGYPQVFYGDYYGIPSDGVPSYRQQIDPLLKARQQYAYGRQHDYFDHWDVIGWTREGNASHPNSGLATIMSDGPGGSKWMYVGRQKAGEVWHDMTGNRSGTVTINQDGWGHFFVNGGSVSVWVKR

SEQ ID NO: 33235 - protein, 485 aa, Bacillus sp.
HHDGTNGTIMQYFEWNVPNDGQHWNRLHNNAQNLKNAGITAIWIPPAWKGTSQNDVGYGAYDLYDLGEFNQKGTVRTKYGTKAELERAIRSLKANGIQVYGDVVMNHKGGADFTERVQAVEVNPQNRNQEVSGTYQIEAWTGFNFPGRGNQHSSFKWRWYHFDGTDWDQSRQLANRIYKFRGDGKAWDWEVDTENGNYDEQLYADVDMDHPEVINELNRWGVWYANTLNLDGFRLDAVKHIKFSFMRDWLGHVRGQTGKNLFAVAEYWKNDLGALENYLSKTNWTMSAFDVPLHYNLYQASNSSGNYDMRNLLNGTLVQRHPSHAVTFVDNHDTQPGEALESFVQGWFKPLAYATILTREQGYPQVFYGDYYGIPSDGVPSYRQQIDPLLKARQQYAYGRQHDYFDHWDVIGWTREGNASHPNSGLATIMSDGPGGSKWMYVGRQKAGEVWHDMTGNRSGTVTINQDGWGHFFVNGGSVSVWVKR

SEQ ID NO: 33236 - protein, 485 aa, Bacillus sp.
HHDGTNGTIMQYFEWNVPNDGQHWNRLHNNAQNLKNAGITAIWIPPAWKGTSQNDVGYGAYDLYDLGEFNQKGTVRTKYGTKAELERAIRSLKANGIQVYGDVVMNHKGGADFTERVQAVEVNPQNRNQEVSGTYQIEAWTGFNFPGRGNQHSSFKWRWYHFDGTDWDQSRQLANRIYKFRGDGKAWDWEVDTENGNYDTLIRADVDMDHPEVINELNRWGVWYANTLNLDGFRLDAVKHIKFSFMRDWLGHVRGQTGKNLFAVAEYWKNDLGALENYLSKTNWTMSAFDVPLHYNLYQASNSSGNYDMRNLLNGTLVQRHPSHAVTFVDNHDTQPGEALESFVQGWFKPLAYATILTREQGYPQVFYGDYYGIPSDGVPSYRQQIDPLLKARQQYAYGRQHDYFDHWDVIGWTREGNASHPNSGLATIMSDGPGGSKWMYVGRQKAGEVWHDMTGNRSGTVTINQDGWGHFFVNGGSVSVWVKR

SEQ ID NO: 33237 - protein, 485 aa, Bacillus sp.
HHDGTNGTIMQYFEWNVPNDGQHWNRLHNNAQNLKNAGITAIWIPPAWKGTSQNDVGYGAYDLYDLGEFNQKGTVRTKYGTKAELERAIRSLKANGIQVYGDVVMNHKGGADFTERVQAVEVNPQNRNQEVSGTYQIEAWTGFNFPGRGNQHSSFKWRWYHFDGTDWDQSRQLANRIYKFRGDGKAWDWEVDTENGNYDNLLLADVDMDHPEVINELNRWGVWYANTLNLDGFRLDAVKHIKFSFMRDWLGHVRGQTGKNLFAVAEYWKNDLGALENYLSKTNWTMSAFDVPLHYNLYQASNSSGNYDMRNLLNGTLVQRHPSHAVTFVDNHDTQPGEALESFVQGWFKPLAYATILTREQGYPQVFYGDYYGIPSDGVPSYRQQIDPLLKARQQYAYGRQHDYFDHWDVIGWTREGNASHPNSGLATIMSDGPGGSKWMYVGRQKAGEVWHDMTGNRSGTVTINQDGWGHFFVNGGSVSVWVKR

SEQ ID NO: 33238 - protein, 485 aa, Bacillus sp.
HHDGTNGTIMQYFEWNVPNDGQHWNRLHNNAQNLKNAGITAIWIPPAWKGTSQNDVGYGAYDLYDLGEFNQKGTVRTKYGTKAELERAIRSLKANGIQVYGDVVMNHKGGADFTERVQAVEVNPQNRNQEVSGTYQIEAWTGFNFPGRGNQHSSFKWRWYHFDGTDWDQSRQLANRIYKFRGDGKAWDWEVDTENGNYDWLPAADVDMDHPEVINELNRWGVWYANTLNLDGFRLDAVKHIKFSFMRDWLGHVRGQTGKNLFAVAEYWKNDLGALENYLSKTNWTMSAFDVPLHYNLYQASNSSGNYDMRNLLNGTLVQRHPSHAVTFVDNHDTQPGEALESFVQGWFKPLAYATILTREQGYPQVFYGDYYGIPSDGVPSYRQQIDPLLKARQQYAYGRQHDYFDHWDVIGWTREGNASHPNSGLATIMSDGPGGSKWMYVGRQKAGEVWHDMTGNRSGTVTINQDGWGHFFVNGGSVSVWVKR

SEQ ID NO: 33239 - protein, 485 aa, Bacillus sp.
HHDGTNGTIMQYFEWNVPNDGQHWNRLHNNAQNLKNAGITAIWIPPAWKGTSQNDVGYGAYDLYDLGEFNQKGTVRTKYGTKAELERAIRSLKANGIQVYGDVVMNHKGGADFTERVQAVEVNPQNRNQEVSGTYQIEAWTGFNFPGRGNQHSSFKWRWYHFDGTDWDQSRQLANRIYKFRGDGKAWDWEVDTENGNYDPLLKADVDMDHPEVINELNRWGVWYANTLNLDGFRLDAVKHIKFSFMRDWLGHVRGQTGKNLFAVAEYWKNDLGALENYLSKTNWTMSAFDVPLHYNLYQASNSSGNYDMRNLLNGTLVQRHPSHAVTFVDNHDTQPGEALESFVQGWFKPLAYATILTREQGYPQVFYGDYYGIPSDGVPSYRQQIDPLLKARQQYAYGRQHDYFDHWDVIGWTREGNASHPNSGLATIMSDGPGGSKWMYVGRQKAGEVWHDMTGNRSGTVTINQDGWGHFFVNGGSVSVWVKR

SEQ ID NO: 33240 - protein, 485 aa, Bacillus sp.
HHDGTNGTIMQYFEWNVPNDGQHWNRLHNNAQNLKNAGITAIWIPPAWKGTSQNDVGYGAYDLYDLGEFNQKGTVRTKYGTKAELERAIRSLKANGIQVYGDVVMNHKGGADFTERVQAVEVNPQNRNQEVSGTYQIEAWTGFNFPGRGNQHSSFKWRWYHFDGTDWDQSRQLANRIYKFRGDGKAWDWEVDTENGNYDQLLHADVDMDHPEVINELNRWGVWYANTLNLDGFRLDAVKHIKFSFMRDWLGHVRGQTGKNLFAVAEYWKNDLGALENYLSKTNWTMSAFDVPLHYNLYQASNSSGNYDMRNLLNGTLVQRHPSHAVTFVDNHDTQPGEALESFVQGWFKPLAYATILTREQGYPQVFYGDYYGIPSDGVPSYRQQIDPLLKARQQYAYGRQHDYFDHWDVIGWTREGNASHPNSGLATIMSDGPGGSKWMYVGRQKAGEVWHDMTGNRSGTVTINQDGWGHFFVNGGSVSVWVKR

SEQ ID NO: 33241 - protein, 485 aa, Bacillus sp.
HHDGTNGTIMQYFEWNVPNDGQHWNRLHNNAQNLKNAGITAIWIPPAWKGTSQNDVGYGAYDLYDLGEFNQKGTVRTKYGTKAELERAIRSLKANGIQVYGDVVMNHKGGADFTERVQAVEVNPQNRNQEVSGTYQIEAWTGFNFPGRGNQHSSFKWRWYHFDGTDWDQSRQLANRIYKFRGDGKAWDWEVDTENGNYDYRHTADVDMDHPEVINELNRWGVWYANTLNLDGFRLDAVKHIKFSFMRDWLGHVRGQTGKNLFAVAEYWKNDLGALENYLSKTNWTMSAFDVPLHYNLYQASNSSGNYDMRNLLNGTLVQRHPSHAVTFVDNHDTQPGEALESFVQGWFKPLAYATILTREQGYPQVFYGDYYGIPSDGVPSYRQQIDPLLKARQQYAYGRQHDYFDHWDVIGWTREGNASHPNSGLATIMSDGPGGSKWMYVGRQKAGEVWHDMTGNRSGTVTINQDGWGHFFVNGGSVSVWVKR

SEQ ID NO: 33242 - protein, 485 aa, Bacillus sp.
HHDGTNGTIMQYFEWNVPNDGQHWNRLHNNAQNLKNAGITAIWIPPAWKGTSQNDVGYGAYDLYDLGEFNQKGTVRTKYGTKAELERAIRSLKANGIQVYGDVVMNHKGGADFTERVQAVEVNPQNRNQEVSGTYQIEAWTGFNFPGRGNQHSSFKWRWYHFDGTDWDQSRQLANRIYKFRGDGKAWDWEVDTENGNYDYTPRADVDMDHPEVINELNRWGVWYANTLNLDGFRLDAVKHIKFSFMRDWLGHVRGQTGKNLFAVAEYWKNDLGALENYLSKTNWTMSAFDVPLHYNLYQASNSSGNYDMRNLLNGTLVQRHPSHAVTFVDNHDTQPGEALESFVQGWFKPLAYATILTREQGYPQVFYGDYYGIPSDGVPSYRQQIDPLLKARQQYAYGRQHDYFDHWDVIGWTREGNASHPNSGLATIMSDGPGGSKWMYVGRQKAGEVWHDMTGNRSGTVTINQDGWGHFFVNGGSVSVWVKR

SEQ ID NO: 33243 - protein, 485 aa, Bacillus sp.
HHDGTNGTIMQYFEWNVPNDGQHWNRLHNNAQNLKNAGITAIWIPPAWKGTSQNDVGYGAYDLYDLGEFNQKGTVRTKYGTKAELERAIRSLKANGIQVYGDVVMNHKGGADFTERVQAVEVNPQNRNQEVSGTYQIEAYTGFNFPGRGNQHSSFKWRWYHFDGTDWDQSRQLANRIYKFRGDGKAWDWEVDTENGNYDYLMYADVDMDHPDVINELNRWGVWYANTLNLDGFRLDAVKHIKFSFMRDWLGHVRGQTGKNLFAVAEYWKNDLGALENYLSKTNWTMSAFDVPLHYNLYQASNSRGNYDMRNLLNGTLVQRHPSHAVTFVDNHDTQPGEALESFVQGWFKPLAYATILTREQGYPQVFYGDYYGIPSDGVPSYRQQIDPLLKARQQYAYGRQHDYFDHWDVIGWTREGNASHPNSGLATIMSDGPGGSKWMYVGRQKAGEVWHDMTGNRSGTVTINQDGWGHFFVNGKSVSVWVKR

SEQ ID NO: 33244 - protein, 485 aa, Bacillus sp.
HHDGTNGTIMQYFEWNVPNDGQHWNRLHNNAQNLKNAGITAIWIPPAWKGTSQNDVGYGAYDLYDLGEFNQKGTVRTKYGTKAELERAIRSLKANGIQVYGDVVMNHKGGADFTERVQAVEVNPQNRNQEVSGTYQIEAWTGFNFPGRGNQHSSFKWRWYHFDGTDWDQSRQLANRIYKFRGDGKAWDWEVDTENGNYDYPLSADVDMDHPEVINELNRWGVWYANTLNLDGFRLDAVKHIKFSFMRDWLGHVRGQTGKNLFAVAEYWKNDLGALENYLSKTNWTMSAFDVPLHYNLYQASNSSGNYDMRNLLNGTLVQRHPSHAVTFVDNHDTQPGEALESFVQGWFKPLAYATILTREQGYPQVFYGDYYGIPSDGVPSYRQQIDPLLKARQQYAYGRQHDYFDHWDVIGWTREGNASHPNSGLATIMSDGPGGSKWMYVGRQKAGEVWHDMTGNRSGTVTINQDGWGHFFVNGGSVSVWVKR

SEQ ID NO: 33245 - protein, 485 aa, Bacillus sp.
HHDGTNGTIMQYFEWNVPNDGQHWNRLHNNAQNLKNAGITAIWIPPAWKGTSQNDVGYGAYDLYDLGEFNQKGTVRTKYGTKAELERAIRSLKANGIQVYGDVVMNHKGGADFTERVQAVEVNPQNRNQEVSGTYQIEAWTGFNFPGRGNQHSSFKWRWYHFDGTDWDQSRQLANRIYKFRGDGKAWDWEVDTENGNYDYHIEADVDMDHPEVINELNRWGVWYANTLNLDGFRLDAVKHIKFSFMRDWLGHVRGQTGKNLFAVAEYWKNDLGALENYLSKTNWTMSAFDVPLHYNLYQASNSSGNYDMRNLLNGTLVQRHPSHAVTFVDNHDTQPGEALESFVQGWFKPLAYATILTREQGYPQVFYGDYYGIPSDGVPSYRQQIDPLLKARQQYAYGRQHDYFDHWDVIGWTREGNASHPNSGLATIMSDGPGGSKWMYVGRQKAGEVWHDMTGNRSGTVTINQDGWGHFFVNGGSVSVWVKR

SEQ ID NO: 33246 - protein, 485 aa, Bacillus sp.
HHDGTNGTIMQYFEWNVPNDGQHWNRLHNNAQNLKNAGITAIWIPPAWKGTSQNDVGYGAYDLYDLGEFNQKGTVRTKYGTKAELERAIRSLKANGIQVYGDVVMNHKGGADFTERVQAVEVNPQNRNQEVSGTYQIEAWTGFNFPGRGNQHSSFKWRWYHFDGTDWDQSRQLANRIYKFRGDGKAWDWEVDTENGNYDWLQVADVDMDHPEVINELNRWGVWYANTLNLDGFRLDAVKHIKFSFMRDWLGHVRGQTGKNLFAVAEYWKNDLGALENYLSKTNWTMSAFDVPLHYNLYQASNSSGNYDMRNLLNGTLVQRHPSHAVTFVDNHDTQPGEALESFVQGWFKPLAYATILTREQGYPQVFYGDYYGIPSDGVPSYRQQIDPLLKARQQYAYGRQHDYFDHWDVIGWTREGNASHPNSGLATIMSDGPGGSKWMYVGRQKAGEVWHDMTGNRSGTVTINQDGWGHFFVNGGSVSVWVKR

SEQ ID NO: 33247 - protein, 485 aa, Bacillus sp.
HHDGTNGTIMQYFEWNVPNDGQHWNRLHNNAQNLKNAGITAIWIPPAWKGTSQNDVGYGAYDLYDLGEFNQKGTVRTKYGTKAELERAIRSLKANGIQVYGDVVMNHKGGADFTERVQAVEVNPQNRNQEVSGTYQIEAWTGFNFPGRGNQHSSFKWRWYHFDGTDWDQSRQLANRIYKFRGDGKAWDWEVDTENGNYDYRRSADVDMDHPEVINELNRWGVWYANTLNLDGFRLDAVKHIKFSFMRDWLGHVRGQTGKNLFAVAEYWKNDLGALENYLSKTNWTMSAFDVPLHYNLYQASNSSGNYDMRNLLNGTLVQRHPSHAVTFVDNHDTQPGEALESFVQGWFKPLAYATILTREQGYPQVFYGDYYGIPSDGVPSYRQQIDPLLKARQQYAYGRQHDYFDHWDVIGWTREGNASHPNSGLATIMSDGPGGSKWMYVGRQKAGEVWHDMTGNRSGTVTINQDGWGHFFVNGGSVSVWVKR

SEQ ID NO: 33248 - protein, 485 aa, Bacillus sp.
HHDGTNGTIMQYFEWNVPNDGQHWNRLHNNAQNLKNAGITAIWIPPAWKGTSQNDVGYGAYDLYDLGEFNQKGTVRTKYGTKAELERAIRSLKANGIQVYGDVVMNHKGGADFTERVQAVEVNPQNRNQEVSGTYQIEAWTGFNFPGRGNQHSSFKWRWYHFDGTDWDQSRQLANRIYKFRGDGKAWDWEVDTENGNYDWLHHADVDMDHPEVINELNRWGVWYANTLNLDGFRLDAVKHIKFSFMRDWLGHVRGQTGKNLFAVAEYWKNDLGALENYLSKTNWTMSAFDVPLHYNLYQASNSSGNYDMRNLLNGTLVQRHPSHAVTFVDNHDTQPGEALESFVQGWFKPLAYATILTREQGYPQVFYGDYYGIPSDGVPSYRQQIDPLLKARQQYAYGRQHDYFDHWDVIGWTREGNASHPNSGLATIMSDGPGGSKWMYVGRQKAGEVWHDMTGNRSGTVTINQDGWGHFFVNGGSVSVWVKR

SEQ ID NO: 33249 - protein, 485 aa, Bacillus sp.
HHDGTNGTIMQYFEWNVPNDGQHWNRLHNNAQNLKNAGITAIWIPPAWKGTSQNDVGYGAYDLYDLGEFNQKGTVRTKYGTKAELERAIRSLKANGIQVYGDVVMNHKGGADFTERVQAVEVNPQNRNQEVSGTYQIEAWTGFNFPGRGNQHSSFKWRWYHFDGTDWDQSRQLANRIYKFRGDGKAWDWEVDTENGNYDYLLNTDVDMDHPEVINELNRWGVWYANTLNLDGFRLDAVKHIKFSFMRDWLGHVRGQTGKNLFAVAEYWKNDLGALENYLSKTNWTMSAFDVPLHYNLYQASNSSGNYDMRNLLNGTLVQRHPSHAVTFVDNHDTQPGEALESFVQGWFKPLAYATILTREQGYPQVFYGDYYGIPSDGVPSYRQQIDPLLKARQQYAYGRQHDYFDHWDVIGWTREGNASHPNSGLATIMSDGPGGSKWMYVGRQKAGEVWHDMTGNRSGTVTINQDGWGHFFVNGGSVSVWVKR

SEQ ID NO: 33250 - protein, 485 aa, Bacillus sp.
HHDGTNGTIMQYFEWNVPNDGQHWNRLHNNAQNLKNAGITAIWIPPAWKGTSQNDVGYGAYDLYDLGEFNQKGTVRTKYGTKAELERAIRSLKANGIQVYGDVVMNHKGGADFTERVQAVEVNPQNRNQEVSGTYQIEAWTGFNFPGRGNQHSSFKWRWYHFDGTDWDQSRQLANRIYKFRGDGKAWDWEVDTENGNYDYQQSADVDMDHPEVINELNRWGVWYANTLNLDGFRLDAVKHIKFSFMRDWLGHVRGQTGKNLFAVAEYWKNDLGALENYLSKTNWTMSAFDVPLHYNLYQASNSSGNYDMRNLLNGTLVQRHPSHAVTFVDNHDTQPGEALESFVQGWFKPLAYATILTREQGYPQVFYGDYYGIPSDGVPSYRQQIDPLLKARQQYAYGRQHDYFDHWDVIGWTREGNASHPNSGLATIMSDGPGGSKWMYVGRQKAGEVWHDMTGNRSGTVTINQDGWGHFFVNGGSVSVWVKR

SEQ ID NO: 33251 - protein, 485 aa, Bacillus sp.
HHDGTNGTIMQYFEWNVPNDGQHWNRLHNNAQNLKNAGITAIWIPPAWKGTSQNDVGYGAYDLYDLGEFNQKGTVRTKYGTKAELERAIRSLKANGIQVYGDVVMNHKGGADFTERVQAVEVNPQNRNQEVSGTYQIEAWTGFNFPGRGNQHSSFKWRWYHFDGTDWDQSRQLANRIYKFRGDGKAWDWEVDTENGNYDQLLDADVDMDHPEVINELNRWGVWYANTLNLDGFRLDAVKHIKFSFMRDWLGHVRGQTGKNLFAVAEYWKNDLGALENYLSKTNWTMSAFDVPLHYNLYQASNSSGNYDMRNLLNGTLVQRHPSHAVTFVDNHDTQPGEALESFVQGWFKPLAYATILTREQGYPQVFYGDYYGIPSDGVPSYRQQIDPLLKARQQYAYGRQHDYFDHWDVIGWTREGNASHPNSGLATIMSDGPGGSKWMYVGRQKAGEVWHDMTGNRSGTVTINQDGWGHFFVNGGSVSVWVKR

SEQ ID NO: 33252 - protein, 485 aa, Bacillus sp.
HHDGTNGTIMQYFEWNVPNDGQHWNRLHNNAQNLKNAGITAIWIPPAWKGTSQNDVGYGAYDLYDLGEFNQKGTVRTKYGTKAELERAIRSLKANGIQVYGDVVMNHKGGADFTERVQAVEVNPQNRNQEVSGTYQIEAWTGFNFPGRGNQHSSFKWRWYHFDGTDWDQSRQLANRIYKFRGDGKAWDWEVDTENGNYDYELIADVDMDHPEVINELNRWGVWYANTLNLDGFRLDAVKHIKFSFMRDWLGHVRGQTGKNLFAVAEYWKNDLGALENYLSKTNWTMSAFDVPLHYNLYQASNSSGNYDMRNLLNGTLVQRHPSHAVTFVDNHDTQPGEALESFVQGWFKPLAYATILTREQGYPQVFYGDYYGIPSDGVPSYRQQIDPLLKARQQYAYGRQHDYFDHWDVIGWTREGNASHPNSGLATIMSDGPGGSKWMYVGRQKAGEVWHDMTGNRSGTVTINQDGWGHFFVNGGSVSVWVKR

SEQ ID NO: 33253 - protein, 485 aa, Bacillus sp.
HHDGTNGTIMQYFEWNVPNDGQHWNRLHNNAQNLKNAGITAIWIPPAWKGTSQNDVGYGAYDLYDLGEFNQKGTVRTKYGTKAELERAIRSLKANGIQVYGDVVMNHKGGADFTERVQAVEVNPQNRNQEVSGTYQIEAWTGFNFPGRGNQHSSFKWRWYHFDGTDWDQSRQLANRIYKFRGDGKAWDWEVDTENGNYDYQLEADVDMDHPEVINELNRWGVWYANTLNLDGFRLDAVKHIKFSFMRDWLGHVRGQTGKNLFAVAEYWKNDLGALENYLSKTNWTMSAFDVPLHYNLYQASNSSGNYDMRNLLNGTLVQRHPSHAVTFVDNHDTQPGEALESFVQGWFKPLAYATILTREQGYPQVFYGDYYGIPSDGVPSYRQQIDPLLKARQQYAYGRQHDYFDHWDVIGWTREGNASHPNSGLATIMSDGPGGSKWMYVGRQKAGEVWHDMTGNRSGTVTINQDGWGHFFVNGGSVSVWVKR

SEQ ID NO: 33254 - protein, 485 aa, Bacillus sp.
HHDGTNGTIMQYFEWNVPNDGQHWNRLHNNAQNLKNAGITAIWIPPAWKGTSQNDVGYGAYDLYDLGEFNQKGTVRTKYGTKAELERAIRSLKANGIQVYGDVVMNHKGGADFTERVQAVEVNPQNRNQEVSGTYQIEAWTGFNFPGRGNQHSSFKWRWYHFDGTDWDQSRQLANRIYKFRGDGKAWDWEVDTENGNYDYQSHADVDMDHPEVINELNRWGVWYANTLNLDGFRLDAVKHIKFSFMRDWLGHVRGQTGKNLFAVAEYWKNDLGALENYLSKTNWTMSAFDVPLHYNLYQASNSSGNYDMRNLLNGTLVQRHPSHAVTFVDNHDTQPGEALESFVQGWFKPLAYATILTREQGYPQVFYGDYYGIPSDGVPSYRQQIDPLLKARQQYAYGRQHDYFDHWDVIGWTREGNASHPNSGLATIMSDGPGGSKWMYVGRQKAGEVWHDMTGNRSGTVTINQDGWGHFFVNGGSVSVWVKR

SEQ ID NO: 33255 - protein, 485 aa, Bacillus sp.
HHDGTNGTIMQYFEWNVPNDGQHWNRLHNNAQNLKNAGITAIWIPPAWKGTSQNDVGYGAYDLYDLGEFNQKGTVRTKYGTKAELERAIRSLKANGIQVYGDVVMNHKGGADFTERVQAVEVNPQNRNQEVSGTYQIEAWTGFNFPGRGNQHSSFKWRWYHFDGTDWDQSRQLANRIYKFRGDGKAWDWEVDTENGNYDWLLPADVDMDHPEVINELNRWGVWYANTLNLDGFRLDAVKHIKFSFMRDWLGHVRGQTGKNLFAVAEYWKNDLGALENYLSKTNWTMSAFDVPLHYNLYQASNSSGNYDMRNLLNGTLVQRHPSHAVTFVDNHDTQPGEALESFVQGWFKPLAYATILTREQGYPQVFYGDYYGIPSDGVPSYRQQIDPLLKARQQYAYGRQHDYFDHWDVIGWTREGNASHPNSGLATIMSDGPGGSKWMYVGRQKAGEVWHDMTGNRSGTVTINQDGWGHFFVNGGSVSVWVKR

SEQ ID NO: 33256 - protein, 485 aa, Bacillus sp.
HHDGTNGTIMQYFEWNVPNDGQHWNRLHNNAQNLKNAGITAIWIPPAWKGTSQNDVGYGAYDLYDLGEFNQKGTVRTKYGTKAELERAIRSLKANGIQVYGDVVMNHKGGADFTERVQAVEVNPQNRNQEVSGTYQIEAWTGFNFPGRGNQHSSFKWRWYHFDGTDWDQSRQLANRIYKFRGDGKAWDWEVDTENGNYDYRPRADVDMDHPEVINELNRWGVWYANTLNLDGFRLDAVKHIKFSFMRDWLGHVRGQTGKNLFAVAEYWKNDLGALENYLSKTNWTMSAFDVPLHYNLYQASNSSGNYDMRNLLNGTLVQRHPSHAVTFVDNHDTQPGEALESFVQGWFKPLAYATILTREQGYPQVFYGDYYGIPSDGVPSYRQQIDPLLKARQQYAYGRQHDYFDHWDVIGWTREGNASHPNSGLATIMSDGPGGSKWMYVGRQKAGEVWHDMTGNRSGTVTINQDGWGHFFVNGGSVSVWVKR

SEQ ID NO: 33257 - protein, 485 aa, Bacillus sp.
HHDGTNGTIMQYFEWNVPNDGQHWNRLHNNAQNLKNAGITAIWIPPAWKGTSQNDVGYGAYDLYDLGEFNQKGTVRTKYGTKAELERAIRSLKANGIQVYGDVVMNHKGGADFTERVQAVEVNPQNRNQEVSGTYQIEAWTGFNFPGRGNQHSSFKWRWYHFDGTDWDQSRQLANRIYKFRGDGKAWDWEVDTENGNYDGLPHADVDMDHPEVINELNRWGVWYANTLNLDGFRLDAVKHIKFSFMRDWLGHVRGQTGKNLFAVAEYWKNDLGALENYLSKTNWTMSAFDVPLHYNLYQASNSSGNYDMRNLLNGTLVQRHPSHAVTFVDNHDTQPGEALESFVQGWFKPLAYATILTREQGYPQVFYGDYYGIPSDGVPSYRQQIDPLLKARQQYAYGRQHDYFDHWDVIGWTREGNASHPNSGLATIMSDGPGGSKWMYVGRQKAGEVWHDMTGNRSGTVTINQDGWGHFFVNGGSVSVWVKR

SEQ ID NO: 33258 - protein, 485 aa, Bacillus sp.
HHDGTNGTIMQYFEWNVPNDGQHWNRLHNNAQNLKNAGITAIWIPPAWKGTSQNDVGYGAYDLYDLGEFNQKGTVRTKYGTKAELERAIRSLKANGIQVYGDVVMNHKGGADFTERVQAVEVNPQNRNQEVSGTYQIEAWTGFNFPGRGNQHSSFKWRWYHFDGTDWDQSRQLANRIYKFRGDGKAWDWEVDTENGNYDNQLYADVDMDHPEVINELNRWGVWYANTLNLDGFRLDAVKHIKFSFMRDWLGHVRGQTGKNLFAVAEYWKNDLGALENYLSKTNWTMSAFDVPLHYNLYQASNSSGNYDMRNLLNGTLVQRHPSHAVTFVDNHDTQPGEALESFVQGWFKPLAYATILTREQGYPQVFYGDYYGIPSDGVPSYRQQIDPLLKARQQYAYGRQHDYFDHWDVIGWTREGNASHPNSGLATIMSDGPGGSKWMYVGRQKAGEVWHDMTGNRSGTVTINQDGWGHFFVNGGSVSVWVKR

SEQ ID NO: 33259 - protein, 485 aa, Bacillus sp.
HHNGTNGTMMQYFEWYLPNDGNHWNRLNSDASNLKSKGIKAVWIPPAWKGASQNDVGYGAYDLYDLGEFNQRGTVRTKYGTRSQLQAAVTSLKNNGIQVYGDVVMNHKGGADATEMVRAVEVNPNNRNQEVTGEYTIEAWTRFDFPGRGNTHSSFKWRWYHFDGVDFDQSRKLNNRIYKFRGHGKAWDWEVDTEFGNYDYLMYVDYDYDHPESTNEMRNWGVWYTNTLGLDGFRIDAVKHIKYSFTRDWINHVRIATGKNMFAVAEFWKNDLGAIENYLQKTNWNHSVFDVPLHYNLYNASKSGGNYDMRNIFNGTVVQAHPSQAVTFVDNHDSQPEEALESFVDEWFKPLAYALTLTREQGYPSVFYGDYYGIPTHGVPAMRSKIDPILEARQKYAYGPQHDYLDHPDVIGWTREGDSSHPKSGLATLITDGPGGSKRMYAGLKNAGETWYDITGNRSDTVKIGSDGWGEFHVNDQSVSIYVQK

SEQ ID NO: 33260 - protein, 485 aa, Bacillus sp.
HHDGTNGTIMQYFEWNVPNDGQHWNRLHNNAQNLKNAGITAIWIPPAWKGTSQNDVGYGAYDLYDLGEFNQKGTVRTKYGTKAELERAIRSLKANGIQVYGDVVMNHKGGADFTERVQAVEVNPQNRNQEVSGTYQIEAWTGFNFPGRGNQHSSFKWRWYHFDGTDWDQSRQLANRIYKFRGDGKAWDWEVDTENGNYDNLLNADVDMDHPEVINELNRWGVWYANTLNLDGFRLDAVKHIKFSFMRDWLGHVRGQTGKNLFAVAEYWKNDLGALENYLSKTNWTMSAFDVPLHYNLYQASNSSGNYDMRNLLNGTLVQRHPSHAVTFVDNHDTQPGEALESFVQGWFKPLAYATILTREQGYPQVFYGDYYGIPSDGVPSYRQQIDPLLKARQQYAYGRQHDYFDHWDVIGWTREGNASHPNSGLATIMSDGPGGSKWMYVGRQKAGEVWHDMTGNRSGTVTINQDGWGHFFVNGGSVSVWVKR

SEQ ID NO: 33261 - protein, 485 aa, Bacillus sp.
HHDGTNGTIMQYFEWNVPNDGQHWNRLHNNAQNLKNAGITAIWIPPAWKGTSQNDVGYGAYDLYDLGEFNQKGTVRTKYGTKAELERAIRSLKANGIQVYGDVVMNHKGGADFTERVQAVEVNPQNRNQEVSGTYQIEAWTGFNFPGRGNQHSSFKWRWYHFDGTDWDQSRQLANRIYKFRGDGKAWDWEVDTENGNYDYGWPADVDMDHPEVINELNRWGVWYANTLNLDGFRLDAVKHIKFSFMRDWLGHVRGQTGKNLFAVAEYWKNDLGALENYLSKTNWTMSAFDVPLHYNLYQASNSSGNYDMRNLLNGTLVQRHPSHAVTFVDNHDTQPGEALESFVQGWFKPLAYATILTREQGYPQVFYGDYYGIPSDGVPSYRQQIDPLLKARQQYAYGRQHDYFDHWDVIGWTREGNASHPNSGLATIMSDGPGGSKWMYVGRQKAGEVWHDMTGNRSGTVTINQDGWGHFFVNGGSVSVWVKR

SEQ ID NO: 33262 - protein, 483 aa, Bacillus sp. (in: firmicutes)
HHDGTNGTIMQYFEWNVPNDGQHWNRLHNNAQNLKNAGITAIWIPPAWKGTSQNDVGYGAYDLYDLGEFNQKGTVRTKYGTKAELERAIRSLKANGIQVYGDVVMNHKGGADFTERVQAVEVNPQNRNQEVSGTYQIEAWTGFNFPGRGNQHSSFKWRWYHFDGTDWDQSRQLANRIYKFRGKAWDWEVDTENGNYDYLMYADVDMDHPEVINELNRWGVWYANTLNLDGFRLDAVKHIKFSFMRDWLGHVRGQTGKNLFAIGEYWKNDLGALENYLSKTNWTMSAFDAPLHYNLYQASNSSGNYDMRNLLNGTLVQRHPSHAVTLVDNHDTQPGEALESFVQGWFKPLAYATILTREQGYPSVFYGDYYGIPSDGVPSYRQQIDPLLKARQQYAYGRQHDYFDHWDVIGWTREGNASHPNSGLATIMSDGPGGSKWMYVGRQKAGEVWHDMTGNRSGTVTINQDGWGHFFVNGGSVSVWVKR

SEQ ID NO: 33263 - protein, 485 aa, Bacillus sp.
HHDGTNGTIMQYFEWNVPNDGQHWNRLHNNAQNLKNAGITAIWIPPAWKGTSQNDVGYGAYDLYDLGEFNQKGTVRTKYGTKAELERAIRSLKANGIQVYGDVVMNHKGGADFTERVQAVEVNPQNRNQEVSGTYQIEAWTGFNFPGRGNQHSSFKWRWYHFDGTDWDQSRQLANRIYKFRGDGKAWDWEVDTENGNYDWLLHADVDMDHPEVINELNRWGVWYANTLNLDGFRLDAVKHIKFSFMRDWLGHVRGQTGKNLFAVAEYWKNDLGALENYLSKTNWTMSAFDVPLHYNLYQASNSSGNYDMRNLLNGTLVQRHPSHAVTFVDNHDTQPGEALESFVQGWFKPLAYATILTREQGYPQVFYGDYYGIPSDGVPSYRQQIDPLLKARQQYAYGRQHDYFDHWDVIGWTREGNASHPNSGLATIMSDGPGGSKWMYVGRQKAGEVWHDMTGNRSGTVTINQDGWGHFFVNGGSVSVWVKR

SEQ ID NO: 33264 - protein, 485 aa, Bacillus sp.
HHDGTNGTIMQYFEWNVPNDGQHWNRLHNNAQNLKNAGITAIWIPPAWKGTSQNDVGYGAYDLYDLGEFNQKGTVRTKYGTKAELERAIRSLKANGIQVYGDVVMNHKGGADFTERVQAVEVNPQNRNQEVSGTYQIEAWTGFNFPGRGNQHSSFKWRWYHFDGTDWDQSRQLANRIYKFRGDGKAWDWEVDTENGNYDYQHSADVDMDHPEVINELNRWGVWYANTLNLDGFRLDAVKHIKFSFMRDWLGHVRGQTGKNLFAVAEYWKNDLGALENYLSKTNWTMSAFDVPLHYNLYQASNSSGNYDMRNLLNGTLVQRHPSHAVTFVDNHDTQPGEALESFVQGWFKPLAYATILTREQGYPQVFYGDYYGIPSDGVPSYRQQIDPLLKARQQYAYGRQHDYFDHWDVIGWTREGNASHPNSGLATIMSDGPGGSKWMYVGRQKAGEVWHDMTGNRSGTVTINQDGWGHFFVNGGSVSVWVKR

SEQ ID NO: 33265 - protein, 485 aa, Bacillus sp.
HHDGTNGTIMQYFEWNVPNDGQHWNRLHNNAQNLKNAGITAIWIPPAWKGTSQNDVGYGAYDLYDLGEFNQKGTVRTKYGTKAELERAIRSLKANGIQVYGDVVMNHKGGADFTERVQAVEVNPQNRNQEVSGTYQIEAWTGFNFPGRGNQHSSFKWRWYHFDGTDWDQSRQLANRIYKFRGDGKAWDWEVDTENGNYDYPTDADVDMDHPEVINELNRWGVWYANTLNLDGFRLDAVKHIKFSFMRDWLGHVRGQTGKNLFAVAEYWKNDLGALENYLSKTNWTMSAFDVPLHYNLYQASNSSGNYDMRNLLNGTLVQRHPSHAVTFVDNHDTQPGEALESFVQGWFKPLAYATILTREQGYPQVFYGDYYGIPSDGVPSYRQQIDPLLKARQQYAYGRQHDYFDHWDVIGWTREGNASHPNSGLATIMSDGPGGSKWMYVGRQKAGEVWHDMTGNRSGTVTINQDGWGHFFVNGGSVSVWVKR

SEQ ID NO: 33266 - protein, 483 aa, Bacillus sp. (in: firmicutes)
HHDGTNGTIMQYFEWNVPNDGQHWNRLHNNAQNLKNAGITAIWIPPAWKGTSQNDVGYGAYDLYDLGEFNQKGTVRTKYGTKAELERAIRSLKANGIQVYGDVVMNHKGGADFTEKVQAVEVNPQNRNQEVPGTYDIEAWTGFNFPGRGNQHSSFKWRWYHFDGTDWDQSRQLANRIYKFQGKAWDWEVDTEFGNYDYLMYVDVDMDHPEVINELNRWGVWYANTLNLDGFRLDAVKHIKFSFMRDWLGHVRGQTGKNLFAVAEYWKNDLGALENYLSKTNWTMSAFDVPLHYNLYQASNSSGNYDMRNLLNGTLVQRHPSHAVTFVDNHDTQPGEALESFVQGWFKPLAYATILTREQGYPSVFYGDYYGIPSDGVPSYRQQIDPLLKARQQYAYGRQHDYFDHWDVIGWTREGNASHPNSGLATIMSDGPGGSKWMYVGRQKAGEVWHDMTGNRSGTVTINQDGWGHFFVNGGSVSVWVKR

SEQ ID NO: 33267 - protein, 483 aa, Bacillus sp. (in: firmicutes)
HHDGTNGTIMHYFEWNVPNDGQHWNRLHNNAQNLKNAGITAIWIPPAWKGTSQNDVGYGAYDLYDLGEFNQKGTVRTKYGTKAELERAIRSLKANGIQVYGDVVMNHKGGADFTERVQAVEVNPQNRNQEVSGTYQIEAWTGFNFPGRGNQHSSFKWRWYHFDGTDWDQSRQLANRIYKFRGKAWDWEVDTENGNYDYLMYADVDMDHPEVINELNRWGVWYANTLNLDGFRLDAVKHIKFSFMRDWLGHVRGQTGKNLFAIGEYWKNDLGALENYLSKTNWTMSAFDVPLHYNLYQASNSSGNYDMRNLLNGTLVQRHPSHAVTFVDNHDTQPGEALESFVQGWFKPLAYATILTREQGYPCVFYGDYYGIPSDGVPSYRQQIDPLLKARQQYAYGRQHDYFDHWDVIGWTREGNASHPNSGLATIMSDGPGGSKWMYVGRQKAGEVWHDMTGNRSGTVTINQDGWGHFFVNGGSVSVWVKR

SEQ ID NO: 33268 - protein, 485 aa, Bacillus sp.
HHDGTNGTIMQYFEWNVPNDGQHWNRLHNNAQNLKNAGITAIWIPPAWKGTSQNDVGYGAYDLYDLGEFNQKGTVRTKYGTKAELERAIRSLKANGIQVYGDVVMNHKGGADFTERVQAVEVNPQNRNQEVSGTYQIEAWTGFNFPGRGNQHSSFKWRWYHFDGTDWDQSRQLANRIYKFRGDGKAWDWEVDTENGNYDNLLIADVDMDHPEVINELNRWGVWYANTLNLDGFRLDAVKHIKFSFMRDWLGHVRGQTGKNLFAVAEYWKNDLGALENYLSKTNWTMSAFDVPLHYNLYQASNSSGNYDMRNLLNGTLVQRHPSHAVTFVDNHDTQPGEALESFVQGWFKPLAYATILTREQGYPQVFYGDYYGIPSDGVPSYRQQIDPLLKARQQYAYGRQHDYFDHWDVIGWTREGNASHPNSGLATIMSDGPGGSKWMYVGRQKAGEVWHDMTGNRSGTVTINQDGWGHFFVNGGSVSVWVKR

SEQ ID NO: 33269 - protein, 485 aa, Bacillus sp.
HHDGTNGTIMQYFEWNVPNDGQHWNRLHNNAQNLKNAGITAIWIPPAWKGTSQNDVGYGAYDLYDLGEFNQKGTVRTKYGTKAELERAIRSLKANGIQVYGDVVMNHKGGADFTERVQAVEVNPQNRNQEVSGTYQIEAWTGFNFPGRGNQHSSFKWRWYHFDGTDWDQSRQLANRIYKFRGDGKAWDWEVDTENGNYDWQLYADVDMDHPEVINELNRWGVWYANTLNLDGFRLDAVKHIKFSFMRDWLGHVRGQTGKNLFAVAEYWKNDLGALENYLSKTNWTMSAFDVPLHYNLYQASNSSGNYDMRNLLNGTLVQRHPSHAVTFVDNHDTQPGEALESFVQGWFKPLAYATILTREQGYPQVFYGDYYGIPSDGVPSYRQQIDPLLKARQQYAYGRQHDYFDHWDVIGWTREGNASHPNSGLATIMSDGPGGSKWMYVGRQKAGEVWHDMTGNRSGTVTINQDGWGHFFVNGGSVSVWVKR

SEQ ID NO: 33270 - protein, 485 aa, Bacillus sp.
HHDGTNGTIMQYFEWNVPNDGQHWNRLHNNAQNLKNAGITAIWIPPAWKGTSQNDVGYGAYDLYDLGEFNQKGTVRTKYGTKAELERAIRSLKANGIQVYGDVVMNHKGGADFTERVQAVEVNPQNRNQEVSGTYQIEAWTGFNFPGRGNQHSSFKWRWYHFDGTDWDQSRQLANRIYKFRGDGKAWDWEVDTENGNYDWLPTADVDMDHPEVINELNRWGVWYANTLNLDGFRLDAVKHIKFSFMRDWLGHVRGQTGKNLFAVAEYWKNDLGALENYLSKTNWTMSAFDVPLHYNLYQASNSSGNYDMRNLLNGTLVQRHPSHAVTFVDNHDTQPGEALESFVQGWFKPLAYATILTREQGYPQVFYGDYYGIPSDGVPSYRQQIDPLLKARQQYAYGRQHDYFDHWDVIGWTREGNASHPNSGLATIMSDGPGGSKWMYVGRQKAGEVWHDMTGNRSGTVTINQDGWGHFFVNGGSVSVWVKR

SEQ ID NO: 33271 - protein, 485 aa, Bacillus sp.
HHDGTNGTIMQYFEWNVPNDGQHWNRLHNNAQNLKNAGITAIWIPPAWKGTSQNDVGYGAYDLYDLGEFNQKGTVRTKYGTKAELERAIRSLKANGIQVYGDVVMNHKGGADFTERVQAVEVNPQNRNQEVSGTYQIEAWTGFNFPGRGNQHSSFKWRWYHFDGTDWDQSRQLANRIYKFRGDGKAWDWEVDTENGNYDWLNWADVDMDHPEVINELNRWGVWYANTLNLDGFRLDAVKHIKFSFMRDWLGHVRGQTGKNLFAVAEYWKNDLGALENYLSKTNWTMSAFDVPLHYNLYQASNSSGNYDMRNLLNGTLVQRHPSHAVTFVDNHDTQPGEALESFVQGWFKPLAYATILTREQGYPQVFYGDYYGIPSDGVPSYRQQIDPLLKARQQYAYGRQHDYFDHWDVIGWTREGNASHPNSGLATIMSDGPGGSKWMYVGRQKAGEVWHDMTGNRSGTVTINQDGWGHFFVNGGSVSVWVKR

SEQ ID NO: 33272 - protein, 485 aa, Bacillus sp.
HHDGTNGTIMQYFEWNVPNDGQHWNRLHNNAQNLKNAGITAIWIPPAWKGTSQNDVGYGAYDLYDLGEFNQKGTVRTKYGTKAELERAIRSLKANGIQVYGDVVMNHKGGADFTERVQAVEVNPQNRNQEVSGTYEIEAWTGFNFPGRGNQHSSFKWRWYHFDGTDWDQSRQLSNRIYKFRGDGKAWDWEVDTENGNYDYLMYADXDMNHPEVINELNRWGVWYANTLNLDGFRLDAVKHIQFSFMRNWLGHVRGQTGKNLFAVAEYWXNDLGALENYLSKTNWTMSAFDVPLHYNLYQASNSGGNYDMRNLLNGTLVQRHPSHAVTFVDNHDTQPGEALESFVQGWFKPLAYATILTREQGYPQVFYGDYYGIPSDGVPSYRQQIDPLLKARQQYAYGRQHDYFDHWDVIGWTREGNASHPNSGLATIMSDGPGGSKWMYVGRQKAGEVWHDITGNRSGTVTINQDGWGQFFVNGGSVSVWVKR

SEQ ID NO: 33273 - protein, 485 aa, Bacillus sp.
HHDGTNGTIMQYFEWNVPNDGQHWNRLHNNAQNLKNAGITAIWIPPAWKGTSQNDVGYGAYDLYDLGEFNQKGTVRTKYGTKAELERAIRSLKANGIQVYGDVVMNHKGGADFTERVQAVEVNPQNRNQEVSGTYQIEAWTGFNFPGRGNQHSSFKWRWYHFDGTDWDQSRQLANRIYKFRGDGKAWDWEVDTENGNYDYQLWADVDMDHPEVINELNRWGVWYANTLNLDGFRLDAVKHIKFSFMRDWLGHVRGQTGKNLFAVAEYWKNDLGALENYLSKTNWTMSAFDVPLHYNLYQASNSSGNYDMRNLLNGTLVQRHPSHAVTFVDNHDTQPGEALESFVQGWFKPLAYATILTREQGYPQVFYGDYYGIPSDGVPSYRQQIDPLLKARQQYAYGRQHDYFDHWDVIGWTREGNASHPNSGLATIMSDGPGGSKWMYVGRQKAGEVWHDMTGNRSGTVTINQDGWGHFFVNGGSVSVWVKR

SEQ ID NO: 33274 - protein, 485 aa, Bacillus sp.
HHDGTNGTIMQYFEWNVPNDGQHWNRLHNNAQNLKNAGITAIWIPPAWKGTSQNDVGYGAYDLYDLGEFNQKGTVRTKYGTKAELERAIRSLKANGIQVYGDVVMNHKGGADFTERVQAVEVNPQNRNQEVSGTYQIEAWTGFNFPGRGNQHSSFKWRWYHFDGTDWDQSRQLANRIYKFRGDGKAWDWEVDTENGNYDWLPRADVDMDHPEVINELNRWGVWYANTLNLDGFRLDAVKHIKFSFMRDWLGHVRGQTGKNLFAVAEYWKNDLGALENYLSKTNWTMSAFDVPLHYNLYQASNSSGNYDMRNLLNGTLVQRHPSHAVTFVDNHDTQPGEALESFVQGWFKPLAYATILTREQGYPQVFYGDYYGIPSDGVPSYRQQIDPLLKARQQYAYGRQHDYFDHWDVIGWTREGNASHPNSGLATIMSDGPGGSKWMYVGRQKAGEVWHDMTGNRSGTVTINQDGWGHFFVNGGSVSVWVKR

SEQ ID NO: 33275 - protein, 485 aa, Bacillus sp.
HHDGTNGTIMQYFEWNVPNDGQHWNRLHNNAQNLKNAGITAIWIPPAWKGTSQNDVGYGAYDLYDLGEFNQKGTVRTKYGTKAELERAIRSLKANGIQVYGDVVMNHKGGADFTERVQAVEVNPQNRNQEVSGTYQIEAWTGFNFPGRGNQHSSFKWRWYHFDGTDWDQSRQLANRIYKFRGDGKAWDWEVDTENGNYDWPTYADVDMDHPEVINELNRWGVWYANTLNLDGFRLDAVKHIKFSFMRDWLGHVRGQTGKNLFAVAEYWKNDLGALENYLSKTNWTMSAFDVPLHYNLYQASNSSGNYDMRNLLNGTLVQRHPSHAVTFVDNHDTQPGEALESFVQGWFKPLAYATILTREQGYPQVFYGDYYGIPSDGVPSYRQQIDPLLKARQQYAYGRQHDYFDHWDVIGWTREGNASHPNSGLATIMSDGPGGSKWMYVGRQKAGEVWHDMTGNRSGTVTINQDGWGHFFVNGGSVSVWVKR

SEQ ID NO: 33276 - protein, 485 aa, Bacillus sp.
HHDGTNGTIMQYFEWNVPNDGQHWNRLHNNAQNLKNAGITAIWIPPAWKGTSQNDVGYGAYDLYDLGEFNQKGTVRTKYGTKAELERAIRSLKANGIQVYGDVVMNHKGGADFTERVQAVEVNPQNRNQEVSGTYQIEAWTGFNFPGRGNQHSSFKWRWYHFDGTDWDQSRQLANRIYKFRGDGKAWDWEVDTENGNYDQLLIADVDMDHPEVINELNRWGVWYANTLNLDGFRLDAVKHIKFSFMRDWLGHVRGQTGKNLFAVAEYWKNDLGALENYLSKTNWTMSAFDVPLHYNLYQASNSSGNYDMRNLLNGTLVQRHPSHAVTFVDNHDTQPGEALESFVQGWFKPLAYATILTREQGYPQVFYGDYYGIPSDGVPSYRQQIDPLLKARQQYAYGRQHDYFDHWDVIGWTREGNASHPNSGLATIMSDGPGGSKWMYVGRQKAGEVWHDMTGNRSGTVTINQDGWGHFFVNGGSVSVWVKR

SEQ ID NO: 33277 - protein, 485 aa, Bacillus sp.
HHDGTNGTIMQYFEWNVPNDGQHWNRLHNNAQNLKNAGITAIWIPPAWKGTSQNDVGYGAYDLYDLGEFNQKGTVRTKYGTKAELERAIRSLKANGIQVYGDVVMNHKGGADFTERVQAVEVNPQNRNQEVSGTYQIEAWTGFNFPGRGNQHSSFKWRWYHFDGTDWDQSRQLANRIYKFRGDGKAWDWEVDTENGNYDYHEWADVDMDHPEVINELNRWGVWYANTLNLDGFRLDAVKHIKFSFMRDWLGHVRGQTGKNLFAVAEYWKNDLGALENYLSKTNWTMSAFDVPLHYNLYQASNSSGNYDMRNLLNGTLVQRHPSHAVTFVDNHDTQPGEALESFVQGWFKPLAYATILTREQGYPQVFYGDYYGIPSDGVPSYRQQIDPLLKARQQYAYGRQHDYFDHWDVIGWTREGNASHPNSGLATIMSDGPGGSKWMYVGRQKAGEVWHDMTGNRSGTVTINQDGWGHFFVNGGSVSVWVKR

SEQ ID NO: 33278 - protein, 485 aa, Bacillus sp.
HHDGTNGTIMQYFEWNVPNDGQHWNRLHNNAQNLKNAGITAIWIPPAWKGTSQNDVGYGAYDLYDLGEFNQKGTVRTKYGTKAELERAIRSLKANGIQVYGDVVMNHKGGADFTERVQAVEVNPQNRNQEVSGTYQIEAWTGFNFPGRGNQHSSFKWRWYHFDGTDWDQSRQLANRIYKFRGDGKAWDWEVDTENGNYDWWLYADVDMDHPEVINELNRWGVWYANTLNLDGFRLDAVKHIKFSFMRDWLGHVRGQTGKNLFAVAEYWKNDLGALENYLSKTNWTMSAFDVPLHYNLYQASNSSGNYDMRNLLNGTLVQRHPSHAVTFVDNHDTQPGEALESFVQGWFKPLAYATILTREQGYPQVFYGDYYGIPSDGVPSYRQQIDPLLKARQQYAYGRQHDYFDHWDVIGWTREGNASHPNSGLATIMSDGPGGSKWMYVGRQKAGEVWHDMTGNRSGTVTINQDGWGHFFVNGGSVSVWVKR

SEQ ID NO: 33279 - protein, 485 aa, Bacillus sp.
HHDGTNGTIMQYFEWNVPNDGQHWNRLHNNAQNLKNAGITAIWIPPAWKGTSQNDVGYGAYDLYDLGEFNQKGTVRTKYGTKAELERAIRSLKANGIQVYGDVVMNHKGGADFTERVQAVEVNPQNRNQEVSGTYQIEAWTGFNFPGRGNQHSSFKWRWYHFDGTDWDQSRQLANRIYKFRGDGKAWDWEVDTENGNYDWELYADVDMDHPEVINELNRWGVWYANTLNLDGFRLDAVKHIKFSFMRDWLGHVRGQTGKNLFAVAEYWKNDLGALENYLSKTNWTMSAFDVPLHYNLYQASNSSGNYDMRNLLNGTLVQRHPSHAVTFVDNHDTQPGEALESFVQGWFKPLAYATILTREQGYPQVFYGDYYGIPSDGVPSYRQQIDPLLKARQQYAYGRQHDYFDHWDVIGWTREGNASHPNSGLATIMSDGPGGSKWMYVGRQKAGEVWHDMTGNRSGTVTINQDGWGHFFVNGGSVSVWVKR

SEQ ID NO: 33280 - protein, 485 aa, Bacillus sp.
HHDGTNGTIMQYFEWNVPNDGQHWNRLHNNAQNLKNAGITAIWIPPAWKGTSQNDVGYGAYDLYDLGEFNQKGTVRTKYGTKAELERAIRSLKANGIQVYGDVVMNHKGGADFTERVQAVEVNPQNRNQEVSGTYQIEAWTGFNFPGRGNQHSSFKWRWYHFDGTDWDQSRQLANRIYKFRGDGKAWDWEVDTENGNYDHLLNADVDMDHPEVINELNRWGVWYANTLNLDGFRLDAVKHIKFSFMRDWLGHVRGQTGKNLFAVAEYWKNDLGALENYLSKTNWTMSAFDVPLHYNLYQASNSSGNYDMRNLLNGTLVQRHPSHAVTFVDNHDTQPGEALESFVQGWFKPLAYATILTREQGYPQVFYGDYYGIPSDGVPSYRQQIDPLLKARQQYAYGRQHDYFDHWDVIGWTREGNASHPNSGLATIMSDGPGGSKWMYVGRQKAGEVWHDMTGNRSGTVTINQDGWGHFFVNGGSVSVWVKR

SEQ ID NO: 33281 - protein, 485 aa, Bacillus sp.
HHDGTNGTIMQYFEWNVPNDGQHWNRLHNNAQNLKNAGITAIWIPPAWKGTSQNDVGYGAYDLYDLGEFNQKGTVRTKYGTKAELERAIRSLKANGIQVYGDVVMNHKGGADFTERVQAVEVNPQNRNQEVSGTYQIEAWTGFNFPGRGNQHSSFKWRWYHFDGTDWDQSRQLANRIYKFRGDGKAWDWEVDTENGNYDYQYRADVDMDHPEVINELNRWGVWYANTLNLDGFRLDAVKHIKFSFMRDWLGHVRGQTGKNLFAVAEYWKNDLGALENYLSKTNWTMSAFDVPLHYNLYQASNSSGNYDMRNLLNGTLVQRHPSHAVTFVDNHDTQPGEALESFVQGWFKPLAYATILTREQGYPQVFYGDYYGIPSDGVPSYRQQIDPLLKARQQYAYGRQHDYFDHWDVIGWTREGNASHPNSGLATIMSDGPGGSKWMYVGRQKAGEVWHDMTGNRSGTVTINQDGWGHFFVNGGSVSVWVKR

SEQ ID NO: 33282 - protein, 483 aa, Bacillus sp. (in: firmicutes)
HHDGTNGTIMQYFEWNVPNDGQHWNRLHNNAQNLKNAGITAIWIPPAWKGTSQNDVGYGAYDLYDLGEFNQKGTVRTKYGTKAELERAIRSLKANGIQVYGDVVMNHKGGADFTERVQAVEVNPQNRNQVVSGNYQIEAWTGFNFPGRGNQHSSFKWRWYHFDGTDWDQSRQLANRIYKFYGKKWDWEVDTEFGNYDYLMYADVDMDHPEVINELNRWGVWYANTLNLDGFRLDAVKHIKFSFMRDWLGHVRGQTGKNLFAVAEYWKNDLGALENYLSKTNWTMSAFDVPLHYNLYQASNSSGNYDMRNLLNGTLVQRHPSHAVTFVDNHDTQPGEALESFVQGWFKPLAYATILTREQGYPSVFYGDYYGIPSDGVPSYRQQIDPLLKARQQYAYGRQHDYFDHWDVIGWTREGNASHPNSGLATIMSDGPGGSKWMYVGRQKAGEVWHDMTGNRSGTVTINQDGWGHFFVNGGSVSVWVKR

SEQ ID NO: 33283 - protein, 485 aa, Bacillus sp.
HHDGTNGTIMQYFEWNVPNDGQHWNRLHNNAQNLKNAGITAIWIPPAWKGTSQNDVGYGAYDLYDLGEFNQKGTVRTKYGTKAELERAIRSLKANGIQVYGDVVMNHKGGADFTERVQAVEVNPQNRNQEVSGTYQIEAWTGFNFPGRGNQHSSFKWRWYHFDGTDWDQSRQLANRIYKFRGDGKAWDWEVDTENGNYDELLFADVDMDHPEVINELNRWGVWYANTLNLDGFRLDAVKHIKFSFMRDWLGHVRGQTGKNLFAVAEYWKNDLGALENYLSKTNWTMSAFDVPLHYNLYQASNSSGNYDMRNLLNGTLVQRHPSHAVTFVDNHDTQPGEALESFVQGWFKPLAYATILTREQGYPQVFYGDYYGIPSDGVPSYRQQIDPLLKARQQYAYGRQHDYFDHWDVIGWTREGNASHPNSGLATIMSDGPGGSKWMYVGRQKAGEVWHDMTGNRSGTVTINQDGWGHFFVNGGSVSVWVKR

SEQ ID NO: 33284 - protein, 485 aa, Bacillus sp.
HHDGTNGTIMQYFEWNVPNDGQHWNRLHNNAQNLKNAGITAIWIPPAWKGTSQNDVGYGAYDLYDLGEFNQKGTVRTKYGTKAELERAIRSLKANGIQVYGDVVMNHKGGADFTERVQAVEVNPQNRNQEVSGTYQIEAWTGFNFPGRGNQHSSFKWRWYHFDGTDWDQSRQLANRIYKFRGDGKAWDWEVDTENGNYDWSLYADVDMDHPEVINELNRWGVWYANTLNLDGFRLDAVKHIKFSFMRDWLGHVRGQTGKNLFAVAEYWKNDLGALENYLSKTNWTMSAFDVPLHYNLYQASNSSGNYDMRNLLNGTLVQRHPSHAVTFVDNHDTQPGEALESFVQGWFKPLAYATILTREQGYPQVFYGDYYGIPSDGVPSYRQQIDPLLKARQQYAYGRQHDYFDHWDVIGWTREGNASHPNSGLATIMSDGPGGSKWMYVGRQKAGEVWHDMTGNRSGTVTINQDGWGHFFVNGGSVSVWVKR

SEQ ID NO: 33285 - protein, 485 aa, Bacillus sp.
HHDGTNGTIMQYFEWNVPNDGQHWNRLHNNAQNLKNAGITAIWIPPAWKGTSQNDVGYGAYDLYDLGEFNQKGTVRTKYGTKAELERAIRSLKANGIQVYGDVVMNHKGGADFTERVQAVEVNPQNRNQEVSGTYQIEAWTGFNFPGRGNQHSSFKWRWYHFDGTDWDQSRQLANRIYKFRGDGKAWDWEVDTENGNYDWPWYADVDMDHPEVINELNRWGVWYANTLNLDGFRLDAVKHIKFSFMRDWLGHVRGQTGKNLFAVAEYWKNDLGALENYLSKTNWTMSAFDVPLHYNLYQASNSSGNYDMRNLLNGTLVQRHPSHAVTFVDNHDTQPGEALESFVQGWFKPLAYATILTREQGYPQVFYGDYYGIPSDGVPSYRQQIDPLLKARQQYAYGRQHDYFDHWDVIGWTREGNASHPNSGLATIMSDGPGGSKWMYVGRQKAGEVWHDMTGNRSGTVTINQDGWGHFFVNGGSVSVWVKR

SEQ ID NO: 33286 - protein, 483 aa, Bacillus sp.
HHDGTNGTIMQYFEWNVPNDGQHWNRLHNNAQNLKNAGITAIWIPPAWKGTSQNDVGYGAYDLYDLGEFNQKGTVRTKYGTKAELERAIRSLKANGIQVYGDVVMNHKGGADFTERVQAVEVNPQNRNQEVSGTYEIEAWTGFNFPGRGNQHSSFKWRWYHFDGTDWDQSRQLSNRIYKFDGKAWDWEVDTENGNYDYLMYADVDMNHPXVINELNRWGVWYANTLNLDGFRLDAVKHIQFSFMRNWLGHVRGQTGKNLFAVAEYWKNDLGALENYLSKTNWTMSAFDVPLHYNLYQASNSGGNYDMRNLLNGTLVQRHPSHAVTFVDNHDTQPGEALESFVQGWFKPLAYATILTREQGYPQVFYGDYYGIPSDGVPSYRQQIDPLLKARQQYAYGRQHDYFDHWDVIGWTREGNASHPNSGLATIMSDGPGGSKWMYVGRQKAGEVWHDITGNRSGTVTINQDGWGQFFVNGGSVSVWVKR

SEQ ID NO: 33287 - protein, 485 aa, Bacillus sp.
HHDGTNGTIMQYFEWNVPNDGQHWNRLHNNAQNLKNAGITAIWIPPAWKGTSQNDVGYGAYDLYDLGEFNQKGTVRTKYGTKAELERAIRSLKANGIQVYGDVVMNHKGGADFTERVQAVEVNPQNRNQEVSGTYQIEAWTGFNFPGRGNQHSSFKWRWYHFDGTDWDQSRQLANRIYKFRGDGKAWDWEVDTENGNYDQNLYADVDMDHPEVINELNRWGVWYANTLNLDGFRLDAVKHIKFSFMRDWLGHVRGQTGKNLFAVAEYWKNDLGALENYLSKTNWTMSAFDVPLHYNLYQASNSSGNYDMRNLLNGTLVQRHPSHAVTFVDNHDTQPGEALESFVQGWFKPLAYATILTREQGYPQVFYGDYYGIPSDGVPSYRQQIDPLLKARQQYAYGRQHDYFDHWDVIGWTREGNASHPNSGLATIMSDGPGGSKWMYVGRQKAGEVWHDMTGNRSGTVTINQDGWGHFFVNGGSVSVWVKR

SEQ ID NO: 33288 - protein, 485 aa, Bacillus sp.
HHDGTNGTIMQYFEWNVPNDGQHWNRLHNNAQNLKNAGITAIWIPPAWKGTSQNDVGYGAYDLYDLGEFNQKGTVRTKYGTKAELERAIRSLKANGIQVYGDVVMNHKGGADFTERVQAVEVNPQNRNQEVSGTYQIEAWTGFNFPGRGNQHSSFKWRWYHFDGTDWDQSRQLANRIYKFRGDGKAWDWEVDTENGNYDELLSADVDMDHPEVINELNRWGVWYANTLNLDGFRLDAVKHIKFSFMRDWLGHVRGQTGKNLFAVAEYWKNDLGALENYLSKTNWTMSAFDVPLHYNLYQASNSSGNYDMRNLLNGTLVQRHPSHAVTFVDNHDTQPGEALESFVQGWFKPLAYATILTREQGYPQVFYGDYYGIPSDGVPSYRQQIDPLLKARQQYAYGRQHDYFDHWDVIGWTREGNASHPNSGLATIMSDGPGGSKWMYVGRQKAGEVWHDMTGNRSGTVTINQDGWGHFFVNGGSVSVWVKR

SEQ ID NO: 33289 - protein, 485 aa, Bacillus sp.
HHDGTNGTIMQYFEWNVPNDGQHWNRLHNNAQNLKNAGITAIWIPPAWKGTSQNDVGYGAYDLYDLGEFNQKGTVRTKYGTKAELERAIRSLKANGIQVYGDVVMNHKGGADFTERVQAVEVNPQNRNQEVSGTYEIEAWTGFNFPGRGNQHSSFKWRWYHFDGTDWDQSRQLSNRIYKFRGDGKAWDWEVDTEXGNYDYLMYADVDMNHPEVINELNRWGVWYANTLNLDGFRLDAVKHIQFSFMRNWLGHVRGQTGKNLFAVAEYWXNDLGALENYLSKTNWTMSAFDVPLHYNLYQASNSGGNYDMRNLLNGTLVQRHPSHAVTFVDNHDTQPGEALESFVQGWFKPLAYATILTREQGYPQVFYGDYYGIPSDGVPSYRQQIDPLLKARQQYAYGRQHDYFDHWDVIGWTREGNASHPNSGLATIMSDGPGGSKWMYVGRQKAGEVWHDITGNRSGTVTINQDGWGQFFVNGGSVSVWVKR

SEQ ID NO: 33290 - protein, 485 aa, Bacillus sp.
HHDGTNGTIMQYFEWNVPNDGQHWNRLHNNAQNLKNAGITAIWIPPAWKGTSQNDVGYGAYDLYDLGEFNQKGTVRTKYGTKAELERAIRSLKANGIQVYGDVVMNHKGGADFTERVQAVEVNPQNRNQEVSGTYQIEAWTGFNFPGRGNQHSSFKWRWYHFDGTDWDQSRQLANRIYKFRGDGKAWDWEVDTENGNYDNHLYADVDMDHPEVINELNRWGVWYANTLNLDGFRLDAVKHIKFSFMRDWLGHVRGQTGKNLFAVAEYWKNDLGALENYLSKTNWTMSAFDVPLHYNLYQASNSSGNYDMRNLLNGTLVQRHPSHAVTFVDNHDTQPGEALESFVQGWFKPLAYATILTREQGYPQVFYGDYYGIPSDGVPSYRQQIDPLLKARQQYAYGRQHDYFDHWDVIGWTREGNASHPNSGLATIMSDGPGGSKWMYVGRQKAGEVWHDMTGNRSGTVTINQDGWGHFFVNGGSVSVWVKR

SEQ ID NO: 33291 - protein, 485 aa, Bacillus sp.
HHDGTNGTIMQYFEWNVPNDGQHWNRLHNNAQNLKNAGITAIWIPPAWKGTSQNDVGYGAYDLYDLGEFNQKGTVRTKYGTKAELERAIRSLKANGIQVYGDVVMNHKGGADFTERVQAVEVNPQNRNQEVSGTYQIEAWTGFNFPGRGNQHSSFKWRWYHFDGTDWDQSRQLANRIYKFRGDGKAWDWEVDTENGNYDELLTADVDMDHPEVINELNRWGVWYANTLNLDGFRLDAVKHIKFSFMRDWLGHVRGQTGKNLFAVAEYWKNDLGALENYLSKTNWTMSAFDVPLHYNLYQASNSSGNYDMRNLLNGTLVQRHPSHAVTFVDNHDTQPGEALESFVQGWFKPLAYATILTREQGYPQVFYGDYYGIPSDGVPSYRQQIDPLLKARQQYAYGRQHDYFDHWDVIGWTREGNASHPNSGLATIMSDGPGGSKWMYVGRQKAGEVWHDMTGNRSGTVTINQDGWGHFFVNGGSVSVWVKR

SEQ ID NO: 33292 - protein, 485 aa, Bacillus sp.
HHDGTNGTIMQYFEWNVPNDGQHWNRLHNNAQNLKNAGITAIWIPPAWKGTSQNDVGYGAYDLYDLGEFNQKGTVRTKYGTKAELERAIRSLKANGIQVYGDVVMNHKGGADFTERVQAVEVNPQNRNQEVSGTYQIEAWTGFNFPGRGNQHSSFKWRWYHFDGTDWDQSRQLANRIYKFRGDGKAWDWEVDTENGNYDYQLPADVDMDHPEVINELNRWGVWYANTLNLDGFRLDAVKHIKFSFMRDWLGHVRGQTGKNLFAVAEYWKNDLGALENYLSKTNWTMSAFDVPLHYNLYQASNSSGNYDMRNLLNGTLVQRHPSHAVTFVDNHDTQPGEALESFVQGWFKPLAYATILTREQGYPQVFYGDYYGIPSDGVPSYRQQIDPLLKARQQYAYGRQHDYFDHWDVIGWTREGNASHPNSGLATIMSDGPGGSKWMYVGRQKAGEVWHDMTGNRSGTVTINQDGWGHFFVNGGSVSVWVKR

SEQ ID NO: 33293 - protein, 485 aa, Bacillus sp.
HHDGTNGTIMQYFEWNVPNDGQHWNRLHNNAQNLKNAGITAIWIPPAWKGTSQNDVGYGAYDLYDLGEFNQKGTVRTKYGTKAELERAIRSLKANGIQVYGDVVMNHKGGADFTERVQAVEVNPQNRNQEVSGTYQIEAWTGFNFPGRGNQHSSFKWRWYHFDGTDWDQSRQLANRIYKFRGDGKAWDWEVDTENGNYDYPHSADVDMDHPEVINELNRWGVWYANTLNLDGFRLDAVKHIKFSFMRDWLGHVRGQTGKNLFAVAEYWKNDLGALENYLSKTNWTMSAFDVPLHYNLYQASNSSGNYDMRNLLNGTLVQRHPSHAVTFVDNHDTQPGEALESFVQGWFKPLAYATILTREQGYPQVFYGDYYGIPSDGVPSYRQQIDPLLKARQQYAYGRQHDYFDHWDVIGWTREGNASHPNSGLATIMSDGPGGSKWMYVGRQKAGEVWHDMTGNRSGTVTINQDGWGHFFVNGGSVSVWVKR

SEQ ID NO: 33294 - protein, 485 aa, Bacillus sp.
HHDGTNGTIMQYFEWNVPNDGQHWNRLHNNAQNLKNAGITAIWIPPAWKGTSQNDVGYGAYDLYDLGEFNQKGTVRTKYGTKAELERAIRSLKANGIQVYGDVVMNHKGGADFTERVQAVEVNPQNRNQEVSGTYQIEAWTGFNFPGRGNQHSSFKWRWYHFDGTDWDQSRQLANRIYKFRGDGKAWDWEVDTENGNYDYPLQADVDMDHPEVINELNRWGVWYANTLNLDGFRLDAVKHIKFSFMRDWLGHVRGQTGKNLFAVAEYWKNDLGALENYLSKTNWTMSAFDVPLHYNLYQASNSSGNYDMRNLLNGTLVQRHPSHAVTFVDNHDTQPGEALESFVQGWFKPLAYATILTREQGYPQVFYGDYYGIPSDGVPSYRQQIDPLLKARQQYAYGRQHDYFDHWDVIGWTREGNASHPNSGLATIMSDGPGGSKWMYVGRQKAGEVWHDMTGNRSGTVTINQDGWGHFFVNGGSVSVWVKR

SEQ ID NO: 33295 - protein, 485 aa, Bacillus sp.
HHDGTNGTIMQYFEWNVPNDGQHWNRLHNNAQNLKNAGITAIWIPPAWKGTSQNDVGYGAYDLYDLGEFNQKGTVRTKYGTKAELERAIRSLKANGIQVYGDVVMNHKGGADFTERVQAVEVNPQNRNQEVSGTYQIEAWTGFNFPGRGNQHSSFKWRWYHFDGTDWDQSRQLANRIYKFRGDGKAWDWEVDTENGNYDYPIDADVDMDHPEVINELNRWGVWYANTLNLDGFRLDAVKHIKFSFMRDWLGHVRGQTGKNLFAVAEYWKNDLGALENYLSKTNWTMSAFDVPLHYNLYQASNSSGNYDMRNLLNGTLVQRHPSHAVTFVDNHDTQPGEALESFVQGWFKPLAYATILTREQGYPQVFYGDYYGIPSDGVPSYRQQIDPLLKARQQYAYGRQHDYFDHWDVIGWTREGNASHPNSGLATIMSDGPGGSKWMYVGRQKAGEVWHDMTGNRSGTVTINQDGWGHFFVNGGSVSVWVKR

SEQ ID NO: 33296 - protein, 485 aa, Bacillus sp.
HHDGTNGTIMQYFEWNVPNDGQHWNRLHNNAQNLKNAGITAIWIPPAWKGTSQNDVGYGAYDLYDLGEFNQKGTVRTKYGTKAELERAIRSLKANGIQVYGDVVMNHKGGADFTERVQAVEVNPQNRNQEVSGTYQIEAWTGFNFPGRGNQHSSFKWRWYHFDGTDWDQSRQLANRIYKFRGDGKAWDWEVDTENGNYDYWLSADVDMDHPEVINELNRWGVWYANTLNLDGFRLDAVKHIKFSFMRDWLGHVRGQTGKNLFAVAEYWKNDLGALENYLSKTNWTMSAFDVPLHYNLYQASNSSGNYDMRNLLNGTLVQRHPSHAVTFVDNHDTQPGEALESFVQGWFKPLAYATILTREQGYPQVFYGDYYGIPSDGVPSYRQQIDPLLKARQQYAYGRQHDYFDHWDVIGWTREGNASHPNSGLATIMSDGPGGSKWMYVGRQKAGEVWHDMTGNRSGTVTINQDGWGHFFVNGGSVSVWVKR

SEQ ID NO: 33297 - protein, 485 aa, Bacillus sp.
HHDGTNGTIMQYFEWNVPNDGQHWNRLHNNAQNLKNAGITAIWIPPAWKGTSQNDVGYGAYDLYDLGEFNQKGTVRTKYGTKAELERAIRSLKANGIQVYGDVVMNHKGGADFTERVQAVEVNPQNRNQEVSGTYQIEAWTGFNFPGRGNQHSSFKWRWYHFDGTDWDQSRQLANRIYKFRGDGKAWDWEVDTENGNYDYWPRADVDMDHPEVINELNRWGVWYANTLNLDGFRLDAVKHIKFSFMRDWLGHVRGQTGKNLFAVAEYWKNDLGALENYLSKTNWTMSAFDVPLHYNLYQASNSSGNYDMRNLLNGTLVQRHPSHAVTFVDNHDTQPGEALESFVQGWFKPLAYATILTREQGYPQVFYGDYYGIPSDGVPSYRQQIDPLLKARQQYAYGRQHDYFDHWDVIGWTREGNASHPNSGLATIMSDGPGGSKWMYVGRQKAGEVWHDMTGNRSGTVTINQDGWGHFFVNGGSVSVWVKR

SEQ ID NO: 33298 - protein, 485 aa, Bacillus sp.
HHDGTNGTIMQYFEWNVPNDGQHWNRLHNNAQNLKNAGITAIWIPPAWKGTSQNDVGYGAYDLYDLGEFNQKGTVRTKYGTKAELERAIRSLKANGIQVYGDVVMNHKGGADFTERVQAVEVNPQNRNQEVSGTYQIEAWTGFNFPGRGNQHSSFKWRWYHFDGTDWDQSRQLANRIYKFRGDGKAWDWEVDTENGNYDWLLRADVDMDHPEVINELNRWGVWYANTLNLDGFRLDAVKHIKFSFMRDWLGHVRGQTGKNLFAVAEYWKNDLGALENYLSKTNWTMSAFDVPLHYNLYQASNSSGNYDMRNLLNGTLVQRHPSHAVTFVDNHDTQPGEALESFVQGWFKPLAYATILTREQGYPQVFYGDYYGIPSDGVPSYRQQIDPLLKARQQYAYGRQHDYFDHWDVIGWTREGNASHPNSGLATIMSDGPGGSKWMYVGRQKAGEVWHDMTGNRSGTVTINQDGWGHFFVNGGSVSVWVKR

SEQ ID NO: 33299 - protein, 485 aa, Bacillus sp.
HHDGTNGTIMQYFEWNVPNDGQHWNRLHNNAQNLKNAGITAIWIPPAWKGTSQNDVGYGAYDLYDLGEFNQKGTVRTKYGTKAELERAIRSLKANGIQVYGDVVMNHKGGADFTERVQAVEVNPQNRNQEVSGTYQIEAWTGFNFPGRGNQHSSFKWRWYHFDGTDWDQSRQLANRIYKFRGDGKAWDWEVDTENGNYDYHTSADVDMDHPEVINELNRWGVWYANTLNLDGFRLDAVKHIKFSFMRDWLGHVRGQTGKNLFAVAEYWKNDLGALENYLSKTNWTMSAFDVPLHYNLYQASNSSGNYDMRNLLNGTLVQRHPSHAVTFVDNHDTQPGEALESFVQGWFKPLAYATILTREQGYPQVFYGDYYGIPSDGVPSYRQQIDPLLKARQQYAYGRQHDYFDHWDVIGWTREGNASHPNSGLATIMSDGPGGSKWMYVGRQKAGEVWHDMTGNRSGTVTINQDGWGHFFVNGGSVSVWVKR

SEQ ID NO: 33300 - protein, 485 aa, Bacillus sp.
HHDGTNGTIMQYFEWNVPNDGQHWNRLHNNAQNLKNAGITAIWIPPAWKGTSQNDVGYGAYDLYDLGEFNQKGTVRTKYGTKAELERAIRSLKANGIQVYGDVVMNHKGGADFTERVQAVEVNPQNRNQEVSGTYQIEAWTGFNFPGRGNQHSSFKWRWYHFDGTDWDQSRQLANRIYKFRGDGKAWDWEVDTENGNYDRLLPADVDMDHPEVINELNRWGVWYANTLNLDGFRLDAVKHIKFSFMRDWLGHVRGQTGKNLFAVAEYWKNDLGALENYLSKTNWTMSAFDVPLHYNLYQASNSSGNYDMRNLLNGTLVQRHPSHAVTFVDNHDTQPGEALESFVQGWFKPLAYATILTREQGYPQVFYGDYYGIPSDGVPSYRQQIDPLLKARQQYAYGRQHDYFDHWDVIGWTREGNASHPNSGLATIMSDGPGGSKWMYVGRQKAGEVWHDMTGNRSGTVTINQDGWGHFFVNGGSVSVWVKR

SEQ ID NO: 33301 - protein, 485 aa, Bacillus sp.
HHDGTNGTIMQYFEWNVPNDGQHWNRLHNNAQNLKNAGITAIWIPPAWKGTSQNDVGYGAYDLYDLGEFNQKGTVRTKYGTKAELERAIRSLKANGIQVYGDVVMNHKGGADFTERVQAVEVNPQNRNQEVSGTYQIEAWTGFNFPGRGNQHSSFKWRWYHFDGTDWDQSRQLANRIYKFRGDGKAWDWEVDTENGNYDDLLLADVDMDHPEVINELNRWGVWYANTLNLDGFRLDAVKHIKFSFMRDWLGHVRGQTGKNLFAVAEYWKNDLGALENYLSKTNWTMSAFDVPLHYNLYQASNSSGNYDMRNLLNGTLVQRHPSHAVTFVDNHDTQPGEALESFVQGWFKPLAYATILTREQGYPQVFYGDYYGIPSDGVPSYRQQIDPLLKARQQYAYGRQHDYFDHWDVIGWTREGNASHPNSGLATIMSDGPGGSKWMYVGRQKAGEVWHDMTGNRSGTVTINQDGWGHFFVNGGSVSVWVKR

SEQ ID NO: 33302 - protein, 485 aa, Bacillus sp.
HHDGTNGTIMQYFEWNVPNDGQHWNRLHNNAQNLKNAGITAIWIPPAWKGTSQNDVGYGAYDLYDLGEFNQKGTVRTKYGTKAELERAIRSLKANGIQVYGDVVMNHKGGADFTERVQAVEVNPQNRNQEVSGTYQIEAWTGFNFPGRGNQHSSFKWRWYHFDGTDWDQSRQLANRIYKFRGDGKAWDWEVDTENGNYDYQPTADVDMDHPEVINELNRWGVWYANTLNLDGFRLDAVKHIKFSFMRDWLGHVRGQTGKNLFAVAEYWKNDLGALENYLSKTNWTMSAFDVPLHYNLYQASNSSGNYDMRNLLNGTLVQRHPSHAVTFVDNHDTQPGEALESFVQGWFKPLAYATILTREQGYPQVFYGDYYGIPSDGVPSYRQQIDPLLKARQQYAYGRQHDYFDHWDVIGWTREGNASHPNSGLATIMSDGPGGSKWMYVGRQKAGEVWHDMTGNRSGTVTINQDGWGHFFVNGGSVSVWVKR

SEQ ID NO: 33303 - protein, 485 aa, Bacillus sp.
HHDGTNGTIMQYFEWNVPNDGQHWNRLHNNAQNLKNAGITAIWIPPAWKGTSQNDVGYGAYDLYDLGEFNQKGTVRTKYGTKAELERAIRSLKANGIQVYGDVVMNHKGGADFTERVQAVEVNPQNRNQEVSGTYQIEAWTGFNFPGRGNQHSSFKWRWYHFDGTDWDQSRQLANRIYKFRGDGKAWDWEVDTENGNYDQLLEADVDMDHPEVINELNRWGVWYANTLNLDGFRLDAVKHIKFSFMRDWLGHVRGQTGKNLFAVAEYWKNDLGALENYLSKTNWTMSAFDVPLHYNLYQASNSSGNYDMRNLLNGTLVQRHPSHAVTFVDNHDTQPGEALESFVQGWFKPLAYATILTREQGYPQVFYGDYYGIPSDGVPSYRQQIDPLLKARQQYAYGRQHDYFDHWDVIGWTREGNASHPNSGLATIMSDGPGGSKWMYVGRQKAGEVWHDMTGNRSGTVTINQDGWGHFFVNGGSVSVWVKR

SEQ ID NO: 33304 - protein, 483 aa, Bacillus sp. (in: firmicutes)
HHDGTNGTIMQYFEWNVPNDGQHWNRLHNNAQNLKNAGITAIWIPPAWKGTSQNDVGYGAYDLYDLGEFNQKGTVRTKYGTKAELERAIRSLKANGIQVYGDVVMNHKGGADFTERVQAVEVNPQNRNQEVSGTYQIEAWTGFNFPGRGNQHSSFKWRWYHFDGTDWDQSRQLANRIYKFRGKAWDWEVDTENGNYDYLMYADVDMDHPEVINELNRWGVWYANTLNLDGFRLDAVKHIKFSFMRDWLGHVRGQTGKNLFAIGEYWKNDLGALENYLSKTNWTMSAFDAPLHYNLYQASNSSGNYDMRNLLNGTLVQRHPSHAVTFVDNHDTQPGEALESFVQGWFKPLAYATILTREQGYPCVFYGDYYGIPSDGVPSYRQQIDPLLKARQQYAYGRQHDYFDHWDVIGWTREGNASHPNSGLATIMSDGPGGSKWMYVGRQKAGEVWHDMTGNRSGTVTINQDGWGHFFVNGGSVSVWVKR

SEQ ID NO: 33305 - protein, 485 aa, Bacillus sp.
HHDGTNGTIMQYFEWNVPNDGQHWNRLHNNAQNLKNAGITAIWIPPAWKGTSQNDVGYGAYDLYDLGEFNQKGTVRTKYGTKAELERAIRSLKANGIQVYGDVVMNHKGGADFTERVQAVEVNPQNRNQEVSGTYQIEAYTGFNFPGRGNQHSSFKWRWYHFDGTDWDQSRQLANRIYKFRGDGKAWDWEVDTENGNYDYLMYADVDMDHPDVINELNRWGVWYANTLNLDGFRLDAVKHIKFSFMRDWLGHVRGQTGKNLFAVAEYWKNDLGALENYLSKTNWTMSAFDVPLHYNLYQASNSRGNYDMRNLLNGTLVQRHPSHAVTFVDNHDTQPGEALESFVQGWFKPLAYATILTREQGYPQVFYGDYYGIPSDGVPSYRQQIDPLLKARQQYAYGRQHDYFDHWDVIGWTREGNASHPNSGLATIMSDGPGGSKWMYVGRQKAGEVWHDMTGNRSGTVTINQDGWGHFFVKGGSVSVWVKR

SEQ ID NO: 33306 - protein, 485 aa, Bacillus sp.
HHDGTNGTIMQYFEWNVPNDGQHWNRLHNNAQNLKNAGITAIWIPPAWKGTSQNDVGYGAYDLYDLGEFNQKGTVRTKYGTKAELERAIRSLKANGIQVYGDVVMNHKGGADFTERVQAVEVNPQNRNQEVSGTYQIEAWTGFNFPGRGNQHSSFKWRWYHFDGTDWDQSRQLANRIYKFRGDGKAWDWEVDTENGNYDKLLPADVDMDHPEVINELNRWGVWYANTLNLDGFRLDAVKHIKFSFMRDWLGHVRGQTGKNLFAVAEYWKNDLGALENYLSKTNWTMSAFDVPLHYNLYQASNSSGNYDMRNLLNGTLVQRHPSHAVTFVDNHDTQPGEALESFVQGWFKPLAYATILTREQGYPQVFYGDYYGIPSDGVPSYRQQIDPLLKARQQYAYGRQHDYFDHWDVIGWTREGNASHPNSGLATIMSDGPGGSKWMYVGRQKAGEVWHDMTGNRSGTVTINQDGWGHFFVNGGSVSVWVKR

SEQ ID NO: 33307 - protein, 485 aa, Bacillus sp.
HHDGTNGTIMQYFEWNVPNDGQHWNRLHNNAQNLKNAGITAIWIPPAWKGTSQNDVGYGAYDLYDLGEFNQKGTVRTKYGTKAELERAIRSLKANGIQVYGDVVMNHKGGADFTERVQAVEVNPQNRNQEVSGTYQIEAWTGFNFPGRGNQHSSFKWRWYHFDGTDWDQSRQLANRIYKFRGDGKAWDWEVDTENGNYDWLWGADVDMDHPEVINELNRWGVWYANTLNLDGFRLDAVKHIKFSFMRDWLGHVRGQTGKNLFAVAEYWKNDLGALENYLSKTNWTMSAFDVPLHYNLYQASNSSGNYDMRNLLNGTLVQRHPSHAVTFVDNHDTQPGEALESFVQGWFKPLAYATILTREQGYPQVFYGDYYGIPSDGVPSYRQQIDPLLKARQQYAYGRQHDYFDHWDVIGWTREGNASHPNSGLATIMSDGPGGSKWMYVGRQKAGEVWHDMTGNRSGTVTINQDGWGHFFVNGGSVSVWVKR

SEQ ID NO: 33308 - protein, 485 aa, Bacillus sp.
HHDGTNGTIMQYFEWNVPNDGQHWNRLHNNAQNLKNAGITAIWIPPAWKGTSQNDVGYGAYDLYDLGEFNQKGTVRTKYGTKAELERAIRSLKANGIQVYGDVVMNHKGGADFTERVQAVEVNPQNRNQEVSGTYQIEAWTGFNFPGRGNQHSSFKWRWYHFDGTDWDQSRQLANRIYKFRGDGKAWDWEVDTENGNYDYHTPADVDMDHPEVINELNRWGVWYANTLNLDGFRLDAVKHIKFSFMRDWLGHVRGQTGKNLFAVAEYWKNDLGALENYLSKTNWTMSAFDVPLHYNLYQASNSSGNYDMRNLLNGTLVQRHPSHAVTFVDNHDTQPGEALESFVQGWFKPLAYATILTREQGYPQVFYGDYYGIPSDGVPSYRQQIDPLLKARQQYAYGRQHDYFDHWDVIGWTREGNASHPNSGLATIMSDGPGGSKWMYVGRQKAGEVWHDMTGNRSGTVTINQDGWGHFFVNGGSVSVWVKR

SEQ ID NO: 33309 - protein, 483 aa, Synthetic construct
LNGTLMQYFEWYMPNDGQHWKRLQNDSAYLAEHGITAVWIPPAYKGTSQADVGYGAYDLYDLGEFHQKGTVRTKYGTKGELQSAIKSLHSRDINVYGDVVIDHKGGADGTEWVDAVEVNPSDRNQEISGTYQIQAWTKFDFPGRGNTYSSFKWRWYHFDGVDWDESRKLSRIYKFRGIGKAWDWEVDTENGNYDYLMYADLDYDHPDVAAEIKRWGTWYANELQLDGFRLDAVKHIKFSFLRDWVNHVREKTGKEMFTVAEYWSYDLGALENYLNKTNFNHSVFDVPLHYQFHAASTQGGGYDMRKLLNGTVVSKHPLKSVTFVDNHDTQPGQSLESTVQTWFKPLAYAFILTRESGYPQVFYGDMYGTKGDSQREIPALKHKIEPILKARKQYAYGAQHDYFDHHDIVGWTREGDSSVANSGLAALITDGPGGAKRMYVGRQNAGETWHDITGNRSEPVVINSAGWGEFHVNGGSVSIYVQR

SEQ ID NO: 33310 - protein, 482 aa, Synthetic construct
HHNGTNGTMMQYFEWYLPNDGNHWNRLNSDASNLKSKGITAVWIPPAWKGTSQADVGYGAYDLYDLGEFNQKGTVRTKYGTRSQLQAAVTSLKNNGINVYGDVVMNHKAGADATEDVQAVEVNPNNRNQVVTGEYLIKAYTHFHFPGRGNTHSDFKWYWYHFDGVDWDQSRRLNRIYKFQGKAWDWPVDTENGNYDYLMYADLDMDHPDVANELKRWGTWYANTLGLDGFRIDAVKHIKYSFTRDWINHVREKTGKNMFAVAEFWKNDLGAIENYLNKTNFNHSVFDVPLHYNLYNASNSGGNYDMRKIFNGTVVQKHPSKAVTFVDNHDTQPEEALESFVEEWFKPLAYALILTRESGYPSVFYGDYYGIPTHGVPAMRSKIDPILEARQKYAYGPQHDYLDHPDIIGWTREGDSSHPKSGLATLITDGPGGSKTMYAGLKNAGETWYDITGNRSDTVKIGSDGNGTFHVNKGSVSIYVQK

SEQ ID NO: 33311 - protein, 482 aa, Synthetic construct
HHNGTNGTMMQYFEWYLPNDGQHWKRLQNDASNLKSKGITAVWIPPAWKGTSQADVGYGAYDLYDLGEFHQKGTVRTKYGTRSDLQAAIKSLHNNGINVYGDVVMNHKGGADATEDVQAVEVNPNNRNQVETGEYLIKAWTRFDFPGRGNTHSSFKWRWYHFDGVDWDQSRRLNRIYKFQGKAWDWEVDTENGNYDYLMYADLDMDHPEVVNELRNWGVWYTNTLQLDGFRIDAVKHIKYSFTRDWINHVRSATGKNMFAVAEFWKNDLGAIENYLQKTNWNHSVFDVPLHYNLYNASKSGGNYDMRNIFNGTVVSKHPSHAVTFVDNHDSQPEEALESTVETWFKPLAYALTLTREQGYPSVFYGDYYGTPTHGIPALKSKIDPILEARQKYAYGAQHDYLDHPDVIGWTREGDSSHPNSGLATLITDGPGGSKRMYAGAKNAGETWYDITGNRSDTVVIGSDGWGEFHVNDGSVSIYVQK

SEQ ID NO: 33312 - protein, 483 aa, Synthetic construct
HHDGTNGTIMQYFEWNVPNDGQHWNRLHNNAQNLKNAGITAIWIPPAWKGTSQNDVGYGAYDLYDLGEFNQKGTVRTKYGTKAELERAIRSLKANGIQVYGDVVMNHKAGADGTEFVDAVEVDPSNRNQETSGTYQIQAWTKFDFPGRGNTYSSFKWRWYHFDGTDWDESRKLNRIYKFSTGKAWDWEVDTENGNYDYLMFADLDMDHPEVINELNRWGVWYANTLNLDGFRLDAVKHIKFSFMRDWLGHVRGQTGKNLFAVAEYWKNDLGALENYLSKTNWTMSAFDVPLHYNLYQASNSSGNYDMRNLLNGTLVQRHPSHAVTFVDNHDTQPGEALESFVQGWFKPLAYATILTREQGYPQVFYGDYYGIPSDGVPSYRQQIDPLLKARQQYAYGRQHDYFDHWDVIGWTREGNASHPNSGLATIMSDGPGGSKWMYVGRQKAGEVWHDMTGNRSGTVTINQDGWGHFFVNGGSVSVWVKR

SEQ ID NO: 33313 - protein, 484 aa, Synthetic construct
HHDGTNGTIMQYFEWNVPNDGQHWNRLHNNAQNLKNAGITAIWIPPAWKGTSQNDVGYGAYDLYDLGEFNQKGTVRTKYGTKAELERAIRSLKANGIQVYGDVVMNHKAGADATEDVTAVEVNPANRNQETSEEYQIKAWTDFRFPGRGNTYSDFKWHWYHFDGADWDESRKISRIFKFRGEGKAWDWEVSSENGNYDYLMYADVDMDHPEVINELNRWGVWYANTLNLDGFRLDAVKHIKFSFMRDWLGHVRGQTGKNLFAVAEYWKNDLGALENYLSKTNWTMSAFDVPLHYNLYQASNSSGNYDMRNLLNGTLVQRHPSHAVTFVDNHDTQPGEALESFVQGWFKPLAYATILTREQGYPQVFYGDYYGIPSDGVPSYRQQIDPLLKARQQYAYGRQHDYFDHWDVIGWTREGNASHPNSGLATIMSDGPGGSKWMYVGRQKAGEVWHDMTGNRSGTVTINQDGWGHFFVNGGSVSVWVKR

SEQ ID NO: 33314 - protein, 482 aa, Synthetic construct
LNGTLMQYFEWYMPNDGQHWKRLQNDSAYLAEHGITAVWIPPAYKGTSQADVGYGAYDLYDLGEFHQKGTVRTKYGTKGELQSAIKSLHSRDINVYGDVVINHKAGADGTEFVDAVEVDPSNRNQETSGTYQIQAWTKFDFPGRGNTYSSFKWRWYHFDGTDWDESRKLNRIYKFSTGKAWDWEVDTENGNYDYLMFADLDYDHPDVAAEIKRWGTWYANELQLDGFRLDAVKHIKFSFLRDWVNHVREKTGKEMFTVAEYWSYDLGALENYLNKTNFNHSVFDVPLHYQFHAASTQGGGYDMRKLLNGTVVSKHPLKSVTFVDNHDTQPGQSLESTVQTWFKPLAYAFILTRESGYPQVFYGDMYGTKGDSQREIPALKHKIEPILKARKQYAYGAQHDYFDHHDIVGWTREGDSSVANSGLAALITDGPGGAKRMYVGRQNAGETWHDITGNRSEPVVINSAGWGEFHVNGGSVSIYVQR

SEQ ID NO: 33315 - protein, 477 aa, Bacillus sp.
NGTMMQYFEWDLPNDGTLWNRLHNNAQNLKNAGITALWLPPAYKGTSQSDVGYGVYDLYDLGEFNQKGTIRTKYGTKTQLERAIRSLKANGIQVYADVVFNHKAGADGTEFVDAVEVDPSNRNQEVSGTYQIEAWTKFDFPGRGNTYSSFKWRWYHFDGTDWDESRKLNRIYKFRGKAWDWEVDTENGNYDYLMFADLDMDHPEVVTELKNWGTWYVNTTNIDGFRLDAVKHIKFSFMRDWLTYVRNQTGKNLFAVGEFWKNDLGALENYITKTNGSMSLFDAPLHNNFYTASKSSGNFDMRNLLNGTLVQRHPSHAVTLVDNHDTQPGQSLQSWVEPWFKPLAYAFILTRQEGYPCVFYGDYYGIPKYNIPGLKSKIDPLLIARRDYAYGTQRDYIDHQDIIGWTREGIDTKPNSGLAALITDGPGGSKWMYVGKKHAGKVFYDLTGNRSDTVTINADGWGEFKVKGGSVSIWVAK

SEQ ID NO: 33316 - protein, 481 aa, Bacillus licheniformis
VNGTLMQYFEWYTPNDGQHWKRLQNDAEHLSDIGITAVWIPPAYKAISQADVGYGAYDLYDLGEFWQKGTVRTKYGTKGELQSAIKSLHSRDINVYGDVVINHKAGADATEDVQAVEVDPADRNRVISGEHLIKAWTHFHFPGRGSTYSDFKWYWYHFDGTDWDESRKLNRIYLFQGKTWDWPVSNEFGNYDYLMYADYDYDYPDVVAEITRWGTWYANELQLDGFRLDAVKHIKFPFLRDWVNHVREKTGKEMFTVAEYWSNDLGALENYLNWTNFNHSVFDVPLHYQFHAASTQGGGYDMRKLLNGTVVSKHPLKSVTFVDNHDTQPGQSLESTVQTWFKPLAYAFILTRESGYPSVFYGDMYGTKGDSQREIPALKHKIEPILKARKQYAYGAQHDYFDHHDIVGWTREGVSSVANSGLAALITDGPGGAKWMYVGRQNAGETWHDITGNRSEPVVINSEGWGEFHVNGGSVSIYVQR

SEQ ID NO: 33317 - protein, 481 aa, Bacillus licheniformis
VNGTLMQYFEWYTPNDGQHWKRLQNDAEHLSDIGITAVWIPPAYKAISQADVGYGAYDLYDLGEFWQKGTVRTKYGTKGELQSAIKSLHSRDINVYGDVVINHKAGADATEDVQAVEVDPADRNRVISGEHLIKAWTHFHFPGRGSTYSDFKWYWYHFDGTDWDESRKLNRIYLFQGKTWDWPVSNEFGNYDYLMYADYDYDYPDVVAEITRWGTWYANELQLDGFRLDAVKHIKFLFLRDWVNHVREKTGKEMFTVAEYWSNDLGALENYLNITNFNHSVFDVPLHYQFHAASTQGGGYDMRKLLNGTVVSKHPLKSVTFVDNHDTQPGQSLESTVQTWFKPLAYAFILTRESGYPSVFYGDMYGTKGDSQREIPALKHKIEPILKARKQYAYGAQHDYFDHHDIVGWTREGVSSVANSGLAALITDGPGGAKWMYVGRQNAGETWHDITGNRSEPVVINSEGWGEFHVNGGSVSIYVQR

SEQ ID NO: 33318 - protein, 481 aa, Bacillus licheniformis
VNGTLMQYFEWYTPNDGQHWKRLQNDAEHLSDIGITAVWIPPAYKAISQADVGYGAYDLYDLGEFWQKGTVRTKYGTKGELQSAIKSLHSRDINVYGDVVINHKAGADATEDVQAVEVDPADRNRVISGEHLIKAWTHFHFPGRGSTYSDFKWYWYHFDGTDWDESRKLNRIYLFQGKTWDWPVSNEFGNYDYLMYADYDYDYPDVVAEITRWGTWYANELQLDGFRLDAVKHIKFLFLRDWVNHVREKTGKEMFTVAEYWSNDLGALENYLNWTNFNHSVFDVPLHYQFHAASTQGGGYDMRKLLNGTVVSKHPLKSVTFVDNHDTQPGQSLESTVQTWFKPLAYAFILTRESGYPSVFYGDMYGTKGDSQREIPALKHKIEPILKARKQYAYGAQHDYFDHHDIVGWTREGVSSVANSGLAALITDGPGGAKWMYVGRQNAGETWHDITGNRSEPVVINSEGWGEFHVNGGSVSIYVQR

SEQ ID NO: 33319 - protein, 481 aa, Bacillus licheniformis
VNGTLMQYFEWYTPNDGQHWKRLQNDAEHLSDIGITAVWIPPAYKAISQADVGYGAYDLYDLGEFWQKGTVRTKYGTKGELQSAIKSLHSRDINVYGDVVINHKAGADATEDVQAVEVDPADRNRVISGEHLIKAWTHFHFPGRGSTYSDFKWYWYHFDGTDWDESRKLNRIYLFQGKTWDWPVSNEFGNYDYLMYADYDYDYPDVVAEITRWGTWYANELQLDGFRLDAVKHIKFPFLRDWVNHVREKTGKEMFTVAEYWSNDLGALENYLNITNFNHSVFDVPLHYQFHAASTQGGGYDMRKLLNGTVVSKHPLKSVTFVDNHDTQPGQSLESTVQTWFKPLAYAFILTRESGYPSVFYGDMYGTKGDSQREIPALKHKIEPILKARKQYAYGAQHDYFDHHDIVGWTREGVSSVANSGLAALITDGPGGAKWMYVGRQNAGETWHDITGNRSEPVVINSEGWGEFHVNGGSVSIYVQR

SEQ ID NO: 33320 - protein, 481 aa, Bacillus licheniformis
VNGTLMQYFEWYTPNDGQHWKRLQNDAEHLSDIGITAVWIPPAYKAISQADVGYGAYDLYDLGEFWQKGTVRTKYGTKGELQSAIKSLHSRDINVYGDVVINHKAGADATEDVQAVEVDPADRNRVISGEHLIKAWTHFHFPGRGSTYSDFKWYWYHFDGTDWDESRKLNRIYLFQGKTWDWPVSNEFGNYDYLMYADYDYDYPDVVAEITRWGTWYANELQLDGFRLDAVKHIKFYFLRDWVNHVREKTGKEMFTVAEYWSNDLGALENYLNITNFNHSVFDVPLHYQFHAASTQGGGYDMRKLLNGTVVSKHPLKSVTFVDNHDTQPGQSLESTVQTWFKPLAYAFILTRESGYPSVFYGDMYGTKGDSQREIPALKHKIEPILKARKQYAYGAQHDYFDHHDIVGWTREGVSSVANSGLAALITDGPGGAKWMYVGRQNAGETWHDITGNRSEPVVINSEGWGEFHVNGGSVSIYVQR

SEQ ID NO: 33321 - protein, 482 aa, Bacillus licheniformis
LNGTLMQYFEWYTPNDGQHWKRLQNDSAYLAEHGITAVWIPPAYKGTSQADVGYGAYDLYDLGEFHQKGTVRTKYGTKGELQSAIKSLHSRDINVYGDVVINHKGGADATEDVTAVEVDPADRNRVISGEHLIKAYTHFHFPGRGSTYSDFKWHWYHFDGVDWDQSRRLNNRIYKFQGKAWDWEVDTEFGNYDYLTYADIDYDHPDVAAEIKRWGTWYANELQLDGFRLDAVKHIKFSFLRDWVNHVREKTGKEMFTVAEYWQNDLGALENYLNKTNFNHSVFDVPLHYQFHAASTQGGGYDMRKLLNGTVVSKHPLKSVTFVDNHDTQPGQSLESTVQTWFKPLAYAFILTRESGYPQVFYGDMYGTKGDSQREIPALKHKIEPILKARKQYAYGAQHDYFDHHDIVGWTREGDSSVANSGLAALITDGPGGAKRMYVGRQNAGETWHDITGNRSEPVVINSEGWGEFHVNGGSVSIYVQR

SEQ ID NO: 33322 - protein, 481 aa, Bacillus licheniformis
LNGTLMQYFEWYMPNDGQHWRRLQNDSAYLAEHGITAVWIPPAYKGTSQADVGYGAYDLYDLGEFHQKGTVRTKYGTKGELQSAIKSLHSRDINVYGDVVINHKGGADATEDVTAVEVDPADRNRVISGEHLIKAWTHFHFPGRGSTYSDFKWHWYHFDGTDWDESRKLNRIYRFQGKAWDWEVSNENGNYDYLMYADFDYDNPDVAAEIKRWGTWYANELQLDGFRLDAVKHIKFSFLRDWVNHVREKTGKEMFTVAEYWQNDLGALENYLNKTNFNHSVFDVPLHYQFHAASTQGGGYDMRKLLNGTVVSKHPLKSVTFVDNHDTQPGQSLESTVQTWFKPLAYAFILTREAGFPQVFYGDMYGTKGDSQREIPALKHKIEPILKARKQYAYGAQHDYFDHHDIVGWTREGDSSVANSGLAALITDGPGGAKRMYVGRQNAGETWHDITGNRSEPVVINSEGWGEFHVNGGSVSIYVQR

SEQ ID NO: 33323 - protein, 481 aa, Bacillus licheniformis
LNGTLMQYFEWYMPNDGQHWRRLQNDSAYLAEHGITAVWIPPAYKGTSQADVGYGAYDLYDLGEFHQKGTVRTKYGTKGELQSAIKSLHSRDINVYGDVVINHKGGADATEDVTAVEVDPADRNRVISGEHLIKAWTHFHFPGRGSTYSDFKWHWYHFDGTDWDESRKLNRIYRFQGKAWDWEVSNENGNYDYLMYADFDYDNPDVAAEIKRWGTWYANELQLDGFRLDAVKHIKFSFLRDWVNHVREKTGKEMFTVAEYWQNDLGALENYLNKTNFNHSVFDVPLHYQFHAASTQGGGYDMRKLLNGTVVSKHPLKSVTFVDNHDTQPGQSLESTVQTWFKPLAYAFILTRESGYPQVFYGDMYGTKGDSQRKIPALKHKIEPILKARKQYAYGAQHDYFDHHDIVGWTREGDSSVRNSGLAALITDGPGGAKRMYVGRQNAGETWHDITGNRSEPVVINSEGWGEFHVNGGSVSIYVQR

SEQ ID NO: 33324 - protein, 481 aa, Bacillus licheniformis
LNGTLMQYFEWYMPNDGQHWRRLQNDSAYLAEHGITAVWIPPAYKGTSQADVGYGAYDLYDLGEFHQKGTVRTKYGTKGELQSAIKSLHSRDINVYGDVVINHKGGADATEDVTAVEVDPADRNRVISGEHLIKAWTHFHFPGRGSTYSDFKWHWYHFDGTDWDESRKLNRIYRFQGKAWDWEVSNENGNYDYLMYADFDYDNPDVAAEIKRWGTWYANELQLDGFRLDAVKHIKFSFLRDWVNHVREKTGKEMFTVAEYWQNDLGALENYLNKTNFNHSVFDVPLHYQFHAASTQGGGYDMRKLLNGTVVSKHPLKSVTFVDNHDTQPGQSLESTVQTWFKPLAYAFILTRESGYPQVFYGDMYGTKGDSQREIPALKHKIEPILKARKQYAYGAQHDYFDHHDIVGWTREGDTSVQNSGLAALITDGPGGAKRMYVGRQNAGETWHDITGNRSEPVVINSEGWGEFHVNGGSVSIYVQR

SEQ ID NO: 33325 - protein, 481 aa, unidentified
LKGTLMQYFEWYMPNDGQHWKRLQNDSAYLAEHGITAVWIPPAYKGTSQADVGYGAYDLYDLGEFHQKGTVRTKYGTKGELQSAIKSLHSRDINVYGDVVITNKGGADATEDVTAVEVDPADRNRVISGEHRIKAWTHFHFPGRGSTYSDFKWHWYHFDGTDWDESRKLNRIYKFQGKAWDWEVSNENGNYDYLMYADIDYDHPDVAAEIKRWGTWYANELQLDGFRLDAVKHIKFSFLRDWVNHVREKTGKEMFTVAEYWQNDLGALENYLNKTNFNHSVFDVPLHYQFHAASTQGGGYDMGKLLNGTVVSKHPLKAVTFVDNHDTQPGQSLESTVQTWFKPLAYAFILTRESGYPSGFYGDMYGTKGASQREIPALKHKIEPILKARKQYAYGAQHDYFDHHDIVGWTREGDSSVANSGLAALITDGPGGAKRMYVGRQNAGETWHDITGNRSEPVVINSEGWGEFHVNGGSVSIYVQR

SEQ ID NO: 33326 - protein, 481 aa, Bacillus licheniformis
LNGTLMQYFEWYMPNDGQHWRRLQNDSAYLAEHGITAVWIPPAYKGTSQADVGYGAYDLYDLGEFHQKGTVRTKYGTKGELQSAIKSLHSRDINVYGDVVINHKGGADATEDVTAVEVDPADRNRVISGEHLIKAWTHFHFPGRGSTYSDFKWHWYHFDGTDWDESRKLNRIYKFQGKTWDWYVSNEFGNYDYLMYADIDYDHPDVAAEIKRWGTWYANELQLDGFRLDAVKHIKFSFLRDWVNHVREKTGKEMFTVAEYWSNDLGALENYLNKTNFNHSVFDVPLHVQFHAASTQGGGYDMRKLLNGTVVSKHPLKSVTFVDNHDTQPGQSLESTVQTWFKPLAYAFILTRESGYPQVFYGDMYGTKGDSQREIPALKHKIEPILKARKQYAYGAQHDYFDHHDIVGWTREGDSSVANSGLAALITDGPGGAKRMYVGRQNAGETWHDITGNRSEPVVINSEGWGEFHVNGGSVSIYVQR

SEQ ID NO: 33327 - protein, 481 aa, Bacillus licheniformis
LNGTLMQYFEWYMPNDGQHWRRLQNDSAYLAEHGITAVWIPPAYKGTSQADVGYGAYDLYDLGEFHQKGTVRTKYGTKGELQSAIKSLHSRDINVYGDVVINHKGGADATEDVTAVEVDPADRNRVISGEHLIKAWTHFHFPGRGSTYSDFKWHWYHFDGTDWDESRKLNRIYLFQGKAWDWPVSNENGNYDYLMYADIDYDHPDVAAEIKRWGTWYANELQLDGFRLDAVKHIKFSFLRDWVNHVREKTGKEMFTVAEYWQNDLGALENYLNKTNFNHSVFDVPLHYQFHAASTQGGGYDMRKLLNGTVVSKHPLKSVTFVDNHDTQPGQSLESTVQTWFKPLAYAFILTRESGYPSVFYGDMYGTKGDSQREIPALKHKIEPILKARKQYAYGAQHDYFDHHDIVGWTREGDSSVANSGLAALITDGPGGAKWMYVGRQNAGETWHDITGNRSEPVVINSEGWGEFHVNGGSVSIYVQR

SEQ ID NO: 33328 - protein, 228 aa, Synthetic construct
NGTMMQYFEWYLPNDGQHWRLNDANLSSGITALWIPPAYKGTSQSDVGYGAYDLYDLGEFNQKGTVRTKYGTKAQLAIALHAGIQVYGDVVMNHKGGADGTEVAVEVNPSDRNQEISGYIAWTKFDFPGRGNTYSFKWRWYHFDGVDWDESRKLNRIYKFRGGKAWDWEVDTENGNYDYLMYADIDMDHPEVVELKNWGWYNTLNLDGFRLDAVKHIKFSFDWLSHVR

SEQ ID NO: 33329 - protein, 480 aa, Bacillus sp.
APINETMMQYFEWDLPNDGTLWNRLHNNAQNLKNAGITALWLPPAYKGTSQSDVGYGVYDLYDLGEFNQKGTIRTKYGTKTQLERAIRSLKANGIQVYADVVFNHKAGADGTEFVDAVEVDPSNRNQEVSGTYQIEAWTKFDFPGRGNTYSSFKWRWYHFDGTDWDESRKLNRIYKFRGKAWDWEVDTENGNYDYLMFADLDMDHPEVVTELKNWGTWYVNTTNIDGFRLDAVKHIKFSFMRDWLTYVRNQTGKNLFAVGEFWKNDLGALENYITKTNGSMSLFDAPLHNNFYTASKSSGYFDMRNLLNGTLVQRHPSHAVTLVDNHDTQPGQSLQSWVEPWFKPLAYAFILTRQEGYPCVFYGDYYGIPKYNIPGLKSKIDPLLIARRDYAYGTQRDYIDHQDIIGWTREGIDTKPNSGLAALITDGPGGSKWMYVGKKHAGKVFYDLTGNRSDTVTINADGWGEFKVNGGSVSIWVAK

SEQ ID NO: 33330 - protein, 485 aa, Bacillus sp.
HHDGTNGTIMQYFEWNVPNDGQHWNRLHNNAQNLKNAGITAIWIPPAWKGTSQNDVGYGAYDLYDLGEFNQKGTVRTKYGTKAELERAIRSLKANGIQVYGDVVMNHKGGADFTERVQAVEVNPQNRNQEVSGTYQIEAWTGFNFPGRGNQHSSFKWRWYHFDGTDWDQSRQLANRIYKFRGDGKAWDWEVDTENGNYDYLMYADVDMDHPEVINELNRWGVWYANTLNLDGFRLDAVKHIKFSFMRDWLGHVRGQTGKNLFAVAEYWKNDLGALENYTSKTNGTMSAFDVPLHYNLYQASNSSGNYDMRNLLNGTLVQRHPSNAVTFVDNHDTQPGEALESFVQGWFKPLAYATILTREQGYPQVFYGDYYGIPSDGVPSYRQQIDPLLKARQQYAYGRQHDYFDHWDVIGWTREGNASHPNSGLATIMSDGPGGSKNMYVGRQKAGEVWHDMTGNRSGTVTINQDGWGHFFVNGGSVSVWVKR

SEQ ID NO: 33331 - protein, 485 aa, Bacillus sp.
HHDGTNGTIMQYFEWNVPNDGQHWNRLHNNAQNLKNAGITAIWIPPAWKGTSQNDVGYGAYDLYDLGEFNQKGTVRTKYGTKAELERAIRSLKANGIQVYGDVVMNHKGGADFTERVQAVEVNPQNRNQEVSGTYQIEAWTGFNFPGRGNQHSSFKWRWYHFDGTDWDQSRQLANRIYKFRGDGKAWDWEVDTENGNYDWPLHADVDMDHPEVINELNRWGVWYANTLNLDGFRLDAVKHIKFSFMRDWLGHVRGQTGKNLFAVAEYWKNDLGALENYLSKTNWTMSAFDVPLHYNLYQASNSSGNYDMRNLLNGTLVQRHPSHAVTFVDNHDTQPGEALESFVQGWFKPLAYATILTREQGYPQVFYGDYYGIPSDGVPSYRQQIDPLLKARQQYAYGRQHDYFDHWDVIGWTREGNASHPNSGLATIMSDGPGGSKWMYVGRQKAGEVWHDMTGNRSGTVTINQDGWGHFFVNGGSVSVWVKR

SEQ ID NO: 33332 - protein, 485 aa, Bacillus sp.
HHDGTNGTIMQYFEWNVPNDGQHWNRLHNNAQNLKNAGITAIWIPPAWKGTSQNDVGYGAYDLYDLGEFNQKGTVRTKYGTKAELERAIRSLKANGIQVYGDVVMNHKGGADFTERVQAVEVNPQNRNQEVSGTYQIEAWTGFNFPGRGNQHSSFKWRWYHFDGTDWDQSRQLANRIYKFRGDGKAWDWEVDTENGNYDWQLHADVDMDHPEVINELNRWGVWYANTLNLDGFRLDAVKHIKFSFMRDWLGHVRGQTGKNLFAVAEYWKNDLGALENYLSKTNWTMSAFDVPLHYNLYQASNSSGNYDMRNLLNGTLVQRHPSHAVTFVDNHDTQPGEALESFVQGWFKPLAYATILTREQGYPQVFYGDYYGIPSDGVPSYRQQIDPLLKARQQYAYGRQHDYFDHWDVIGWTREGNASHPNSGLATIMSDGPGGSKWMYVGRQKAGEVWHDMTGNRSGTVTINQDGWGHFFVNGGSVSVWVKR

SEQ ID NO: 33333 - protein, 485 aa, Bacillus sp.
HHDGTNGTIMQYFEWNVPNDGQHWNRLHNNAQNLKNAGITAIWIPPAWKGTSQNDVGYGAYDLYDLGEFNQKGTVRTKYGTKAELERAIRSLKANGIQVYGDVVMNHKGGADFTERVQAVEVNPQNRNQEVSGTYQIEAWTGFNFPGRGNQHSSFKWRWYHFDGTDWDQSRQLANRIYKFRGDGKAWDWEVDTENGNYDTPLNADVDMDHPEVINELNRWGVWYANTLNLDGFRLDAVKHIKFSFMRDWLGHVRGQTGKNLFAVAEYWKNDLGALENYLSKTNWTMSAFDVPLHYNLYQASNSSGNYDMRNLLNGTLVQRHPSHAVTFVDNHDTQPGEALESFVQGWFKPLAYATILTREQGYPQVFYGDYYGIPSDGVPSYRQQIDPLLKARQQYAYGRQHDYFDHWDVIGWTREGNASHPNSGLATIMSDGPGGSKWMYVGRQKAGEVWHDMTGNRSGTVTINQDGWGHFFVNGGSVSVWVKR

SEQ ID NO: 33334 - protein, 485 aa, Bacillus sp.
HHDGTNGTIMQYFEWNVPNDGQHWNRLHNNAQNLKNAGITAIWIPPAWKGTSQNDVGYGAYDLYDLGEFNQKGTVRTKYGTKAELERAIRSLKANGIQVYGDVVMNHKGGADFTERVQAVEVNPQNRNQEVSGTYQIEAWTGFNFPGRGNQHSSFKWRWYHFDGTDWDQSRQLANRIYKFRGDGKAWDWEVDTENGNYDIELLADVDMDHPEVINELNRWGVWYANTLNLDGFRLDAVKHIKFSFMRDWLGHVRGQTGKNLFAVAEYWKNDLGALENYLSKTNWTMSAFDVPLHYNLYQASNSSGNYDMRNLLNGTLVQRHPSHAVTFVDNHDTQPGEALESFVQGWFKPLAYATILTREQGYPQVFYGDYYGIPSDGVPSYRQQIDPLLKARQQYAYGRQHDYFDHWDVIGWTREGNASHPNSGLATIMSDGPGGSKWMYVGRQKAGEVWHDMTGNRSGTVTINQDGWGHFFVNGGSVSVWVKR

SEQ ID NO: 33335 - protein, 485 aa, Bacillus sp.
HHDGTNGTIMQYFEWNVPNDGQHWNRLHNNAQNLKNAGITAIWIPPAWKGTSQNDVGYGAYDLYDLGEFNQKGTVRTKYGTKAELERAIRSLKANGIQVYGDVVMNHKGGADFTERVQAVEVNPQNRNQEVSGTYQIEAWTGFNFPGRGNQHSSFKWRWYHFDGTDWDQSRQLANRIYKFRGDGKAWDWEVDTENGNYDIELNADVDMDHPEVINELNRWGVWYANTLNLDGFRLDAVKHIKFSFMRDWLGHVRGQTGKNLFAVAEYWKNDLGALENYLSKTNWTMSAFDVPLHYNLYQASNSSGNYDMRNLLNGTLVQRHPSHAVTFVDNHDTQPGEALESFVQGWFKPLAYATILTREQGYPQVFYGDYYGIPSDGVPSYRQQIDPLLKARQQYAYGRQHDYFDHWDVIGWTREGNASHPNSGLATIMSDGPGGSKWMYVGRQKAGEVWHDMTGNRSGTVTINQDGWGHFFVNGGSVSVWVKR

SEQ ID NO: 33336 - protein, 485 aa, Bacillus sp.
HHDGTNGTIMQYFEWNVPNDGQHWNRLHNNAQNLKNAGITAIWIPPAWKGTSQNDVGYGAYDLYDLGEFNQKGTVRTKYGTKAELERAIRSLKANGIQVYGDVVMNHKGGADFTERVQAVEVNPQNRNQEVSGTYQIEAWTGFNFPGRGNQHSSFKWRWYHFDGTDWDQSRQLANRIYKFRGDGKAWDWEVDTENGNYDWHSHADVDMDHPEVINELNRWGVWYANTLNLDGFRLDAVKHIKFSFMRDWLGHVRGQTGKNLFAVAEYWKNDLGALENYLSKTNWTMSAFDVPLHYNLYQASNSSGNYDMRNLLNGTLVQRHPSHAVTFVDNHDTQPGEALESFVQGWFKPLAYATILTREQGYPQVFYGDYYGIPSDGVPSYRQQIDPLLKARQQYAYGRQHDYFDHWDVIGWTREGNASHPNSGLATIMSDGPGGSKWMYVGRQKAGEVWHDMTGNRSGTVTINQDGWGHFFVNGGSVSVWVKR

SEQ ID NO: 33337 - protein, 485 aa, Bacillus sp.
HHDGTNGTIMQYFEWNVPNDGQHWNRLHNNAQNLKNAGITAIWIPPAWKGTSQNDVGYGAYDLYDLGEFNQKGTVRTKYGTKAELERAIRSLKANGIQVYGDVVMNHKGGADFTERVQAVEVNPQNRNQEVSGTYQIEAWTGFNFPGRGNQHSSFKWRWYHFDGTDWDQSRQLANRIYKFRGDGKAWDWEVDTENGNYDYWLGTDVDMDHPEVINELNRWGVWYANTLNLDGFRLDAVKHIKFSFMRDWLGHVRGQTGKNLFAVAEYWKNDLGALENYLSKTNWTMSAFDVPLHYNLYQASNSSGNYDMRNLLNGTLVQRHPSHAVTFVDNHDTQPGEALESFVQGWFKPLAYATILTREQGYPQVFYGDYYGIPSDGVPSYRQQIDPLLKARQQYAYGRQHDYFDHWDVIGWTREGNASHPNSGLATIMSDGPGGSKWMYVGRQKAGEVWHDMTGNRSGTVTINQDGWGHFFVNGGSVSVWVKR

SEQ ID NO: 33338 - protein, 485 aa, Bacillus sp.
HHDGTNGTIMQYFEWNVPNDGQHWNRLHNNAQNLKNAGITAIWIPPAWKGTSQNDVGYGAYDLYDLGEFNQKGTVRTKYGTKAELERAIRSLKANGIQVYGDVVMNHKGGADFTERVQAVEVNPQNRNQEVSGTYQIEAWTGFNFPGRGNQHSSFKWRWYHFDGTDWDQSRQLANRIYKFRGDGKAWDWEVDTENGNYDYLMYADVDMDHPEVINELNRWGVWYANTLNLDGFRLDAVKHIKFSFMRDWLGHVRGQTGKNLFAVAEYWKNDLGALENYTSKTNGTMSAFDVPLHYNLYQASNSSGNYDMRNLLNGTLVQRHPSNAVTFVDNHDTQPGEALESFVQGWFKPLAYATILTREQGYPQVFYGDYYGIPSDGVPSYRQQIDPLLKARQQYAYGRQHDYFDHWDVIGWTREGNASHPNSGLATIMSDGPGGSKWMYVGRQKAGEVWHDMTGNRSGTVTINQDGWGHFFVNKGSVSVWVKR

SEQ ID NO: 33339 - protein, 485 aa, Bacillus sp.
HHDGTNGTIMQYFEWNVPNDGQHWNRLHNNAQNLKNAGITAIWIPPAWKGTSQNDVGYGAYDLYDLGEFNQKGTVRTKYGTKAELERAIRSLKANGIQVYGDVVMNHKGGADFTERVQAVEVNPQNRNQEVSGTYQIEAWTGFNFPGRGNQHSSFKWRWYHFDGTDWDQSRQLANRIYKFRGDGKAWDWEVDTENGNYDYQLPTDVDMDHPEVINELNRWGVWYANTLNLDGFRLDAVKHIKFSFMRDWLGHVRGQTGKNLFAVAEYWKNDLGALENYLSKTNWTMSAFDVPLHYNLYQASNSSGNYDMRNLLNGTLVQRHPSHAVTFVDNHDTQPGEALESFVQGWFKPLAYATILTREQGYPQVFYGDYYGIPSDGVPSYRQQIDPLLKARQQYAYGRQHDYFDHWDVIGWTREGNASHPNSGLATIMSDGPGGSKWMYVGRQKAGEVWHDMTGNRSGTVTINQDGWGHFFVNGGSVSVWVKR

SEQ ID NO: 33340 - protein, 485 aa, Bacillus sp.
HHDGTNGTIMQYFEWNVPNDGQHWNRLHNNAQNLKNAGITAIWIPPAWKGTSQNDVGYGAYDLYDLGEFNQKGTVRTKYGTKAELERAIRSLKANGIQVYGDVVMNHKGGADFTERVQAVEVNPQNRNQEVSGTYQIEAYTGFNFPGRGNQHSSFKWRWYHFDGTDWDQSRQLANRIYKFRGDGKAWDWEVDTENGNYDYLMYADVDMDHPEVINELNRWGVWYANTLNLDGFRLDAVKHIKFSFMRDWLGHVRGQTGKNLFAVAEYWKNDLGALENYLSKTNWTMSAFDVPLHYNLYQASNSSKNYDMRNLLNGTLVQRHPSHAVTFVDNHDTQPGEALESFVQGWFKPLAYATILTREQGYPQVFYGDYYGIPSDGVPSYRQQIDPLLKARQQYAYGRQHDYFDHWDVIGWTREGNASHPNSGLATIMSDGPGGSKNMYVGRQKAGEVWHDMTGNRSGTVTINQDGWGHFFVNGKSVSVWVKR

SEQ ID NO: 33341 - protein, 483 aa, Bacillus sp. (in: firmicutes)
HHDGTNGTIMQYFEWNVPNDGQHWNRLHNNAQNLKNAGITAIWIPPAWKGTSQNDVGYGAYDLYDLGEFNQKGTVRTKYGTKAELERAIRSLKANGIQVYGDVVMNHKGGADFTERVQAVEVNPQNRNQYVTGSYQIEAWTGFNFPGRGNQHSSFKWRWYHFDGTDWDQSRQLANRIYKFEGKDWDWEVDTEFGNYDYLMYADVDMDHPEVINELNRWGVWYANTLNLDGFRLDAVKHIKFSFMRDWLGHVRGQTGKNLFAVAEYWKNDLGALENYLSKTNWTMSAFDVPLHYNLYQASNSSGNYDMRNLLNGTLVQRHPSHAVTFVDNHDTQPGEALESFVQGWFKPLAYATILTREQGYPSVFYGDYYGIPSDGVPSYRQQIDPLLKARQQYAYGRQHDYFDHWDVIGWTREGNASHPNSGLATIMSDGPGGSKWMYVGRQKAGEVWHDMTGNRSGTVTINQDGWGHFFVNGGSVSVWVKR

SEQ ID NO: 33342 - protein, 485 aa, Bacillus sp.
HHDGTNGTIMQYFEWNVPNDGQHWNRLHNNAQNLKNAGITAIWIPPAWKGTSQNDVGYGAYDLYDLGEFNQKGTVRTKYGTKAELERAIRSLKANGIQVYGDVVMNHKGGADFTERVQAVEVNPQNRNQEVSGTYQIEAWTGFNFPGRGNQHSSFKWRWYHFDGTDWDQSRQLANRIYKFRGDGKAWDWEVDTENGNYDWQLLADVDMDHPEVINELNRWGVWYANTLNLDGFRLDAVKHIKFSFMRDWLGHVRGQTGKNLFAVAEYWKNDLGALENYLSKTNWTMSAFDVPLHYNLYQASNSSGNYDMRNLLNGTLVQRHPSHAVTFVDNHDTQPGEALESFVQGWFKPLAYATILTREQGYPQVFYGDYYGIPSDGVPSYRQQIDPLLKARQQYAYGRQHDYFDHWDVIGWTREGNASHPNSGLATIMSDGPGGSKWMYVGRQKAGEVWHDMTGNRSGTVTINQDGWGHFFVNGGSVSVWVKR

SEQ ID NO: 33343 - protein, 485 aa, Bacillus sp.
HHDGTNGTIMQYFEWNVPNDGQHWNRLHNNAQNLKNAGITAIWIPPAWKGTSQNDVGYGAYDLYDLGEFNQKGTVRTKYGTKAELERAIRSLKANGIQVYGDVVMNHKGGADFTERVQAVEVNPQNRNQEVSGTYQIEAWTGFNFPGRGNQHSSFKWRWYHFDGTDWDQSRQLANRIYKFRGDGKAWDWEVDTENGNYDQLLNTDVDMDHPEVINELNRWGVWYANTLNLDGFRLDAVKHIKFSFMRDWLGHVRGQTGKNLFAVAEYWKNDLGALENYLSKTNWTMSAFDVPLHYNLYQASNSSGNYDMRNLLNGTLVQRHPSHAVTFVDNHDTQPGEALESFVQGWFKPLAYATILTREQGYPQVFYGDYYGIPSDGVPSYRQQIDPLLKARQQYAYGRQHDYFDHWDVIGWTREGNASHPNSGLATIMSDGPGGSKWMYVGRQKAGEVWHDMTGNRSGTVTINQDGWGHFFVNGGSVSVWVKR

SEQ ID NO: 33344 - protein, 485 aa, Bacillus sp.
HHDGTNGTIMQYFEWNVPNDGQHWNRLHNNAQNLKNAGITAIWIPPAWKGTSQNDVGYGAYDLYDLGEFNQKGTVRTKYGTKAELERAIRSLKANGIQVYGDVVMNHKGGADFTERVQAVEVNPQNRNQEVSGTYQIEAWTGFNFPGRGNQHSSFKWRWYHFDGTDWDQSRQLANRIYKFRGDGKAWDWEVDTENGNYDWNLSADVDMDHPEVINELNRWGVWYANTLNLDGFRLDAVKHIKFSFMRDWLGHVRGQTGKNLFAVAEYWKNDLGALENYLSKTNWTMSAFDVPLHYNLYQASNSSGNYDMRNLLNGTLVQRHPSHAVTFVDNHDTQPGEALESFVQGWFKPLAYATILTREQGYPQVFYGDYYGIPSDGVPSYRQQIDPLLKARQQYAYGRQHDYFDHWDVIGWTREGNASHPNSGLATIMSDGPGGSKWMYVGRQKAGEVWHDMTGNRSGTVTINQDGWGHFFVNGGSVSVWVKR

SEQ ID NO: 33345 - protein, 485 aa, Bacillus sp.
HHDGTNGTIMQYFEWNVPNDGQHWNRLHNNAQNLKNAGITAIWIPPAWKGTSQNDVGYGAYDLYDLGEFNQKGTVRTKYGTKAELERAIRSLKANGIQVYGDVVMNHKGGADFTERVQAVEVNPQNRNQEVSGTYQIEAWTGFNFPGRGNQHSSFKWRWYHFDGTDWDQSRQLANRIYKFRGDGKAWDWEVDTENGNYDIELPADVDMDHPEVINELNRWGVWYANTLNLDGFRLDAVKHIKFSFMRDWLGHVRGQTGKNLFAVAEYWKNDLGALENYLSKTNWTMSAFDVPLHYNLYQASNSSGNYDMRNLLNGTLVQRHPSHAVTFVDNHDTQPGEALESFVQGWFKPLAYATILTREQGYPQVFYGDYYGIPSDGVPSYRQQIDPLLKARQQYAYGRQHDYFDHWDVIGWTREGNASHPNSGLATIMSDGPGGSKWMYVGRQKAGEVWHDMTGNRSGTVTINQDGWGHFFVNGGSVSVWVKR

SEQ ID NO: 33346 - protein, 485 aa, Bacillus sp.
HHDGTNGTIMQYFEWNVPNDGQHWNRLHNNAQNLKNAGITAIWIPPAWKGTSQNDVGYGAYDLYDLGEFNQKGTVRTKYGTKAELERAIRSLKANGIQVYGDVVMNHKGGADFTERVQAVEVNPQNRNQEVSGTYQIEAWTGFNFPGRGNQHSSFKWRWYHFDGTDWDQSRQLANRIYKFRGDGKAWDWEVDTENGNYDQWLHADVDMDHPEVINELNRWGVWYANTLNLDGFRLDAVKHIKFSFMRDWLGHVRGQTGKNLFAVAEYWKNDLGALENYLSKTNWTMSAFDVPLHYNLYQASNSSGNYDMRNLLNGTLVQRHPSHAVTFVDNHDTQPGEALESFVQGWFKPLAYATILTREQGYPQVFYGDYYGIPSDGVPSYRQQIDPLLKARQQYAYGRQHDYFDHWDVIGWTREGNASHPNSGLATIMSDGPGGSKWMYVGRQKAGEVWHDMTGNRSGTVTINQDGWGHFFVNGGSVSVWVKR

SEQ ID NO: 33347 - protein, 485 aa, Bacillus sp.
HHDGTNGTIMQYFEWNVPNDGQHWNRLHNNAQNLKNAGITAIWIPPAWKGTSQNDVGYGAYDLYDLGEFNQKGTVRTKYGTKAELERAIRSLKANGIQVYGDVVMNHKGGADFTERVQAVEVNPQNRNQEVSGTYQIEAYTGFNFPGRGNQHSSFKWRWYHFDGTDWDQSRQLANRIYKFRGDGKAWDWEVDTENGNYDYLMYADVDMDHPDVINELNRWGVWYANTLNLDGFRLDAVKHIKFSFMRDWLGHVRGQTGKNLFAVAEYWKNDLGALENYLSKTNWTMSAFDVPLHYNLYQASNSSKNYDMRNLLNGTLVQRHPSHAVTFVDNHDTQPGEALESFVQGWFKPLAYATILTREQGYPQVFYGDYYGIPSDGVPSYRQQIDPLLKARQQYAYGRQHDYFDHWDVIGWTREGNASHPNSGLATIMSDGPGGSKWMYVGRQKAGEVWHDMTGNRSGTVTINQDGWGHFFVNGKSVSVWVKR

SEQ ID NO: 33348 - protein, 485 aa, Bacillus sp.
HHDGTNGTIMQYFEWNVPNDGQHWNRLHNNAQNLKNAGITAIWIPPAWKGTSQNDVGYGAYDLYDLGEFNQKGTVRTKYGTKAELERAIRSLKANGIQVYGDVVMNHKGGADFTERVQAVEVNPQNRNQEVSGTYQIEAWTGFNFPGRGNQHSSFKWRWYHFDGTDWDQSRQLANRIYKFRGDGKAWDWEVDTENGNYDIELKADVDMDHPEVINELNRWGVWYANTLNLDGFRLDAVKHIKFSFMRDWLGHVRGQTGKNLFAVAEYWKNDLGALENYLSKTNWTMSAFDVPLHYNLYQASNSSGNYDMRNLLNGTLVQRHPSHAVTFVDNHDTQPGEALESFVQGWFKPLAYATILTREQGYPQVFYGDYYGIPSDGVPSYRQQIDPLLKARQQYAYGRQHDYFDHWDVIGWTREGNASHPNSGLATIMSDGPGGSKWMYVGRQKAGEVWHDMTGNRSGTVTINQDGWGHFFVNGGSVSVWVKR

SEQ ID NO: 33349 - protein, 485 aa, Bacillus sp.
HHDGTNGTIMQYFEWNVPNDGQHWNRLHNNAQNLKNAGITAIWIPPAWKGTSQNDVGYGAYDLYDLGEFNQKGTVRTKYGTKAELERAIRSLKANGIQVYGDVVMNHKGGADFTERVQAVEVNPQNRNQEVSGTYQIEAYTGFNFPGRGNQHSSFKWRWYHFDGTDWDQSRQLANRIYKFRGDGKAWDWEVDTENGNYDYLMYADVDMDHPEVINELNRWGVWYANTLNLDGFRLDAVKHIKFSFMRDWLGHVRGQTGKNLFAVAEYWKNDLGALENYLSKTNWTMSAFDVPLHYNLYQASNSSKNYDMRNLLNGTLVQRHPSHAVTFVDNHDTQPGEALESFVQGWFKPLAYATILTREQGYPQVFYGDYYGIPSDGVPSYRQQIDPLLKARQQYAYGRQHDYFDHWDVIGWTREGNASHPNSGLATIMSDGPGGSKWMYVGRQKAGEVWHDMTGNRSGTVTINQDGTGHFFVNKGSVSVWVKR

SEQ ID NO: 33350 - protein, 485 aa, Bacillus sp.
HHDGTNGTIMQYFEWNVPNDGQHWNRLHNNAQNLKNAGITAIWIPPAWKGTSQNDVGYGAYDLYDLGEFNQKGTVRTKYGTKAELERAIRSLKANGIQVYGDVVMNHKGGADFTERVQAVEVNPQNRNQEVSGTYQIEAWTGFNFPGRGNQHSSFKWRWYHFDGTDWDQSRQLANRIYKFRGDGKAWDWEVDTENGNYDIELTADVDMDHPEVINELNRWGVWYANTLNLDGFRLDAVKHIKFSFMRDWLGHVRGQTGKNLFAVAEYWKNDLGALENYLSKTNWTMSAFDVPLHYNLYQASNSSGNYDMRNLLNGTLVQRHPSHAVTFVDNHDTQPGEALESFVQGWFKPLAYATILTREQGYPQVFYGDYYGIPSDGVPSYRQQIDPLLKARQQYAYGRQHDYFDHWDVIGWTREGNASHPNSGLATIMSDGPGGSKWMYVGRQKAGEVWHDMTGNRSGTVTINQDGWGHFFVNGGSVSVWVKR

SEQ ID NO: 33351 - protein, 485 aa, Bacillus sp.
HHDGTNGTIMQYFEWNVPNDGQHWNRLHNNAQNLKNAGITAIWIPPAWKGTSQNDVGYGAYDLYDLGEFNQKGTVRTKYGTKAELERAIRSLKANGIQVYGDVVMNHKGGADFTERVQAVEVNPQNRNQEVSGTYQIEAWTGFNFPGRGNQHSSFKWRWYHFDGTDWDQSRQLANRIYKFRGDGKAWDWEVDTENGNYDEQLEADVDMDHPEVINELNRWGVWYANTLNLDGFRLDAVKHIKFSFMRDWLGHVRGQTGKNLFAVAEYWKNDLGALENYLSKTNWTMSAFDVPLHYNLYQASNSSGNYDMRNLLNGTLVQRHPSHAVTFVDNHDTQPGEALESFVQGWFKPLAYATILTREQGYPQVFYGDYYGIPSDGVPSYRQQIDPLLKARQQYAYGRQHDYFDHWDVIGWTREGNASHPNSGLATIMSDGPGGSKWMYVGRQKAGEVWHDMTGNRSGTVTINQDGWGHFFVNGGSVSVWVKR

SEQ ID NO: 33352 - protein, 485 aa, Bacillus sp.
HHDGTNGTIMQYFEWNVPNDGQHWNRLHNNAQNLKNAGITAIWIPPAWKGTSQNDVGYGAYDLYDLGEFNQKGTVRTKYGTKAELERAIRSLKANGIQVYGDVVMNHKGGADFTERVQAVEVNPQNRNQEVSGTYQIEAWTGFNFPGRGNQHSSFKWRWYHFDGTDWDQSRQLANRIYKFRGDGKAWDWEVDTENGNYDWQLTADVDMDHPEVINELNRWGVWYANTLNLDGFRLDAVKHIKFSFMRDWLGHVRGQTGKNLFAVAEYWKNDLGALENYLSKTNWTMSAFDVPLHYNLYQASNSSGNYDMRNLLNGTLVQRHPSHAVTFVDNHDTQPGEALESFVQGWFKPLAYATILTREQGYPQVFYGDYYGIPSDGVPSYRQQIDPLLKARQQYAYGRQHDYFDHWDVIGWTREGNASHPNSGLATIMSDGPGGSKWMYVGRQKAGEVWHDMTGNRSGTVTINQDGWGHFFVNGGSVSVWVKR

SEQ ID NO: 33353 - protein, 485 aa, Bacillus sp.
HHDGTNGTIMQYFEWNVPNDGQHWNRLHNNAQNLKNAGITAIWIPPAWKGTSQNDVGYGAYDLYDLGEFNQKGTVRTKYGTKAELERAIRSLKANGIQVYGDVVMNHKGGADFTERVQAVEVNPQNRNQEVSGTYQIEAWTGFNFPGRGNQHSSFKWRWYHFDGTDWDQSRQLANRIYKFRGDGKAWDWEVDTENGNYDIEVSADVDMDHPEVINELNRWGVWYANTLNLDGFRLDAVKHIKFSFMRDWLGHVRGQTGKNLFAVAEYWKNDLGALENYLSKTNWTMSAFDVPLHYNLYQASNSSGNYDMRNLLNGTLVQRHPSHAVTFVDNHDTQPGEALESFVQGWFKPLAYATILTREQGYPQVFYGDYYGIPSDGVPSYRQQIDPLLKARQQYAYGRQHDYFDHWDVIGWTREGNASHPNSGLATIMSDGPGGSKWMYVGRQKAGEVWHDMTGNRSGTVTINQDGWGHFFVNGGSVSVWVKR

SEQ ID NO: 33354 - protein, 485 aa, Bacillus sp.
HHDGTNGTIMQYFEWNVPNDGQHWNRLHNNAQNLKNAGITAIWIPPAWKGTSQNDVGYGAYDLYDLGEFNQKGTVRTKYGTKAELERAIRSLKANGIQVYGDVVMNHKGGADFTERVQAVEVNPQNRNQEVSGTYQIEAWTGFNFPGRGNQHSSFKWRWYHFDGTDWDQSRQLANRIYKFRGDGKAWDWEVDTENGNYDYQLLTDVDMDHPEVINELNRWGVWYANTLNLDGFRLDAVKHIKFSFMRDWLGHVRGQTGKNLFAVAEYWKNDLGALENYLSKTNWTMSAFDVPLHYNLYQASNSSGNYDMRNLLNGTLVQRHPSHAVTFVDNHDTQPGEALESFVQGWFKPLAYATILTREQGYPQVFYGDYYGIPSDGVPSYRQQIDPLLKARQQYAYGRQHDYFDHWDVIGWTREGNASHPNSGLATIMSDGPGGSKWMYVGRQKAGEVWHDMTGNRSGTVTINQDGWGHFFVNGGSVSVWVKR

SEQ ID NO: 33355 - protein, 485 aa, Bacillus sp.
HHDGTNGTIMQYFEWNVPNDGQHWNRLHNNAQNLKNAGITAIWIPPAWKGTSQNDVGYGAYDLYDLGEFNQKGTVRTKYGTKAELERAIRSLKANGIQVYGDVVMNHKGGADFTERVQAVEVNPQNRNQEVSGTYQIEAWTGFNFPGRGNQHSSFKWRWYHFDGTDWDQSRQLANRIYKFRGDGKAWDWEVDTENGNYDLPLLADVDMDHPEVINELNRWGVWYANTLNLDGFRLDAVKHIKFSFMRDWLGHVRGQTGKNLFAVAEYWKNDLGALENYLSKTNWTMSAFDVPLHYNLYQASNSSGNYDMRNLLNGTLVQRHPSHAVTFVDNHDTQPGEALESFVQGWFKPLAYATILTREQGYPQVFYGDYYGIPSDGVPSYRQQIDPLLKARQQYAYGRQHDYFDHWDVIGWTREGNASHPNSGLATIMSDGPGGSKWMYVGRQKAGEVWHDMTGNRSGTVTINQDGWGHFFVNGGSVSVWVKR

SEQ ID NO: 33356 - protein, 485 aa, Bacillus sp.
HHDGTNGTIMQYFEWNVPNDGQHWNRLHNNAQNLKNAGITAIWIPPAWKGTSQNDVGYGAYDLYDLGEFNQKGTVRTKYGTKAELERAIRSLKANGIQVYGDVVMNHKGGADFTERVQAVEVNPQNRNQEVSGTYQIEAWTGFNFPGRGNQHSSFKWRWYHFDGTDWDQSRQLANRIYKFRGDGKAWDWEVDTENGNYDIELRADVDMDHPEVINELNRWGVWYANTLNLDGFRLDAVKHIKFSFMRDWLGHVRGQTGKNLFAVAEYWKNDLGALENYLSKTNWTMSAFDVPLHYNLYQASNSSGNYDMRNLLNGTLVQRHPSHAVTFVDNHDTQPGEALESFVQGWFKPLAYATILTREQGYPQVFYGDYYGIPSDGVPSYRQQIDPLLKARQQYAYGRQHDYFDHWDVIGWTREGNASHPNSGLATIMSDGPGGSKWMYVGRQKAGEVWHDMTGNRSGTVTINQDGWGHFFVNGGSVSVWVKR

SEQ ID NO: 33357 - protein, 485 aa, Bacillus sp.
HHDGTNGTIMQYFEWNVPNDGQHWNRLHNNAQNLKNAGITAIWIPPAWKGTSQNDVGYGAYDLYDLGEFNQKGTVRTKYGTKAELERAIRSLKANGIQVYGDVVMNHKGGADFTERVQAVEVNPQNRNQEVSGTYQIEAWTGFNFPGRGNQHSSFKWRWYHFDGTDWDQSRQLANRIYKFRGDGKAWDWEVDTENGNYDPQLIADVDMDHPEVINELNRWGVWYANTLNLDGFRLDAVKHIKFSFMRDWLGHVRGQTGKNLFAVAEYWKNDLGALENYLSKTNWTMSAFDVPLHYNLYQASNSSGNYDMRNLLNGTLVQRHPSHAVTFVDNHDTQPGEALESFVQGWFKPLAYATILTREQGYPQVFYGDYYGIPSDGVPSYRQQIDPLLKARQQYAYGRQHDYFDHWDVIGWTREGNASHPNSGLATIMSDGPGGSKWMYVGRQKAGEVWHDMTGNRSGTVTINQDGWGHFFVNGGSVSVWVKR

SEQ ID NO: 33358 - protein, 485 aa, Bacillus sp.
HHDGTNGTIMQYFEWNVPNDGQHWNRLHNNAQNLKNAGITAIWIPPAWKGTSQNDVGYGAYDLYDLGEFNQKGTVRTKYGTKAELERAIRSLKANGIQVYGDVVMNHKGGADFTERVQAVEVNPQNRNQEVSGTYQIEAWTGFNFPGRGNQHSSFKWRWYHFDGTDWDQSRQLANRIYKFRGDGKAWDWEVDTENGNYDWHLPADVDMDHPEVINELNRWGVWYANTLNLDGFRLDAVKHIKFSFMRDWLGHVRGQTGKNLFAVAEYWKNDLGALENYLSKTNWTMSAFDVPLHYNLYQASNSSGNYDMRNLLNGTLVQRHPSHAVTFVDNHDTQPGEALESFVQGWFKPLAYATILTREQGYPQVFYGDYYGIPSDGVPSYRQQIDPLLKARQQYAYGRQHDYFDHWDVIGWTREGNASHPNSGLATIMSDGPGGSKWMYVGRQKAGEVWHDMTGNRSGTVTINQDGWGHFFVNGGSVSVWVKR

SEQ ID NO: 33359 - protein, 485 aa, Bacillus sp.
HHDGTNGTIMQYFEWNVPNDGQHWNRLHNNAQNLKNAGITAIWIPPAWKGTSQNDVGYGAYDLYDLGEFNQKGTVRTKYGTKAELERAIRSLKANGIQVYGDVVMNHKGGADFTERVQAVEVNPQNRNQEVSGTYQIEAWTGFNFPGRGNQHSSFKWRWYHFDGTDWDQSRQLANRIYKFRGDGKAWDWEVDTENGNYDQHLPADVDMDHPEVINELNRWGVWYANTLNLDGFRLDAVKHIKFSFMRDWLGHVRGQTGKNLFAVAEYWKNDLGALENYLSKTNWTMSAFDVPLHYNLYQASNSSGNYDMRNLLNGTLVQRHPSHAVTFVDNHDTQPGEALESFVQGWFKPLAYATILTREQGYPQVFYGDYYGIPSDGVPSYRQQIDPLLKARQQYAYGRQHDYFDHWDVIGWTREGNASHPNSGLATIMSDGPGGSKWMYVGRQKAGEVWHDMTGNRSGTVTINQDGWGHFFVNGGSVSVWVKR

SEQ ID NO: 33360 - protein, 485 aa, Bacillus sp.
HHDGTNGTIMQYFEWNVPNDGQHWNRLHNNAQNLKNAGITAIWIPPAWKGTSQNDVGYGAYDLYDLGEFNQKGTVRTKYGTKAELERAIRSLKANGIQVYGDVVMNHKGGADFTERVQAVEVNPQNRNQEVSGTYQIEAWTGFNFPGRGNQHSSFKWRWYHFDGTDWDQSRQLANRIYKFRGDGKAWDWEVDTENGNYDYLMYADVDMDHPEVINELNRWGVWYANTLNLDGFRLDAVKHIKFSFMRDWLGHVRGQTGKNLFAVAEYWKNDLGALENYTSKTNGTMSAFDVPLHYNLYQASNSSGNYDMRNLLNGTLVQRHPSNAVTFVDNHDTQPGEALESFVQGWFKPLAYATILTREQGYPQVFYGDYYGIPSDGVPSYRQQIDPLLKARQQYAYGRQHDYFDHWDVIGWTREGNASHPNSGLATIMSDGPGGSKWMYVGRQKAGEVWHDMTGNRSGTVTINQDGTGHFFVNGGSVSVWVKR

SEQ ID NO: 33361 - protein, 485 aa, Bacillus sp.
HHDGTNGTIMQYFEWNVPNDGQHWNRLHNNAQNLKNAGITAIWIPPAWKGTSQNDVGYGAYDLYDLGEFNQKGTVRTKYGTKAELERAIRSLKANGIQVYGDVVMNHKGGADFTERVQAVEVNPQNRNQEVSGTYQIEAWTGFNFPGRGNQHSSFKWRWYHFDGTDWDQSRQLANRIYKFRGDGKAWDWEVDTENGNYDWHTQADVDMDHPEVINELNRWGVWYANTLNLDGFRLDAVKHIKFSFMRDWLGHVRGQTGKNLFAVAEYWKNDLGALENYLSKTNWTMSAFDVPLHYNLYQASNSSGNYDMRNLLNGTLVQRHPSHAVTFVDNHDTQPGEALESFVQGWFKPLAYATILTREQGYPQVFYGDYYGIPSDGVPSYRQQIDPLLKARQQYAYGRQHDYFDHWDVIGWTREGNASHPNSGLATIMSDGPGGSKWMYVGRQKAGEVWHDMTGNRSGTVTINQDGWGHFFVNGGSVSVWVKR

SEQ ID NO: 33362 - protein, 485 aa, Bacillus sp.
HHDGTNGTIMQYFEWNVPNDGQHWNRLHNNAQNLKNAGITAIWIPPAWKGTSQNDVGYGAYDLYDLGEFNQKGTVRTKYGTKAELERAIRSLKANGIQVYGDVVMNHKGGADFTERVQAVEVNPQNRNQEVSGTYQIEAWTGFNFPGRGNQHSSFKWRWYHFDGTDWDQSRQLANRIYKFRGDGKAWDWEVDTENGNYDPTLPADVDMDHPEVINELNRWGVWYANTLNLDGFRLDAVKHIKFSFMRDWLGHVRGQTGKNLFAVAEYWKNDLGALENYLSKTNWTMSAFDVPLHYNLYQASNSSGNYDMRNLLNGTLVQRHPSHAVTFVDNHDTQPGEALESFVQGWFKPLAYATILTREQGYPQVFYGDYYGIPSDGVPSYRQQIDPLLKARQQYAYGRQHDYFDHWDVIGWTREGNASHPNSGLATIMSDGPGGSKWMYVGRQKAGEVWHDMTGNRSGTVTINQDGWGHFFVNGGSVSVWVKR

SEQ ID NO: 33363 - protein, 485 aa, Bacillus sp.
HHDGTNGTIMQYFEWNVPNDGQHWNRLHNNAQNLKNAGITAIWIPPAWKGTSQNDVGYGAYDLYDLGEFNQKGTVRTKYGTKAELERAIRSLKANGIQVYGDVVMNHKGGADFTERVQAVEVNPQNRNQEVSGTYQIEAWTGFNFPGRGNQHSSFKWRWYHFDGTDWDQSRQLANRIYKFRGDGKAWDWEVDTENGNYDWQLRADVDMDHPEVINELNRWGVWYANTLNLDGFRLDAVKHIKFSFMRDWLGHVRGQTGKNLFAVAEYWKNDLGALENYLSKTNWTMSAFDVPLHYNLYQASNSSGNYDMRNLLNGTLVQRHPSHAVTFVDNHDTQPGEALESFVQGWFKPLAYATILTREQGYPQVFYGDYYGIPSDGVPSYRQQIDPLLKARQQYAYGRQHDYFDHWDVIGWTREGNASHPNSGLATIMSDGPGGSKWMYVGRQKAGEVWHDMTGNRSGTVTINQDGWGHFFVNGGSVSVWVKR

SEQ ID NO: 33364 - protein, 485 aa, Bacillus sp.
HHDGTNGTIMQYFEWNVPNDGQHWNRLHNNAQNLKNAGITAIWIPPAWKGTSQNDVGYGAYDLYDLGEFNQKGTVRTKYGTKAELERAIRSLKANGIQVYGDVVMNHKGGADFTERVQAVEVNPQNRNQEVSGTYQIEAWTGFNFPGRGNQHSSFKWRWYHFDGTDWDQSRQLANRIYKFRGDGKAWDWEVDTENGNYDQLWGTDVDMDHPEVINELNRWGVWYANTLNLDGFRLDAVKHIKFSFMRDWLGHVRGQTGKNLFAVAEYWKNDLGALENYLSKTNWTMSAFDVPLHYNLYQASNSSGNYDMRNLLNGTLVQRHPSHAVTFVDNHDTQPGEALESFVQGWFKPLAYATILTREQGYPQVFYGDYYGIPSDGVPSYRQQIDPLLKARQQYAYGRQHDYFDHWDVIGWTREGNASHPNSGLATIMSDGPGGSKWMYVGRQKAGEVWHDMTGNRSGTVTINQDGWGHFFVNGGSVSVWVKR

SEQ ID NO: 33365 - protein, 485 aa, Bacillus sp.
HHDGTNGTIMQYFEWNVPNDGQHWNRLHNNAQNLKNAGITAIWIPPAWKGTSQNDVGYGAYDLYDLGEFNQKGTVRTKYGTKAELERAIRSLKANGIQVYGDVVMNHKGGADFTERVQAVEVNPQNRNQEVSGTYQIEAYTGFNFPGRGNQHSSFKWRWYHFDGTDWDQSRQLANRIYKFRGDGKAWDWEVDTENGNYDYLMYADVDMDHPEVINELNRWGVWYANTLNLDGFRLDAVKHIKFSFMRDWLGHVRGQTGKNLFAVAEYWKNDLGALENYLSKTNWTMSAFDVPLHYNLYQASNSSKNYDMRNLLNGTLVQRHPSHAVTFVDNHDTQPGEALESFVQGWFKPLAYATILTREQGYPQVFYGDYYGIPSDGVPSYRQQIDPLLKARQQYAYGRQHDYFDHWDVIGWTREGNASHPNSGLATIMSDGPGGSKNMYVGRQKAGEVWHDMTGNRSGTVTINQDGWGHFFVNKGSVSVWVKR

SEQ ID NO: 33366 - protein, 485 aa, Bacillus sp.
HHDGTNGTIMQYFEWNVPNDGQHWNRLHNNAQNLKNAGITAIWIPPAWKGTSQNDVGYGAYDLYDLGEFNQKGTVRTKYGTKAELERAIRSLKANGIQVYGDVVMNHKGGADFTERVQAVEVNPQNRNQEVSGTYQIEAWTGFNFPGRGNQHSSFKWRWYHFDGTDWDQSRQLANRIYKFRGDGKAWDWEVDTENGNYDTPQIADVDMDHPEVINELNRWGVWYANTLNLDGFRLDAVKHIKFSFMRDWLGHVRGQTGKNLFAVAEYWKNDLGALENYLSKTNWTMSAFDVPLHYNLYQASNSSGNYDMRNLLNGTLVQRHPSHAVTFVDNHDTQPGEALESFVQGWFKPLAYATILTREQGYPQVFYGDYYGIPSDGVPSYRQQIDPLLKARQQYAYGRQHDYFDHWDVIGWTREGNASHPNSGLATIMSDGPGGSKWMYVGRQKAGEVWHDMTGNRSGTVTINQDGWGHFFVNGGSVSVWVKR

SEQ ID NO: 33367 - protein, 485 aa, Bacillus sp.
HHDGTNGTIMQYFEWNVPNDGQHWNRLHNNAQNLKNAGITAIWIPPAWKGTSQNDVGYGAYDLYDLGEFNQKGTVRTKYGTKAELERAIRSLKANGIQVYGDVVMNHKGGADFTERVQAVEVNPQNRNQEVSGTYQIEAWTGFNFPGRGNQHSSFKWRWYHFDGTDWDQSRQLANRIYKFRGDGKAWDWEVDTENGNYDWQLIADVDMDHPEVINELNRWGVWYANTLNLDGFRLDAVKHIKFSFMRDWLGHVRGQTGKNLFAVAEYWKNDLGALENYLSKTNWTMSAFDVPLHYNLYQASNSSGNYDMRNLLNGTLVQRHPSHAVTFVDNHDTQPGEALESFVQGWFKPLAYATILTREQGYPQVFYGDYYGIPSDGVPSYRQQIDPLLKARQQYAYGRQHDYFDHWDVIGWTREGNASHPNSGLATIMSDGPGGSKWMYVGRQKAGEVWHDMTGNRSGTVTINQDGWGHFFVNGGSVSVWVKR

SEQ ID NO: 33368 - protein, 485 aa, Bacillus sp.
HHDGTNGTIMQYFEWNVPNDGQHWNRLHNNAQNLKNAGITAIWIPPAWKGTSQNDVGYGAYDLYDLGEFNQKGTVRTKYGTKAELERAIRSLKANGIQVYGDVVMNHKGGADFTERVQAVEVNPQNRNQEVSGTYQIEAYTGFNFPGRGNQHSSFKWRWYHFDGTDWDQSRQLANRIYKFRGDGKAWDWEVDTENGNYDYLMYADVDMDHPEVINELNRWGVWYANTLNLDGFRLDAVKHIKFSFMRDWLGHVRGQTGKNLFAVAEYWKNDLGALENYLSKTNKTMSAFDVPLHYNLYQASNSSKNYDMRNLLNGTLVQRHPSHAVTFVDNHDTQPGEALESFVQGWFKPLAYATILTREQGYPQVFYGDYYGIPSDGVPSYRQQIDPLLKARQQYAYGRQHDYFDHWDVIGWTREGNASHPNSGLATIMSDGPGGSKWMYVGRQKAGEVWHDMTGNRSGTVTINQDGWGHFFVNGKSVSVWVKR

SEQ ID NO: 33369 - protein, 485 aa, Bacillus sp.
HHDGTNGTIMQYFEWNVPNDGQHWNRLHNNAQNLKNAGITAIWIPPAWKGTSQNDVGYGAYDLYDLGEFNQKGTVRTKYGTKAELERAIRSLKANGIQVYGDVVMNHKGGADFTERVQAVEVNPQNRNQEVSGTYQIEAWTGFNFPGRGNQHSSFKWRWYHFDGTDWDQSRQLANRIYKFRGDGKAWDWEVDTENGNYDTTLPADVDMDHPEVINELNRWGVWYANTLNLDGFRLDAVKHIKFSFMRDWLGHVRGQTGKNLFAVAEYWKNDLGALENYLSKTNWTMSAFDVPLHYNLYQASNSSGNYDMRNLLNGTLVQRHPSHAVTFVDNHDTQPGEALESFVQGWFKPLAYATILTREQGYPQVFYGDYYGIPSDGVPSYRQQIDPLLKARQQYAYGRQHDYFDHWDVIGWTREGNASHPNSGLATIMSDGPGGSKWMYVGRQKAGEVWHDMTGNRSGTVTINQDGWGHFFVNGGSVSVWVKR

SEQ ID NO: 33370 - protein, 485 aa, Bacillus sp.
HHDGTNGTIMQYFEWNVPNDGQHWNRLHNNAQNLKNAGITAIWIPPAWKGTSQNDVGYGAYDLYDLGEFNQKGTVRTKYGTKAELERAIRSLKANGIQVYGDVVMNHKGGADFTERVQAVEVNPQNRNQEVSGTYQIEAWTGFNFPGRGNQHSSFKWRWYHFDGTDWDQSRQLANRIYKFRGDGKAWDWEVDTENGNYDQELPADVDMDHPEVINELNRWGVWYANTLNLDGFRLDAVKHIKFSFMRDWLGHVRGQTGKNLFAVAEYWKNDLGALENYLSKTNWTMSAFDVPLHYNLYQASNSSGNYDMRNLLNGTLVQRHPSHAVTFVDNHDTQPGEALESFVQGWFKPLAYATILTREQGYPQVFYGDYYGIPSDGVPSYRQQIDPLLKARQQYAYGRQHDYFDHWDVIGWTREGNASHPNSGLATIMSDGPGGSKWMYVGRQKAGEVWHDMTGNRSGTVTINQDGWGHFFVNGGSVSVWVKR

SEQ ID NO: 33371 - protein, 485 aa, Bacillus sp.
HHDGTNGTIMQYFEWNVPNDGQHWNRLHNNAQNLKNAGITAIWIPPAWKGTSQNDVGYGAYDLYDLGEFNQKGTVRTKYGTKAELERAIRSLKANGIQVYGDVVMNHKGGADFTERVQAVEVNPQNRNQEVSGTYQIEAWTGFNFPGRGNQHSSFKWRWYHFDGTDWDQSRQLANRIYKFRGDGKAWDWEVDTENGNYDWWLWADVDMDHPEVINELNRWGVWYANTLNLDGFRLDAVKHIKFSFMRDWLGHVRGQTGKNLFAVAEYWKNDLGALENYLSKTNWTMSAFDVPLHYNLYQASNSSGNYDMRNLLNGTLVQRHPSHAVTFVDNHDTQPGEALESFVQGWFKPLAYATILTREQGYPQVFYGDYYGIPSDGVPSYRQQIDPLLKARQQYAYGRQHDYFDHWDVIGWTREGNASHPNSGLATIMSDGPGGSKWMYVGRQKAGEVWHDMTGNRSGTVTINQDGWGHFFVNGGSVSVWVKR

SEQ ID NO: 33372 - protein, 485 aa, Bacillus sp.
HHDGTNGTIMQYFEWNVPNDGQHWNRLHNNAQNLKNAGITAIWIPPAWKGTSQNDVGYGAYDLYDLGEFNQKGTVRTKYGTKAELERAIRSLKANGIQVYGDVVMNHKGGADFTERVQAVEVNPQNRNQEVSGTYQIEAWTGFNFPGRGNQHSSFKWRWYHFDGTDWDQSRQLANRIYKFRGDGKAWDWEVDTENGNYDWWLDADVDMDHPEVINELNRWGVWYANTLNLDGFRLDAVKHIKFSFMRDWLGHVRGQTGKNLFAVAEYWKNDLGALENYLSKTNWTMSAFDVPLHYNLYQASNSSGNYDMRNLLNGTLVQRHPSHAVTFVDNHDTQPGEALESFVQGWFKPLAYATILTREQGYPQVFYGDYYGIPSDGVPSYRQQIDPLLKARQQYAYGRQHDYFDHWDVIGWTREGNASHPNSGLATIMSDGPGGSKWMYVGRQKAGEVWHDMTGNRSGTVTINQDGWGHFFVNGGSVSVWVKR

SEQ ID NO: 33373 - protein, 485 aa, Bacillus sp.
HHDGTNGTIMQYFEWNVPNDGQHWNRLHNNAQNLKNAGITAIWIPPAWKGTSQNDVGYGAYDLYDLGEFNQKGTVRTKYGTKAELERAIRSLKANGIQVYGDVVMNHKGGADFTERVQAVEVNPQNRNQEVSGTYQIEAWTGFNFPGRGNQHSSFKWRWYHFDGTDWDQSRQLANRIYKFRGDGKAWDWEVDTENGNYDQQLQADVDMDHPEVINELNRWGVWYANTLNLDGFRLDAVKHIKFSFMRDWLGHVRGQTGKNLFAVAEYWKNDLGALENYLSKTNWTMSAFDVPLHYNLYQASNSSGNYDMRNLLNGTLVQRHPSHAVTFVDNHDTQPGEALESFVQGWFKPLAYATILTREQGYPQVFYGDYYGIPSDGVPSYRQQIDPLLKARQQYAYGRQHDYFDHWDVIGWTREGNASHPNSGLATIMSDGPGGSKWMYVGRQKAGEVWHDMTGNRSGTVTINQDGWGHFFVNGGSVSVWVKR

SEQ ID NO: 33374 - protein, 483 aa, Bacillus sp. (in: firmicutes)
HHDGTNGTIMQYFEWNVPNDGQHWNRLHNNAQNLKNAGITAIWIPPAWKGTSQNDVGYGAYDLYDLGEFNQKGTVRTKYGTKAELERAIRSLKANGIQVYGDVVMNHKGGADFTERVQAVEVNPQNRNQKVTGYYQIEAWTGFNFPGRGNQHSSFKWRWYHFDGTDWDQSRQLANRIYKFTGKKWDWEVDTEFGNYDYLMYADVDMDHPEVINELNRWGVWYANTLNLDGFRLDAVKHIKFSFMRDWLGHVRGQTGKNLFAVAEYWKNDLGALENYLSKTNWTMSAFDVPLHYNLYQASNSSGNYDMRNLLNGTLVQRHPSHAVTFVDNHDTQPGEALESFVQGWFKPLAYATILTREQGYPSVFYGDYYGIPSDGVPSYRQQIDPLLKARQQYAYGRQHDYFDHWDVIGWTREGNASHPNSGLATIMSDGPGGSKWMYVGRQKAGEVWHDMTGNRSGTVTINQDGWGHFFVNGGSVSVWVKR

SEQ ID NO: 33375 - protein, 485 aa, Bacillus sp.
HHDGTNGTIMQYFEWNVPNDGQHWNRLHNNAQNLKNAGITAIWIPPAWKGTSQNDVGYGAYDLYDLGEFNQKGTVRTKYGTKAELERAIRSLKANGIQVYGDVVMNHKGGADFTERVQAVEVNPQNRNQEVSGTYQIEAWTGFNFPGRGNQHSSFKWRWYHFDGTDWDQSRQLANRIYKFRGDGKAWDWEVDTENGNYDIELWADVDMDHPEVINELNRWGVWYANTLNLDGFRLDAVKHIKFSFMRDWLGHVRGQTGKNLFAVAEYWKNDLGALENYLSKTNWTMSAFDVPLHYNLYQASNSSGNYDMRNLLNGTLVQRHPSHAVTFVDNHDTQPGEALESFVQGWFKPLAYATILTREQGYPQVFYGDYYGIPSDGVPSYRQQIDPLLKARQQYAYGRQHDYFDHWDVIGWTREGNASHPNSGLATIMSDGPGGSKWMYVGRQKAGEVWHDMTGNRSGTVTINQDGWGHFFVNGGSVSVWVKR

SEQ ID NO: 33376 - protein, 485 aa, Bacillus sp.
HHDGTNGTIMQYFEWNVPNDGQHWNRLHNNAQNLKNAGITAIWIPPAWKGTSQNDVGYGAYDLYDLGEFNQKGTVRTKYGTKAELERAIRSLKANGIQVYGDVVMNHKGGADFTERVQAVEVNPQNRNQEVSGTYQIEAWTGFNFPGRGNQHSSFKWRWYHFDGTDWDQSRQLANRIYKFRGDGKAWDWEVDTENGNYDQQLVADVDMDHPEVINELNRWGVWYANTLNLDGFRLDAVKHIKFSFMRDWLGHVRGQTGKNLFAVAEYWKNDLGALENYLSKTNWTMSAFDVPLHYNLYQASNSSGNYDMRNLLNGTLVQRHPSHAVTFVDNHDTQPGEALESFVQGWFKPLAYATILTREQGYPQVFYGDYYGIPSDGVPSYRQQIDPLLKARQQYAYGRQHDYFDHWDVIGWTREGNASHPNSGLATIMSDGPGGSKWMYVGRQKAGEVWHDMTGNRSGTVTINQDGWGHFFVNGGSVSVWVKR

SEQ ID NO: 33377 - protein, 485 aa, Bacillus sp.
HHDGTNGTIMQYFEWNVPNDGQHWNRLHNNAQNLKNAGITAIWIPPAWKGTSQNDVGYGAYDLYDLGEFNQKGTVRTKYGTKAELERAIRSLKANGIQVYGDVVMNHKGGADFTERVQAVEVNPQNRNQEVSGTYQIEAWTGFNFPGRGNQHSSFKWRWYHFDGTDWDQSRQLANRIYKFRGDGKAWDWEVDTENGNYDKPPSADVDMDHPEVINELNRWGVWYANTLNLDGFRLDAVKHIKFSFMRDWLGHVRGQTGKNLFAVAEYWKNDLGALENYLSKTNWTMSAFDVPLHYNLYQASNSSGNYDMRNLLNGTLVQRHPSHAVTFVDNHDTQPGEALESFVQGWFKPLAYATILTREQGYPQVFYGDYYGIPSDGVPSYRQQIDPLLKARQQYAYGRQHDYFDHWDVIGWTREGNASHPNSGLATIMSDGPGGSKWMYVGRQKAGEVWHDMTGNRSGTVTINQDGWGHFFVNGGSVSVWVKR

SEQ ID NO: 33378 - protein, 485 aa, Bacillus sp.
HHDGTNGTIMQYFEWNVPNDGQHWNRLHNNAQNLKNAGITAIWIPPAWKGTSQNDVGYGAYDLYDLGEFNQKGTVRTKYGTKAELERAIRSLKANGIQVYGDVVMNHKGGADFTERVQAVEVNPQNRNQEVSGTYQIEAWTGFNFPGRGNQHSSFKWRWYHFDGTDWDQSRQLANRIYKFRGDGKAWDWEVDTENGNYDWELIADVDMDHPEVINELNRWGVWYANTLNLDGFRLDAVKHIKFSFMRDWLGHVRGQTGKNLFAVAEYWKNDLGALENYLSKTNWTMSAFDVPLHYNLYQASNSSGNYDMRNLLNGTLVQRHPSHAVTFVDNHDTQPGEALESFVQGWFKPLAYATILTREQGYPQVFYGDYYGIPSDGVPSYRQQIDPLLKARQQYAYGRQHDYFDHWDVIGWTREGNASHPNSGLATIMSDGPGGSKWMYVGRQKAGEVWHDMTGNRSGTVTINQDGWGHFFVNGGSVSVWVKR

SEQ ID NO: 33379 - protein, 485 aa, Bacillus sp.
HHDGTNGTIMQYFEWNVPNDGQHWNRLHNNAQNLKNAGITAIWIPPAWKGTSQNDVGYGAYDLYDLGEFNQKGTVRTKYGTKAELERAIRSLKANGIQVYGDVVMNHKGGADFTERVQAVEVNPQNRNQEVSGTYQIEAYTGFNFPGRGNQHSSFKWRWYHFDGTDWDQSRQLANRIYKFRGDGKAWDWEVDTENGNYDYLMYADVDMDHPEVINELNRWGVWYANTLNLDGFRLDAVKHIKFSFMRDWLGHVRGQTGKNLFAVAEYWKNDLGALENYLSKTNWTMSAFDVPLHYNLYQASNSSKNYDMRNLLNGTLVQRHPSHAVTFVDNHDTQPGEALESFVQGWFKPLAYATILTREQGYPQVFYGDYYGIPSDGVPSYRQQIDPLLKARQQYAYGRQHDYFDHWDVIGWTREGNASHPNSGLATIMSDGPGGSKWMYVGRQKAGEVWHDMTGNRSGTVTINQDGTGHFFVNGKSVSVWVKR

SEQ ID NO: 33380 - protein, 485 aa, Bacillus sp.
HHDGTNGTIMQYFEWNVPNDGQHWNRLHNNAQNLKNAGITAIWIPPAWKGTSQNDVGYGAYDLYDLGEFNQKGTVRTKYGTKAELERAIRSLKANGIQVYGDVVMNHKGGADFTERVQAVEVNPQNRNQEVSGTYQIEAWTGFNFPGRGNQHSSFKWRWYHFDGTDWDQSRQLANRIYKFRGDGKAWDWEVDTENGNYDTSLPADVDMDHPEVINELNRWGVWYANTLNLDGFRLDAVKHIKFSFMRDWLGHVRGQTGKNLFAVAEYWKNDLGALENYLSKTNWTMSAFDVPLHYNLYQASNSSGNYDMRNLLNGTLVQRHPSHAVTFVDNHDTQPGEALESFVQGWFKPLAYATILTREQGYPQVFYGDYYGIPSDGVPSYRQQIDPLLKARQQYAYGRQHDYFDHWDVIGWTREGNASHPNSGLATIMSDGPGGSKWMYVGRQKAGEVWHDMTGNRSGTVTINQDGWGHFFVNGGSVSVWVKR

SEQ ID NO: 33381 - protein, 485 aa, Bacillus sp.
HHDGTNGTIMQYFEWNVPNDGQHWNRLHNNAQNLKNAGITAIWIPPAWKGTSQNDVGYGAYDLYDLGEFNQKGTVRTKYGTKAELERAIRSLKANGIQVYGDVVMNHKGGADFTERVQAVEVNPQNRNQEVSGTYQIEAWTGFNFPGRGNQHSSFKWRWYHFDGTDWDQSRQLANRIYKFRGDGKAWDWEVDTENGNYDPPQFADVDMDHPEVINELNRWGVWYANTLNLDGFRLDAVKHIKFSFMRDWLGHVRGQTGKNLFAVAEYWKNDLGALENYLSKTNWTMSAFDVPLHYNLYQASNSSGNYDMRNLLNGTLVQRHPSHAVTFVDNHDTQPGEALESFVQGWFKPLAYATILTREQGYPQVFYGDYYGIPSDGVPSYRQQIDPLLKARQQYAYGRQHDYFDHWDVIGWTREGNASHPNSGLATIMSDGPGGSKWMYVGRQKAGEVWHDMTGNRSGTVTINQDGWGHFFVNGGSVSVWVKR

SEQ ID NO: 33382 - protein, 485 aa, Bacillus sp.
HHDGTNGTIMQYFEWNVPNDGQHWNRLHNNAQNLKNAGITAIWIPPAWKGTSQNDVGYGAYDLYDLGEFNQKGTVRTKYGTKAELERAIRSLKANGIQVYGDVVMNHKGGADFTERVQAVEVNPQNRNQEVSGTYQIEAWTGFNFPGRGNQHSSFKWRWYHFDGTDWDQSRQLANRIYKFRGDGKAWDWEVDTENGNYDNHLPADVDMDHPEVINELNRWGVWYANTLNLDGFRLDAVKHIKFSFMRDWLGHVRGQTGKNLFAVAEYWKNDLGALENYLSKTNWTMSAFDVPLHYNLYQASNSSGNYDMRNLLNGTLVQRHPSHAVTFVDNHDTQPGEALESFVQGWFKPLAYATILTREQGYPQVFYGDYYGIPSDGVPSYRQQIDPLLKARQQYAYGRQHDYFDHWDVIGWTREGNASHPNSGLATIMSDGPGGSKWMYVGRQKAGEVWHDMTGNRSGTVTINQDGWGHFFVNGGSVSVWVKR

SEQ ID NO: 33383 - protein, 485 aa, Bacillus sp.
HHDGTNGTIMQYFEWNVPNDGQHWNRLHNNAQNLKNAGITAIWIPPAWKGTSQNDVGYGAYDLYDLGEFNQKGTVRTKYGTKAELERAIRSLKANGIQVYGDVVMNHKGGADFTERVQAVEVNPQNRNQEVSGTYQIEAWTGFNFPGRGNQHSSFKWRWYHFDGTDWDQSRQLANRIYKFRGDGKAWDWEVDTENGNYDPPLPADVDMDHPEVINELNRWGVWYANTLNLDGFRLDAVKHIKFSFMRDWLGHVRGQTGKNLFAVAEYWKNDLGALENYLSKTNWTMSAFDVPLHYNLYQASNSSGNYDMRNLLNGTLVQRHPSHAVTFVDNHDTQPGEALESFVQGWFKPLAYATILTREQGYPQVFYGDYYGIPSDGVPSYRQQIDPLLKARQQYAYGRQHDYFDHWDVIGWTREGNASHPNSGLATIMSDGPGGSKWMYVGRQKAGEVWHDMTGNRSGTVTINQDGWGHFFVNGGSVSVWVKR

SEQ ID NO: 33384 - protein, 485 aa, Bacillus sp.
HHDGTNGTIMQYFEWNVPNDGQHWNRLHNNAQNLKNAGITAIWIPPAWKGTSQNDVGYGAYDLYDLGEFNQKGTVRTKYGTKAELERAIRSLKANGIQVYGDVVMNHKGGADFTERVQAVEVNPQNRNQEVSGTYQIEAWTGFNFPGRGNQHSSFKWRWYHFDGTDWDQSRQLANRIYKFRGDGKAWDWEVDTENGNYDIRTKADVDMDHPEVINELNRWGVWYANTLNLDGFRLDAVKHIKFSFMRDWLGHVRGQTGKNLFAVAEYWKNDLGALENYLSKTNWTMSAFDVPLHYNLYQASNSSGNYDMRNLLNGTLVQRHPSHAVTFVDNHDTQPGEALESFVQGWFKPLAYATILTREQGYPQVFYGDYYGIPSDGVPSYRQQIDPLLKARQQYAYGRQHDYFDHWDVIGWTREGNASHPNSGLATIMSDGPGGSKWMYVGRQKAGEVWHDMTGNRSGTVTINQDGWGHFFVNGGSVSVWVKR

SEQ ID NO: 33385 - protein, 485 aa, Bacillus sp.
HHDGTNGTIMQYFEWNVPNDGQHWNRLHNNAQNLKNAGITAIWIPPAWKGTSQNDVGYGAYDLYDLGEFNQKGTVRTKYGTKAELERAIRSLKANGIQVYGDVVMNHKGGADFTERVQAVEVNPQNRNQEVSGTYQIEAYTGFNFPGRGNQHSSFKWRWYHFDGTDWDQSRQLANRIYKFRGDGKAWDWEVDTENGNYDYLMYADVDMDHPDVINELNRWGVWYANTLNLDGFRLDAVKHIKFSFMRDWLGHVRGQTGKNLFAVAEYWKNDLGALENYLSKTNWTMSAFDVPLHYNLYQASNSSKNYDMRNLLNGTLVQRHPSHAVTFVDNHDTQPGEALESFVQGWFKPLAYATILTREQGYPQVFYGDYYGIPSDGVPSYRQQIDPLLKARQQYAYGRQHDYFDHWDVIGWTREGNASHPNSGLATIMSDGPGGSKWMYVGRQKAGEVWHDMTGNRSGTVTINQDGWGHFFVNKGSVSVWVKR

SEQ ID NO: 33386 - protein, 485 aa, Bacillus sp.
HHDGTNGTIMQYFEWNVPNDGQHWNRLHNNAQNLKNAGITAIWIPPAWKGTSQNDVGYGAYDLYDLGEFNQKGTVRTKYGTKAELERAIRSLKANGIQVYGDVVMNHKGGADFTERVQAVEVNPQNRNQEVSGTYQIEAWTGFNFPGRGNQHSSFKWRWYHFDGTDWDQSRQLANRIYKFRGDGKAWDWEVDTENGNYDKPLSADVDMDHPEVINELNRWGVWYANTLNLDGFRLDAVKHIKFSFMRDWLGHVRGQTGKNLFAVAEYWKNDLGALENYLSKTNWTMSAFDVPLHYNLYQASNSSGNYDMRNLLNGTLVQRHPSHAVTFVDNHDTQPGEALESFVQGWFKPLAYATILTREQGYPQVFYGDYYGIPSDGVPSYRQQIDPLLKARQQYAYGRQHDYFDHWDVIGWTREGNASHPNSGLATIMSDGPGGSKWMYVGRQKAGEVWHDMTGNRSGTVTINQDGWGHFFVNGGSVSVWVKR

SEQ ID NO: 33387 - protein, 485 aa, Bacillus sp.
HHDGTNGTIMQYFEWNVPNDGQHWNRLHNNAQNLKNAGITAIWIPPAWKGTSQNDVGYGAYDLYDLGEFNQKGTVRTKYGTKAELERAIRSLKANGIQVYGDVVMNHKGGADFTERVQAVEVNPQNRNQEVSGTYQIEAWTGFNFPGRGNQHSSFKWRWYHFDGTDWDQSRQLANRIYKFRGDGKAWDWEVDTENGNYDWQLNADVDMDHPEVINELNRWGVWYANTLNLDGFRLDAVKHIKFSFMRDWLGHVRGQTGKNLFAVAEYWKNDLGALENYLSKTNWTMSAFDVPLHYNLYQASNSSGNYDMRNLLNGTLVQRHPSHAVTFVDNHDTQPGEALESFVQGWFKPLAYATILTREQGYPQVFYGDYYGIPSDGVPSYRQQIDPLLKARQQYAYGRQHDYFDHWDVIGWTREGNASHPNSGLATIMSDGPGGSKWMYVGRQKAGEVWHDMTGNRSGTVTINQDGWGHFFVNGGSVSVWVKR

SEQ ID NO: 33388 - protein, 485 aa, Bacillus sp.
HHDGTNGTIMQYFEWNVPNDGQHWNRLHNNAQNLKNAGITAIWIPPAWKGTSQNDVGYGAYDLYDLGEFNQKGTVRTKYGTKAELERAIRSLKANGIQVYGDVVMNHKGGADFTERVQAVEVNPQNRNQEVSGTYQIEAWTGFNFPGRGNQHSSFKWRWYHFDGTDWDQSRQLANRIYKFRGDGKAWDWEVDTENGNYDYLMYADVDMDHPEVINELNRWGVWYANTLNLDGFRLDAVKHIKFSFMRDWLGHVRGQTGKNLFAVAEYWKNDLGALENYTSKTNGTMSAFDVPLHYNLYQASNSSRNYDMRNLLNGTLVQRHPSNAVTFVDNHDTQPGEALESFVQGWFKPLAYATILTREQGYPQVFYGDYYGIPSDGVPSYRQQIDPLLKARQQYAYGRQHDYFDHWDVIGWTREGNASHPNSGLATIMSDGPGGSKWMYVGRQKAGEVWHDMTGNRSGTVTINQDGWGHFFVNGGSVSVWVKR

SEQ ID NO: 33389 - protein, 485 aa, Bacillus sp.
HHDGTNGTIMQYFEWNVPNDGQHWNRLHNNAQNLKNAGITAIWIPPAWKGTSQNDVGYGAYDLYDLGEFNQKGTVRTKYGTKAELERAIRSLKANGIQVYGDVVMNHKGGADFTERVQAVEVNPQNRNQEVSGTYQIEAWTGFNFPGRGNQHSSFKWRWYHFDGTDWDQSRQLANRIYKFRGDGKAWDWEVDTENGNYDWSLPADVDMDHPEVINELNRWGVWYANTLNLDGFRLDAVKHIKFSFMRDWLGHVRGQTGKNLFAVAEYWKNDLGALENYLSKTNWTMSAFDVPLHYNLYQASNSSGNYDMRNLLNGTLVQRHPSHAVTFVDNHDTQPGEALESFVQGWFKPLAYATILTREQGYPQVFYGDYYGIPSDGVPSYRQQIDPLLKARQQYAYGRQHDYFDHWDVIGWTREGNASHPNSGLATIMSDGPGGSKWMYVGRQKAGEVWHDMTGNRSGTVTINQDGWGHFFVNGGSVSVWVKR

SEQ ID NO: 33390 - protein, 483 aa, Bacillus sp. (in: firmicutes)
HHDGTNGTIMQYFEWNVPNDGQHWNRLHNNAQNLKNAGITAIWIPPAWKGTSQNDVGYGAYDLYDLGEFNQKGTVRTKYGTKAELERAIRSLKANGIQVYGDVVMNHKGGADFTERVQAVEVNPQNRNQEVSGTYQIEAWTGFNFPGRGNQHSSFKWRWHHFDGTDWDQSRQLANRIYKFRGKAWDWEVDTENGNYDYLMYADVDMDHPDVINELNRWGVWYANTLNLDGFRLDAVKHIKFSFMRDWLGHVRGQTGKNLFAVAEYWKNDLGALNNYLSKTNYTMSAFDVPLHYNLYQASNSSGNYDMRNLLNGTLVQSHPSHAVTFVDNHDTQPGEALESFVQGWFKPLAYATILTREQGYPSVFYGDYYGIPSDGVPSYRQQIDPLLKARQQYAYGRQHDYFDHHDVIGWTREGNASHPNSGLATIMSDGPGGSKTMYVGRQKAGEVWHDMTGNRSGTVTINQDGNGHFSVNKGSVSVWVKR

SEQ ID NO: 33391 - protein, 485 aa, Bacillus sp.
HHDGTNGTIMQYFEWNVPNDGQHWNRLHNNAQNLKNAGITAIWIPPAWKGTSQNDVGYGAYDLYDLGEFNQKGTVRTKYGTKAELERAIRSLKANGIQVYGDVVMNHKGGADFTERVQAVEVNPQNRNQEVSGTYQIEAWTGFNFPGRGNQHSSFKWRWYHFDGTDWDQSRQLANRIYKFRGDGKAWDWEVDTENGNYDIELFADVDMDHPEVINELNRWGVWYANTLNLDGFRLDAVKHIKFSFMRDWLGHVRGQTGKNLFAVAEYWKNDLGALENYLSKTNWTMSAFDVPLHYNLYQASNSSGNYDMRNLLNGTLVQRHPSHAVTFVDNHDTQPGEALESFVQGWFKPLAYATILTREQGYPQVFYGDYYGIPSDGVPSYRQQIDPLLKARQQYAYGRQHDYFDHWDVIGWTREGNASHPNSGLATIMSDGPGGSKWMYVGRQKAGEVWHDMTGNRSGTVTINQDGWGHFFVNGGSVSVWVKR

SEQ ID NO: 33392 - protein, 485 aa, Bacillus sp.
HHDGTNGTIMQYFEWNVPNDGQHWNRLHNNAQNLKNAGITAIWIPPAWKGTSQNDVGYGAYDLYDLGEFNQKGTVRTKYGTKAELERAIRSLKANGIQVYGDVVMNHKGGADFTERVQAVEVNPQNRNQEVSGTYQIEAWTGFNFPGRGNQHSSFKWRWYHFDGTDWDQSRQLANRIYKFRGDGKAWDWEVDTENGNYDPHRHADVDMDHPEVINELNRWGVWYANTLNLDGFRLDAVKHIKFSFMRDWLGHVRGQTGKNLFAVAEYWKNDLGALENYLSKTNWTMSAFDVPLHYNLYQASNSSGNYDMRNLLNGTLVQRHPSHAVTFVDNHDTQPGEALESFVQGWFKPLAYATILTREQGYPQVFYGDYYGIPSDGVPSYRQQIDPLLKARQQYAYGRQHDYFDHWDVIGWTREGNASHPNSGLATIMSDGPGGSKWMYVGRQKAGEVWHDMTGNRSGTVTINQDGWGHFFVNGGSVSVWVKR

SEQ ID NO: 33393 - protein, 483 aa, Bacillus sp. (in: firmicutes)
HHDGTNATIMQYFEWNVPNDGQHWNRLHNNAQNLKNAGITAIWIPPAWKGTSQNDVGYGAYDLYDLGEFNQKGTVRTKYGTKAELERAIRSLKANGIQVYGDVVMNHKGGADNTENVQAVEVNPQNRNQEVSGTYQIEAWTGFNFPGRGNQHSSFKWRWYHFDGTDWDQSRQLANRIYKFRGKAWDWEVDTENGNYDYLMYADVDMDHPEVINELNRWGVWYANTLNLDGFRLDAVKHIKFSFMRDWLGHVRGQTGKNLFAVAEYWKNDLGALNNYLSKTNWTMSAFDVPLHYNLYQASNSGGNYDMRNLLNGTLVQSHPSHAVTFVDNHDTQPGEALESFVNGWFKPLAYATILTREQGYPQVFYGDYYGIPSDGVPSYRQQIDPLLKARQQYAYGRQHDYFDHWDVIGWTREGNASHPNSGLATIMSDGPGGSKRMYVGRQKAGEVWHDMTGNRSGTVTIGSDGYGHFFVNGGSVSVWVKR

SEQ ID NO: 33394 - protein, 485 aa, Bacillus sp.
HHDGTNGTIMQYFEWNVPNDGQHWNRLHNNAQNLKNAGITAIWIPPAWKGTSQNDVGYGAYDLYDLGEFNQKGTVRTKYGTKAELERAIRSLKANGIQVYGDVVMNHKGGADFTERVQAVEVNPQNRNQEVSGTYQIEAWTGFNFPGRGNQHSSFKWRWYHFDGTDWDQSRQLANRIYKFRGDGKAWDWEVDTENGNYDWWLGADVDMDHPEVINELNRWGVWYANTLNLDGFRLDAVKHIKFSFMRDWLGHVRGQTGKNLFAVAEYWKNDLGALENYLSKTNWTMSAFDVPLHYNLYQASNSSGNYDMRNLLNGTLVQRHPSHAVTFVDNHDTQPGEALESFVQGWFKPLAYATILTREQGYPQVFYGDYYGIPSDGVPSYRQQIDPLLKARQQYAYGRQHDYFDHWDVIGWTREGNASHPNSGLATIMSDGPGGSKWMYVGRQKAGEVWHDMTGNRSGTVTINQDGWGHFFVNGGSVSVWVKR

SEQ ID NO: 33395 - protein, 485 aa, Bacillus sp.
HHDGTNGTIMQYFEWNVPNDGQHWNRLHNNAQNLKNAGITAIWIPPAWKGTSQNDVGYGAYDLYDLGEFNQKGTVRTKYGTKAELERAIRSLKANGIQVYGDVVMNHKGGADFTERVQAVEVNPQNRNQEVSGTYQIEAWTGFNFPGRGNQHSSFKWRWYHFDGTDWDQSRQLANRIYKFRGDGKAWDWEVDTENGNYDTPLPADVDMDHPEVINELNRWGVWYANTLNLDGFRLDAVKHIKFSFMRDWLGHVRGQTGKNLFAVAEYWKNDLGALENYLSKTNWTMSAFDVPLHYNLYQASNSSGNYDMRNLLNGTLVQRHPSHAVTFVDNHDTQPGEALESFVQGWFKPLAYATILTREQGYPQVFYGDYYGIPSDGVPSYRQQIDPLLKARQQYAYGRQHDYFDHWDVIGWTREGNASHPNSGLATIMSDGPGGSKWMYVGRQKAGEVWHDMTGNRSGTVTINQDGWGHFFVNGGSVSVWVKR

SEQ ID NO: 33396 - protein, 483 aa, Bacillus sp. (in: firmicutes)
HHDGTNGTIMQYFEWNVPNDGQHWNRLHNNAQNLKNAGITAIWIPPAWKGTSQNDVGYGAYDLYDLGEFNQKGTVRTKYGTKAELERAIRSLKANGINVYGDVVMNHKGGADYTERVQAVEVNPQNRNQEVSGTYQIEAWTGFNFPGRGNQHSSFKWQWFHFDGTDWDQSRQLANRIYKFRGKAWDWEVDTENGNYDYLMYADVDMDHPEVINELNRWGVWYANTLNLDGFRLDAVKHIKFSFMRDWLGHVRGQTGKNLFAVAEYWKNDLGALENYLSKTNWTMSAFDVPLHYNLYQASNSQGNYDMRNLLNGTLVQSHPSHAVTFVDNHDTQPGEALESFVQGWFKPLAYATILTREQGYPQVFYGDYYGIPSDGVPSYRQQIDPLLKARQQYAYGRQHDYFDHWDVIGWTREGNASHPNSGLATIMSDGPGGSKRMYVGRQKAGEVWHDMTGNRSGTVTINQDGWGHFPVNGGSVSVWVKR

SEQ ID NO: 33397 - protein, 485 aa, Bacillus sp.
HHDGTNGTIMQYFEWNVPNDGQHWNRLHNNAQNLKNAGITAIWIPPAWKGTSQNDVGYGAYDLYDLGEFNQKGTVRTKYGTKAELERAIRSLKANGIQVYGDVVMNHKGGADFTERVQAVEVNPQNRNQEVSGTYQIEAWTGFNFPGRGNQHSSFKWRWYHFDGTDWDQSRQLANRIYKFRGDGKAWDWEVDTENGNYDWPLVADVDMDHPEVINELNRWGVWYANTLNLDGFRLDAVKHIKFSFMRDWLGHVRGQTGKNLFAVAEYWKNDLGALENYLSKTNWTMSAFDVPLHYNLYQASNSSGNYDMRNLLNGTLVQRHPSHAVTFVDNHDTQPGEALESFVQGWFKPLAYATILTREQGYPQVFYGDYYGIPSDGVPSYRQQIDPLLKARQQYAYGRQHDYFDHWDVIGWTREGNASHPNSGLATIMSDGPGGSKWMYVGRQKAGEVWHDMTGNRSGTVTINQDGWGHFFVNGGSVSVWVKR

SEQ ID NO: 33398 - protein, 485 aa, Bacillus sp.
HHDGTNGTIMQYFEWNVPNDGQHWNRLHNNAQNLKNAGITAIWIPPAWKGTSQNDVGYGAYDLYDLGEFNQKGTVRTKYGTKAELERAIRSLKANGIQVYGDVVMNHKGGADFTERVQAVEVNPQNRNQEVSGTYQIEAWTGFNFPGRGNQHSSFKWRWYHFDGTDWDQSRQLANRIYKFRGDGKAWDWEVDTENGNYDEHLHADVDMDHPEVINELNRWGVWYANTLNLDGFRLDAVKHIKFSFMRDWLGHVRGQTGKNLFAVAEYWKNDLGALENYLSKTNWTMSAFDVPLHYNLYQASNSSGNYDMRNLLNGTLVQRHPSHAVTFVDNHDTQPGEALESFVQGWFKPLAYATILTREQGYPQVFYGDYYGIPSDGVPSYRQQIDPLLKARQQYAYGRQHDYFDHWDVIGWTREGNASHPNSGLATIMSDGPGGSKWMYVGRQKAGEVWHDMTGNRSGTVTINQDGWGHFFVNGGSVSVWVKR

SEQ ID NO: 33399 - protein, 485 aa, Bacillus sp.
HHDGTNGTIMQYFEWNVPNDGQHWNRLHNNAQNLKNAGITAIWIPPAWKGTSQNDVGYGAYDLYDLGEFNQKGTVRTKYGTKAELERAIRSLKANGIQVYGDVVMNHKGGADFTERVQAVEVNPQNRNQEVSGTYQIEAWTGFNFPGRGNQHSSFKWRWYHFDGTDWDQSRQLANRIYKFRGDGKAWDWEVDTENGNYDIELHADVDMDHPEVINELNRWGVWYANTLNLDGFRLDAVKHIKFSFMRDWLGHVRGQTGKNLFAVAEYWKNDLGALENYLSKTNWTMSAFDVPLHYNLYQASNSSGNYDMRNLLNGTLVQRHPSHAVTFVDNHDTQPGEALESFVQGWFKPLAYATILTREQGYPQVFYGDYYGIPSDGVPSYRQQIDPLLKARQQYAYGRQHDYFDHWDVIGWTREGNASHPNSGLATIMSDGPGGSKWMYVGRQKAGEVWHDMTGNRSGTVTINQDGWGHFFVNGGSVSVWVKR

SEQ ID NO: 33400 - protein, 485 aa, Bacillus sp.
HHDGTNGTIMQYFEWNVPNDGQHWNRLHNNAQNLKNAGITAIWIPPAWKGTSQNDVGYGAYDLYDLGEFNQKGTVRTKYGTKAELERAIRSLKANGIQVYGDVVMNHKGGADFTERVQAVEVNPQNRNQEVSGTYQIEAWTGFNFPGRGNQHSSFKWRWYHFDGTDWDQSRQLANRIYKFRGDGKAWDWEVDTENGNYDQPLPADVDMDHPEVINELNRWGVWYANTLNLDGFRLDAVKHIKFSFMRDWLGHVRGQTGKNLFAVAEYWKNDLGALENYLSKTNWTMSAFDVPLHYNLYQASNSSGNYDMRNLLNGTLVQRHPSHAVTFVDNHDTQPGEALESFVQGWFKPLAYATILTREQGYPQVFYGDYYGIPSDGVPSYRQQIDPLLKARQQYAYGRQHDYFDHWDVIGWTREGNASHPNSGLATIMSDGPGGSKWMYVGRQKAGEVWHDMTGNRSGTVTINQDGWGHFFVNGGSVSVWVKR

SEQ ID NO: 33401 - protein, 483 aa, Bacillus sp. (in: firmicutes)
HHDGTNGTMMQYFEWNVPNDGQHWNRLHNNAQNLKNAGITAIWIPPAWKGTSQNDVGYGAYDLYDLGEFNQKGTVRTKYGTKAELERAIRSLKANGIQVYGDVVMNHKGGADFTERVQAVEVNPQNRNQEVSGTYQIEAWTGFNFPGRGNQHSSFKWRWHHFDGTDWDQSRQLANRIYKFRGKAWDWEVDTENGNYDYLMYADVDMDHPDVINELNRWGVWYANTLNLDGFRLDAVKHIKFSFMRDWLGHVRGQTGKNLFAVAEYWKNDLGALNNYLSKTNYTMSAFDVPLHYNLYQASNSSGNYDMRNLLNGTLVQSHPSHAVTFVDNHDTQPGEALESFVQGWFKPLAYATILTREQGYPQVFYGDYYGIPSDGVPSYRQQIDPLLKARQQYAYGRQHDYFDHHDVIGWTREGNASHPNSGLATIMSDGPGGSKTMYVGRQKAGEVWHDMTGNRSGTVTINQDGNGHFSVNKGSVSVWVKR

SEQ ID NO: 33402 - protein, 485 aa, Bacillus sp.
HHDGTNGTIMQYFEWNVPNDGQHWNRLHNNAQNLKNAGITAIWIPPAWKGTSQNDVGYGAYDLYDLGEFNQKGTVRTKYGTKAELERAIRSLKANGIQVYGDVVMNHKGGADFTERVQAVEVNPQNRNQEVSGTYQIEAWTGFNFPGRGNQHSSFKWRWYHFDGTDWDQSRQLANRIYKFRGDGKAWDWEVDTENGNYDWPLIADVDMDHPEVINELNRWGVWYANTLNLDGFRLDAVKHIKFSFMRDWLGHVRGQTGKNLFAVAEYWKNDLGALENYLSKTNWTMSAFDVPLHYNLYQASNSSGNYDMRNLLNGTLVQRHPSHAVTFVDNHDTQPGEALESFVQGWFKPLAYATILTREQGYPQVFYGDYYGIPSDGVPSYRQQIDPLLKARQQYAYGRQHDYFDHWDVIGWTREGNASHPNSGLATIMSDGPGGSKWMYVGRQKAGEVWHDMTGNRSGTVTINQDGWGHFFVNGGSVSVWVKR

SEQ ID NO: 33403 - protein, 485 aa, Bacillus sp.
HHDGTNGTIMQYFEWNVPNDGQHWNRLHNNAQNLKNAGITAIWIPPAWKGTSQNDVGYGAYDLYDLGEFNQKGTVRTKYGTKAELERAIRSLKANGIQVYGDVVMNHKGGADFTERVQAVEVNPQNRNQEVSGTYQIEAWTGFNFPGRGNQHSSFKWRWYHFDGTDWDQSRQLANRIYKFRGDGKAWDWEVDTENGNYDIELSADVDMDHPEVINELNRWGVWYANTLNLDGFRLDAVKHIKFSFMRDWLGHVRGQTGKNLFAVAEYWKNDLGALENYLSKTNWTMSAFDVPLHYNLYQASNSSGNYDMRNLLNGTLVQRHPSHAVTFVDNHDTQPGEALESFVQGWFKPLAYATILTREQGYPQVFYGDYYGIPSDGVPSYRQQIDPLLKARQQYAYGRQHDYFDHWDVIGWTREGNASHPNSGLATIMSDGPGGSKWMYVGRQKAGEVWHDMTGNRSGTVTINQDGWGHFFVNGGSVSVWVKR

SEQ ID NO: 33404 - protein, 485 aa, Bacillus sp.
HHDGTNGTIMQYFEWNVPNDGQHWNRLHNNAQNLKNAGITAIWIPPAWKGTSQNDVGYGAYDLYDLGEFNQKGTVRTKYGTKAELERAIRSLKANGIQVYGDVVMNHKGGADFTERVQAVEVNPQNRNQEVSGTYQIEAWTGFNFPGRGNQHSSFKWRWYHFDGTDWDQSRQLANRIYKFRGDGKAWDWEVDTENGNYDWWLPADVDMDHPEVINELNRWGVWYANTLNLDGFRLDAVKHIKFSFMRDWLGHVRGQTGKNLFAVAEYWKNDLGALENYLSKTNWTMSAFDVPLHYNLYQASNSSGNYDMRNLLNGTLVQRHPSHAVTFVDNHDTQPGEALESFVQGWFKPLAYATILTREQGYPQVFYGDYYGIPSDGVPSYRQQIDPLLKARQQYAYGRQHDYFDHWDVIGWTREGNASHPNSGLATIMSDGPGGSKWMYVGRQKAGEVWHDMTGNRSGTVTINQDGWGHFFVNGGSVSVWVKR

SEQ ID NO: 33405 - protein, 485 aa, Bacillus sp.
HHDGTNGTIMQYFEWNVPNDGQHWNRLHNNAQNLKNAGITAIWIPPAWKGTSQNDVGYGAYDLYDLGEFNQKGTVRTKYGTKAELERAIRSLKANGIQVYGDVVMNHKGGADFTERVQAVEVNPQNRNQEVSGTYQIEAWTGFNFPGRGNQHSSFKWRWYHFDGTDWDQSRQLANRIYKFRGDGKAWDWEVDTENGNYDQWLTADVDMDHPEVINELNRWGVWYANTLNLDGFRLDAVKHIKFSFMRDWLGHVRGQTGKNLFAVAEYWKNDLGALENYLSKTNWTMSAFDVPLHYNLYQASNSSGNYDMRNLLNGTLVQRHPSHAVTFVDNHDTQPGEALESFVQGWFKPLAYATILTREQGYPQVFYGDYYGIPSDGVPSYRQQIDPLLKARQQYAYGRQHDYFDHWDVIGWTREGNASHPNSGLATIMSDGPGGSKWMYVGRQKAGEVWHDMTGNRSGTVTINQDGWGHFFVNGGSVSVWVKR

SEQ ID NO: 33406 - protein, 485 aa, Bacillus sp.
HHDGTNGTIMQYFEWNVPNDGQHWNRLHNNAQNLKNAGITAIWIPPAWKGTSQNDVGYGAYDLYDLGEFNQKGTVRTKYGTKAELERAIRSLKANGIQVYGDVVMNHKGGADFTERVQAVEVNPQNRNQEVSGTYQIEAWTGFNFPGRGNQHSSFKWRWYHFDGTDWDQSRQLANRIYKFRGDGKAWDWEVDTENGNYDTPLFADVDMDHPEVINELNRWGVWYANTLNLDGFRLDAVKHIKFSFMRDWLGHVRGQTGKNLFAVAEYWKNDLGALENYLSKTNWTMSAFDVPLHYNLYQASNSSGNYDMRNLLNGTLVQRHPSHAVTFVDNHDTQPGEALESFVQGWFKPLAYATILTREQGYPQVFYGDYYGIPSDGVPSYRQQIDPLLKARQQYAYGRQHDYFDHWDVIGWTREGNASHPNSGLATIMSDGPGGSKWMYVGRQKAGEVWHDMTGNRSGTVTINQDGWGHFFVNGGSVSVWVKR

SEQ ID NO: 33407 - protein, 483 aa, Bacillus sp.
HHDGTNGTIMQYFEWNVPNDGQHWNRLHNNAQNLKNAGITAIWIPPAWKGTSQNDVGYGAYDLYDLGEFNQKGTVRTKYGTKAELERAIRSLKANGIQVYGDVVMNHKGGADFTERVQAVEVNPQNRNQEVSGTYEIEAWTGFNFPGRGNQHSSFKWRWYHFDGTDWDQSRQLSNRIYKFDGKAWDWEVDTEFGNYDYLMYADVDMNHPEVINQLNRWGVWYANTLNLDGFRLDAVKHIQFSFMRNWLGHVRGQTGKNLFAVAEYWKNDLGALENYLSKTNWTMSAFDVPLHYNLYQASNSGGNYDMRNLLNGTLVQRHPSHAVTFVDNHDTQPGEALESFVQGWFKPLAYATILTREQGYPQVFYGDYYGIPSDGVPSYRQQIDPLLKARQQYAYGRQHDYFDHWDVIGWTREGNASHPNSGLATIMSDGPGGSKWMYVGRQKAGEVWHDITGNRSGTVTINQDGWGQFFVNGGSVSVWVKR

SEQ ID NO: 33408 - protein, 485 aa, Bacillus sp.
HHDGTNGTIMQYFEWNVPNDGQHWNRLHNNAQNLKNAGITAIWIPPAWKGTSQNDVGYGAYDLYDLGEFNQKGTVRTKYGTKAELERAIRSLKANGIQVYGDVVMNHKGGADFTERVQAVEVNPQNRNQEVSGTYQIEAWTGFNFPGRGNQHSSFKWRWYHFDGTDWDQSRQLANRIYKFRGDGKAWDWEVDTENGNYDYLMYADVDMDHPEVINELNRWGVWYANTLNLDGFRLDAVKHIKFSFMRDWLGHVRGQTGKNLFAVAEYWKNDLGALENYTSKTNGTMSAFDVPLHYNLYQASNSSGNYDMRNLLNGTLVQRHPSNAVTFVDNHDTQPGEALESFVQGWFKPLAYATILTREQGYPQVFYGDYYGIPSDGVPSYRQQIDPLLKARQQYAYGRQHDYFDHWDVIGWTREGNASHPNSGLATIMSDGPGGSKWMYVGRQKAGEVWHDMTGNRSGTVTINQDGWGHFFVNGRSVSVWVKR

SEQ ID NO: 33409 - protein, 483 aa, Synthetic construct
LNGTLMQYFEWYMPNDGQHWKRLQNDSAYLAEHGITAVWIPPAYKGTSQADVGYGAYDLYDLGEFHQKGTVRTKYGTKGELQSAIKSLHSRDINVYGDVVINHKAGADATEWVDAVEVNPSNRNQEVSGTYKIQAWTKFDFPGRGNTYSSFKWRWYHFDGTDWDQSRQLNRIYKFRGTGKAWDWEVDTENGNYDYLMFADLDYDHPDVAAEIKRWGTWYANELQLDGFRLDAVKHIKFSFLRDWVNHVREKTGKEMFTVAEYWSYDLGALENYLNKTNFNHSVFDVPLHYQFHAASTQGGGYDMRKLLNGTVVSKHPLKSVTFVDNHDTQPGQSLESTVQTWFKPLAYAFILTRESGYPQVFYGDMYGTKGDSQREIPALKHKIEPILKARKQYAYGAQHDYFDHHDIVGWTREGDSSVANSGLAALITDGPGGAKRMYVGRQNAGETWHDITGNRSEPVVINSAGWGEFHVNGGSVSIYVQR

SEQ ID NO: 33410 - protein, 484 aa, Synthetic construct
LNGTLMQYFEWYMPNDGQHWKRLQNDSAYLAEHGITAVWIPPAYKGTSQADVGYGAYDLYDLGEFHQKGTVRTKYGTKGELQSAIKSLHSRDINVYGDVVINHKGGADATEMVRAVEVNPNNRNQEVSGEYTIEAWTKFDFPGRGNTHSNFKWRWYHFDGVDWDQSRKLNNRIYKFRGDGKGWDWEVDTENGNYDYLMYADIDYDHPDVAAEIKRWGTWYANELQLDGFRLDAVKHIKFSFLRDWVNHVREKTGKEMFTVAEYWSYDLGALENYLNKTNFNHSVFDVPLHYQFHAASTQGGGYDMRKLLNGTVVSKHPLKSVTFVDNHDTQPGQSLESTVQTWFKPLAYAFILTRESGYPQVFYGDMYGTKGDSQREIPALKHKIEPILKARKQYAYGAQHDYFDHHDIVGWTREGDSSVANSGLAALITDGPGGAKRMYVGRQNAGETWHDITGNRSEPVVINSAGWGEFHVNGGSVSIYVQR

SEQ ID NO: 33411 - protein, 482 aa, Bacillus sp.
HHDGTNGTIMQYFEWNVPNDGQHWNRLHNNAQNLKNAGITAIWIPPAWKGTSQNDVGYGAYDLYDLGEFNQKGTVRTKYGTKAELERAIRSLKANGIQVYGDVVMNHKGGADFTERVQAVEVNPQNRNQEVSGTYQIEAWTGFNFPGRANQHSSFKWRWYHFDGTDWDQSRQLANRIYKFRTKAWDWEVDTEFGNYDYLMYADLDMDHPEVINELNRWGVWYANTLNLDGFRLDAVKHIKFSFVRDWLGHVRGQGKNLFAVAEYWKNDLGALENYLSKTNWTMSAFDVPLHFNLYYASNSSGNYDMRNLLNGTLVQRHPSHAVTFVDNHDTQPGESLESFVRGWFKPLAYATILTREQGYPQVFYGDYYGIPSDGVPSYRQQIDPLLKARQQYAYGRQHDYFDHWDVIGWTREGNASHPNSGLATIMSDGPGGSKWMYVGRQKAGEVWHDMTGNKSGTVTINQDGWGHFFVNGGSVSVWVKR

SEQ ID NO: 33412 - protein, 482 aa, Unidentified
HHNGTNGTMMQYFEWYLPNDGNHWNRLRSDASNLKDKGISAVWIPPAWKGASQNDVGYGAYDLYDLGEFNQKGTIRTKYGTRNQLQAAVNALKSNGIQVYGDVVMNHKAGADETEVFKVIEVDPNDRTKEISEPFEIEGWTKFTFPGRGDQYSSFKWNSEHFNGTDFDAKGERTGVFRIAGKKWNWEVDTEFGNYDYLMFANIDYNHPDVVNELRNWGVWYTNTLGLDGFRIDAVKHIKYSFTRDWINHVRSATGKNMFAVAEFWKNDLGAIENYLNKTNWNHSVFDVPLHYNLYNASKSGGNYDMRQIFNGTVVQKHPMHAVTFVDNHDSQPEEALESFVEEWFKPLAYALTLTREQGYPSVFYGDYYGIPTHGVPAMKSKIDPILEARQKYAYGRQNDYLDHHNIIGWTREGNTAHPNSGLATIMSDGAGGNKWMFVGRNKAGQVWTDITGNKAGTVTINADGWGNFSVNGGSVSIWVNK

SEQ ID NO: 33413 - protein, 482 aa, Synthetic construct
HHNGTNGTMMQYFEWYLPNDGNHWNRLNSDASNLKSKGITAVWIPPAWKGTSQADVGYGAYDLYDLGEFNQKGTVRTKYGTRSQLQAAVTSLKNNGINVYGDVVMNHKAGADATEDVQAVEVNPNNRNQVVTGEYLIKAWTHFHFPGRGNTHSDFKWYWYHFDGVDWDQSRRLNRIYKFQGKAWDWPVDTENGNYDYLMYADLDMDHPDVANELKRWGTWYANTLGLDGFRIDAVKHIKYSFTRDWINHVREKTGKNMFAVAEFWKNDLGAIENYLQKTNFNHSVFDVPLHYNLYNASKSGGNYDMRKIFNGTVVQKHPSKAVTFVDNHDTQPEEALESFVEEWFKPLAYALILTRESGYPSVFYGDYYGIPTHGVPAMRSKIDPILEARQKYAYGPQHDYLDHPDIIGWTREGDSSHPKSGLATLITDGPGGSKTMYAGLKNAGETWYDITGNRSDTVKIGSDGNGTFHVNDGSVSIYVQK

SEQ ID NO: 33414 - protein, 481 aa, Synthetic construct
HAGTNGTLMQYFEWYLPNDGNHWNRLNSDASNLASKGITAVWIPPAYKGTSQADVGYGAYDLYDLGEFNQKGTVRTKYGTRSQLQAAVTSLKNNGIQVYGDVVINHKAGADATEMVTAVEVNPNNRNQEVTGEYTIEAYTRFDFPGRGNTHSSFKWRWYHFDGVDWDQSRSLNRIYKFQGKAWDWPVDTENGNYDYLMYADLDMDHPEVVNELRNWGVWYTNTLGLDGFRLDAVKHIKFSFLRDWINHVRSATGKNMFAVAEYWKNDLGAIENYLNFTNWNHSVFDVPLHYNLYAASTSGGNYDMRNIFNGTVVQKHPSHAVTFVDNHDTQPEESLESFVQPWFKPLAYALILTRESGYPSVFYGDYYGIPTHGIPALRSKIDPILEARQKYAYGPQHDYLDHPDIIGWTREGDSSHPKSGLATLITDGPGGSKRMYAGLKNAGETWYDITGNRSDTVKIGSDGWGEFHVNKGSVSIYVQK

SEQ ID NO: 33415 - protein, 481 aa, Synthetic construct
HAGTNGTLMQYFEWYLPNDGNHWNRLNSDASNLASKGITAVWIPPAYKGTSQADVGYGAYDLYDLGEFNQKGTVRTKYGTRSQLQAAVTSLKNNGIQVYGDVVINHKAGADATEMVQAVEVNPNNRNQEVTGEYTIEAYTRFDFPGRGNTHSSFKWRWYHFDGVDWDQSRSLNRIYKFQGKAWDWPVDTENGNYDYLMYADLDMDHPEVINELRNWGVWYTNTLGLDGFRLDAVKHIKFSFLRDWINHVRSATGKNMFAVAEYWKNDLGAIENYLNFTNWNHSVFDVPLHYNLYAASTSGGNYDMRNIFNGTVVQKHPSHAVTFVDNHDTQPEESLESFVQPWFKPLAYALTLTREQGYPSVFYGDYYGIPTHGIPALRSKIDPILEARQKYAYGPQHDYLDHPDIIGWTREGDSSHPKSGLATLITDGPGGSKRMYAGLKNAGETWYDITGNRSDTVKIGSDGWGEFHVNKGSVSIYVQR

SEQ ID NO: 33416 - protein, 481 aa, Bacillus licheniformis
LNGTLMQYFEWYMPNDGQHWRRLQNDSAYLAEHGITAVWIPPAYKGTSQADVGYGAYDLYDLGEFHQKGTVRTKYGTKGELQSAIKSLHSRDINVYGDVVINHKGGADATEDVTAVEVDPADRNRVISGEHLIKAWTHFHFPGRGSTYSDFKWHWYHFNGTDWDESRKLNRIYKFQGKNWNWEVSNENGNYDYLMYANIDYSHPDVAAEIKRWGTWYANELQLDGFRLDAVKHIKFSFLRDWVNHVREKTGKEMFTVAEYWQNDLGALENYLNKTNFNHSVFDVPLHYQFHAASTQGGGYDMRKLLNGTVVSKHPLKSVTFVDNHDTQPGQSLESTVQTWFKPLAYAFILTRESGYPQVFYGDMYGTKGDSQREIPALKHKIEPILKARKQYAYGAQHDYFDHHDIVGWTREGDSSVANSGLAALITDGPGGAKRMYVGRQNAGETWHDITGNRSEPVVINSEGWGEFHVNGGSVSIYVQR

SEQ ID NO: 33417 - protein, 482 aa, Bacillus licheniformis
LNGTLMQYFEWYTPNDGQHWKRLQNDSAYLAEXGITAVWIPPAYKGTSQADVGYGAYDLYDLGEFHQKGTVRTKYGTKGELQSAIKSLHSRDINVYGDVVINHKGGADATELVRAVEVNPNNRNQEVSGEYTIEAYTYFDFPGRGNTHSNFKWRWYHFDGVDWDQSRRLNNRIYKFRGKAWDWEVDTEFGNYDYLTYADIDYDHPDVAAEIKRWGTWYANELQLDGFRLDAVKHIKFSFLRDWVNHVREKTGKEMFTVAEYWQNDLGALENYLNKTNFNHSVFDVPLHYQFHAASTQGGGYDMRKLLNGTVVSKHPLKSVTFVDNHDTQPGQSLESTVQTWFKPLAYAFILTRESGYPQVFYGDMYGTKGDSQREIPALKHKIEPILKARKQYAYGAQHDYFDHHDIVGWTREGDSSVANSGLFALITDGPGGAKRMYVGRQNAGETWHDITGNRSEPVVINSEGWGEFHVNGGSVSIYVQR

SEQ ID NO: 33418 - protein, 480 aa, Bacillus sp.
APINETMMQYFEWDLPNDGTLWNRLHNNAQNLKNAGITALWLPPAYKGTSQSDVGYGVYDLYDLGEFNQKGTIRTKYGTKTQLERAIRSLKANGIQVYADVVFNHKAGADGTEFVDAVEVDPSNRNQEVSGTYQIEAWTKFDFPGRGNTYSSFKWRWYHFDGTDWDESRKLNRIYKFRGKAWDWEVDTENGNYDYLMFADLDMDHPEVVTELKNWGTWYVNTTNIDGFRLDAVKHIKFSFMRDWLTYVRNQTGKNLFAVGEFWKNDLGALENYITKTNGSMSLFDAPLHNNFYTASKSSGYFDMRNLLNGTLVQRHPSHAVTLVDNHDTQPGQSLQSWVEPWFKPLAYAFILTRQEGYPCVFYGDYYGIPKYNIPGLKSKIDPLLIARRDYAYGTQRDYIDHQDIIGWTREGDSSHPNSGLAALITDGPGGSKWMYVGKKHAGKVFYDLTGNRSDTVTINADGWGEFKVNGGSVSIWVAK

SEQ ID NO: 33419 - protein, 480 aa, Bacillus sp.
APTNETMMQYFEWDLPNDGTLWNRLHNNAQNLKNAGITALWLPPAYKGTSQSDVGYGVYDLYDLGEFNQKGTIRTKYGTKTQLERAIRSLKANGIQVYADVVFNHKAGADGTEFVDAVEVDPSNRNQEVSGTYQIEAWTKFDFPGRGNTYSSFKWRWYHFDGTDWDESRKLNRIYKFRGKAWDWEVDTENGNYDYLMFADLDMDHPEVVTELKNWGTWYVNTTNIDGFRLDAVKHIKFSFMRDWLTYVRNQTGKNLFAVGEFWKNDLGALENYITKTNGSMSLFDAPLHNNFYTASKSSGYFDMRNLLNGTLVQRHPSHAVTLVDNHDTQPGQSLQSWVEPWFKPLAYAFILTRQEGYPCVFYGDYYGIPKYNIPGLKSKIDPLLIARRDYAYGTQRDYIDHQDIIGWTREGDSSHPNSGLAALITDGPGGSKWMYVGKKHAGKVFYDLTGNRSDTVTINADGWGEFKVNGGSVSIWVAK

SEQ ID NO: 33420 - protein, 483 aa, Bacillus sp. (in: firmicutes)
HHDGTNGTIMQYFEWNVPNDGQHWNRLHNNAQNLKNAGITAIWIPPAWKGTSQNDVGYGAYDLYDLGEFNQKGTVRTKYGTKAELERAIRSLKANGIQVYGDVVMNHKGGADFTERVQAVEVNPQNRNQEVSGTYQIEAWTGFNFPGRGNQHSSFKWRWHHFDGTDWDQSRQLANRIYKFRGKAWDWEVDTENGNYDYLMYADVDMDHPDVINELNRWGVWYANTLNLDGFRLDAVKHIKFSFMRDWLGHVRGHTGKNLFAVAEYWKNDLGALNNYLSKTNYTMSAFDVPLHYNLYQASNSSGNYDMRNLLNGTLVQSHPSHAVTFVDNHDTQPGEALESFVQGWFKPLAYATILTREQGYPQVFYGDYYGIPSDGVPSYRQQIDPLLKARQQYAYGRQHDYFDHHDVIGWTREGNASHPNSGLATIMSDGPGGSKTMYVGRQKAGEVWHDMTGNRSGTVTINQDGNGHFSVNKGSVSVWVKR

SEQ ID NO: 33421 - protein, 483 aa, Bacillus sp. (in: firmicutes)
HHDGTNGTIMQYFEWNVPNDGQHWNRLHNNAQNLKNAGITAIWIPPAWKGTSQNDVGYGAYDLYDLGEFNQKGTVRTKYGTKAELERAIRSLKANGIQVYGDVVMNHKGGADFTERVQAVEVNPQNRNQEVSGTYQIEAWTGFNFPGRGNQHSSFKWRWHHFDGTDWDQSRQLSNRIYKFRGKAWDWEVDTENGNYDYLMYADVDMDHPDVINELNRWGVWYANTLNLDGFRLDAVKHIKFSFMRDWLGHVRGQTGKNLFAVAEYWKNDLGALNNYLSKTNYTMSAFDVPLHYNLYQASNSSGNYDMRNLLNGTLVQSHPSHAVTFVDNHDTQPGEALESFVQGWFKPLAYATILTREQGYPQVFYGDYYGIPSDGVPSYRQQIDPLLKARQQYAYGRQHDYFDHHDVIGWTREGNASHPNSGLATIMSDGPGGSKTMYVGRQKAGEVWHDMTGNRSGTVTINQDGNGHFSVNKGSVSVWVKR

SEQ ID NO: 33422 - protein, 483 aa, Bacillus sp. (in: firmicutes)
HHDGTNGTIMQYFEWNVPNDGQHWNRLHNNAQNLKNAGITAIWIPPAWKGTSQNDVGYGAYDLYDLGEFNQKGTVRTKYGTKAELERAIRSLKANGIQVYGDVVMNHKGGADFTERVQAVEVNPQNRNQEVSGTYQIEAWTGFNFPGRGNQHSSFKWRWHHFDGTDWDQSRQLANRIYKFRGKAWDWEVDTENGNYDYLMYADVDMDHPDVINELNRWGVWYANTLNLDGFRLDAVKHIKFSFMRDWLGHVRGQTGKNLFAVAEYWKNDLGALNNYLSKTNYTMSAFDVPLHYNLYQASNSGGRYDMRNLLNGTLVQSHPSHAVTFVDNHDTQPGEALESFVQGWFKPLAYATILTREQGYPQVFYGDYYGIPSDGVPSYRQQIDPLLKARQQYAYGRQHDYFDHHDVIGWTREGNASHPNSGLATIMSDGPGGSKTMYVGRQKAGEVWHDMTGNRSGTVTINQDGNGHFSVNKGSVSVWVKR

SEQ ID NO: 33423 - protein, 483 aa, Bacillus sp. (in: firmicutes)
HHDGTNGTIMQYFEWNVPNDGQHWNRLHNNAQNLKNAGITAIWIPPAWKGTSQNDVGYGAYDLYDLGEFNQKGTVRTKYGTKAELERAIRSLKANGIQVYGDVVMNHKGGADFTERVQAVEVNPQNRNQEVSGTYQIEAWTGFNFPGRGNQHSSFKWRWHHFDGTDWDQSRQLANRIYKFRGKAWDWEVDTENGNYDYLMYADVDMDHPDVINELNRWGVWYANTLNLDGFRLDAVKHIKFSFMRDWLGHVRGQTGKNLFAVAEYWKNDLGALNNYLSKTNYTMSAFDVPLHYNLYQASNSGGYYDMRNLLNGTLVQSHPSHAVTFVDNHDTQPGEALESFVQGWFKPLAYATILTREQGYPQVFYGDYYGIPSDGVPSYRQQIDPLLKARQQYAYGRQHDYFDHHDVIGWTREGNASHPNSGLATIMSDGPGGSKTMYVGRQKAGEVWHDMTGNRSGTVTINQDGNGHFSVNKGSVSVWVKR

SEQ ID NO: 33424 - protein, 483 aa, Bacillus sp. (in: firmicutes)
HHDGTNGTIMQYFEWNVPNDGQHWNRLHNNAQNLKNAGITAIWIPPAWKGTSQNDVGYGAYDLYDLGEFNQKGTVRTKYGTKAELERAIRSLKANGIQVYGDVVMNHKGGADFTERVQAVEVNPQNRNQEVSGTYQIETWTGFNFPGRGNQHSSFKWSWDHFDGTDWDQSRQLANRIYKFRGKAMDWEVDTEFGNYDYLMYADVDMDNPEVINELNRWGVWYANTLNLDGFRLDAVKHIKFSFMRDWLGHVRGQTGKNLFAVAEYWKNDLGALENYLSKTNWTMSAFDVPLHYNLYQASNSSGNYDMRNLLNGTLVQRHPSHAVTFVDNHDTQPGEALESFVQGWFKPLAYATILTREQGYPSVFYGDYYGIPSDGVPSYRQQIDPLLKARQQYAYGRQHDYFDHWDVIGWTREGNASHPNSGLATIMSDGPGGSKWMYVGRQKAGEVWHDMTGNRSGTVTINQDGWGHFFVNGGSVSVWVKR

SEQ ID NO: 33425 - protein, 483 aa, Bacillus sp.
HHDGTNGTIMQYFEWNVPNDGQHWNRLHNNAQNLKNAGITAIWIPPAWKGTSQNDVGYGAYDLYDLGEFNQKGTVRTKYGTKAELERAIRSLKANGIQVYGDVVMNHKGGADFTERVQAVEVNPQNRNQEVSGTYQIEAWTGFNFPGRANQHSSFKWRWYHFDGTDWDQSRQLANRIYKFRTKAWDWEVDTEFGNYDYLMYADLDMDHPEVINELNRWGVWYANTLNLDGFRLDAVKHIKFSFVRDWLGHVRGQIGKNLFAVAEYWKNDLGALENYLSKTNWTMSAFDVPLHFNLYYASNSSGNYDMRNLLNGTLVQRHPSHAVTFVDNHDTQPGESLESFVRGWFKPLAYATILTREQGYPQVFYGDYYGIPSDGVPSYRQQIDPLLKARQQYAYGRQHDYFDHWDVIGWTREGNASHPNSGLATIMSDGPGGSKWMYVGRQKAGEVWHDMTGNKSGTVTINQDGWGHFFVNGGSVSVWVKR

SEQ ID NO: 33426 - protein, 483 aa, Bacillus sp. (in: firmicutes)
HHDGTNGTIMQYFEWNVPNDGQHWNRLHNNAQNLKNAGITAIWIPPAWKGTSQNDVGYGAYDLYDLGEFNQKGTVRTKYGTKAELERAIRSLKANGIQVYGDVVMNHKGGADFTERVQAVEVNPQNRNQEVSGTYQIEAWTGFNFPGRGNQHSSFKWRWHHFDGTDWDQSRQLANRIYKFRGKAWDWEVDTENGNYDYLMYADVDMDHPDVINELNRWGVWYANTLNLDGFRLDAVKHIKFSFMRDWLGHVRGNTGKNLFAVAEYWKNDLGALNNYLSKTNYTMSAFDVPLHYNLYQASNSSGNYDMRNLLNGTLVQSHPSHAVTFVDNHDTQPGEALESFVQGWFKPLAYATILTREQGYPQVFYGDYYGIPSDGVPSYRQQIDPLLKARQQYAYGRQHDYFDHHDVIGWTREGNASHPNSGLATIMSDGPGGSKTMYVGRQKAGEVWHDMTGNRSGTVTINQDGNGHFSVNKGSVSVWVKR

SEQ ID NO: 33427 - protein, 483 aa, Bacillus sp. (in: firmicutes)
HHDGTNGTIMQYFEWNVPNDGQHWNRLHNNAQNLKNAGITAIWIPPAWKGTSQNDVGYGAYDLYDLGEFNQKGTVRTKYGTKAELERAIRSLKANGIQVYGDVVMNHKGGADFTERVQAVEVNPQNRNQEVSGTYQIEAWTGFNFPGRGNQHSSFKWRWHHFDGTDWDQSRQLANRIYKFRGKAWDWEVDTENGNYDYLMYADVDMDHPDVINELNRWGVWYANTLNLDGFRLDAVKHIKFSFLRDWLGHVRGQTGKNLFAVAEYWKNDLGALNNYLSKTNYTMSAFDVPLHYNLYQASNSSGNYDMRNLLNGTLVQSHPSHAVTFVDNHDTQPGEALESFVQGWFKPLAYATILTREQGYPQVFYGDYYGIPSDGVPSYRQQIDPLLKARQQYAYGRQHDYFDHHDVIGWTREGNASHPNSGLATIMSDGPGGSKTMYVGRQKAGEVWHDMTGNRSGTVTINQDGNGHFSVNKGSVSVWVKR

SEQ ID NO: 33428 - protein, 483 aa, Bacillus sp. (in: firmicutes)
HHDGTNGTMMQYFEWNVPNDGQHWNRLHNNAQNLKNAGITAIWIPPAWKGTSQNDVGYGAYDLYDLGEFNQKGTVRTKYGTKAELERAIRSLKANGIQVYGDVVMNHKGGADFTERVQAVEVNPQNRNQEVSGTYQIEAWTGFNFPGRGNQHSSFKWRWHHFDGTDWDQSRQLANRIYKFRGKAWDWEVDTENGNYDYLLYADVDMDHPDVINELNRWGVWYANTLNLDGFRLDAVKHIKFSFMRDWLGHVRGQTGKNLFAVAEYWKNDLGALNNYLSKTNYTMSAFDVPLHYNLYQASNSSGNYDMRNLLNGTLVQSHPSHAVTFVDNHDTQPGEALESFVQGWFKPLAYATILTREQGYPQVFYGDYYGIPSDGVPSYRQQIDPLLKARQQYAYGRQHDYFDHHDVIGWTREGNASHPNSGLATIMSDGPGGSKTMYVGRQKAGEVWHDMTGNRSGTVTINQDGNGHFSVNKGSVSVWVKR

SEQ ID NO: 33429 - protein, 485 aa, Bacillus sp.
HHDGTNGTIMQYFEWNVPNDGQHWNRLHNNAQNLKNAGITAIWIPPAWKGTSQNDVGYGAYDLYDLGEFNQKGTVRTKYGTKAELERAIRSLKANGIQVYGDVVMNHKGGADFTERVQAVEVNPQNRNQEVSGTYQIEAWTGFNFPGRGNQHSSFKWRWYHFDGTDWDQSRQLANRIYKFRGDGKAWDWEVDTENGNYDIELKTDVDMDHPEVINELNRWGVWYANTLNLDGFRLDAVKHIKFSFMRDWLGHVRGQTGKNLFAVAEYWKNDLGALENYLSKTNWTMSAFDVPLHYNLYQASNSSGNYDMRNLLNGTLVQRHPSHAVTFVDNHDTQPGEALESFVQGWFKPLAYATILTREQGYPQVFYGDYYGIPSDGVPSYRQQIDPLLKARQQYAYGRQHDYFDHWDVIGWTREGNASHPNSGLATIMSDGPGGSKWMYVGRQKAGEVWHDMTGNRSGTVTINQDGWGHFFVNGGSVSVWVKR

SEQ ID NO: 33430 - protein, 484 aa, Synthetic construct
LNGTLMQYFEWYMPNDGQHWKRLQNDSAYLAEHGITAVWIPPAYKGTSQADVGYGAYDLYDLGEFHQKGTVRTKYGTKGELQSAIKSLHSRDINVYGDVVINHKGGADATEMVRAVEVNPNNRNQEVTGEYTIEAWTRFDFPGRGNTHSSFKWRWYHFDGVDWDQSRRLNNRIYKFRGHGKAWDWEVDTENGNYDYLMYADIDYDHPDVAAEIKRWGTWYANELQLDGFRLDAVKHIKFSFLRDWVNHVREKTGKEMFTVAEYWSYDLGALENYLNKTNFNHSVFDVPLHYQFHAASTQGGGYDMRKLLNGTVVSKHPLKSVTFVDNHDTQPGQSLESTVQTWFKPLAYAFILTRESGYPQVFYGDMYGTKGDSQREIPALKHKIEPILKARKQYAYGAQHDYFDHHDIVGWTREGDSSVANSGLAALITDGPGGAKRMYVGRQNAGETWHDITGNRSEPVVINSAGWGEFHVNGGSVSIYVQR

SEQ ID NO: 33431 - protein, 484 aa, Synthetic construct
LNGTLMQYFEWYMPNDGQHWKRLQNDSAYLAEHGITAVWIPPAYKGTSQADVGYGAYDLYDLGEFHQKGTVRTKYGTKGELQSAIKSLHSRDINVYGDVVINHKGGADFTERVQAVEVNPQNRNQEVSGTYQIEAWTGFNFPGRGNQHSSFKWRWYHFDGTDWDQSRQLANRIYKFRGDGKAWDWEVDTENGNYDYLMYADVDYDHPDVAAEIKRWGTWYANELQLDGFRLDAVKHIKFSFLRDWVNHVREKTGKEMFTVAEYWSYDLGALENYLNKTNFNHSVFDVPLHYQFHAASTQGGGYDMRKLLNGTVVSKHPLKSVTFVDNHDTQPGQSLESTVQTWFKPLAYAFILTRESGYPQVFYGDMYGTKGDSQREIPALKHKIEPILKARKQYAYGAQHDYFDHHDIVGWTREGDSSVANSGLAALITDGPGGAKRMYVGRQNAGETWHDITGNRSEPVVINSAGWGEFHVNGGSVSIYVQR

SEQ ID NO: 33432 - protein, 478 aa, Bacillus sp.
APINETMMQYFEWDLPNDGTLWNRLHNNAQNLKNAGITALWLPPAYKGTSQSDVGYGVYDLYDLGEFNQKGTIRTKYGTKTQLERAIRSLKANGIQVYADVVFNHKAGADGTEFVDAVEVDPSNRNQEVSGTYQIEAWTKFDFPGRGNTYSSFKWRWYHFDGTDWDESRKLNRIYKFRGKAWDWEVDTENGNYDYLMFADLDMDHPEVVTELKNWGTWYVNTTNIDGFRLDAVKHIKFSFMRDWLTYVRNQTGKNLFAVGEFWKNDLGALENYITKTNGSMSLFDAPLHNNFYTASKSSGYFDMRNLLNGTLVQRHPSHAVTLVDNHDTQPGQSLQSWVEPWFKPLAYAFILTRQEGYPCVFYGDYYGIPKYNIPGLKSKIDPLLEARRDYAYGTQRDYIDHQDIIGWTREGIDTKPNSGLAALITDGPGGSKWMYVGKKHAGKVFKDITGNRSDTVTINADGWGEFKVNGGSVSIWV

SEQ ID NO: 33433 - protein, 482 aa, Bacillus sp.
HHDGTNGTIMQYFEWNVPNDGQHWNRLHNNAQNLKNAGITAIWIPPAWKGTSQNDVGYGAYDLYDLGEFNQKGTVRTKYGTKAELERAIRSLKANGIQVYGDVVMNHKGGADFTERVQAVEVNPQNRNQEVSGTYQIEAWTGFNFPGRANQHSSFKWRWYHFDGTDWDQSRQLANRIYKFRTKAWDWEVDTEFGNYDYLLYADLDMDHPEVINELNRWGVWYANTLNLDGFRLDAVKHIKFSFMRDWLGHVRGQGKNLFAVAEYWKNDLGALENYLSKTNWTMSAFDVPLHFNLYYASNSSGNYDMRNLLNGTLVQRHPSHAVTFVDNHDTQPGESLESFVRGWFKPLAYATILTREQGYPQVFYGDYYGIPSDGVPSYRQQIDPLLKARQQYAYGRQHDYFDHWDVIGWTREGNASHPNSGLATIMSDGPGGSKWMYVGRQKAGEVWHDMTGNKSGTVTINQDGWGHFFVNGGSVSVWVKR

SEQ ID NO: 33434 - protein, 482 aa, Bacillus sp.
HHDGTNGTIMQYFEWNVPNDGQHWNRLHNNAQNLKNAGITAIWIPPAWKGTSQNDVGYGAYDLYDLGEFNQKGTVRTKYGTKAELERAIRSLKANGIQVYGDVVMNHKGGADFTERVQAVEVNPQNRNQEVSGTYQIEAWTGFNFPGRANQHSSFKWRWYHFDGTDWDQSRQLANRIYKFRTKAWDWEVDTENGNYDYLLYADLDMDHPEVINELNRWGVWYANTLNLDGFRLDAVKHIKFSFMRDWLGHVRGQGKNLFAVAEYWKNDLGALENYLSKTNWTMSAFDVPLHFNLYYASNSSGNYDMRNLLNGTLVQRHPSHAVTFVDNHDTQPGESLESFVRGWFKPLAYATILTREQGYPQVFYGDYYGIPSDGVPSYRQQIDPLLKARQQYAYGRQHDYFDHWDVIGWTREGNASHPNSGLATIMSDGPGGSKWMYVGRQKAGEVWHDMTGNRSGTVTINQDGWGEFFVNGGSVSVWVKR

SEQ ID NO: 33435 - protein, 482 aa, Bacillus sp. (in: firmicutes)
HHDGTNGTIMQYFEWHVPNDGQHWNRLHNNAQNLKNAGITAIWIPPAWKGTSQSDTGYGAYDLYDLGEFNQKGTVRTKYGTKAELERAIRSLKANGIQVYGDVVMNHKAGADFTERVQAVEVNPQNRNQEVSGTYQIEAWTGFNFPGRGNQHSSFKWRWYHFDGTDWDESRKLNRIYKFRGKAWDWEVDTEFGNYDYLMYADLDMDHPEVINELNRWGVWYANTLNLDGFRLDAVKHIKFSFMRDWLGHVRGQTGKNLFAVAEYWKNDLGALENYLSKTNWTMSAFDVPLHYNLYQASNSSGNYDMRNLLNGTLVQRHPSHAVTFVDNHDTQPGEALESFVQGWFKPLAYATILTREQGYPQVFYGDYYGIPSDGVPSYRQQIDPLLAARQQYAYGRQHDYFDHWDVIGWTREGNASHPNSGLATIMSDGPGGSKWMYVGRQKAGEVWHDMTGNRSGTVTINQDGWGHFFVNGGSVSVWVKR

SEQ ID NO: 33436 - protein, 482 aa, Bacillus sp. (in: firmicutes)
HDGTNGTIMQYFEWNVPNDGQHWNRLHNNAQNLKNAGITAIWIPPAWKGTSQNDVGYGAYDLYDLGEFNQKGTVRTKYGTKAELERAIRSLKANGIQVYGDVVMNHKGGADFTERVQAVEVNPQNRNQEVSGTYQIEAWTGFNFPGRGNQHSSFKWRWHHFDGTDWDQSRQLANRIYKFRGKAWDWEVDTENGNYDYLMYADVDMDHPDVINELNRWGVWYANTLNLDGFRLDAVKHIKFSFMRDWLGHVRGQTGKNLFAVAEYWKNDLGALNNYLSKTNYTMSAFDVPLHYNLYQASNSSGNYDMRNLLNGTLVQSHPSHAVTFVDNHDTQPGEALESFVQGWFKPLAYATILTREQGYPQVFYGDYYGIPSDGVPSYRQQIDPLLKARQQYAYGRQHDYFDHHDVIGWTREGNASHPNSGLATIMSDGPGGSKTMYVGRQKAGEVWHDMTGNRSGTVTINQDGNGHFSVNKGSVSVWVKR

SEQ ID NO: 33437 - protein, 482 aa, Synthetic construct
HAGTNGTLMQYFEWYLPNDGNHWNRLNSDASNLASKGITAVWIPPAYKGTSQADVGYGAYDLYDLGEFNQKGTVRTKYGTRSQLQAAVTSLKNNGIQVYGDVVINHKAGADATEMVTAVEVNPNNRNQEVTGEYTIEAYTRFDFPGRGNTHSSFKWRWYHFDGVDWDQSRSLNNRIYKFQGKAWDWPVDTENGNYDYLMYADLDMDHPEVVNELRNWGVWYTNTLGLDGFRLDAVKHIKFSFLRDWINHVRSATGKNMFAVAEYWKNDLGAIENYLNFTNWNHSVFDVPLHYNLYAASTSGGNYDMRNIFNGTVVQKHPSHAVTFVDNHDTQPEESLESFVQPWFKPLAYALTLTREQGYPSVFYGDYYGIPTHGIPALRSKIDPILEARQKYAYGPQHDYLDHPDIIGWTREGDSSHPKSGLATLITDGPGGSKRMYAGLKNAGETWYDITGNRSDTVKIGSDGWGEFHVNKGSVSIYVQK

SEQ ID NO: 33438 - protein, 484 aa, Synthetic construct
HHDGTNGTIMQYFEWNVPNDGQHWNRLHNNAQNLKNAGITAIWIPPAWKGTSQNDVGYGAYDLYDLGEFNQKGTVRTKYGTKAELERAIRSLKANGIQVYGDVVMNHKAGADYTENVTAVEVNPSNRNQETSGEYNIQAWTGFNFPGRGTTYSNFKWQWFHFDGTDWDQSRSLSRIFKFRGTGKAWDWEVSSENGNYDYLMYADIDMDHPEVINELNRWGVWYANTLNLDGFRLDAVKHIKFSFMRDWLGHVRGQTGKNLFAVAEYWKNDLGALENYLSKTNWTMSAFDVPLHYNLYQASNSSGNYDMRNLLNGTLVQRHPSHAVTFVDNHDTQPGEALESFVQGWFKPLAYATILTREQGYPQVFYGDYYGIPSDGVPSYRQQIDPLLKARQQYAYGRQHDYFDHWDVIGWTREGNASHPNSGLATIMSDGPGGSKWMYVGRQKAGEVWHDMTGNRSGTVTINQDGWGHFFVNGGSVSVWVKR

SEQ ID NO: 33439 - protein, 481 aa, Bacillus sp. (in: firmicutes)
HDGTNGTIMQYFEWNVPNDGQHWNRLHNNAQNLKNAGITAIWIPPAWKGTSQSDTGYGAYDLYDLGEFNQKGTVRTKYGTKAELERAIRSLKANGIQVYGDVVMNHKAGADFTENVQAVEVNPQNRNQEVSGTYQIEAWTGFNFPGRGNQHSSFKWRWYHFDGTDWDESRKLNRIYKFRGKAWDWEVDTEFGNYDYLMYADLDMDHPEVINELNRWGVWYANTLNLDGFRLDAVKHIKFSFMRDWLGHVRGQTGKNLFAVAEYWKNDLGALENYLSKTNWTMSAFDVPLHYNLYQASNSSGNYDMRNLLNGTLVQRHPSHAVTFVDNHDTQPGEALESFVQGWFKPLAYATILTREQGYPQVFYGDYYGIPSDGVPSYRQQIDPLLAARQQYAYGRQHDYFDHWDVIGWTREGNASHPNSGLATIMSDGPGGSKWMYVGRQKAGEVWHDMTGNRSGTVTINQDGWGHFFVNGGSVSVWVKR

SEQ ID NO: 33440 - protein, 481 aa, Bacillus sp. (in: firmicutes)
HDGTNGTIMQYFEWNVPNDGQHWNRLHNNAQNLKNAGITAIWIPPAWKGTSQSDTGYGAYDLYDLGEFNQKGTVRTKYGTKAELERAIRSLKANGIQVYGDVVMNHKAGADFTERVQAVEVNPQNRNQEVSGTYQIEAWTGFNFPGRGNQHSSFKWRWYHFDGTDWDESRKLNRIYKFRGKAWDWEVDTEFGNYDYLMYADLDMDHPEVINELNRWGVWYANTLNLDGFRLDAVKHIKFSFMRDWLGHVRGQTGKNLFAVAEYWKNDLGALENYLSKTNWTMSAFDVPLHYNLYNASNSSGNYDMRNLLNGTLVQRHPSHAVTFVDNHDTQPGEALESFVQGWFKPLAYATILTREQGYPQVFYGDYYGIPSDGVPSYRQQIDPLLAARQQYAYGRQHDYFDHWDVIGWTREGNASHPNSGLATIMSDGPGGSKWMYVGRQKAGEVWHDMTGNRSGTVTINQDGWGHFFVNGGSVSVWVKR

SEQ ID NO: 33441 - protein, 481 aa, Bacillus sp. (in: firmicutes)
HDGTNGTIMQYFEWNVPNDGQHWNRLHNNAQNLKNAGITAIWIPPAWKGTSQSDTGYGAYDLYDLGEFNQKGTVRTKYGTKAQLERAIRSLKANGIQVYGDVVMNHKAGADFTERVQAVEVNPQNRNQEVSGTYQIEAWTGFNFPGRGNQHSSFKWRWYHFDGTDWDESRKLNRIYKFRGKAWDWEVDTEFGNYDYLMYADLDMDHPEVINELNRWGVWYANTLNLDGFRLDAVKHIKFSFMRDWLGHVRGQTGKNLFAVAEYWKNDLGALENYLSKTNWTMSAFDVPLHYNLYQASNSSGNYDMRNLLNGTLVQRHPSHAVTFVDNHDTQPGEALESFVQGWFKPLAYATILTREQGYPQVFYGDYYGIPSDGVPSYRQQIDPLLAARQQYAYGRQHDYFDHWDVIGWTREGNASHPNSGLATIMSDGPGGSKWMYVGRQKAGEVWHDMTGNRSGTVTINQDGWGHFFVNGGSVSVWVKR

SEQ ID NO: 33442 - protein, 481 aa, Bacillus sp. (in: firmicutes)
HDGTNGTMMQYFEWNVPNDGQHWNRLHNNAQNLKNAGITAIWIPPAWKGTSQSDTGYGAYDLYDLGEFNQKGTVRTKYGTKAELERAIRSLKANGIQVYGDVVMNHKAGADFTERVQAVEVNPQNRNQEVSGTYQIEAWTGFNFPGRGNQHSSFKWRWYHFDGTDWDESRKLNRIYKFRGKAWDWEVDTEFGNYDYLLYADLDMDHPEVINELNRWGVWYANTLNLDGFRLDAVKHIKFSFMRDWLGHVRGQTGKNLFAVAEYWKNDLGALENYLSKTNWTMSAFDVPLHYNLYQASNSSGNYDMRNLLNGTLVQRHPSHAVTFVDNHDTQPGEALESFVQGWFKPLAYATILTREQGYPSVFYGDYYGIPSDGVPSYRQQIDPLLAARQQYAYGRQHDYFDHWDVIGWTREGNASHPNSGLATIMSDGPGGSKWMYVGRQKAGEVWHDMTGNRSGTVTINQDGWGHFFVNGGSVSVWVKR

SEQ ID NO: 33443 - protein, 481 aa, Bacillus sp. (in: firmicutes)
HDGTNGTIMQYFEWHVPNDGQHWNRLHNNAQNLKNAGITAIWIPPAWKGTSQSDTGYGAYDLYDLGEFNQKGTVRTKYGTKAELERAIRSLKANGIQVYGDVVMNHKAGADFTERVQAVEVNPQNRNQEVSGTYQIEAWTGFNFPGRGNQHSSFKWRWYHFDGTDWDESRKLNRIYKFRGKAWDWEVDTEFGNYDYLMYADLDMDHPEVINELNRWGVWYANTLNLDGFRLDAVKHIKFSFMRDWLGHVRGQTGKNLFAVAEYWKNDLGALENYLSKTNWTMSAFDVPLHYNLYQASNSSGNYDMRNLLNGTLVQRHPSHAVTFVDNHDTQPGEALESFVQGWFKPLAYATILTREQGYPQVFYGDYYGIPSDGVPSYRQLIDPLLAARQQYAYGRQHDYFDHWDVIGWTREGNASHPNSGLATIMSDGPGGSKWMYVGRQKAGEVWHDMTGNRSGTVTINQDGWGHFFVNGGSVSVWVKR

SEQ ID NO: 33444 - protein, 481 aa, Bacillus sp. (in: firmicutes)
HDGTNGTIMQYFEWNVPNDGQHWNRLHNNAQNLKNAGITAIWIPPAWKGTSQSDTGYGAYDLYDLGEFNQKGTVRTKYGTKAELERAIRSLKANGIQVYGDVVMNHKAGADFTERVQAVEVNPQNRNQEVSGTYQIEAWTGFNFPGRGNQHSSFKWRWYHFDGTDWDESRKLNRIYKFRGKAWDWEVDTEFGNYDYLMYADLDMDHPEVINELNRWGVWYANTLNLDGFRLDAVKHIKFSFMRDWLGHVRGQTGKNLFAVAEYWKNDLGALENYLSKTNWTMSAFDVPLHYNLYQASNSSGNYDMRNLLNGTLVQRHPSHAVTFVDNHDTQPGEALESFVQGWFKPLAYATILTREQGYPSVFYGDYYGIPSDGVPSYRQQIDPLLAARQQYAYGRQHDYFDHWDVIGWTREGNASHPNSGLATIMSDGPGGSKWMYVGRQKAGEVWHDMTGNRSGTVTINQDGWGHFFVNGGSVSVWVKR

SEQ ID NO: 33445 - protein, 481 aa, Bacillus sp. (in: firmicutes)
HDGTNGTIMQYFEWHVPNDGQHWNRLHNNAQNLKNAGITAIWIPPAWKGTSQSDTGYGAYDLYDLGEFNQKGTVRTKYGTKAELERAIRSLKANGIQVYGDVVMNHKAGADFTERVQAVEVNPQNRNQEVSGTYQIEAWTGFNFPGRGNQHSSFKWRWYHFDGTDWDESRKLNRIYKFRGKAWDWEVDTEFGNYDYLMYADLDMDHPEVINELNRWGVWYANTLNLDGFRLDAVKHIKFSFMRDWLGHVRGQTGKNLFAVAEYWKNDLGALENYLSKTNWTMSAFDVPLHYNLYQASNSSGNYDMRNLLNGTLVQRHPSHAVTFVDNHDTQPGEALESFVQGWFKPLAYATILTREQGYPQVFYGDYYGIPSDGVPSYRQQIDPLLAARQQYAYGRQHDYFDHWDVIGWTREGNASHPNSGLATIMSDGPGGSKWMYVGRQKAGEVWHDMTGNRSGTVTINQDGWGHFFVNGGSVSVWVKR

SEQ ID NO: 33446 - protein, 481 aa, Bacillus sp. (in: firmicutes)
HDGTNGTIMQYFEWNVPNDGQHWNRLHNNAQNLKNAGITAIWIPPAWKGTSQSDTGYGAYDLYDLGEFNQKGTVRTKYGTKAELERAIRSLKANGIQVYGDVVMNHKAGADFTERVQAVEVNPQNRNQEVSGTYQIEAWTGFNFPGRGNQHSSFKWRWYHFDGTDWDESRKLNRIYKFRGKAWDWEVDTEFGNYDYLMYADLDMDHPEVINELNRWGVWYANTLNLDGFRLDAVKHIKFSFMRDWLGHVRGQTGKNLFAVAEYWKNDLGALENYLSKTNWTMSAFDVPLHYNLYQASNSSGNYDMRNLLNGTLVQRHPSHAVTFVDNHDTQPGEALESFVQGWFKPLAYATILTREQGYPQVFYGDYYGIPSHGVPSYRQQIDPLLAARQQYAYGRQHDYFDHWDVIGWTREGNASHPNSGLATIMSDGPGGSKWMYVGRQKAGEVWHDMTGNRSGTVTINQDGWGHFFVNGGSVSVWVKR

SEQ ID NO: 33447 - protein, 481 aa, Bacillus sp. (in: firmicutes)
HDGTNGTIMQYFEWNVPNDGQHWNRLHNNAQNLKNAGITAIWIPPAWKGTSQSDTGYGAYDLYDLGEFNQKGTVRTKYGTKAELERAIRSLKANGIQVYGDVVMNHKAGADFTERVQAVEVNPQNRNQEVSGTYQIEAWTGFNFPGRGNQHSSFKWRWYHFDGTDWDESRKLNRIYKFRGKAWDWEVDTEFGNYDYLMYADLDMDHPEVINELNRWGVWYANTLNLDGFRLDAVKHIKFSFMRDWLGHVRGQTGKNLFAVAEYWKNDLGALENYLSKTNWTMSAFDVPLHYNLYQASNSSGNYDMRKLLNGTLVQRHPSHAVTFVDNHDTQPGEALESFVQGWFKPLAYATILTREQGYPQVFYGDYYGIPSDGVPSYRQQIDPLLAARQQYAYGRQHDYFDHWDVIGWTREGNASHPNSGLATIMSDGPGGSKWMYVGRQKAGEVWHDMTGNRSGTVTINQDGWGHFFVNGGSVSVWVKR

SEQ ID NO: 33448 - protein, 481 aa, Bacillus sp. (in: firmicutes)
HDGTNGTIMQYFEWNVPNDGQHWNRLHNNAQNLKNAGITAIWIPPAWKGTSQNDVGFGAYDLYDLGEFNQKGTVRTKYGTKAELERAIRSLKANGIQVYGDVVMNHKAGADFTERVQAVEVNPQNRNQEVSGTYQIEAWTGFNFPGRGNQHSSFKWRWYHFDGTDWDESRKLNRIYKFRGKAWDWEVDTEFGNYDYLMYADLDMDHPEVINELNRWGVWYANTLNLDGFRLDAVKHIKFSFMRDWLGHVRGQTGKNLFAVAEYWKNDLGALENYLSKTNWTMSAFDVPLHYNLYQASNSSGNYDMRNLLNGTLVQRHPSHAVTFVDNHDTQPGEALESFVQGWFKPLAYATILTREQGYPQVFYGDYYGIPSDGVPSYRQQIDPLLAARQQYAYGRQHDYFDHWDVIGWTREGNASHPNSGLATIMSDGPGGSKWMYVGRQKAGEVWHDMTGNRSGTVTINQDGWGHFFVNGGSVSVWVKR

SEQ ID NO: 33449 - protein, 481 aa, Bacillus sp. (in: firmicutes)
HDGTNGTIMQYFEWNVPNDGQHWNRLHNNAQNLKNAGITAIWIPPAWKGTSQNDVGYAAYDLYDLGEFNQKGTVRTKYGTKAELERAIRSLKANGIQVYGDVVMNHKAGADFTERVQAVEVNPQNRNQEVSGTYQIEAWTGFNFPGRGNQHSSFKWRWYHFDGTDWDESRKLNRIYKFRGKAWDWEVDTEFGNYDYLMYADLDMDHPEVINELNRWGVWYANTLNLDGFRLDAVKHIKFSFMRDWLGHVRGQTGKNLFAVAEYWKNDLGALENYLSKTNWTMSAFDVPLHYNLYQASNSSGNYDMRNLLNGTLVQRHPSHAVTFVDNHDTQPGEALESFVQGWFKPLAYATILTREQGYPQVFYGDYYGIPSDGVPSYRQQIDPLLAARQQYAYGRQHDYFDHWDVIGWTREGNASHPNSGLATIMSDGPGGSKWMYVGRQKAGEVWHDMTGNRSGTVTINQDGWGHFFVNGGSVSVWVKR

SEQ ID NO: 33450 - protein, 481 aa, Bacillus sp. (in: firmicutes)
HDGTNGTIMQYFEWNVPNDGQHWNRLHNNAQNLKNAGITAIWIPPAWKGTSQSDTGYGAYDLYDLGEFNQKGTVRTKYGTKAELERAIHSLKANGIQVYGDVVMNHKAGADFTERVQAVEVNPQNRNQEVSGTYQIEAWTGFNFPGRGNQHSSFKWRWYHFDGTDWDESRKLNRIYKFRGKAWDWEVDTEFGNYDYLMYADLDMDHPEVINELNRWGVWYANTLNLDGFRLDAVKHIKFSFMRDWLGHVRGQTGKNLFAVAEYWKNDLGALENYLSKTNWTMSAFDVPLHYNLYQASNSSGNYDMRNLLNGTLVQRHPSHAVTFVDNHDTQPGEALESFVQGWFKPLAYATILTREQGYPQVFYGDYYGIPSDGVPSYRQQIDPLLAARQQYAYGRQHDYFDHWDVIGWTREGNASHPNSGLATIMSDGPGGSKWMYVGRQKAGEVWHDMTGNRSGTVTINQDGWGHFFVNGGSVSVWVKR

SEQ ID NO: 33451 - protein, 481 aa, Bacillus sp. (in: firmicutes)
HDGTNGTIMQYFEWNVPNDGQHWNRLHNNAQNLKNAGITAIWIPPAWKGTSQSDTGYGAYDLYDLGEFNQKGTVRTKYGTKAELERAIRSLKANGIQVYGDVVMNHKAGADFTERVQAVEVNPQNRNQEVSGTYQIEAWTGFNFPGRGNQHSSFKWRWYHFDGTDWDESRKLNRIYKFRGKAWDWEVDTENGNYDYLMYADLDMDHPEVINELNRWGVWYANTLNLDGFRLDAVKHIKFSFMRDWLGHVRGQTGKNLFAVAEYWKNDLGALENYLSKTNWTMSAFDVPLHYNLYQASNSSGNYDMRNLLNGTLVQRHPSHAVTFVDNHDTQPGEALESFVQGWFKPLAYATILTREQGYPQVFYGDYYGIPSDGVPSYRQQIDPLLAARQQYAYGRQHDYFDHWDVIGWTREGNASHPNSGLATIMSDGPGGSKWMYVGRQKAGEVWHDMTGNRSGTVTINQDGWGHFFVNGGSVSVWVKR

SEQ ID NO: 33452 - protein, 481 aa, Bacillus sp. (in: firmicutes)
HDGTNGTIMQYFEWNVPNDGQHWNRLHNNAQNLKNAGITAIWIPPAWKGTSQSDTGYGAYDLYDLGEFNQKGTVRTKYGTKAELERAIRSLKANGIQVYGDVVMNHKAGADATEDVTAVEVNPQNRNQEVSGTYQIEAWTGFNFPGRGNQHSSFKWRWYHFDGTDWDESRKLNRIYKFRGKAWDWEVDTEFGNYDYLMYADLDMDHPEVINELNRWGVWYANTLNLDGFRLDAVKHIKFSFMRDWLGHVRGQTGKNLFAVAEYWKNDLGALENYLSKTNWTMSAFDVPLHYNLYQASNSSGNYDMRNLLNGTLVQRHPSHAVTFVDNHDTQPGEALESFVQGWFKPLAYATILTREQGYPQVFYGDYYGIPSDGVPSYRQQIDPLLAARQQYAYGRQHDYFDHWDVIGWTREGNASHPNSGLATIMSDGPGGSKWMYVGRQKAGEVWHDMTGNRSGTVTINQDGWGHFFVNGGSVSVWVKR

SEQ ID NO: 33453 - protein, 481 aa, Bacillus licheniformis
LNGTLMQYFEWYMPNDGQHWRRLQNDSAYLAEHGITAVWIPPAYKGTSQADVGYGAYDLYDLGEFHQKGTVRTKYGTKGELQSAIKSLHSRDINVYGDVVIDHKGGADATEDVTAVEVDPADRNRVISGEHLIKAWTHFHFPGRGSTYSDFKWHWYHFNGTDWDESRKLNRIYKFQGKNWNWEVSNENGNYDYLMYANIDYSHPDVAAEIKRWGTWYANELQLDGFRLDAVKHIKFSFLRDWVNHVREKTGKEMFTVAEYWQNDLGALENYLNKTNFNHSVFDVPLHYQFHAASTQGGGYDMRKLLNGTVVSKHPLKSVTFVDNHDTQPGQSLESTVQTWFKPLAYAFILTRESGYPQVFYGDMYGTKGDSQREIPALKHKIEPILKARKQYAYGAQHDYFDHHDIVGWTREGDSSVANSGLAALITDGPGGAKRMYVGRQNAGETWHDITGNRSEPVVINSEGWGEFHVNGGSVSIYVQR

SEQ ID NO: 33454 - protein, 481 aa, Bacillus licheniformis
LNGTLMQYFEWYMPNDGQHWRRLQNDSAYLAEHGITAVWIPPAYKGTSQADVGYGAYDLYDLGEFHQKGTVRTKYGTKGELQSAIKSLHSRDINVYGDVVINHKGGADATEDVTAVEVDPADRNRVISGEHLIKAWTHFHFPGRGSTYSDFKWHWYHFNGTDWDESRKLNRIYKFQGKNWNWEVSNENGNYDYLMYANIDYSHPDVAAEIKRWGTWYANELQLDGFRLDAVKHIPFSFLRDWVNHVREKTGKEMFTVAEYWQNDLGALENYLNKTNFNHSVFDVPLHYQFHAASTQGGGYDMRKLLNGTVVSKHPLKSVTFVDNHDTQPGQSLESTVQTWFKPLAYAFILTRESGYPQVFYGDMYGTKGDSQREIPALKHKIEPILKARKQYAYGAQHDYFDHHDIVGWTREGDSSVANSGLAALITDGPGGAKRMYVGRQNAGETWHDITGNRSEPVVINSEGWGEFHVNGGSVSIYVQR

SEQ ID NO: 33455 - protein, 481 aa, Bacillus licheniformis
LNGTLMQYFEWYTPNDGQHWKRLQNDSAYLAEHGITAVWIPPAYKGASQNDVGYGAYDLYDLGEFHQKGTVRTKYGTKGELQSAIKSLHSRDINVYGDVVINHKGGADATEDVTAVEVDPADRNRVISGEHLIKAYTHFHFPGRGSTYSDFKWHWYHFDGTDWDESRKLNRIYKFQGKAWDWEVSNENGNYDYLTYADIDYDHPDVAAEIKRWGTWYANELQLDGFRLDAVKHIKYSFLRDWVNHVREKTGKEMFTVAEFWKNDLGALENYLNKTNFNHSVFDVPLHYQFYAASKQGGGYDMRKLLNGTVVSKHPLKSVTFVDNHDTQPEEALESTVQTWFKPLAYAFILTRESGYPQVFYGDMYGTKGDSQREIPALKHKIEPILKARKQYAYGAQHDYFDHHDIVGWTREGDSSVANSGLAALITDGPGGAKRMYVGRQNAGETWHDITGNRSEPVVINSEGWGEFHVNGGSVSIYVQR

SEQ ID NO: 33456 - protein, 480 aa, Bacillus sp.
APTNETMMQYFEWDLPNDGTLWNRLHNNAQNLKNAGITALWLPPAYKGTSQSDVGYGVYDLYDLGEFNQKGTIRTKYGTKTQLERAIRSLKANGIQVYADVVFNHKAGADGTEFVDAVEVDPSNRNQEVSGTYQIEAWTKFDFPGRGNTYSSFKWRWYHFDGTDWDESRKLNRIYKFRGKAWDWEVDTENGNYDYLMFADLDMDHPEVVTELKNWGTWYVNTTNIDGFRLDAVKHIKFSFMRDWLTYVRNQTGKNLFAVGEFWKNDLGALENYITKTNGSMSLFDAPLHNNFYTASKSSGYFDMRNLLNGTLVQRHPSHAVTLVDNHDTQPGQSLQSWVEPWFKPLAYAFILTRQEGYPCVFYGDYYGIPKYNIPGLKSKIDPLLIARQDYAYGTQRDYIDHQDIIGWTREGDSSHPNSGLAALITDGPGGSKWMYVGKKHAGKVFYDLTGNRSDTVTINADGWGEFKVNGGSVSIWVAK

SEQ ID NO: 33457 - protein, 480 aa, Bacillus sp.
APINETMMQYFEWDLPNDGTLWNRLHNNAQNLKNAGITALWLPPAYKGTSQSDVGYGVYDLYDLGEFNQKGTIRTKYGTKTQLERAIRSLKANGIQVYADVVFNHKAGADGTEFVDAVEVDPSNRNQEVSGTYQIEAWTKFDFPGRGNTYSSFKWRWYHFDGTDWDESRKLNRIYKFRGKAWDWEVDTENGNYDYLMFADLDMDHPEVVTELKNWGTWYVNTTNIDGFRLDAVKHIKFSFMRDWLTYVRNQTGKNLFAVGEFWKNDLGALENYITKTNGSMSLFDAPLHNNFYTASKSSGYFDMRNLLNGTLVQRHPSHAVTLVDNHDTQPGQSLQSWVEPWFKPLAYAFILTRQEGYPCVFYGDYYGIPKYNIPGLKSKIDPLLIARRDYAYGTQRDYIDHQDIIGWTREGIDTKPNSGLAALITDGPGGSKYMYVGKKHAGKVFYDLTGNRSDTVTINADGNGEFKVNGGSVSIWVAK

SEQ ID NO: 33458 - protein, 480 aa, Bacillus sp.
APINETMMQYFEWDLPNDGTLWNRLHNNAQNLKNAGITALWLPPAYKGTSQSDVGYGVYDLYDLGEFNQKGTIRTKYGTKTQLERAIRSLKANGIQVYADVVFNHKAGADGTEFVDAVEVDPSNRNQEVSGTYQIEAWTKFDFPGRGNTYSSFKWRWYHFDGTDWDESRKLNRIYKFRGKAWDWEVDTENGNYDYLMFADLDMDHPEVVTELKNWGTWYVNTTNIDGFRLDAVKHIKFSFMRDWLTYVRNQTGKNLFAVGEFWKNDLGALENYITKTNGSMSLFDAPLHNNFYTASKSSGYFDMRNLLNGTLVQRHPSHAVTLVDNHDTQPGQSLQSWVEPWFKPLAYAFILTRQEGYPCVFYGDYYGIPKHGIPGLKSKIDPLLIARRDYAYGTQRDYIDHQDIIGWTREGIDTKPNSGLAALITDGPGGSKWMYVGKKHAGKVFYDLTGNRSDTVTINADGWGEFKVNGGSVSIWVAK

SEQ ID NO: 33459 - protein, 480 aa, Bacillus sp.
APINETMMQYFEWDLPNDGTLWNRLHNNAQNLKNAGITALWLPPAYKGTSQSDVGYGVYDLYDLGEFNQKGTIRTKYGTKTQLERAIRSLKANGIQVYADVVFNHKAGADGTEFVDAVEVDPSNRNQEVSGTYQIEAWTKFDFPGRGNTYSSFKWRWYHFDGTDWDESRKLNRIYKFRGKAWDWEVDTENGNYDYLMFADLDMDHPEVVTELKNWGTWYVNTTNIDGFRLDAVKHIKFSFMRDWLTYVRNQTGKNLFAVGEFWKNDLGALENYITKTNGSMSLFDAPLHNNFYTASKSSGYFDMRNLLNGTLVQRHPSHAVTLVDNHDTQPGQSLQSWVEPWFKPLAYAFILTRQEGYPCVFYGDYYGIPKYNIPGLKSKIDPLLEARRDYAYGTQRDYIDHQDIIGWTREGIDTKPNSGLAALITDGPGGSKWMYVGKKHAGKVFYDITGNRSDTVTINADGWGEFKVNGGSVSIWVAK

SEQ ID NO: 33460 - protein, 480 aa, Bacillus sp.
APINETMMQYFEWDLPNDGTLWNRLHNNAQNLKNAGITALWLPPAYKGTSQSDVGYGVYDLYDLGEFNQKGTIRTKYGTKTQLERAIRSLKANGIQVYADVVFNHKAGADGTEFVDAVEVDPSNRNQEVSGTYQIEAWTKFDFPGRGNTYSSFKWRWYHFDGTDWDESRKLNRIYKFRGKAWDWEVDTENGNYDYLMFADLDMDHPEVVTELKNWGTWYVNTTNIDGFRLDAVKHIKFSFMRDWLTYVRNQTGKNLFAVGEFWKNDLGALENYITKTNGSMSLFDAPLHNNFYTASKSSGYFDMRNLLNGTLVQRHPSHAVTLVDNHDTQPGQSLQSWVEEWFKPLAYAFILTRQEGYPCVFYGDYYGIPKYNIPGMKSKIDPLLIARRDYAYGTQRDYIDHQDIIGWTREGIDTKPNSGLAALITDGPGGSKWMYVGKKHAGKVFYDLTGNRSDTVTINADGWGEFKVNGGSVSIWVAK

SEQ ID NO: 33461 - protein, 481 aa, Bacillus sp.
APINETMMQYFEWDLPNDGTLWNRLHNNAQNLKNAGITALWLPPAYKGTSQSDVGYGVYDLYDLGEFNQKGTIRTKYGTKTQLERAIRSLKANGIQVYADVVFNHKAGADGTEFVDAVEVDPSNRNQEVSGTYQIEAWTKFDFPGRGNTYSSFKWRWYHFDGTDWDESRKLQNRIYKFRGKAWDWEVDTENGNYDYLMFADLDMDHPEVVTELKNWGTWYVNTTNIDGFRLDAVKHIKFSFMRDWLTYVRNQTGKNLFAVGEFWKDDLGALENYITKTNGSMSLFDAPLHNNFYTASKSSGYFDMRNLLNGTLVQRHPSHAVTLVDNHDTDPGQSLESWVEPWFKPLAYAFILTRQEGYPCVFYGDYYGIPKYEIPGLKSKIDPLLIARRDYAYGTQRDYIDHQDIIGWTREGIDTKPNSGLAALITDGPGGSKWMYVGKKHAGKVFYDLTGNRSDTVTINADGWGEFKVNGGSVSIWVAK

SEQ ID NO: 33462 - protein, 480 aa, Bacillus licheniformis
LNGTLMQYFEWYMPNDGQHWKRLQNDSAYLAEHGITAVWIPPAYKGTSQADVGYGAYDLYDLGEFHQKGTVRTKYGTKGELQSAIKSLHSRDINVYGDVVINHKGGADATEDVTAVEVDPADRNRVISGEHLIKAWTHFHFPGRGSTYSDFKWHWYHFDGTDWDESRKLNRIYKFQGKAWDWEVSNENGNYDYLMLADIDYDHPDVAAEIKRWGTWYANELQLDGFRLDAVKHIKFSFLRDWVNHVRAKTGKEMFTVAEYWQNDLGALENYLNKTNFNHSVFDVPLHYQFHAASTQGGGYDMRKLLNGTVVSKHPLKSVTFVDNHDTQPGQSLESTVQTWFKPLAYAFILTRESGYPQVFYGDMYGTKGDSQREIPALKHKIEPILKARKQYAYGAQHDYFDHHDIVGWTREGDTSVANSGLAALITDGPGGQSECMSAGKTRETWHDITGNRSEPVVINSEGWESFTVNGGSVSIYVQR

SEQ ID NO: 33463 - protein, 483 aa, Bacillus sp. (in: firmicutes)
HHDGTNGTIMQYFEWNVPNDGQHWNRLHNNAQNLKNAGITAIWIPPAWKGTSQNDVGYGAYDLYDLGEFNQKGTVRTKYGTKAELERAIRSLKANGIQVYGDVVMNHKAGADFTERVQAVEVNPQNRNQEVSGTYQIEAWTGFNFPGRGNQHSSFKWRWHHFDGTDWDQSRQLANRIYKFRGKAWDWEVDTENGNYDYLMYADVDMDHPDVINELNRWGVWYANTLNLDGFRLDAVKHIKFSFMRDWLGHVRGQTGKNLFAVAEYWKNDLGALNNYLSKTNYTMSAFDVPLHYNLYQASNSSGNYDMRNLLNGTLVQSHPSHAVTFVDNHDTQPGEALESFVQGWFKPLAYATILTREQGYPQVFYGDYYGIPSDGVPSYRQQIDPLLKARQQYAYGRQHDYFDHHDVIGWTREGNASHPNSGLATIMSDGPGGSKTMYVGRQKAGEVWHDMTGNRSGTVTINQDGNGHFSVNKGSVSVWVKR

SEQ ID NO: 33464 - protein, 483 aa, Bacillus sp. (in: firmicutes)
HHDGTNGTIMQYFEWNVPNDGQHWNRLHNNAQNLKNAGITAIWIPPAWKGTSQNDVGYGSYDLYDLGEFNQKGTVRTKYGTKAELERAIRSLKANGIQVYGDVVMNHKGGADFTERVQAVEVNPQNRNQEVSGTYQIEAWTGFNFPGRGNQHSSFKWRWHHFDGTDWDQSRQLANRIYKFRGKAWDWEVDTENGNYDYLMYADVDMDHPDVINELNRWGVWYANTLNLDGFRLDAVKHIKFSFMRDWLGHVRGQTGKNLFAVAEYWKNDLGALNNYLSKTNYTMSAFDVPLHYNLYQASNSSGNYDMRNLLNGTLVQSHPSHAVTFVDNHDTQPGEALESFVQGWFKPLAYATILTREQGYPQVFYGDYYGIPSDGVPSYRQQIDPLLKARQQYAYGRQHDYFDHHDVIGWTREGNASHPNSGLATIMSDGPGGSKTMYVGRQKAGEVWHDMTGNRSGTVTINQDGNGHFSVNKGSVSVWVKR

SEQ ID NO: 33465 - protein, 483 aa, Bacillus sp. (in: firmicutes)
HHDGTNGTIMQYFEWNVPNDGQHWNRLHNNAQNLKNAGITAIWIPPAWKGTSQNDVGYGAYDLYDLGEFNQKGTVRTKYGTKAELERAIRSLKANGIQVYGDVVMNHKGGADFTERVQAVEVNPQNRNQEVSGTYQIEAWTGFNFPGRGNQHSSFKWRWHHFDGTDWDQSRQLANRIYKFRGKAWDWEVDTENGNYDYLMYADVDMDHPDVINELNRWGVWYANTLNLDGFRLDAVKHIKFSFMRDWLGHVRGHTGHNLFAVAEYWKNDLGALNNYLSKTNYTMSAFDVPLHYNLYQASNSSGNYDMRNLLNGTLVQSHPSHAVTFVDNHDTQPGEALESFVQGWFKPLAYATILTREQGYPQVFYGDYYGIPSDGVPSYRQQIDPLLKARQQYAYGRQHDYFDHHDVIGWTREGNASHPNSGLATIMSDGPGGSKTMYVGRQKAGEVWHDMTGNRSGTVTINQDGNGHFSVNKGSVSVWVKR

SEQ ID NO: 33466 - protein, 483 aa, Bacillus sp. (in: firmicutes)
HHDGTNGTIMQYFEWNVPNDGQHWNRLHNNAQNLKNAGITAIWIPPAWKGTSQNDVGYGAYDLYDLGEFNQKGTVRTKYGTKAELERAIRSLKANGIQVYGDVVMNHKGGADFTERVQAVEVNPQNRNQEVSGTYQIEAWTGFNFPGRGNQHSSFKWRWHHFDGTDWDQSRQLANRIYKFRGKAWDWEVDTENGNYDYLMYADVDMDHPDVINELNRWGVWYANTLNLDGFRLDAVKHIKFSFMRDWLGHVRGQTGKNLFAVAEYWKNDLGALNNYLSKTNYTMSAFDVPLHYNLYQASNSSGYYDMRNLLNGTLVQSHPSHAVTFVDNHDTQPGEALESFVQGWFKPLAYATILTREQGYPQVFYGDYYGIPSDGVPSYRQQIDPLLKARQQYAYGRQHDYFDHHDVIGWTREGNASHPNSGLATIMSDGPGGSKTMYVGRQKAGEVWHDMTGNRSGTVTINQDGNGHFSVNKGSVSVWVKR

SEQ ID NO: 33467 - protein, 483 aa, Bacillus sp. (in: firmicutes)
HHDGTNGTIMQYFEWNVPNDGQHWNRLHNNAQNLKNAGITAIWIPPAWKGTSQNDTGYGAYDLYDLGEFNQKGTVRTKYGTKAELERAIRSLKANGIQVYGDVVMNHKGGADFTERVQAVEVNPQNRNQEVSGTYQIEAWTGFNFPGRGNQHSSFKWRWHHFDGTDWDQSRQLNNRIYKFRGKAWDWEVDTENGNYDYLMYADVDMDHPDVINELNRWGVWYANTLNLDGFRLDAVKHIKFSFMRDWLGHVRGQTGKNLFAVAEYWKNDLGALNNYLSKTNYTMSAFDVPLHYNLYQASNSSGNYDMRNLLNGTLVQSHPSHAVTFVDNHDTQPGEALESFVQGWFKPLAYATILTREQGYPQVFYGDYYGIPSDGVPSYRQQIDPLLKARQQYAYGRQHDYFDHHDVIGWTREGNASHPNSGLATIMSDGPGGSKTMYVGRQKAGEVWHDMTGNRSGTVTINQDGNGHFSVNKGSVSVWVKR

SEQ ID NO: 33468 - protein, 483 aa, Bacillus sp. (in: firmicutes)
HHDGTNGTIMQYFEWNVPNDGQHWNRLHNNAQNLKNAGITAIWIPPAWKGTSQNDVGYGAYDLYDLGEFNQKGTVRTKYGTKAELERAIRSLKANGIQVYGDVVMNHKGGADFTERVQAVEVNPQNRNQEVSGTYQIEAWTGFNFPGRGNQHSSFKWRWHHFDGTDWDESRQLANRIYKFRGKAWDWEVDTENGNYDYLMYADVDMDHPDVINELNRWGVWYANTLNLDGFRLDAVKHIKFSFMRDWLGHVRGQTGKNLFAVAEYWKNDLGALNNYLSKTNYTMSAFDVPLHYNLYQASNSSGNYDMRNLLNGTLVQSHPSHAVTFVDNHDTQPGEALESFVQGWFKPLAYATILTREQGYPQVFYGDYYGIPSDGVPSYRQQIDPLLKARQQYAYGRQHDYFDHHDVIGWTREGNASHPNSGLATIMSDGPGGSKTMYVGRQKAGEVWHDMTGNRSGTVTINQDGNGHFSVNKGSVSVWVKR

SEQ ID NO: 33469 - protein, 483 aa, Synthetic construct
HHNGTNGTMMQYFEWYLPNDGQHWKRLQNDASNLASKGITAVWIPPAWKGTSQADVGYGAYDLYDLGEFHQKGTVRTKYGTRSDLQAAIKSLHNNGINVYGDVVMNHKAGADATEDVQAVEVNPNNRNQVITGEYLIKAWTRFDFPGRGNTHSSFKWRWYHFDGVDFDQSRSLNNRIYKFQGKAWDWEVDTENGNYDYLMYADLDMDHPEVVNELRNWGVWYTNTLQLDGFRLDAVKHIKFSFTRDWINHVRSATGKNMFAVAEYWKNDLGAIENYLNFTNWNHSVFDVPLHYNLYAASNSGGNYDMRNIFNGTVVSKHPSHAVTFVDNHDTQPEESLESTVQTWFKPLAYALTLTREQGYPSVFYGDYYGTPTHGIPALKSKIDPILEARQKYAYGAQHDYLDHPDIIGWTREGDSSHPNSGLATLITDGPGGSKRMYAGAKNAGETWYDITGNRSDTVVIGSDGWGTFHVNKGSVSIYVQK

SEQ ID NO: 33470 - protein, 483 aa, Bacillus sp.
HHDGTNGTIMQYFEWNVPNDGQHWNRLHNNAQNLKNAGITAIWIPPAWKGTSQNDVGYGAYDLYDLGEFNQKGTVRTKYGTKAELERAIRSLKANGIQVYGDVVMNHKGGADFTERVQAVEVNPQNRNQEVSGTYQIEAWTGFNFPGRANQHSSFKWRWYHFDGTDWDQSRQLANRIYKFRTKAWDWEVDTENGNYDYLLYADLDMDHPEVINELNRWGVWYANTLNLDGFRLDAVKHIKFSFMRDWLGHVRGQIGKNLFAVAEYWKNDLGALENYLSKTNWTMSAFDVPLHFNLYYASNSSGNYDMRNLLNGTLVQRHPSHAVTFVDNHDTQPGESLESFVRGWFKPLAYATILTREQGYPQVFYGDYYGIPSDGVPSYRQQIDPLLKARQQYAYGRQHDYFDHWDVIGWTREGNASHPNSGLATIMSDGPGGSKWMYVGRQKAGEVWHDMTGNRSGTVTINQDGWGEFFVNGGSVSVWVKR

SEQ ID NO: 33471 - protein, 483 aa, Bacillus sp. (in: firmicutes)
HHDGTNGTIMQYFEWNVPNDGQHWNRLHNNAQNLKNAGITAIWIPPAWKGTSQSDVGYGAYDLYDLGEFNQKGTVRTKYGTKAELERAIRSLKANGIQVYGDVVMNHKGGADFTERVQAVEVNPQNRNQEVSGTYQIEAWTGFNFPGRGNQHSSFKWRWHHFDGTDWDQSRQLANRIYKFRGKAWDWEVDTENGNYDYLMYADVDMDHPDVINELNRWGVWYANTLNLDGFRLDAVKHIKFSFMRDWLGHVRGQTGKNLFAVAEYWKNDLGALNNYLSKTNYTMSAFDVPLHYNLYQASNSSGNYDMRNLLNGTLVQSHPSHAVTFVDNHDTQPGEALESFVQGWFKPLAYATILTREQGYPQVFYGDYYGIPSDGVPSYRQQIDPLLKARQQYAYGRQHDYFDHHDVIGWTREGNASHPNSGLATIMSDGPGGSKTMYVGRQKAGEVWHDMTGNRSGTVTINQDGNGHFSVNKGSVSVWVKR

SEQ ID NO: 33472 - protein, 483 aa, Bacillus sp. (in: firmicutes)
HHDGTNGTIMQYFEWNVPNDGQHWNRLHNNAQNLKNAGITAIWIPPAWKGTSQNDVGYGAYDLYDLGEFNQKGTVRTKYGTKAELERAIRSLKANGIQVYGDVVMNHKGGADFTERVQAVEVNPQNRNQEVSGTYQIEAWTGFNFPGRGNQHSSFKWRWHHFDGTDWDQSRQLANRIYKFRGKAWDWEVDTEFGNYDYLMYADVDMDHPDVINELNRWGVWYANTLNLDGFRLDAVKHIKFSFMRDWLGHVRGQTGKNLFAVAEYWKNDLGALNNYLSKTNYTMSAFDVPLHYNLYQASNSSGNYDMRNLLNGTLVQSHPSHAVTFVDNHDTQPGEALESFVQGWFKPLAYATILTREQGYPQVFYGDYYGIPSDGVPSYRQQIDPLLKARQQYAYGRQHDYFDHHDVIGWTREGNASHPNSGLATIMSDGPGGSKTMYVGRQKAGEVWHDMTGNRSGTVTINQDGNGHFSVNKGSVSVWVKR

SEQ ID NO: 33473 - protein, 483 aa, Bacillus sp. (in: firmicutes)
HHDGTNGTIMQYFEWNVPNDGQHWNRLHNNAQNLKNAGITAIWIPPAWKGTSQNDVGYGAYDLYDLGEFNQKGTVRTKYGTKAELLRAIRSLKANGIQVYGDVVMNHKGGADFTERVQAVEVNPQNRNQEVSGTYQIEAWTGFNFPGRGNQHSSFKWRWHHFDGTDWDQSRQLANRIYKFRGKAWDWEVDTENGNYDYLMYADVDMDHPDVINELNRWGVWYANTLNLDGFRLDAVKHIKFSFMRDWLGHVRGQTGKNLFAVAEYWKNDLGALNNYLSKTNYTMSAFDVPLHYNLYQASNSSGNYDMRNLLNGTLVQSHPSHAVTFVDNHDTQPGEALESFVQGWFKPLAYATILTREQGYPQVFYGDYYGIPSDGVPSYRQQIDPLLKARQQYAYGRQHDYFDHHDVIGWTREGNASHPNSGLATIMSDGPGGSKTMYVGRQKAGEVWHDMTGNRSGTVTINQDGNGHFSVNKGSVSVWVKR

SEQ ID NO: 33474 - protein, 483 aa, Bacillus sp. (in: firmicutes)
HHDGTNGTIMQYFEWNVPNDGQHWNRLHNNAQNLKNAGITAIWIPPAWKGTSQNDVGYGAYDLYDLGEFNQKGTVRTKYGTKAELERAIRSLKANGIQVYGDVVMNHKGGADFTERVQAVEVNPQNRNQEVSGTYQIEAWTGFNFPGRGNQHSSFKWRWHHFDGTDWDQSRQLANRIYKFRGKAWDWEVDTENGNYDYLLYADVDMDHPDVINELNRWGVWYANTLNLDGFRLDAVKHIKFSFMRDWLGHVRGQTGKNLFAVAEYWKNDLGALNNYLSKTNYTMSAFDVPLHYNLYQASNSSGNYDMRNLLNGTLVQSHPSHAVTFVDNHDTQPGEALESFVQGWFKPLAYATILTREQGYPQVFYGDYYGIPSDGVPSYRQQIDPLLKARQQYAYGRQHDYFDHHDVIGWTREGNASHPNSGLATIMSDGPGGSKTMYVGRQKAGEVWHDMTGNRSGTVTINQDGNGHFSVNKGSVSVWVKR

SEQ ID NO: 33475 - protein, 483 aa, Bacillus sp. (in: firmicutes)
HHDGTNGTIMQYFEWNVPNDGQHWNRLHNNAQNLKNAGITAIWIPPAWKGTSQNDVGYGAYDLYDLGEFNQKGTVRTKYGTKAELERAIRSLKANGIQVYGDVVMNHKGGADFTERVQAVEVNPQNRNQEVSGTYQIEAWTGFNFPGRGNQHSSFKWRWHHFDGTDWDQSYQLANRIYKFRGKAWDWEVDTENGNYDYLMYADVDMDHPDVINELNRWGVWYANTLNLDGFRLDAVKHIKFSFMRDWLGHVRGQTGKNLFAVAEYWKNDLGALNNYLSKTNYTMSAFDVPLHYNLYQASNSSGNYDMRNLLNGTLVQSHPSHAVTFVDNHDTQPGEALESFVQGWFKPLAYATILTREQGYPQVFYGDYYGIPSDGVPSYRQQIDPLLKARQQYAYGRQHDYFDHHDVIGWTREGNASHPNSGLATIMSDGPGGSKTMYVGRQKAGEVWHDMTGNRSGTVTINQDGNGHFSVNKGSVSVWVKR

SEQ ID NO: 33476 - protein, 483 aa, Bacillus sp. (in: firmicutes)
HHDGTNGTIMQYFEWNVPNDGQHWNRLHNNAQNLKNAGITAIWIPPAWKGTSQNDVGYGAYDLYDLGEFNQKGTVRTKYGTKAELERAIRSLKANGIQVYGDVVMNHKGGADFTERVQAVEVNPQNRNQEVSGTYQIEAWTGFNFPGRGNQHSSFKWRWHHFDGTDWDQSRQLANRIYKFRGKAWDWEVDTENGNYDYLMYADVDMDHPDVINELNRWGVWYANTLNLDGFRLDAVKHIKFSFMRDWLGHVRGQTGKNLFAVAEYWKNDLGAVNNYLSKTNYTMSAFDVPLHYNLYQASNSSGNYDMRNLLNGTLVQSHPSHAVTFVDNHDTQPGEALESFVQGWFKPLAYATILTREQGYPQVFYGDYYGIPSDGVPSYRQQIDPLLKARQQYAYGRQHDYFDHHDVIGWTREGNASHPNSGLATIMSDGPGGSKTMYVGRQKAGEVWHDMTGNRSGTVTINQDGNGHFSVNKGSVSVWVKR

SEQ ID NO: 33477 - protein, 483 aa, Bacillus sp. (in: firmicutes)
HHDGTNGTIMQYFEWNVPNDGQHWNRLHNNAQNLKNAGITAIWIPPAWKGTSQNDTGYGAYDLYDLGEFNQKGTVRTKYGTKAELERAIRSLKANGIQVYGDVVMNHKGGADFTERVQAVEVNPQNRNQEVSGTYQIEAWTGFNFPGRGNQHSSFKWRWHHFDGTDWDQSRQLANRIYKFRGKAWDWEVDTENGNYDYLMYADVDMDHPDVINELNRWGVWYANTLNLDGFRLDAVKHIKFSFMRDWLGHVRGQTGKNLFAVAEYWKNDLGALNNYLSKTNYTMSAFDVPLHYNLYQASNSSGNYDMRNLLNGTLVQSHPSHAVTFVDNHDTQPGEALESFVQGWFKPLAYATILTREQGYPQVFYGDYYGIPSDGVPSYRQQIDPLLKARQQYAYGRQHDYFDHHDVIGWTREGNASHPNSGLATIMSDGPGGSKTMYVGRQKAGEVWHDMTGNRSGTVTINQDGNGHFSVNKGSVSVWVKR

SEQ ID NO: 33478 - protein, 483 aa, Bacillus sp. (in: firmicutes)
HHDGTNGTIMQYFEWNVPNDGQHWNRLHNNAQNLKNAGITAIWIPPAWKGTSQNDVGYGAYDLYDLGEFNQKGTVRTKYGTKAELERAIRSLKANGIQVYGDVVMNHKGGADFTERVQAVEVNPQNNNQEVSGTYQIEAWTGFNFPGRGNQHSSFKWRWHHFDGTDWDQSRQLANRIYKFRGKAWDWEVDTENGNYDYLMYADVDMDHPDVINELNRWGVWYANTLNLDGFRLDAVKHIKFSFMRDWLGHVRGQTGKNLFAVAEYWKNDLGALNNYLSKTNYTMSAFDVPLHYNLYQASNSSGNYDMRNLLNGTLVQSHPSHAVTFVDNHDTQPGEALESFVQGWFKPLAYATILTREQGYPQVFYGDYYGIPSDGVPSYRQQIDPLLKARQQYAYGRQHDYFDHHDVIGWTREGNASHPNSGLATIMSDGPGGSKTMYVGRQKAGEVWHDMTGNRSGTVTINQDGNGHFSVNKGSVSVWVKR

SEQ ID NO: 33479 - protein, 483 aa, Bacillus sp. (in: firmicutes)
HHDGTNGTIMQYFEWNVPNDGQHWNRLHNNAQNLKNAGITAIWIPPAWKGTSQNDVGYGAYDLYDLGEFNQKGTVRTKYGTKAELERAIRSLKANGIQVYGDVVMNHKGGADFTERVQAVEVNPQNRNQEVSGTYQIEAWTGFNFPGRGNQHSSFKWRWHHFDGTDWDQSRQLANRIYKFRGKAWDWEVDTEQGNYDYLMYADVDMDHPDVINELNRWGVWYANTLNLDGFRLDAVKHIKFSFMRDWLGHVRGQTGKNLFAVAEYWKNDLGALNNYLSKTNYTMSAFDVPLHYNLYQASNSSGNYDMRNLLNGTLVQSHPSHAVTFVDNHDTQPGEALESFVQGWFKPLAYATILTREQGYPQVFYGDYYGIPSDGVPSYRQQIDPLLKARQQYAYGRQHDYFDHHDVIGWTREGNASHPNSGLATIMSDGPGGSKTMYVGRQKAGEVWHDMTGNRSGTVTINQDGNGHFSVNKGSVSVWVKR

SEQ ID NO: 33480 - protein, 483 aa, Bacillus sp. (in: firmicutes)
HHDGTNGTIMQYFEWNVPNDGQHWNRLHNNAQNLKNAGITAIWIPPAWKGTSQNDVGYGAYDLYDLGEFNQKGTVRTKYGTKAELERAIRSLKANGIQVYGDVVMNHKGGADFTERVQAVEVNPQNRNQEVSGTYQIEAWTGFNFPGRGNQHSSFKWRWHHFDGTDWDQSRSLANRIYKFRGKAWDWEVDTENGNYDYLMYADVDMDHPDVINELNRWGVWYANTLNLDGFRLDAVKHIKFSFMRDWLGHVRGQTGKNLFAVAEYWKNDLGALNNYLSKTNYTMSAFDVPLHYNLYQASNSSGNYDMRNLLNGTLVQSHPSHAVTFVDNHDTQPGEALESFVQGWFKPLAYATILTREQGYPQVFYGDYYGIPSDGVPSYRQQIDPLLKARQQYAYGRQHDYFDHHDVIGWTREGNASHPNSGLATIMSDGPGGSKTMYVGRQKAGEVWHDMTGNRSGTVTINQDGNGHFSVNKGSVSVWVKR

SEQ ID NO: 33481 - protein, 483 aa, Bacillus sp. (in: firmicutes)
HHDGTNGTIMQYFEWNVPNDGQHWNRLHNNAQNLKNAGITAIWIPPAWKGTSQNDVGYGAYDLYDLGEFNQKGTVRTKYGTKAELERAIRSLKANGIQVYGDVVMNHKGGADFTERVQAVEVNPQNRNQEVSGTYQIEAWTGFNFPGRGNQHSSFKWRWHHFDGTDWDQSRQLANRIYKFRGKAWDWEVDTENGNYDYLMYADVDMDHPDVINELNRWGVWYANTLNLDGFRLDAVKHIKFSFMRDWLGHVRGQTGKNLFAVAEYWKNDLGALNNYLSKTNYTMSAFDVPLHYNLYQASNSSGRYDMRNLLNGTLVQSHPSHAVTFVDNHDTQPGEALESFVQGWFKPLAYATILTREQGYPQVFYGDYYGIPSDGVPSYRQQIDPLLKARQQYAYGRQHDYFDHHDVIGWTREGNASHPNSGLATIMSDGPGGSKTMYVGRQKAGEVWHDMTGNRSGTVTINQDGNGHFSVNKGSVSVWVKR

SEQ ID NO: 33482 - protein, 483 aa, Bacillus sp.
HHDGTNGTIMQYFEWNVPNDGQHWNRLHNNAQNLKNAGITAIWIPPAWKGTSQNDVGYGAYDLYDLGEFNQKGTVRTKYGTKAELERAIRSLKANGIQVYGDVVMNHKGGADFTERVQAVEVNPQNRNQEVSGTYQIEAWTGFNFPGRANQHSSFKWRWYHFDGTDWDQSRQLANRIYKFRTKAWDWEVDTEFGNYDYLLYADLDMDHPEVINELNRWGVWYANTLNLDGFRLDAVKHIKFSFMRDWLGHVRGQIGKNLFAVAEYWKNDLGALENYLSKTNWTMSAFDVPLHFNLYYASNSSGNYDMRNLLNGTLVQRHPSHAVTFVDNHDTQPGESLESFVRGWFKPLAYATILTREQGYPQVFYGDYYGIPSDGVPSYRQQIDPLLKARQQYAYGRQHDYFDHWDVIGWTREGNASHPNSGLATIMSDGPGGSKWMYVGRQKAGEVWHDMTGNKSGTVTINQDGWGHFFVNGGSVSVWVKR

SEQ ID NO: 33483 - protein, 483 aa, Bacillus sp. (in: firmicutes)
HHDGTNGTIMQYFEWNVPNDGQHWNRLHNNAQNLKNAGITAIWIPPAWKGTSQNDVGYGAYDLYDLGEFNQKGTVRTKYGTKAELERAIRSLKANGIQVYGDVVMNHKGGADFTERVQAVEVNPQNRNQEVSGTYQIEAWTGFNFPGRGNQHSSFKWRWHHFDGTDWDQSRQLANRIYKFRGKAWDWEVDTEYGNYDYLMYADVDMDHPDVINELNRWGVWYANTLNLDGFRLDAVKHIKFSFMRDWLGHVRGQTGKNLFAVAEYWKNDLGALNNYLSKTNYTMSAFDVPLHYNLYQASNSSGNYDMRNLLNGTLVQSHPSHAVTFVDNHDTQPGEALESFVQGWFKPLAYATILTREQGYPQVFYGDYYGIPSDGVPSYRQQIDPLLKARQQYAYGRQHDYFDHHDVIGWTREGNASHPNSGLATIMSDGPGGSKTMYVGRQKAGEVWHDMTGNRSGTVTINQDGNGHFSVNKGSVSVWVKR

SEQ ID NO: 33484 - protein, 483 aa, Bacillus sp. (in: firmicutes)
HHDGTNGTIMQYFEWNVPNDGQHWNRLHNNAQNLKNAGITAIWIPPAWKGTSQNDVGYGAYDLYDLGEFNQKGTVRTKYGTKAELERAIRSLKANGIQVYGDVVMNHKGGADFTERVQAVEVNPQNRNQEVSGTYQIEAWTGFNFPGRGNQHSSFKWRWHHFDGTDWDQSLQLANRIYKFRGKAWDWEVDTENGNYDYLMYADVDMDHPDVINELNRWGVWYANTLNLDGFRLDAVKHIKFSFMRDWLGHVRGQTGKNLFAVAEYWKNDLGALNNYLSKTNYTMSAFDVPLHYNLYQASNSSGNYDMRNLLNGTLVQSHPSHAVTFVDNHDTQPGEALESFVQGWFKPLAYATILTREQGYPQVFYGDYYGIPSDGVPSYRQQIDPLLKARQQYAYGRQHDYFDHHDVIGWTREGNASHPNSGLATIMSDGPGGSKTMYVGRQKAGEVWHDMTGNRSGTVTINQDGNGHFSVNKGSVSVWVKR

SEQ ID NO: 33485 - protein, 483 aa, Bacillus sp. (in: firmicutes)
HHDGTNGTIMQYFEWNVPNDGQHWNRLHNNAQNLKNAGITAIWIPPAWKGTSQNDVGYGAYDLYDLGEFNQKGTVRTKYGTKAELERAIRSLKANGIQVYGDVVMNHKGGADFTERVQAVEVNPQNRNQEVSGTYQIEAWTGFNFPGRGNQHSSFKWRWHHFDGTDWDQSRQLANRIYKFRGKAWDWEVDTENGNYDYLMYADVDMDHPDVINELNRWGVWYANTLNLDGFRLDAVKHIKFSFMRDWLGHVRGQTGGNLFAVAEYWKNDLGALNNYLSKTNYTMSAFDVPLHYNLYQASNSSGNYDMRNLLNGTLVQSHPSHAVTFVDNHDTQPGEALESFVQGWFKPLAYATILTREQGYPQVFYGDYYGIPSDGVPSYRQQIDPLLKARQQYAYGRQHDYFDHHDVIGWTREGNASHPNSGLATIMSDGPGGSKTMYVGRQKAGEVWHDMTGNRSGTVTINQDGNGHFSVNKGSVSVWVKR

SEQ ID NO: 33486 - protein, 482 aa, Bacillus sp. (in: firmicutes)
HDGTNGTIMQYFEWNVPNDGQHWNRLHNNAQNLKNAGITAIWIPPAWKGTSQSDTGYGAYDLYDLGEFNQKGTVRTKYGTKAELERAIRSLKANGIQVYGDVVMNHKAGADFTERVQAVEVNPQNRNQEVSGEYQIEAWTGFNFPGRGNQHSSFKWRWYHFDGTDWDQSRQLSNRIYKFRGKAWDWEVDTEFGNYDYLMYADLDMDHPEVINELNRWGVWYANTLNLDGFRLDAVKHIKFSFMRDWLGHVRGQTGKNLFAVAEYWKNDLGALENYLSKTNWTMSAFDVPLHYNLYQASNSSGNYDMRNLLNGTLVQRHPSHAVTFVDNHDTQPGEALESFVQGWFKPLAYATILTREQGYPQVFYGDYYGIPSDGVPSYRQQIDPLLAARQQYAYGRQHDYFDHWDVIGWTREGNASHPNSGLATIMSDGPGGSKWMYVGRQKAGEVWHDMTGNRSGTVTINQDGWGHFFVNKGSVSVWVKR

SEQ ID NO: 33487 - protein, 482 aa, Synthetic construct
HHNGTNGTMMQYFEWYLPNDGQHWRRLQNDASNLKSKGITAVWIPPAWKGTSQADVGYGAYDLYDLGEFHQKGTVRTKYGTKGELQAAIKSLHNNGINVYGDVVMNHKAGADATEDVTAVEVNPNNRNQVVTGEYLIKAYTHFHFPGRGSTYSDFKWYWYHFDGVDWDQSRSLNRIYKFQGKAWDWPVDTENGNYDYLMYADLDMDHPEVVNELRNWGVWYTNTLGLDGFRIDAVKHIKFSFTRDWINHVRSATGKNMFAVAEYWKNDLGAIENYLNFTNWNHSVFDVPLHYNLYAASNSGGNYDMRNIFNGTVVQKHPSHAVTFVDNHDTQPEESLESFVQPWFKPLAYALILTRESGYPSVFYGDYYGIPTHGVPAMRSKIDPILEARQKYAYGPQHDYLDHPDIIGWTREGDSSHPKSGLATLITDGPGGSKRMYAGLKNAGETWYDITGNRSDTVKIGSDGWGTFHVNKGSVSIYVQK

SEQ ID NO: 33488 - protein, 482 aa, Bacillus sp. (in: firmicutes)
HHDGTNGTMMQYFEWNVPNDGQHWNRLHNNAQNLKNAGITAIWIPPAWKGTSQSDTGYGAYDLYDLGEFNQKGTVRTKYGTKAELERAIRSLKANGIQVYGDVVMNHKAGADFTERVQAVEVNPQNRNQEVSGTYQIEAWTGFNFPGRANQHSSFKWRWYHFDGTDWDESRKLNRIYKFRTKAWDWEVDTEFGNYDYLLYADLDMDHPEVINELNRWGVWYANTLNLDGFRLDAVKHIKFSFMRDWLGHVRGQTGKNLFAVAEYWKNDLGALENYLSKTNWTMSAFDVPLHFNLYYASNSSGNYDMRNLLNGTLVQKHPTHAVTFVDNHDTQPGESLESFVRGWFKPLAYATILTREQGYPSVFYGDYYGIPSDGVPSYRQQIDPLLAARQQYAYGRQHDYFDHWDVIGWTREGNASHPNSGLATIMSDGPGGSKWMYVGRQKAGEVWHDMTGNKSGTVTINQDGWGHFFVNGGSVSVWVKR

SEQ ID NO: 33489 - protein, 482 aa, Bacillus sp. (in: firmicutes)
HDGTNGTIMQYFEWNVPNDGQHWNRLHNNAQNLKNAGITAIWIPPAWKGTSQSDTGYGAYDLYDLGEFNQKGTVRTKYGTKAELERAIRSLKANGIQVYGDVVMNHKAGADFTERVQAVEVNPQNRNQEVSGTYQIEAWTGFNFPGRGNQHSSFKWRWYHFDGTDWDQSHQLANRIYKFRGKAWDWEVDTEFGNYDYLMYADLDMDHPEVINELNRWGVWYANTLNLDGFRLDAVKHIKFSFMRDWLGHVRGQTGKNLFAVAEYWKNDLGALENYLSKTNWTMSAFDVPLHYNLYQASNSSGNYDMRNLLNGTLVQRHPSHAVTFVDNHDTQPGEALESFVQGWFKPLAYATILTREQGYPQVFYGDYYGIPSDGVPSYRQQIDPLLAARQQYAYGRQHDYFDHWDVIGWTREGNASHPNSGLATIMSDGPGGSKWMYVGRQKAGEVWHDMTGNRSGTVTINQDGWGHFFVNGGSVSVWVKR

SEQ ID NO: 33490 - protein, 482 aa, Bacillus sp. (in: firmicutes)
HDGTNGTIMQYFEWNVPNDGQHWNRLHNNAQNLKNAGITAIWIPPAWKGTSQSDTGYGAYDLYDLGEFNQKGTVRTKYGTKAELERAIRSLKANGIQVYGDVVMNHKAGADFTEHVQAVEVNPQNRNQEVSGTYQIEAWTGFNFPGRGNQHSSFKWRWYHFDGTDWDQSRQLSNRIYKFRGKAWDWEVDTEFGNYDYLMYADLDMDHPEVINELNRWGVWYANTLNLDGFRLDAVKHIKFSFMRDWLGHVRGQTGKNLFAVAEYWKNDLGALENYLSKTNWTMSAFDVPLHYNLYQASNSSGNYDMRNLLNGTLVQRHPSHAVTFVDNHDTQPGEALESFVQGWFKPLAYATILTREQGYPQVFYGDYYGIPSDGVPSYRQQIDPLLAARQQYAYGRQHDYFDHWDVIGWTREGNASHPNSGLATIMSDGPGGSKWMYVGRQKAGEVWHDMTGNRSGTVTINQDGWGHFFVNKGSVSVWVKR

SEQ ID NO: 33491 - protein, 482 aa, Bacillus sp. (in: firmicutes)
HHDGTNGTMMQYFEWYVPNDGQHWNRLHNNAQNLKNAGITAIWIPPAWKGTSQSDTGYGAYDLYDLGEFNQKGTVRTKYGTKAELERAIRSLKANGIQVYGDVVMNHKAGADFTEYVTAVEVNPSNRNQEVSGTYEIEAWTGFNFPGRGNQHSSFKWRWHHFDGTDWDESRKLNRIYKFHGKAWDWEVDTEFGNYDYLLYADLDMDHPEVINELNRWGVWYANTLNLDGFRLDAVKHIKFSFMRDWLGHVRGQTGKNLFAVAEYWKNDLGALENYLSKTNWTMSAFDVPLHYNLYQASNSSGNYDMNNLLNGTLVQQHPSHAVTFVDNHDTQPGEALESFVQGWFKPLAYATILTREQGYPSVFYGDYYGIPSDGVPSYRQQIDPLLAARQQYAYGSQHDYFDHHDVIGWTREGNASHPNSGLATIMSDGPGGSKWMYVGTSKAGEVWHDMTGNRSGTVTINSDGWGHFFVNGGSVSVWVKR

SEQ ID NO: 33492 - protein, 479 aa, Synthetic construct
HHDGTNGTLMQYFEWYLPNDGNHWNRLNSDASNLASKGITAVWIPPAYKGTSQSDVGYGAYDLYDLGEFNQKGTVRTKYGTKSQLQAAITSLKNNGIQVYGDVVNHKAGADATEMVNAVEVNPNNRNQEVTGEYTIEAYTRFDFPGRGNTYSSFKWRWYHFDGTDWDQSRSLNNRIYKFQGHGKAWDWPVDTENGNYDYLMYADYDYDHPDVNERNWGVWYTNELGLDGFRLDAVKHIKFSFLRDWINHVRSATGKGMFAVAEYWKNDLGALENYLTYTNWNHSVFDVPLHYNLYAASTSGGNYDMRNIFNGTVVQKHPSHSVTFVDNHDTQPEESLESTVQPWFKPLAYALLTREQGYPSVFYGDYYGIPTHGPALKSKIDPILEARQKYAYGPQHDYLDHPDIGWTREGDSSHPKSGLATLMTDGPGGSKRMYAGLKNAGETWYDITGNRSDTVKIGSDGWGEFHVNKGSVSIYVQK

SEQ ID NO: 33493 - protein, 481 aa, Bacillus sp. (in: firmicutes)
HDGTNGTIMQYFEWNVPNDGQHWNRLHNNAQNLKNAGITAIWIPPAWKGTSQSDTGYGAYDLYDLGEFNQKGTVRTKYGTKAELERAIRSLKANGIQVYGDVVMNHKAGADFTERVQAVEVNPQNRNQEVSGTYQIEAWTGFNFPGRGNQHSSFKWRWYHFDGTDWDESRKLNRIYKFRGKAWDWEVDTEHGNYDYLMYADLDMDHPEVINELNRWGVWYANTLNLDGFRLDAVKHIKFSFMRDWLGHVRGQTGKNLFAVAEYWKNDLGALENYLSKTNWTMSAFDVPLHYNLYQASNSSGNYDMRNLLNGTLVQRHPSHAVTFVDNHDTQPGEALESFVQGWFKPLAYATILTREQGYPQVFYGDYYGIPSDGVPSYRQQIDPLLAARQQYAYGRQHDYFDHWDVIGWTREGNASHPNSGLATIMSDGPGGSKWMYVGRQKAGEVWHDMTGNRSGTVTINQDGWGHFFVNGGSVSVWVKR

SEQ ID NO: 33494 - protein, 481 aa, Bacillus sp. (in: firmicutes)
HDGTNGTIMQYFEWNVPNDGQHWNRLHNNAQNLKNAGITAIWIPPAWKGTSQSDTGYGAYDLYDLGEFNQKGTVRTKYGTKAELERAIRSLKANGIQVYGDVVMNHKAGADFTERVQAVEVNPQNRNQEVSGTYQIEAWTGFNFPGRGNQHSSFKWRWYHFDGTDWDESRKLNRIYKFRGKAWDWEVDTEFGNYDYLMYADLDMDHPEVINELNRWGVWYANTLNLDGFRLDAVKHIKFSFMRDWLGHVRGQTGKNLFAVAEYWKNDLGALENYLSKTNWTMSAFDVPLHYNLYQASNSSGNYDMRRLLNGTLVQRHPSHAVTFVDNHDTQPGEALESFVQGWFKPLAYATILTREQGYPQVFYGDYYGIPSDGVPSYRQQIDPLLAARQQYAYGRQHDYFDHWDVIGWTREGNASHPNSGLATIMSDGPGGSKWMYVGRQKAGEVWHDMTGNRSGTVTINQDGWGHFFVNGGSVSVWVKR

SEQ ID NO: 33495 - protein, 481 aa, Bacillus sp. (in: firmicutes)
HDGTNGTIMQYFEWNVPNDGQHWNRLHNNAQNLKNAGITAIWIPPAWKGTSQSDTGYGAYDLYDLGEFNQKGTVRTKYGTKAELERAIRSLKANGIQVYGDVVMNHKAGADFTERVQAVEVNPQNRNQEVSGTYQIEAWTGFNFPGRGNQHSSFKWRWYHFDGTDWDESRKLNRIYKFRGKAWDWEVDTEFGNYDYLMYADLDMDHPEVINELNRWGVWYANTLNLDGFRLDAVKHIKFSFMRDWLGHVRGQTGKNLFAVAEYWKNDLGALENYLSKTNWTMSAFDVPLHYNLYQASNSSGNYDMRNLLNGTLVQRHPSHAVTFVDNHDTQPGEALESFVQGWFKPLAYATILTREQGYPCVFYGDYYGIPSDGVPSYRQQIDPLLAARQQYAYGRQHDYFDHWDVIGWTREGNASHPNSGLATIMSDGPGGSKWMYVGRQKAGEVWHDMTGNRSGTVTINQDGWGHFFVNGGSVSVWVKR

SEQ ID NO: 33496 - protein, 481 aa, Bacillus sp. (in: firmicutes)
HDGTNGTMMQYFEWYVPNDGQHWNRLHNNAQNLKNAGITAIWIPPAWKGTSQSDTGYGAYDLYDLGEFNQKGTVRTKYGTKAELERAIRSLKANGIQVYGDVVMNHKAGADFTEYVTAVEVNPSNRNQEVSGTYEIEAWTGFNFPGRGNQHSSFKWRWHHFDGTDWDESRKLNRIYKFHGKAWDWEVDTEFGNYDYLLYADLDMDHPEVINELNRWGVWYANTLNLDGFRLDAVKHIKFSFMRDWLGHVRGQTGKNLFAVAEYWKNDLGALENYLSKTNWTMSAFDVPLHYNLYQASNSSGNYDMNNLLNGTLVQQHPSHAVTFVDNHDTQPGEALESFVQGWFKPLAYATILTREQGYPSVFYGDYYGIPSDGVPSYRQQIDPLLAARQQYAYGSQHDYFDHHDVIGWTREGNASHPNSGLATIMSDGPGGSKWMYVGTSKAGEVWHDMTGNRSGTVTINSDGWGHFFVNGGSVSVWVKR

SEQ ID NO: 33497 - protein, 481 aa, Bacillus sp. (in: firmicutes)
HDGTNGTIMQYFEWYVPNDGQHWNRLHNNAQNLKNAGITAIWIPPAWKGTSQSDTGYGAYDLYDLGEFNQKGTVRTKYGTKAELERAIRSLKANGIQVYGDVVMNHKAGADFTERVQAVEVNPQNRNQEVSGTYQIEAWTGFNFPGRGNQHSSFKWRWYHFDGTDWDESRKLNRIYKFRGKAWDWEVDTEFGNYDYLMYADLDMDHPEVINELNRWGVWYANTLNLDGFRLDAVKHIKFSFMRDWLGHVRGQTGKNLFAVAEYWKNDLGALENYLSKTNWTMSAFDVPLHYNLYQASNSSGNYDMRNLLNGTLVQRHPSHAVTFVDNHDTQPGEALESFVQGWFKPLAYATILTREQGYPQVFYGDYYGIPSDGVPSYRQQIDPLLAARQQYAYGRQHDYFDHWDVIGWTREGNASHPNSGLATIMSDGPGGSKWMYVGRQKAGEVWHDMTGNRSGTVTINQDGWGHFFVNGGSVSVWVKR

SEQ ID NO: 33498 - protein, 481 aa, Bacillus sp. (in: firmicutes)
HDGTNGTIMQYFEWNVPNDGQHWNRLHNNAQNLKNAGITAIWIPPAWKGTSQSDTGYGAYDLYDLGEFNQKGTVRTKYGTKAELERAIRSLKANGIQVYGDVVMNHKAGADFTERVQAVEVNPQNRNQEVSGTYQIEAWTGFNFPGRGNQHSSFKWRWYHFDGTDWDESRKLNRIYKFRGKAWDWEVDTEFGNYDYLMYADLDMDHPEVINELNRWGVWYANTLNLDGFRLDAVKHIKFSFMRDWLGHVRGQTGKNLFAVAEYWKNDLGALENYLSKTNWTMSAFDVPLHYNLYQASNSSGNYDMRNLLNGTLVQRHPSHAVTFVDNHDTQPGEALESFVQGWFKPLAYATILTREQGYPEVFYGDYYGIPSDGVPSYRQQIDPLLAARQQYAYGRQHDYFDHWDVIGWTREGNASHPNSGLATIMSDGPGGSKWMYVGRQKAGEVWHDMTGNRSGTVTINQDGWGHFFVNGGSVSVWVKR

SEQ ID NO: 33499 - protein, 481 aa, Bacillus sp. (in: firmicutes)
HDGTNGTIMQYFEWNVPNDGQHWNRLHNNAQNLKNAGITAIWIPPAWKGTSQSDTGYGAYDLYDLGEFNQKGTVRTKYGTKAELERAIRSLKANGIQVYGDVVMNHKAGADFTERVQAVEVNPQNRNQEVSGTYQIEAWTGFNFPGRGNQHSSFKWRWYHFDGTDWDESRKLNRIYKFRGKAWDWEVDTEFGNYDYLMYADLDMDHPEVINELNRWGVWYANTLNLDGFRLDAVKHIKFSFLRDWLGHVRGQTGKNLFAVAEYWKNDLGALENYLSKTNWTMSAFDVPLHYNLYQASNSSGNYDMRNLLNGTLVQRHPSHAVTFVDNHDTQPGEALESFVQGWFKPLAYATILTREQGYPQVFYGDYYGIPSDGVPSYRQQIDPLLAARQQYAYGRQHDYFDHWDVIGWTREGNASHPNSGLATIMSDGPGGSKWMYVGRQKAGEVWHDMTGNRSGTVTINQDGWGHFFVNGGSVSVWVKR

SEQ ID NO: 33500 - protein, 481 aa, Bacillus sp. (in: firmicutes)
HDGTNGTIMQYFEWNVPNDGQHWNRLHNNAQNLKNAGITAIWIPPAWKGTSQSDTGYGAYDLYDLGEFNQKGTVRTKYGTKAELERAIRSLKANGIQVYGDVVMNHKAGADFTEFVQAVEVNPQNRNQEVSGTYQIEAWTGFNFPGRGNQHSSFKWRWYHFDGTDWDESRKLNRIYKFRGKAWDWEVDTEFGNYDYLMYADLDMDHPEVINELNRWGVWYANTLNLDGFRLDAVKHIKFSFMRDWLGHVRGQTGKNLFAVAEYWKNDLGALENYLSKTNWTMSAFDVPLHYNLYQASNSSGNYDMRNLLNGTLVQRHPSHAVTFVDNHDTQPGEALESFVQGWFKPLAYATILTREQGYPQVFYGDYYGIPSDGVPSYRQQIDPLLAARQQYAYGRQHDYFDHWDVIGWTREGNASHPNSGLATIMSDGPGGSKWMYVGRQKAGEVWHDMTGNRSGTVTINQDGWGHFFVNGGSVSVWVKR

SEQ ID NO: 33501 - protein, 481 aa, Bacillus sp. (in: firmicutes)
HDGTNGTIMQYFEWNVPNDGQHWNRLHNNAQNLKNAGITAIWIPPAWKGTSQSDTGYGAYDLYDLGEFNQKGTVRTKYGTKAELERAIRSLKANGIQVYGDVVMNHKAGADFTERVQAVEVNPGNRNQEVSGTYQIEAWTGFNFPGRGNQHSSFKWRWYHFDGTDWDESRKLNRIYKFRGKAWDWEVDTEFGNYDYLMYADLDMDHPEVINELNRWGVWYANTLNLDGFRLDAVKHIKFSFMRDWLGHVRGQTGKNLFAVAEYWKNDLGALENYLSKTNWTMSAFDVPLHYNLYQASNSSGNYDMRNLLNGTLVQRHPSHAVTFVDNHDTQPGEALESFVQGWFKPLAYATILTREQGYPQVFYGDYYGIPSDGVPSYRQQIDPLLAARQQYAYGRQHDYFDHWDVIGWTREGNASHPNSGLATIMSDGPGGSKWMYVGRQKAGEVWHDMTGNRSGTVTINQDGWGHFFVNGGSVSVWVKR

SEQ ID NO: 33502 - protein, 481 aa, Bacillus sp. (in: firmicutes)
HDGTNGTIMQYFEWNVPNDGQHWNRLHNNAQNLKNAGITAIWIPPAWKGTSQSDTGYGAYDLYDLGEFNQKGTVRTKYGTKAELERAIRSLKANGIQVYGDVVMNHKAGADFTERVQAVEVNPQNRNQEVSGPYQIEAWTGFNFPGRGNQHSSFKWRWYHFDGTDWDESRKLNRIYKFRGKAWDWEVDTEFGNYDYLMYADLDMDHPEVINELNRWGVWYANTLNLDGFRLDAVKHIKFSFMRDWLGHVRGQTGKNLFAVAEYWKNDLGALENYLSKTNWTMSAFDVPLHYNLYQASNSSGNYDMRNLLNGTLVQRHPSHAVTFVDNHDTQPGEALESFVQGWFKPLAYATILTREQGYPQVFYGDYYGIPSDGVPSYRQQIDPLLAARQQYAYGRQHDYFDHWDVIGWTREGNASHPNSGLATIMSDGPGGSKWMYVGRQKAGEVWHDMTGNRSGTVTINQDGWGHFFVNGGSVSVWVKR

SEQ ID NO: 33503 - protein, 481 aa, Bacillus sp. (in: firmicutes)
HDGTNGTIMQYFEWNVPNDGQHWNRLHNNAQNLKNAGITAIWIPPAWKGTSQSDVGYGAYDLYDLGEFNQKGTVRTKYGTKAELERAIRSLKANGIQVYGDVVMNHKAGADFTERVQAVEVNPQNRNQEVSGTYQIEAWTGFNFPGRGNQHSSFKWRWYHFDGTDWDESRKLNRIYKFRGKAWDWEVDTEFGNYDYLMYADLDMDHPEVINELNRWGVWYANTLNLDGFRLDAVKHIKFSFMRDWLGHVRGQTGKNLFAVAEYWKNDLGALENYLSKTNWTMSAFDVPIHYNLYQASNSSGNYDMRNLLNGTLVQRHPSHAVTFVDNHDTQPGEALESFVQGWFKPLAYATILTREQGYPQVFYGDYYGIPSDGVPSYRQQIDPLLAARQQYAYGRQHDYFDHWDVIGWTREGNASHPNSGLATIMSDGPGGSKWMYVGRQKAGEVWHDMTGNRSGTVTINQDGWGHFFVNGGSVSVWVKR

SEQ ID NO: 33504 - protein, 481 aa, Bacillus sp. (in: firmicutes)
HDGTNGTIMQYFEWNVPNDGQHWNRLHNNAQNLKNAGITAIWIPPAWKGTSQSDTGYGAYDLYDLGEFNQKGTVRTKYGTKAELERAIRSLKANGIQVYGDVVMNHKAGADFTEDVTAVEVNPQNRNQEVSGTYQIEAWTGFNFPGRGNQHSSFKWRWYHFDGTDWDESRKLNRIYKFRGKAWDWEVDTEFGNYDYLMYADLDMDHPEVINELNRWGVWYANTLNLDGFRLDAVKHIKFSFMRDWLGHVRGQTGKNLFAVAEYWKNDLGALENYLSKTNWTMSAFDVPLHYNLYQASNSSGNYDMRNLLNGTLVQRHPSHAVTFVDNHDTQPGEALESFVQGWFKPLAYATILTREQGYPQVFYGDYYGIPSDGVPSYRQQIDPLLAARQQYAYGRQHDYFDHWDVIGWTREGNASHPNSGLATIMSDGPGGSKWMYVGRQKAGEVWHDMTGNRSGTVTINQDGWGHFFVNGGSVSVWVKR

SEQ ID NO: 33505 - protein, 481 aa, Bacillus sp. (in: firmicutes)
HDGTNGTIMQYFEWNVPNDGQHWNRLHNNAQNLKNAGITAIWIPPAWKGTSQSDTGYGAYDLYDLGEFNQKGTVRTKYGTKAELERAIRSLKANGIQVYGDVVMNHKAGADFTERVQAVEVNPQNRNQEVSGTYQIEAWTGFNFPGRGNQHSSFKWRWYHFDGTDWDESRKLNRIYKFRGKAWDWEVDTEFGNYDYLMYADLDMDHPEVINELNRWGVWYANTLNLDGFRLDAVKHIKFSFMRDWLGHVRGQTGKNLFAVAEYWKNDLGALENYLSKTNWTMSAFDVPLHYNLYQASNSSGNYDMRNLLNGTLVQRHPSHAVTFVDNHDTQPGEALESFVQGWFKPLAYATILTREQGYPHVFYGDYYGIPSDGVPSYRQQIDPLLAARQQYAYGRQHDYFDHWDVIGWTREGNASHPNSGLATIMSDGPGGSKWMYVGRQKAGEVWHDMTGNRSGTVTINQDGWGHFFVNGGSVSVWVKR

SEQ ID NO: 33506 - protein, 481 aa, Bacillus sp. (in: firmicutes)
HDGTNGTIMQYFEWNVPNDGQHWNRLHNNAQNLKNAGITAIWIPPAWKGTSQSDTGYGAYDLYDLGEFNQKGTVRTKYGTKAELERAIRSLKANGIQVYGDVVMNHKAGADFTERVQAVEVNPQNRNQEVSGTYQIEAWTGFNFPGRGNQHSSFKWRWYHFDGTDWDESRKLNRIYKFRGKAWDWEVDTEFGNYDYLMYADLDMDHPEVINELNRWGVWYANTLNLDGFRIDAAKHIKFSFMRDWLGHVRGQTGKNLFAVAEYWKNDLGALENYLSKTNWTMSAFDVPLHYNLYQASNSSGNYDMRNLLNGTLVQRHPSHAVTFVDNHDTQPGEALESFVQGWFKPLAYATILTREQGYPQVFYGDYYGIPSDGVPSYRQQIDPLLAARQQYAYGRQHDYFDHWDVIGWTREGNASHPNSGLATIMSDGPGGSKWMYVGRQKAGEVWHDMTGNRSGTVTINQDGWGHFFVNGGSVSVWVKR

SEQ ID NO: 33507 - protein, 481 aa, Bacillus sp. (in: firmicutes)
HDGTNGTIMQYFEWNVPNDGQHWNRLHNNAQNLKNAGITAIWIPPAWKGTSQSDTGYGAYDLYDLGEFNQKGTVRTKYGTKAELERAIRSLKANGIQVYGDVVMNHKAGADFTERVQAVEVNPQNRNQEVSGTYQIEAWTHFHFPGRGNQHSSFKWRWYHFDGTDWDESRKLNRIYKFRGKAWDWEVDTEFGNYDYLMYADLDMDHPEVINELNRWGVWYANTLNLDGFRLDAVKHIKFSFMRDWLGHVRGQTGKNLFAVAEYWKNDLGALENYLSKTNWTMSAFDVPLHYNLYQASNSSGNYDMRNLLNGTLVQRHPSHAVTFVDNHDTQPGEALESFVQGWFKPLAYATILTREQGYPQVFYGDYYGIPSDGVPSYRQQIDPLLAARQQYAYGRQHDYFDHWDVIGWTREGNASHPNSGLATIMSDGPGGSKWMYVGRQKAGEVWHDMTGNRSGTVTINQDGWGHFFVNGGSVSVWVKR

SEQ ID NO: 33508 - protein, 481 aa, Bacillus sp. (in: firmicutes)
HDGTNGTIMQYFEWNVPNDGQHWNRLHNNAQNLKNAGITAIWIPPAWKGTSQSDTGYGAYDLYDLGEFNQKGTVRTKYGTKAELERAIRSLKANGIQVYGDVVMNHKAGADFTERVQAVEVNPQNRNQEVSGTYQIEAWTGFNFPGRGNQHSSFKWRWYHFDGTDWDESRKLNRIYKFRGKAWDWEVDTEFGNYDYLMYADVDMNHPEVINELNRWGVWYANTLNLDGFRLDAVKHIKFSFMRDWLGHVRGQTGKNLFAVAEYWKNDLGALENYLSKTNWTMSAFDVPLHYNLYQASNSSGNYDMRNLLNGTLVQRHPSHAVTFVDNHDTQPGEALESFVQGWFKPLAYATILTREQGYPQVFYGDYYGIPSDGVPSYRQQIDPLLAARQQYAYGRQHDYFDHWDVIGWTREGNASHPNSGLATIMSDGPGGSKWMYVGRQKAGEVWHDMTGNRSGTVTINQDGWGHFFVNGGSVSVWVKR

SEQ ID NO: 33509 - protein, 481 aa, Bacillus sp. (in: firmicutes)
HDGTNGTIMQYFEWNVPNDGQHWNRLHNNAQNLKNAGITAIWIPPAWKGTSQSDTGYGAYDLYDLGEFNQKGTVRTKYGTKAELERAIRSLKANGIQVYGDVVMNHKAGADFTERVQAVEVNPQNRNQEVSGTYQIEAWTGFNFPGRGNQHSSFKWRWYHFDGTDWDESRKLNRIYKFRGKAWDWEVDTEFGNYDYLMYADLDMDHPEVINELNRWGVWYANTLNLDGFRLDAVKHIKFSFMRDWLGHVRGQTGKNLFAVAEYWKNDLGALENYLSKTNWTMSAFDVPLHYNLYQASNSSGNYDMRNLLNGTLVQRHPSHAVTFVDNHDTQPGEALESFVQGWFKPLAYATILTREQGYPAVFYGDYYGIPSDGVPSYRQQIDPLLAARQQYAYGRQHDYFDHWDVIGWTREGNASHPNSGLATIMSDGPGGSKWMYVGRQKAGEVWHDMTGNRSGTVTINQDGWGHFFVNGGSVSVWVKR

SEQ ID NO: 33510 - protein, 481 aa, Bacillus sp. (in: firmicutes)
HDGTNGTIMQYFEWNVPNDGQHWNRLHNNAQNLKNAGITAIWIPPAWKGTSQSDTGYGAYDLYDLGEFNQKGTVRTKYGTKAELERAIRSLKANGIQVYGDVVMNHKAGADFTERVQAVEVNPQNRNQEVSGTYQIEAWTGFNFPGRGNQHSSFKWRWYHFDGTDWDESRKLNRIYKFRGKAWDWEVDTEFGNYDYLLYADLDMDHPEVINELNRWGVWYANTLNLDGFRLDAVKHIKFSFMRDWLGHVRGQTGKNLFAVAEYWKNDLGALENYLSKTNWTMSAFDVPLHYNLYQASNSSGNYDMRNLLNGTLVQRHPSHAVTFVDNHDTQPGEALESFVQGWFKPLAYATILTREQGYPSVFYGDYYGIPSDGVPSYRQQIDPLLAARQQYAYGRQHDYFDHWDVIGWTREGNASHPNSGLATIMSDGPGGSKWMYVGRQKAGEVWHDMTGNRSGTVTINQDGWGHFFVNGGSVSVWVKR

SEQ ID NO: 33511 - protein, 481 aa, Bacillus sp. (in: firmicutes)
HDGTNGTIMQYFEWNVPNDGQHWNRLHNNAQNLKNAGITAIWIPPAWKGTSQSDTGYGAYDLYDLGEFNQKGTVRTKYGTKAELERAIRSLKANGIQVYGDVVMNHKAGADFTERVQAVEVNPQNRNQEVSGTYQIEAWTGFNFPGRGNQHSSFKWRWYHFDGTDWDESRKLNRIYKFRGKAWDWEVDTEFGNYDYLMYADLDMDHPEVINELNRWGVWYANTLNLDGFRLDAVKHIKFSFMRDWLGHVRGQTGKNLFAVAEYWKNDLGALENYLSKTNWTMSAFDVPLHYNLYQASNSSGNYDMRNLLNGTLVQRHPSHAVTFVDNHDTQPGEALESFVQGWFKPLAYATILTREQGYPQVFYGDYYGIPSDGVPSYRQQIDPLLAARQQYAYGRQHDYFDHWDVIGWTREGNASHPNSGLATIMSDGPGGSKWMYVGRQKAGEVWHDMTGNRSGTVTINQDGWGHFFVNGGSVSVWVKR

SEQ ID NO: 33512 - protein, 481 aa, Bacillus sp. (in: firmicutes)
HDGTNGTMMQYFEWNVPNDGQHWNRLHNNAQNLKNAGITAIWIPPAWKGTSQSDTGYGAYDLYDLGEFNQKGTVRTKYGTKAELERAIRSLKANGIQVYGDVVMNHKAGADFTERVQAVEVNPQNRNQEVSGTYQIEAWTGFNFPGRGNQHSSFKWRWYHFDGTDWDESRKLNRIYKFRGKAWDWEVDTEFGNYDYLLYADLDMDHPEVINELNRWGVWYANTLNLDGFRLDAVKHIKFSFMRDWLGHVRGQTGKNLFAVAEYWKNDLGALENYLSKTNWTMSAFDVPLHYNLYQASNSSGNYDMRNLLNGTLVQRHPSHAVTFVDNHDTQPGEALESFVQGWFKPLAYATILTREQGYPQVFYGDYYGIPSDGVPSYRQQIDPLLAARQQYAYGRQHDYFDHWDVIGWTREGNASHPNSGLATIMSDGPGGSKWMYVGRQKAGEVWHDMTGNRSGTVTINQDGWGHFFVNGGSVSVWVKR

SEQ ID NO: 33513 - protein, 481 aa, Bacillus sp. (in: firmicutes)
HDGTNGTIMQYFEWNVPNDGQHWNRLHNNAQNLKNAGITAIWIPPAWKGTSQSDTGYGAYDLYDLGEFNQKGTVRTKYGTKAELERAIRSLKANGIQVYGDVVMNHKAGADFTERVQAVEVNPQNRNQEVSGTYQIEAWTGFNFPGRGNQHSSFKWRWYHFDGTDWDESRKLNRIYKFRGKAWDWEVDTEFGNYDYLMYADLDMDHPEVINELNRWGVWYANTLNLDGFRLDAVKHIKFSFMRDWLGHVRGQTGKNLFAVAEYWKNDLGALENYLSKTNWTMSAFDVPLHYNLYYASNSSGNYDMRNLLNGTLVQRHPSHAVTFVDNHDTQPGEALESFVQGWFKPLAYATILTREQGYPQVFYGDYYGIPSDGVPSYRQQIDPLLAARQQYAYGRQHDYFDHWDVIGWTREGNASHPNSGLATIMSDGPGGSKWMYVGRQKAGEVWHDMTGNRSGTVTINQDGWGHFFVNGGSVSVWVKR

SEQ ID NO: 33514 - protein, 481 aa, Bacillus sp. (in: firmicutes)
HDGTNGTIMQYFEWNVPNDGQHWNRLHNNAQNLKNAGITAIWIPPAWKGTSQSDTGYGAYDLYDLGEFNQKGTVRTKYGTKAELERAINSLKANGIQVYGDVVMNHKAGADFTERVQAVEVNPQNRNQEVSGTYQIEAWTGFNFPGRGNQHSSFKWRWYHFDGTDWDESRKLNRIYKFRGKAWDWEVDTEFGNYDYLMYADLDMDHPEVINELNRWGVWYANTLNLDGFRLDAVKHIKFSFMRDWLGHVRGQTGKNLFAVAEYWKNDLGALENYLSKTNWTMSAFDVPLHYNLYQASNSSGNYDMRNLLNGTLVQRHPSHAVTFVDNHDTQPGEALESFVQGWFKPLAYATILTREQGYPQVFYGDYYGIPSDGVPSYRQQIDPLLAARQQYAYGRQHDYFDHWDVIGWTREGNASHPNSGLATIMSDGPGGSKWMYVGRQKAGEVWHDMTGNRSGTVTINQDGWGHFFVNGGSVSVWVKR

SEQ ID NO: 33515 - protein, 481 aa, Bacillus sp. (in: firmicutes)
HDGTNGTIMQYFEWNVPNDGQHWNRLHNNAQNLKNAGITAIWIPPAWKGTSQSDTGYGAYDLYDLGEFNQKGTVRTKYGTKAELERAIRSLKANGIQVYGDVVMNHKAGADFTERVQAVEVNPQNRNQEVSGTYQIEAWTGFNFPGRGNQHSSFKWRWYHFDGTDWDESRKLNRIYKFRGKAWDWEVDTEDGNYDYLMYADLDMDHPEVINELNRWGVWYANTLNLDGFRLDAVKHIKFSFMRDWLGHVRGQTGKNLFAVAEYWKNDLGALENYLSKTNWTMSAFDVPLHYNLYQASNSSGNYDMRNLLNGTLVQRHPSHAVTFVDNHDTQPGEALESFVQGWFKPLAYATILTREQGYPQVFYGDYYGIPSDGVPSYRQQIDPLLAARQQYAYGRQHDYFDHWDVIGWTREGNASHPNSGLATIMSDGPGGSKWMYVGRQKAGEVWHDMTGNRSGTVTINQDGWGHFFVNGGSVSVWVKR

SEQ ID NO: 33516 - protein, 481 aa, Bacillus sp. (in: firmicutes)
HDGTNGTIMQYFEWNVPNDGQHWNRLHNNAQNLKNAGITAIWIPPAWKGTSQSDTGYGAYDLYDLGEFNQKGTVRTKYGTKAELERAIRSLKANGIQVYGDVVMNHKAGADFTERVNAVEVNPQNRNQEVSGTYQIEAWTGFNFPGRGNQHSSFKWRWYHFDGTDWDESRKLNRIYKFRGKAWDWEVDTEFGNYDYLMYADLDMDHPEVINELNRWGVWYANTLNLDGFRLDAVKHIKFSFMRDWLGHVRGQTGKNLFAVAEYWKNDLGALENYLSKTNWTMSAFDVPLHYNLYQASNSSGNYDMRNLLNGTLVQRHPSHAVTFVDNHDTQPGEALESFVQGWFKPLAYATILTREQGYPQVFYGDYYGIPSDGVPSYRQQIDPLLAARQQYAYGRQHDYFDHWDVIGWTREGNASHPNSGLATIMSDGPGGSKWMYVGRQKAGEVWHDMTGNRSGTVTINQDGWGHFFVNGGSVSVWVKR

SEQ ID NO: 33517 - protein, 481 aa, Bacillus sp. (in: firmicutes)
HDGTNGTMMQYFEWNVPNDGQHWNRLHNNAQNLKNAGITAIWIPPAWKGTSQSDTGYGAYDLYDLGEFNQKGTVRTKYGTKAELERAIRSLKANGIQVYGDVVMNHKAGADFTERVQAVEVNPQNRNQEVSGTYQIEAWTGFNFPGRANQHSSFKWRWYHFDGTDWDESRKLNRIYKFRTKAWDWEVDTEFGNYDYLLYADLDMDHPEVINELNRWGVWYANTLNLDGFRLDAVKHIKFSFMRDWLGHVRGQTGKNLFAVAEYWKNDLGALENYLSKTNWTMSAFDVPLHFNLYYASNSSGNYDMRNLLNGTLVQKHPTHAVTFVDNHDTQPGESLESFVRGWFKPLAYATILTREQGYPSVFYGDYYGIPSDGVPSYRQQIDPLLAARQQYAYGRQHDYFDHWDVIGWTREGNASHPNSGLATIMSDGPGGSKWMYVGRQKAGEVWHDMTGNKSGTVTINQDGWGHFFVNGGSVSVWVKR

SEQ ID NO: 33518 - protein, 482 aa, Bacillus sp. (in: firmicutes)
HDGTNGTIMQYFEWNVPNDGQHWNRLHNNAQNLKNAGITAIWIPPAWKGTSQSDTGYGAYDLYDLGEFNQKGTVRTKYGTKAELERAIRSLKANGIQVYGDVVMNHKAGADFTERVQAVEVNPQNRNQEVSGTYQIEAWTGFNFPGRGNQHSSFKWRWYHFDGTDWDESRKLNRIYKFRGKKAWDWEVDTEFGNYDYLMYADLDMDHPEVINELNRWGVWYANTLNLDGFRLDAVKHIKFSFMRDWLGHVRGQTGKNLFAVAEYWKNDLGALENYLSKTNWTMSAFDVPLHYNLYQASNSSGNYDMRNLLNGTLVQRHPSHAVTFVDNHDTQPGEALESFVQGWFKPLAYATILTREQGYPQVFYGDYYGIPSDGVPSYRQQIDPLLAARQQYAYGRQHDYFDHWDVIGWTREGNASHPNSGLATIMSDGPGGSKWMYVGRQKAGEVWHDMTGNRSGTVTINQDGWGHFFVNGGSVSVWVKR

SEQ ID NO: 33519 - protein, 482 aa, Bacillus sp. (in: firmicutes)
HDGTNGTIMQYFEWNVPNDGQHWNRLHNNAQNLKNAGITAIWIPPAWKGTSQSDTGYGAYDLYDLGEFNQKGTVRTKYGTKAELERAIRSLKANGIQVYGDVVMNHKAGADFTERVQAVEVNPQNRNQEVSGTYQIEAWTGFNFPGRGNQHSSFKWRWYHFDGTDWDESRKLNRIYKFRGHKAWDWEVDTEFGNYDYLMYADLDMDHPEVINELNRWGVWYANTLNLDGFRLDAVKHIKFSFMRDWLGHVRGQTGKNLFAVAEYWKNDLGALENYLSKTNWTMSAFDVPLHYNLYQASNSSGNYDMRNLLNGTLVQRHPSHAVTFVDNHDTQPGEALESFVQGWFKPLAYATILTREQGYPQVFYGDYYGIPSDGVPSYRQQIDPLLAARQQYAYGRQHDYFDHWDVIGWTREGNASHPNSGLATIMSDGPGGSKWMYVGRQKAGEVWHDMTGNRSGTVTINQDGWGHFFVNGGSVSVWVKR

SEQ ID NO: 33520 - protein, 481 aa, Bacillus licheniformis
LNGTLMQYFEWYMPNDGQHWRRLQNDSAYLAEHGITAVWIPPAYKGTSQADVGYGAYDLYDLGEFHQKGTVRTKYGTKGELQSAIKSLHSRDINVYGDVVINHKGGADATEDVTAVEVDPADRNRVISGEHLIKAWTHFHFPGRGSTYSDFKWHWYHFDGTDWDESRKLNRIYLFQGKAWDWPVSNENGNYDYLMYADYDYDYPDVAAEITRWGTWYANELQLDGFRLDAVKHIKFSFLRDWVNHVREKTGKEMFTVAEYWQNDLGALENYLNKTNFNHSVFDVPLHYQFHAASTQGGGYDMRKLLNGTVVSFHPLKSVTFVDNHDTQPGQSLESTVQTWFKPLAYAFILTRESGYPSVFYGDMYGTKGDSQREIPALKHKIEPILKARKQYAYGAQHDYFDHHDIVGWTREGVSSVANSGLAALITDGPGGAKWMYVGRQNAGETWHDITGNRSEPVVINSEGWGEFHVNGGSVSIYVQR

SEQ ID NO: 33521 - protein, 481 aa, Bacillus licheniformis
LNGTLMQYFEWYMPNDGQHWRRLQNDSAYLAEHGITAVWIPPAYKGTSQADVGYGAYDLYDLGEFHQKGTVRTKYGTKGELQSAIKSLHSRDINVYGDVVINHKGGADATEDVTAVEVDPADRNRVISGEHLIKAWTHFHFPGRGSTYSDFKWHWYHFDGTDWDESRKLNRIYLFQGKAWDWPVSNENGNYDYLMYADYDYDYPDVAAEITRWGTWYANELQLDGFRLDAVKHIKFSFLRDWVNHVREKTGKEMFTVAEYWQNDLGALENYLNKTNFNHSVFDVPLHYQFHAASTQGGGYDMRKLLNGTVVSLHPLKSVTFVDNHDTQPGQSLESTVQTWFKPLAYAFILTRESGYPSVFYGDMYGTKGDSQREIPALKHKIEPILKARKQYAYGAQHDYFDHHDIVGWTREGVSSVANSGLAALITDGPGGAKWMYVGRQNAGETWHDITGNRSEPVVINSEGWGEFHVNGGSVSIYVQR

SEQ ID NO: 33522 - protein, 481 aa, Bacillus licheniformis
LNGTLMQYFEWYMPNDGQHWRRLQNDSAYLAEHGITAVWIPPAYKGTSQADVGYGAYDLYDLGEFHQKGTVRTKYGTKGELQSAIKSLHSRDINVYGDVVINHKGGADATEDVTAVEVDPADRNRVISGEHLIKAWTHFHFPGRGSTYSDFKWHWYHFDGTDWDESRKLNRIYLFQGKAWDWEVSNENGNYDYLMYADYDYDYPDVAAEITRWGTWYANELQLDGFRLDAVKHIKFSFLRDWVNHVREKTGKPMFTVAEYWQNDLGALENYLNKTNFNHSVFDVPLHYQFHAASTQGGGYDMRKLLNGTVVSEHPLKSVTFVDNHDTQPGQSLESTVQTWFKPLAYAFILTRESGYPSVFYGDMYGTKGDSQREIPALKHKIEPILKARKQYAYGAQHDYFDHHDIVGWTREGVSSVANSGLAALITDGPGGAKWMYVGRQNAGETWHDITGNRSEPVVINSEGWGEFHVNGGSVSIYVQR

SEQ ID NO: 33523 - protein, 481 aa, Bacillus licheniformis
LNGTLMQYFEWYMPNDGQHWRRLQNDSAYLAEHGITAVWIPPAYKGTSQADVGYGAYDLYDLGEFHQKGTVRTKYGTKGELQSAIKSLHSRDINVYGDVVINHKGGADATEDVTAVEVDPADRNRVISGEHLIKAWTHFHFPGRGSTYSDFKWHWYHFDGTDWDESRKLNRIYLFQGKAWDWPVSNENGNYDYLMYADYDYDYPDVAAEITRWGTWYANELQLDGFRLDAVKHIKFSFLRDWVNHVREKTGKEMFTVAEYWQNDLGALENYLNKTNFNHSVFDVPLHYQFHAASTQGGGYDMRKLLNGTVVSMHPLKSVTFVDNHDTQPGQSLESTVQTWFKPLAYAFILTRESGYPSVFYGDMYGTKGDSQREIPALKHKIEPILKARKQYAYGAQHDYFDHHDIVGWTREGVSSVANSGLAALITDGPGGAKWMYVGRQNAGETWHDITGNRSEPVVINSEGWGEFHVNGGSVSIYVQR

SEQ ID NO: 33524 - protein, 481 aa, Bacillus licheniformis
LNGTLMQYFEWYMPNDGQHWRRLQNDSAYLAEHGITAVWIPPAYKGTSQADVGYGAYDLYDLGEFHQKGTVRTKYGTKGELQSAIKSLHSRDINVYGDVVINHKGGADATEDVTAVEVDPADRNRVISGEHLIKAWTHFHFPGRGSTYSDFKWHWYHFDGTDWDESRKLNRIYLFQGKAWDWPVSNENGNYDYLMYADYDYDYPDVAAEITRWGTWYANELQLDGFRLDAVKHIKFSFLRDWVNHVREKTGKEMFTVAEYWQNDLGALENYLNKTNFNHSVFDVPLHYQFHAASTQGGGYDMRKLLNGTVVSCHPLKSVTFVDNHDTQPGQSLESTVQTWFKPLAYAFILTRESGYPSVFYGDMYGTKGDSQREIPALKHKIEPILKARKQYAYGAQHDYFDHHDIVGWTREGVSSVANSGLAALITDGPGGAKWMYVGRQNAGETWHDITGNRSEPVVINSEGWGEFHVNGGSVSIYVQR

SEQ ID NO: 33525 - protein, 481 aa, Bacillus licheniformis
LNGTLMQYFEWYMPNDGQHWRRLQNDSAYLAEHGITAVWIPPAYKGTSQADVGYGAYDLYDLGEFHQKGTVRTKYGTKGELQSAIKSLHSRDINVYGDVVINHKGGADATEDVTAVEVDPADRNRVISGEHLIKAWTHFHFPGRGSTYSDFKWHWYHFDGTDWDESRKLNRIYLFQGKAWDWEVSNENGNYDYLMYADYDYDYPDVAAEITRWGTWYANELQLDGFRLDAVKHIKFSFLRDWVNHVREKTGKPMFTVAEYWQNDLGALENYLNKTNFNHSVFDVPLHYQFHAASTQGGGYDMRKLLNGTVVSMHPLKSVTFVDNHDTQPGQSLESTVQTWFKPLAYAFILTRESGYPSVFYGDMYGTKGDSQREIPALKHKIEPILKARKQYAYGAQHDYFDHHDIVGWTREGVSSVANSGLAALITDGPGGAKWMYVGRQNAGETWHDITGNRSEPVVINSEGWGEFHVNGGSVSIYVQR

SEQ ID NO: 33526 - protein, 481 aa, Bacillus licheniformis
LNGTLMQYFEWYMPNDGQHWRRLQNDSAYLAEHGITAVWIPPAYKGTSQADVGYGAYDLYDLGEFHQKGTVRTKYGTKGELQSAIKSLHSRDINVYGDVVINHKGGADATEDVTAVEVDPADRNRVISGEHLIKAWTHFHFPGRGSTYSDFKWHWYHFDGTDWDESRKLNRIYLFQGKAWDWPVSNENGNYDYLMYADYDYDYPDVAAEITRWGTWYANELQLDGFRLDAVKHIKFSFLRDWVNHVREKTGKEMFTVAEYWQNDLGALENYLNKTNFNHSVFDVPLHYQFHAASTQGGGYDMRKLLNGTVVSGHPLKSVTFVDNHDTQPGQSLESTVQTWFKPLAYAFILTRESGYPSVFYGDMYGTKGDSQREIPALKHKIEPILKARKQYAYGAQHDYFDHHDIVGWTREGVSSVANSGLAALITDGPGGAKWMYVGRQNAGETWHDITGNRSEPVVINSEGWGEFHVNGGSVSIYVQR

SEQ ID NO: 33527 - protein, 481 aa, Bacillus licheniformis
LNGTLMQYFEWYMPNDGQHWRRLQNDSAYLAEHGITAVWIPPAYKGTSQADVGYGAYDLYDLGEFHQKGTVRTKYGTKGELQSAIKSLHSRDINVYGDVVINHKGGADATEDVTAVEVDPADRNRVISGEHLIKAWTHFHFPGRGSTYSDFKWHWYHFDGTDWDESRKLNRIYLFQGKAWDWEVSNENGNYDYLMYADYDYDYPDVAAEITRWGTWYANELQLDGFRLDAVKHIKFSFLRDWVNHVREKTGKPMFTVAEYWQNDLGALENYLNKTNFNHSVFDVPLHYQFHAASTQGGGYDMRKLLNGTVVSLHPLKSVTFVDNHDTQPGQSLESTVQTWFKPLAYAFILTRESGYPSVFYGDMYGTKGDSQREIPALKHKIEPILKARKQYAYGAQHDYFDHHDIVGWTREGVSSVANSGLAALITDGPGGAKWMYVGRQNAGETWHDITGNRSEPVVINSEGWGEFHVNGGSVSIYVQR

SEQ ID NO: 33528 - protein, 481 aa, Bacillus licheniformis
LNGTLMQYFEWYMPNDGQHWRRLQNDSAYLAEHGITAVWIPPAYKGTSQADVGYGAYDLYDLGEFHQKGTVRTKYGTKGELQSAIKSLHSRDINVYGDVVINHKGGADATEDVTAVEVDPADRNRVISGEHLIKAWTHFHFPGRGSTYSDFKWHWYHFDGTDWDESRKLNRIYLFQGKAWDWPVSNENGNYDYLMYADYDYDYPDVAAEITRWGTWYANELQLDGFRLDAVKHIKFSFLRDWVNHVREKTGKEMFTVAEYWQNDLGALENYLNKTNFNHSVFDVPLHYQFHAASTQGGGYDMRMLLNGTVVSKHPLKSVTFVDNHDTQPGQSLESTVQTWFKPLAYAFILTRESGYPSVFYGDMYGTKGDSQREIPALKHKIEPILKARKQYAYGAQHDYFDHHDIVGWTREGVSSVANSGLAALITDGPGGAKWMYVGRQNAGETWHDITGNRSEPVVINSEGWGEFHVNGGSVSIYVQR

SEQ ID NO: 33529 - protein, 481 aa, Bacillus licheniformis
LNGTLMQYFEWYMPNDGQHWRRLQNDSAYLAEHGITAVWIPPAYKGTSQADVGYGAYDLYDLGEFHQKGTVRTKYGTKGELQSAIKSLHSRDINVYGDVVINHKGGADATEDVTAVEVDPADRNRVISGEHLIKAWTHFHFPGRGSTYSDFKWHWYHFDGTDWDESRKLNRIYLFQGKAWDWEVSNENGNYDYLMYADYDYDYPDVAAEITRWGTWYANELQLDGFRLDAVKHIKFSFLRDWVNHVREKTGKPMFTVAEYWQNDLGALENYLNKTNFNHSVFDVPLHYQFHAASTQGGGYDMRKLLNGTVVSSHPLKSVTFVDNHDTQPGQSLESTVQTWFKPLAYAFILTRESGYPSVFYGDMYGTKGDSQREIPALKHKIEPILKARKQYAYGAQHDYFDHHDIVGWTREGVSSVANSGLAALITDGPGGAKWMYVGRQNAGETWHDITGNRSEPVVINSEGWGEFHVNGGSVSIYVQR

SEQ ID NO: 33530 - protein, 481 aa, Bacillus licheniformis
LNGTLMQYFEWYMPNDGQHWRRLQNDSAYLAEHGITAVWIPPAYKGTSQADVGYGAYDLYDLGEFHQKGTVRTKYGTKGELQSAIKSLHSRDINVYGDVVINHKGGADATEDVTAVEVDPADRNRVISGEHLIKAWTHFHFPGRGSTYSDFKWHWYHFDGTDWDESRKLNRIYLFQGKAWDWPVSNENGNYDYLMYADYDYDYPDVAAEITRWGTWYANELQLDGFRLDAVKHIKFSFLRDWVNHVREKTGKEMFTVAEYWQNDLGALENYLNKTNFNHSVFDVPLHYQFHAASTQGGGYDMRKLLNGTVVSAHPLKSVTFVDNHDTQPGQSLESTVQTWFKPLAYAFILTRESGYPSVFYGDMYGTKGDSQREIPALKHKIEPILKARKQYAYGAQHDYFDHHDIVGWTREGVSSVANSGLAALITDGPGGAKWMYVGRQNAGETWHDITGNRSEPVVINSEGWGEFHVNGGSVSIYVQR

SEQ ID NO: 33531 - protein, 481 aa, Bacillus licheniformis
LNGTLMQYFEWYMPNDGQHWRRLQNDSAYLAEHGITAVWIPPAYKGTSQADVGYGAYDLYDLGEFHQKGTVRTKYGTKGELQSAIKSLHSRDINVYGDVVINHKGGADATEDVTAVEVDPADRNRVISGEHLIKAWTHFHFPGRGSTYSDFKWHWYHFDGTDWDESRKLNRIYLFQGKAWDWEVSNENGNYDYLMYADYDYDYPDVAAEITRWGTWYANELQLDGFRLDAVKHIKFSFLRDWVNHVREKTGKPMFTVAEYWQNDLGALENYLNKTNFNHSVFDVPLHYQFHAASTQGGGYDMRKLLNGTVVSGHPLKSVTFVDNHDTQPGQSLESTVQTWFKPLAYAFILTRESGYPSVFYGDMYGTKGDSQREIPALKHKIEPILKARKQYAYGAQHDYFDHHDIVGWTREGVSSVANSGLAALITDGPGGAKWMYVGRQNAGETWHDITGNRSEPVVINSEGWGEFHVNGGSVSIYVQR

SEQ ID NO: 33532 - protein, 481 aa, Bacillus licheniformis
LNGTLMQYFEWYMPNDGQHWRRLQNDSAYLAEHGITAVWIPPAYKGTSQADVGYGAYDLYDLGEFHQKGTVRTKYGTKGELQSAIKSLHSRDINVYGDVVINHKGGADATEDVTAVEVDPADRNRVISGEHLIKAWTHFHFPGRGSTYSDFKWHWYHFDGTDWDESRKLNRIYLFQGKAWDWPVSNENGNYDYLMYADYDYDYPDVAAEITRWGTWYANELQLDGFRLDAVKHIKFSFLRDWVNHVREKTGKEMFTVAEYWQNDLGALENYLNKTNFNHSVFDVPLHYQFHAASTQGGGYDMRKLLNGTVVSWHPLKSVTFVDNHDTQPGQSLESTVQTWFKPLAYAFILTRESGYPSVFYGDMYGTKGDSQREIPALKHKIEPILKARKQYAYGAQHDYFDHHDIVGWTREGVSSVANSGLAALITDGPGGAKWMYVGRQNAGETWHDITGNRSEPVVINSEGWGEFHVNGGSVSIYVQR

SEQ ID NO: 33533 - protein, 481 aa, Bacillus licheniformis
LNGTLMQYFEWYMPNDGQHWRRLQNDSAYLAEHGITAVWIPPAYKGTSQADVGYGAYDLYDLGEFHQKGTVRTKYGTKGELQSAIKSLHSRDINVYGDVVINHKGGADATEDVTAVEVDPADRNRVISGEHLIKAWTHFHFPGRGSTYSDFKWHWYHFDGTDWDESRKLNRIYLFQGKAWDWEVSNENGNYDYLMYADYDYDYPDVAAEITRWGTWYANELQLDGFRLDAVKHIKFSFLRDWVNHVREKTGKPMFTVAEYWQNDLGALENYLNKTNFNHSVFDVPLHYQFHAASTQGGGYDMRKLLNGTVVSVHPLKSVTFVDNHDTQPGQSLESTVQTWFKPLAYAFILTRESGYPSVFYGDMYGTKGDSQREIPALKHKIEPILKARKQYAYGAQHDYFDHHDIVGWTREGVSSVANSGLAALITDGPGGAKWMYVGRQNAGETWHDITGNRSEPVVINSEGWGEFHVNGGSVSIYVQR

SEQ ID NO: 33534 - protein, 481 aa, Bacillus licheniformis
LNGTLMQYFEWYMPNDGQHWRRLQNDSAYLAEHGITAVWIPPAYKGTSQADVGYGAYDLYDLGEFHQKGTVRTKYGTKGELQSAIKSLHSRDINVYGDVVINHKGGADATEDVTAVEVDPADRNRVISGEHLIKAWTHFHFPGRGSTYSDFKWHWYHFDGTDWDESRKLNRIYLFQGKAWDWEVSNENGNYDYLMYADYDYDYPDVAAEITRWGTWYANELQLDGFRLDAVKHIKFSFLRDWVNHVREQTGKPMFTVAEYWQNDLGALENYLNKTNFNHSVFDVPLHYQFHAASTQGGGYDMRKLLNGTVVSKHPLKSVTFVDNHDTQPGQSLESTVQTWFKPLAYAFILTRESGYPSVFYGDMYGTKGDSQREIPALKHKIEPILKARKQYAYGAQHDYFDHHDIVGWTREGVSSVANSGLAALITDGPGGAKWMYVGRQNAGETWHDITGNRSEPVVINSEGWGEFHVNGGSVSIYVQR

SEQ ID NO: 33535 - protein, 481 aa, Bacillus licheniformis
LNGTLMQYFEWYTPNDGQHWKRLQNDSAYLAEHGITAVWIPPAYKGTSQADVGYGAYDLYDLGEFHQKGTVRTKYGTKGELQSAIKSLHSRDINVYGDVVINHKGGADATEDVTAVEVDPADRNRVISGEHLIKAYTHFHFPGRGSTYSDFKWHWYHFDGTDWDESRKLNRIYKFQGKAWDWEVSNENGNYDYLTYADIDYDHPDVAAEIKRWGTWYANELQLDGFRLDAVKHIKFSFLRDWVNHVREKTGKEMFTVAEYWQNDLGALENYLNKTNFNHSVFDVPLHYQFHAASTQGGGYDMRKLLNGTVVSKHPLKSVTFVDNHDTQPGQSLESTVQTWFKPLAYAFILTRESGYPQVFYGDMYGTKGDSQREIPALKHKIEPILKARKQYAYGRQNDYFDHHDIVGWTREGNSSHANSGLAALITDGPGGAKWMYVGRQKAGQTWSDITGNRSGPVVINSEGWGNFSVNGGSVSIYVQR

SEQ ID NO: 33536 - protein, 481 aa, Bacillus licheniformis
LNGTLMQYFEWYMPNDGQHWRRLQNDSAYLAEHGITAVWIPPAYKGTSQADVGYGAYDLYDLGEFHQKGTVRTKYGTKGELQSAIKSLHSRDINVYGDVVINHKGGADATEDVTAVEVDPADRNRVISGEHLIKAWTHFHFPGRGSTYSDFKWHWYHFDGTDWDESRKLNRIYLFQGKAWDWEVSNENGNYDYLMYADYDYDYPDVAAEITRWGTWYANELQLDGFRLDAVKHIKFSFLRDWVNHVREKTGKPMFTVAEYWQNDLGALENYLNKTNFNHSVFDVPLHYQFHAASTQGGGYDMRKLLNGTVVSFHPLKSVTFVDNHDTQPGQSLESTVQTWFKPLAYAFILTRESGYPSVFYGDMYGTKGDSQREIPALKHKIEPILKARKQYAYGAQHDYFDHHDIVGWTREGVSSVANSGLAALITDGPGGAKWMYVGRQNAGETWHDITGNRSEPVVINSEGWGEFHVNGGSVSIYVQR

SEQ ID NO: 33537 - protein, 481 aa, Bacillus licheniformis
LNGTLMQYFEWYMPNDGQHWRRLQNDSAYLAEHGITAVWIPPAYKGTSQADVGYGAYDLYDLGEFHQKGTVRTKYGTKGELQSAIKSLHSRDINVYGDVVINHKGGADATEDVTAVEVDPADRNRVISGEHLIKAWTHFHFPGRGSTYSDFKWHWYHFDGTDWDESRKLNRIYLFQGKAWDWPVSNENGNYDYLMYADYDYDYPDVAAEITRWGTWYANELQLDGFRLDAVKHIKFSFLRDWVNHVREKTGKEMFTVAEYWQNDLGALENYLNKTNFNHSVFDVPLHYQFHAASTQGGGYDMRKLLNGTVVSHHPLKSVTFVDNHDTQPGQSLESTVQTWFKPLAYAFILTRESGYPSVFYGDMYGTKGDSQREIPALKHKIEPILKARKQYAYGAQHDYFDHHDIVGWTREGVSSVANSGLAALITDGPGGAKWMYVGRQNAGETWHDITGNRSEPVVINSEGWGEFHVNGGSVSIYVQR

SEQ ID NO: 33538 - protein, 481 aa, Bacillus licheniformis
LNGTLMQYFEWYMPNDGQHWRRLQNDSAYLAEHGITAVWIPPAYKGTSQADVGYGAYDLYDLGEFHQKGTVRTKYGTKGELQSAIKSLHSRDINVYGDVVINHKGGADATEDVTAVEVDPADRNRVISGEHLIKAWTHFHFPGRGSTYSDFKWHWYHFDGTDWDESRKLNRIYLFQGKAWDWEVSNENGNYDYLMYADYDYDYPDVAAEITRWGTWYANELQLDGFRLDAVKHIKFSFLRDWVNHVREKTGKPMFTVAEYWQNDLGALENYLNKTNFNHSVFDVPLHYQFHAASTQGGGYDMRKLLNGTVVSCHPLKSVTFVDNHDTQPGQSLESTVQTWFKPLAYAFILTRESGYPSVFYGDMYGTKGDSQREIPALKHKIEPILKARKQYAYGAQHDYFDHHDIVGWTREGVSSVANSGLAALITDGPGGAKWMYVGRQNAGETWHDITGNRSEPVVINSEGWGEFHVNGGSVSIYVQR

SEQ ID NO: 33539 - protein, 481 aa, Bacillus licheniformis
LNGTLMQYFEWYMPNDGQHWRRLQNDSAYLAEHGITAVWIPPAYKGTSQADVGYGAYDLYDLGEFHQKGTVRTKYGTKGELQSAIKSLHSRDINVYGDVVINHKGGADATEDVTAVEVDPADRNRVISGEHLIKAWTHFHFPGRGSTYSDFKWHWYHFNGTDWDESRKLNRIYKFQGKNWNWEVSNENGNYDYLMYANIDYSHPDVAAEIKRWGTWYANELQLDGFRLDAVKHIPFWFLRDWVNHVREKTGKEMFTVAEYWQNDLGALENYLNKTNFNHSVFDVPLHYQFHAASTQGGGYDMRKLLNGTVVSKHPLKSVTFVDNHDTQPGQSLESTVQTWFKPLAYAFILTRESGYPQVFYGDMYGTKGDSQREIPALKHKIEPILKARKQYAYGAQHDYFDHHDIVGWTREGDSSVANSGLAALITDGPGGAKRMYVGRQNAGETWHDITGNRSEPVVINSEGWGEFHVNGGSVSIYVQR

SEQ ID NO: 33540 - protein, 481 aa, Bacillus licheniformis
LNGTLMQYFEWYMPNDGQHWRRLQNDSAYLAEHGITAVWIPPAYKGTSQADVGYGAYDLYDLGEFHQKGTVRTKYGTKGELQSAIKSLHSRDINVYGDVVINHKGGADATEDVTAVEVDPADRNRVISGEHLIKAWTHFHFPGRGSTYSDFKWHWYHFDGTDWDESRKLNRIYLFQGKAWDWPVSNENGNYDYLMYADYDYDYPDVAAEITRWGTWYANELQLDGFRLDAVKHIKFSFLRDWVNHVREKTGKEMFTVAEYWQNDLGALENYLNKTNFNHSVFDVPLHYQFHAASTQGGGYDMRKLLNGTVVSVHPLKSVTFVDNHDTQPGQSLESTVQTWFKPLAYAFILTRESGYPSVFYGDMYGTKGDSQREIPALKHKIEPILKARKQYAYGAQHDYFDHHDIVGWTREGVSSVANSGLAALITDGPGGAKWMYVGRQNAGETWHDITGNRSEPVVINSEGWGEFHVNGGSVSIYVQR

SEQ ID NO: 33541 - protein, 481 aa, Bacillus licheniformis
LNGTLMQYFEWYMPNDGQHWRRLQNDSAYLAEHGITAVWIPPAYKGTSQADVGYGAYDLYDLGEFHQKGTVRTKYGTKGELQSAIKSLHSRDINVYGDVVINHKGGADATEDVTAVEVDPADRNRVISGEHLIKAWTHFHFPGRGSTYSDFKWHWYHFDGTDWDESRKLNRIYLFQGKAWDWEVSNENGNYDYLMYADYDYDYPDVAAEITRWGTWYANELQLDGFRLDAVKHIKFSFLRDWVNHVREKTGKPMFTVAEYWQNDLGALENYLNKTNFNHSVFDVPLHYQFHAASTQGGGYDMRKLLNGTVVSQHPLKSVTFVDNHDTQPGQSLESTVQTWFKPLAYAFILTRESGYPSVFYGDMYGTKGDSQREIPALKHKIEPILKARKQYAYGAQHDYFDHHDIVGWTREGVSSVANSGLAALITDGPGGAKWMYVGRQNAGETWHDITGNRSEPVVINSEGWGEFHVNGGSVSIYVQR

SEQ ID NO: 33542 - protein, 481 aa, Bacillus licheniformis
LNGTLMQYFEWYMPNDGQHWRRLQNDSAYLAEHGITAVWIPPAYKGTSQADVGYGAYDLYDLGEFHQKGTVRTKYGTKGELQSAIKSLHSRDINVYGDVVINHKGGADATEDVTAVEVDPADRNRVISGEHLIKAWTHFHFPGRGSTYSDFKWHWYHFDGTDWDESRKLNRIYLFQGKAWDWEVSNENGNYDYLMYADYDYDYPDVAAEITRWGTWYANELQLDGFRLDAVKHIKFSFLRDWVNHVREKTGKPMFTVAEYWQNDLGALENYLNKTNFNHSVFDVPLHYQFHAASTQGGGYDMRKLLNGTVVSTHPLKSVTFVDNHDTQPGQSLESTVQTWFKPLAYAFILTRESGYPSVFYGDMYGTKGDSQREIPALKHKIEPILKARKQYAYGAQHDYFDHHDIVGWTREGVSSVANSGLAALITDGPGGAKWMYVGRQNAGETWHDITGNRSEPVVINSEGWGEFHVNGGSVSIYVQR

SEQ ID NO: 33543 - protein, 481 aa, Bacillus licheniformis
LNGTLMQYFEWYMPNDGQHWRRLQNDSAYLAEHGITAVWIPPAYKGTSQADVGYGAYDLYDLGEFHQKGTVRTKYGTKGELQSAIKSLHSRDINVYGDVVINHKGGADATEDVTAVEVDPADRNRVISGEHLIKAWTHFHFPGRGSTYSDFKWHWYHFDGTDWDESRKLNRIYLFQGKAWDWEVSNENGNYDYLMYADYDYDYPDVAAEITRWGTWYANELQLDGFRLDAVKHIKFSFLRDWVNHVREKTGKPMFTVAEYWQNDLGALENYLNKTNFNHSVFDVPLHYQFHAASTQGGGYDMRKLLNGTVVSAHPLKSVTFVDNHDTQPGQSLESTVQTWFKPLAYAFILTRESGYPSVFYGDMYGTKGDSQREIPALKHKIEPILKARKQYAYGAQHDYFDHHDIVGWTREGVSSVANSGLAALITDGPGGAKWMYVGRQNAGETWHDITGNRSEPVVINSEGWGEFHVNGGSVSIYVQR

SEQ ID NO: 33544 - protein, 481 aa, Bacillus licheniformis
LNGTLMQYFEWYMPNDGQHWRRLQNDSAYLAEHGITAVWIPPAYKGTSQADVGYGAYDLYDLGEFHQKGTVRTKYGTKGELQSAIKSLHSRDINVYGDVVINHKGGADATEDVTAVEVDPADRNRVISGEHLIKAWTHFHFPGRGSTYSDFKWHWYHFDGTDWDESRKLNRIYLFQGKAWDWPVSNENGNYDYLMYADYDYDYPDVAAEITRWGTWYANELQLDGFRLDAVKHIKFSFLRDWVNHVREKTGKEMFTVAEYWQNDLGALENYLNKTNFNHSVFDVPLHYQFHAASTQGGGYDMRKLLNGTVVSQHPLKSVTFVDNHDTQPGQSLESTVQTWFKPLAYAFILTRESGYPSVFYGDMYGTKGDSQREIPALKHKIEPILKARKQYAYGAQHDYFDHHDIVGWTREGVSSVANSGLAALITDGPGGAKWMYVGRQNAGETWHDITGNRSEPVVINSEGWGEFHVNGGSVSIYVQR

SEQ ID NO: 33545 - protein, 481 aa, Bacillus licheniformis
LNGTLMQYFEWYMPNDGQHWRRLQNDSAYLAEHGITAVWIPPAYKGTSQADVGYGAYDLYDLGEFHQKGTVRTKYGTKGELQSAIKSLHSRDINVYGDVVINHKGGADATEDVTAVEVDPADRNRVISGEHLIKAWTHFHFPGRGSTYSDFKWHWYHFDGTDWDESRKLNRIYLFQGKAWDWPVSNENGNYDYLMYADYDYDYPDVAAEITRWGTWYANELQLDGFRLDAVKHIKFSFLRDWVNHVREKTGKEMFTVAEYWQNDLGALENYLNKTNFNHSVFDVPLHYQFHAASTQGGGYDMRKLLNGTVVSYHPLKSVTFVDNHDTQPGQSLESTVQTWFKPLAYAFILTRESGYPSVFYGDMYGTKGDSQREIPALKHKIEPILKARKQYAYGAQHDYFDHHDIVGWTREGVSSVANSGLAALITDGPGGAKWMYVGRQNAGETWHDITGNRSEPVVINSEGWGEFHVNGGSVSIYVQR

SEQ ID NO: 33546 - protein, 481 aa, Bacillus licheniformis
LNGTLMQYFEWYMPNDGQHWRRLQNDSAYLAEHGITAVWIPPAYKGTSQADVGYGAYDLYDLGEFHQKGTVRTKYGTKGELQSAIKSLHSRDINVYGDVVINHKGGADATEDVTAVEVDPADRNRVISGEHLIKAWTHFHFPGRGSTYSDFKWHWYHFDGTDWDESRKLNRIYLFQGKAWDWPVSNENGNYDYLMYADYDYDYPDVAAEITRWGTWYANELQLDGFRLDAVKHIKFSFLRDWVNHVREKTGKEMFTVAEYWQNDLGALENYLNKTNFNHSVFDVPLHYQFHAASTQGGGYDMRKLLNGTVVSEHPLKSVTFVDNHDTQPGQSLESTVQTWFKPLAYAFILTRESGYPSVFYGDMYGTKGDSQREIPALKHKIEPILKARKQYAYGAQHDYFDHHDIVGWTREGVSSVANSGLAALITDGPGGAKWMYVGRQNAGETWHDITGNRSEPVVINSEGWGEFHVNGGSVSIYVQR

SEQ ID NO: 33547 - protein, 481 aa, Bacillus licheniformis
LNGTLMQYFEWYMPNDGQHWRRLQNDSAYLAEHGITAVWIPPAYKGTSQADVGYGAYDLYDLGEFHQKGTVRTKYGTKGELQSAIKSLHSRDINVYGDVVINHKGGADATEDVTAVEVDPADRNRVISGEHLIKAWTHFHFPGRGSTYSDFKWHWYHFDGTDWDESRKLNRIYLFQGKAWDWPVSNENGNYDYLMYADYDYDYPDVAAEITRWGTWYANELQLDGFRLDAVKHIKFSFLRDWVNHVREKTGKEMFTVAEYWQNDLGALENYLNKTNFNHSVFDVPLHYQFHAASTQGGGYDMRKLLNGTVVSSHPLKSVTFVDNHDTQPGQSLESTVQTWFKPLAYAFILTRESGYPSVFYGDMYGTKGDSQREIPALKHKIEPILKARKQYAYGAQHDYFDHHDIVGWTREGVSSVANSGLAALITDGPGGAKWMYVGRQNAGETWHDITGNRSEPVVINSEGWGEFHVNGGSVSIYVQR

SEQ ID NO: 33548 - protein, 481 aa, Bacillus licheniformis
LNGTLMQYFEWYMPNDGQHWRRLQNDSAYLAEHGITAVWIPPAYKGTSQADVGYGAYDLYDLGEFHQKGTVRTKYGTKGELQSAIKSLHSRDINVYGDVVINHKGGADATEDVTAVEVDPADRNRVISGEHLIKAWTHFHFPGRGSTYSDFKWHWYHFDGTDWDESRKLNRIYLFQGKAWDWEVSNENGNYDYLMYADYDYDYPDVAAEITRWGTWYANELQLDGFRLDAVKHIKFSFLRDWVNHVREKTGKPMFTVAEYWQNDLGALENYLNKTNFNHSVFDVPLHYQFHAASTQGGGYDMRKLLNGTVVSIHPLKSVTFVDNHDTQPGQSLESTVQTWFKPLAYAFILTRESGYPSVFYGDMYGTKGDSQREIPALKHKIEPILKARKQYAYGAQHDYFDHHDIVGWTREGVSSVANSGLAALITDGPGGAKWMYVGRQNAGETWHDITGNRSEPVVINSEGWGEFHVNGGSVSIYVQR

SEQ ID NO: 33549 - protein, 481 aa, Bacillus licheniformis
LNGTLMQYFEWYMPNDGQHWRRLQNDSAYLAEHGITAVWIPPAYKGTSQADVGYGAYDLYDLGEFHQKGTVRTKYGTKGELQSAIKSLHSRDINVYGDVVINHKGGADATEDVTAVEVDPADRNRVISGEHLIKAWTHFHFPGRGSTYSDFKWHWYHFDGTDWDESRKLNRIYLFQGKAWDWPVSNENGNYDYLMYADYDYDYPDVAAEITRWGTWYANELQLDGFRLDAVKHIKFSFLRDWVNHVREKTGKEMFTVAEYWQNDLGALENYLNKTNFNHSVFDVPLHYQFHAASTQGGGYDMRKLLNGTVVSKHPLKSVTFVDNHDTQPGQSLESTVQTWFKPLAYAFILTRESGYPSVFYGDMYGTKGDSQREIPALKHKIEPILKARKQYAYGAQHDYFDHHDIVGWTREGVSSVANSGLAALITDGPGGAKWMYVGRQNAGETWHDITGNRSEPVVINSEGWGEFHVNGGSVSIYVQR

SEQ ID NO: 33550 - protein, 481 aa, Bacillus licheniformis
LNGTLMQYFEWYMPNDGQHWRRLQNDSAYLAEHGITAVWIPPAYKGTSQADVGYGAYDLYDLGEFHQKGTVRTKYGTKGELQSAIKSLHSRDINVYGDVVINHKGGADATEDVTAVEVDPADRNRVISGEHLIKAWTHFHFPGRGSTYSDFKWHWYHFDGTDWDESRKLNRIYLFQGKAWDWEVSNENGNYDYLMYADYDYDYPDVAAEITRWGTWYANELQLDGFRLDAVKHIKFSFLRDWVNHVREKTGKPMFTVAEYWQNDLGALENYLNKTNFNHSVFDVPLHYQFHAASTQGGGYDMRKLLNGTVVSYHPLKSVTFVDNHDTQPGQSLESTVQTWFKPLAYAFILTRESGYPSVFYGDMYGTKGDSQREIPALKHKIEPILKARKQYAYGAQHDYFDHHDIVGWTREGVSSVANSGLAALITDGPGGAKWMYVGRQNAGETWHDITGNRSEPVVINSEGWGEFHVNGGSVSIYVQR

SEQ ID NO: 33551 - protein, 481 aa, Bacillus licheniformis
LNGTLMQYFEWYMPNDGQHWRRLQNDSAYLAEHGITAVWIPPAYKGTSQADVGYGAYDLYDLGEFHQKGTVRTKYGTKGELQSAIKSLHSRDINVYGDVVINHKGGADATEDVTAVEVDPADRNRVISGEHLIKAWTHFHFPGRGSTYSDFKWHWYHFDGTDWDESRKLNRIYLFQGKAWDWPVSNENGNYDYLMYADYDYDYPDVAAEITRWGTWYANELQLDGFRLDAVKHIKFSFLRDWVNHVREQTGKEMFTVAEYWQNDLGALENYLNKTNFNHSVFDVPLHYQFHAASTQGGGYDMRKLLNGTVVSKHPLKSVTFVDNHDTQPGQSLESTVQTWFKPLAYAFILTRESGYPSVFYGDMYGTKGDSQREIPALKHKIEPILKARKQYAYGAQHDYFDHHDIVGWTREGVSSVANSGLAALITDGPGGAKWMYVGRQNAGETWHDITGNRSEPVVINSEGWGEFHVNGGSVSIYVQR

SEQ ID NO: 33552 - protein, 481 aa, Bacillus licheniformis
LNGTLMQYFEWYMPNDGQHWRRLQNDSAYLAEHGITAVWIPPAYKGTSQADVGYGAYDLYDLGEFHQKGTVRTKYGTKGELQSAIKSLHSRDINVYGDVVINHKGGADATEDVTAVEVDPADRNRVISGEHLIKAWTHFHFPGRGSTYSDFKWHWYHFDGTDWDESRKLNRIYLFQGKAWDWPVSNENGNYDYLMYADYDYDYPDVAAEITRWGTWYANELQLDGFRLDAVKHIKFSFLRDWVNHVREKTGKEMFTVAEYWQNDLGALENYLNKTNFNHSVFDVPLHYQFHAASTQGGGYDMRKLLNGTVVSIHPLKSVTFVDNHDTQPGQSLESTVQTWFKPLAYAFILTRESGYPSVFYGDMYGTKGDSQREIPALKHKIEPILKARKQYAYGAQHDYFDHHDIVGWTREGVSSVANSGLAALITDGPGGAKWMYVGRQNAGETWHDITGNRSEPVVINSEGWGEFHVNGGSVSIYVQR

SEQ ID NO: 33553 - protein, 481 aa, Bacillus licheniformis
LNGTLMQYFEWYMPNDGQHWRRLQNDSAYLAEHGITAVWIPPAYKGTSQADVGYGAYDLYDLGEFHQKGTVRTKYGTKGELQSAIKSLHSRDINVYGDVVIDHKGGADATEDVTAVEVDPADRNRVISGEHLIKAWTHFHFPGRGSTYSDFKWHWYHFNGTDWDESRKLNRIYKFQGKNWNWEVSNENGNYDYLMYANIDYSHPDVAAEIKRWGTWYANELQLDGFRLDAVKHIPFSFLRDWVNHVREKTGKEMFTVAEYWQNDLGALENYLNKTNFNHSVFDVPLHYQFHAASTQGGGYDMRKLLNGTVVSKHPLKSVTFVDNHDTQPGQSLESTVQTWFKPLAYAFILTRESGYPQVFYGDMYGTKGDSQREIPALKHKIEPILKARKQYAYGAQHDYFDHHDIVGWTREGDSSVANSGLAALITDGPGGAKRMYVGRQNAGETWHDITGNRSEPVVINSEGWGEFHVNGGSVSIYVQR

SEQ ID NO: 33554 - protein, 481 aa, Bacillus licheniformis
LNGTLMQYFEWYMPNDGQHWRRLQNDSAYLAEHGITAVWIPPAYKGTSQADVGYGAYDLYDLGEFHQKGTVRTKYGTKGELQSAIKSLHSRDINVYGDVVINHKGGADATEDVTAVEVDPADRNRVISGEHLIKAWTHFHFPGRGSTYSDFKWHWYHFDGTDWDESRKLNRIYLFQGKAWDWEVSNENGNYDYLMYADYDYDYPDVAAEITRWGTWYANELQLDGFRLDAVKHIKFSFLRDWVNHVREKTGKPMFTVAEYWQNDLGALENYLNKTNFNHSVFDVPLHYQFHAASTQGGGYDMRKLLNGTVVSWHPLKSVTFVDNHDTQPGQSLESTVQTWFKPLAYAFILTRESGYPSVFYGDMYGTKGDSQREIPALKHKIEPILKARKQYAYGAQHDYFDHHDIVGWTREGVSSVANSGLAALITDGPGGAKWMYVGRQNAGETWHDITGNRSEPVVINSEGWGEFHVNGGSVSIYVQR

SEQ ID NO: 33555 - protein, 481 aa, Bacillus subtilis
LNGTLMQYFEWXMPNDGQHWKRLQNDSAYLAEHGITAVWIPPAYKGTSQADVGYGAYDLYDLGEFHQKGTVRTKYGTKGELQSAIKSLHSRDINVYGDVVINHKGGADATEDVTAVEVDPAXRNRVISGEXXIKAWTHFHFPGRGSTYSDFKWHWYHFDGTXWDESRKLNRIYKFQGXAWDWEVSNENGNYDYLMYADIDYDHPDVAAXIKRWGTWYANELQLDGFRLDAVKHIKFSFLRDWVNHVREKTGKEMFTVAEYWXNDLGALEXYLNKTNFNHSVFDVPLHYQFHAASTQGGGYDMRKLLNXTVVSKHPLKAVTFVDNHDTQPGQSLESTVQTWFKPLAYAFILTRESGYPQVFYGDMYGTKGDXQREIPALKHKIEPILKARKQYAXGAQHDYFDHHDIVGWTREGDSSVANSGLAALITDGPGGAKRMYVGRQNAGETWHDITGNRSEPVVINSEGWGEFHVNGGSVSIYVQR

SEQ ID NO: 33556 - protein, 481 aa, Bacillus licheniformis
LNGTLMQYFEWYMPNDGQHWRRLQNDSAYLAEHGITAVWIPPAYKGTSQADVGYGAYDLYDLGEFHQKGTVRTKYGTKGELQSAIKSLHSRDINVYGDVVINHKGGADATEDVTAVEVDPADRNRVISGEHLIKAWTHFHFPGRGSTYSDFKWHWYHFDGTDWDESRKLNRIYLFQGKAWDWPVSNENGNYDYLMYADYDYDYPDVAAEITRWGTWYANELQLDGFRLDAVKHIKFSFLRDWVNHVREKTGKEMFTVAEYWQNDLGALENYLNKTNFNHSVFDVPLHYQFHAASTQGGGYDMRKLLNGTVVSNHPLKSVTFVDNHDTQPGQSLESTVQTWFKPLAYAFILTRESGYPSVFYGDMYGTKGDSQREIPALKHKIEPILKARKQYAYGAQHDYFDHHDIVGWTREGVSSVANSGLAALITDGPGGAKWMYVGRQNAGETWHDITGNRSEPVVINSEGWGEFHVNGGSVSIYVQR

SEQ ID NO: 33557 - protein, 481 aa, Bacillus licheniformis
LNGTLMQYFEWYMPNDGQHWRRLQNDSAYLAEHGITAVWIPPAYKGTSQADVGYGAYDLYDLGEFHQKGTVRTKYGTKGELQSAIKSLHSRDINVYGDVVINHKGGADATEDVTAVEVDPADRNRVISGEHLIKAWTHFHFPGRGSTYSDFKWHWYHFDGTDWDESRKLNRIYLFQGKAWDWPVSNENGNYDYLMYADYDYDYPDVAAEITRWGTWYANELQLDGFRLDAVKHIKFSFLRDWVNHVREKTGKEMFTVAEYWQNDLGALENYLNKTNFNHSVFDVPLHYQFHAASTQGGGYDMRKLLNGTVVSTHPLKSVTFVDNHDTQPGQSLESTVQTWFKPLAYAFILTRESGYPSVFYGDMYGTKGDSQREIPALKHKIEPILKARKQYAYGAQHDYFDHHDIVGWTREGVSSVANSGLAALITDGPGGAKWMYVGRQNAGETWHDITGNRSEPVVINSEGWGEFHVNGGSVSIYVQR

SEQ ID NO: 33558 - protein, 481 aa, Bacillus licheniformis
LNGTLMQYFEWYMPNDGQHWRRLQNDSAYLAEHGITAVWIPPAYKGTSQADVGYGAYDLYDLGEFHQKGTVRTKYGTKGELQSAIKSLHSRDINVYGDVVINHKGGADATEDVTAVEVDPADRNRVISGEHLIKAWTHFHFPGRGSTYSDFKWHWYHFDGTDWDESRKLNRIYLFQGKAWDWPVSNENGNYDYLMYADYDYDYPDVAAEITRWGTWYANELQLDGFRLDAVKHIKFSFLRDWVNHVREKTGKEMFTVAEYWQNDLGALENYLNKTNFNHSVFDVPLHYQFHAASTQGGGYDMRKLLNGTVVSPHPLKSVTFVDNHDTQPGQSLESTVQTWFKPLAYAFILTRESGYPSVFYGDMYGTKGDSQREIPALKHKIEPILKARKQYAYGAQHDYFDHHDIVGWTREGVSSVANSGLAALITDGPGGAKWMYVGRQNAGETWHDITGNRSEPVVINSEGWGEFHVNGGSVSIYVQR

SEQ ID NO: 33559 - protein, 481 aa, Bacillus licheniformis
LNGTLMQYFEWYMPNDGQHWRRLQNDSAYLAEHGITAVWIPPAYKGTSQADVGYGAYDLYDLGEFHQKGTVRTKYGTKGELQSAIKSLHSRDINVYGDVVINHKGGADATEDVTAVEVDPADRNRVISGEHLIKAWTHFHFPGRGSTYSDFKWHWYHFDGTDWDESRKLNRIYLFQGKAWDWEVSNENGNYDYLMYADYDYDYPDVAAEITRWGTWYANELQLDGFRLDAVKHIKFSFLRDWVNHVREKTGKPMFTVAEYWQNDLGALENYLNKTNFNHSVFDVPLHYQFHAASTQGGGYDMRKLLNGTVVSPHPLKSVTFVDNHDTQPGQSLESTVQTWFKPLAYAFILTRESGYPSVFYGDMYGTKGDSQREIPALKHKIEPILKARKQYAYGAQHDYFDHHDIVGWTREGVSSVANSGLAALITDGPGGAKWMYVGRQNAGETWHDITGNRSEPVVINSEGWGEFHVNGGSVSIYVQR

SEQ ID NO: 33560 - protein, 481 aa, Bacillus licheniformis
LNGTLMQYFEWYMPNDGQHWRRLQNDSAYLAEHGITAVWIPPAYKGTSQADVGYGAYDLYDLGEFHQKGTVRTKYGTKGELQSAIKSLHSRDINVYGDVVINHKGGADATEDVTAVEVDPADRNRVISGEHLIKAWTHFHFPGRGSTYSDFKWHWYHFDGTDWDESRKLNRIYLFQGKAWDWEVSNENGNYDYLMYADYDYDYPDVAAEITRWGTWYANELQLDGFRLDAVKHIKFSFLRDWVNHVREKTGKPMFTVAEYWQNDLGALENYLNKTNFNHSVFDVPLHYQFHAASTQGGGYDMRKLLNGTVVSHHPLKSVTFVDNHDTQPGQSLESTVQTWFKPLAYAFILTRESGYPSVFYGDMYGTKGDSQREIPALKHKIEPILKARKQYAYGAQHDYFDHHDIVGWTREGVSSVANSGLAALITDGPGGAKWMYVGRQNAGETWHDITGNRSEPVVINSEGWGEFHVNGGSVSIYVQR

SEQ ID NO: 33561 - protein, 481 aa, Bacillus licheniformis
LNGTLMQYFEWYMPNDGQHWRRLQNDSAYLAEHGITAVWIPPAYKGTSQADVGYGAYDLYDLGEFHQKGTVRTKYGTKGELQSAIKSLHSRDINVYGDVVINHKGGADATEDVTAVEVDPADRNRVISGEYLIRAWTHFHFPGRGSTYSDFKWHWYHFDGTDWDESRKLNRIYLFQGKAWDWPVSNENGNYDYLMYADYDYDYPDVAAEITRWGTWYANELQLDGFRLDAVKHIKFSFLRDWVNHVREKTGKEMFTVAEYWQNDLGALENYLNKTNFNHSVFDVPLHYQFHAASTQGGGYDMRKLLNGTVVSKHPLKSVTFVDNHDTQPGQSLESTVQTWFKPLAYAFILTRESGYPSVFYGDMYGTKGDSQREIPALKHKIEPILKARKQYAYGAQHDYFDHHDIVGWTREGVSSVANSGLAALITDGPGGAKWMYVGRQNAGETWHDITGNRSEPVVINSEGWGEFHVNGGSVSIYVQR

SEQ ID NO: 33562 - protein, 481 aa, Bacillus licheniformis
LNGTLMQYFEWYMPNDGQHWRRLQNDSAYLAEHGITAVWIPPAYKGTSQADVGYGAYDLYDLGEFHQKGTVRTKYGTKGELQSAIKSLHSRDINVYGDVVINHKGGADATEDVTAVEVDPADRNRVISGEHLIKAWTHFHFPGRGSTYSDFKWHWYHFDGTDWDESRKLNRIYLFQGKAWDWEVSNENGNYDYLMYADYDYDYPDVAAEITRWGTWYANELQLDGFRLDAVKHIKFSFLRDWVNHVREKTGKPMFTVAEYWQNDLGALENYLNKTNFNHSVFDVPLHYQFHAASTQGGGYDMRKLLNGTVVSNHPLKSVTFVDNHDTQPGQSLESTVQTWFKPLAYAFILTRESGYPSVFYGDMYGTKGDSQREIPALKHKIEPILKARKQYAYGAQHDYFDHHDIVGWTREGVSSVANSGLAALITDGPGGAKWMYVGRQNAGETWHDITGNRSEPVVINSEGWGEFHVNGGSVSIYVQR

SEQ ID NO: 33563 - protein, 481 aa, Bacillus licheniformis
LNGTLMQYFEWYMPNDGQHWRRLQNDSAYLAEHGITAVWIPPAYKGTSQADVGYGAYDLYDLGEFHQKGTVRTKYGTKGELQSAIKSLHSRDINVYGDVVINHKGGADATEDVTAVEVDPADRNRVISGEHLIKAWTHFHFPGRGSTYSDFKWHWYHFDGTDWDESRKLNRIYLFQGKAWDWEVSNENGNYDYLMYADYDYDYPDVAAEITRWGTWYANELQLDGFRLDAVKHIKFSFLRDWVNHVREKTGKPMFTVAEYWQNDLGALENYLNKTNFNHSVFDVPLHYQFHAASTQGGGYDMRMLLNGTVVSKHPLKSVTFVDNHDTQPGQSLESTVQTWFKPLAYAFILTRESGYPSVFYGDMYGTKGDSQREIPALKHKIEPILKARKQYAYGAQHDYFDHHDIVGWTREGVSSVANSGLAALITDGPGGAKWMYVGRQNAGETWHDITGNRSEPVVINSEGWGEFHVNGGSVSIYVQR

SEQ ID NO: 33564 - protein, 481 aa, Bacillus licheniformis
LNGTLMQYFEWYMPNDGQHWRRLQNDSAYLAEHGITAVWIPPAYKGTSQADVGYGAYDLYDLGEFHQKGTVRTKYGTKGELQSAIKSLHSRDINVYGDVVINHKGGADATEDVTAVEVDPADRNRVISGEYLIRAWTHFHFPGRGSTYSDFKWHWYHFDGTDWDESRKLNRIYLFQGKAWDWEVSNENGNYDYLMYADYDYDYPDVAAEITRWGTWYANELQLDGFRLDAVKHIKFSFLRDWVNHVREKTGKPMFTVAEYWQNDLGALENYLNKTNFNHSVFDVPLHYQFHAASTQGGGYDMRKLLNGTVVSKHPLKSVTFVDNHDTQPGQSLESTVQTWFKPLAYAFILTRESGYPSVFYGDMYGTKGDSQREIPALKHKIEPILKARKQYAYGAQHDYFDHHDIVGWTREGVSSVANSGLAALITDGPGGAKWMYVGRQNAGETWHDITGNRSEPVVINSEGWGEFHVNGGSVSIYVQR

SEQ ID NO: 33565 - protein, 480 aa, Bacillus sp.
APINETMMQYFEWDLPNDGTLWNRLHNNAQNLKNAGITALWLPPAYKGTSQSDVGYGVYDLYDLGEFNQKGTIRTKYGTKTQLERAIRSLKANGIQVYADVVFNHKAGADGTEFVDAVEVDPSNRNQEVSGTYQIEAWTKFDFPGRGNTYSSFKWRWYHFDGTDWDESRKLNRIYKFRGKAWDWEVDTENGNYDYLMFADLDMDHPEVVTELKNWGTWYVNTTNIDGFRLDAVKHIKFSFMRDWLTYVRNQTGKNLFAVGEFWKNDLGALENYITKTNGSMSLFDAPLHNNFYTASKSSGYFDMRNLLNGTLVQRHPSHAVTLVDNHDTQPGQSLQSWVEPWFKPLAYAFILTRQEGYPCVFYGDYYGIPKYNIPGLKSKIDPLLIARRDYAYGTQRDYIDHQDIIGWTREGIDTKPNSGLAALITDGPGGSKTMYVGKKHAGKVFYDLTGNRSDTVTINADGNGTFKVNGGSVSIWVAK

SEQ ID NO: 33566 - protein, 480 aa, Bacillus sp.
APINETMMQYFEWDLPNDGTLWNRLHNNAQNLKNAGITALWLPPAYKGTSQSDVGYGVYDLYDLGEFNQKGTIRTKYGTKTQLERAIRSLKANGIQVYADVVFNHKAGADGTEFVDAVEVDPSNRNQEVSGTYQIEAWTKFDFPGRGNTYSSFKWRWYHFDGTDWDESRKLNRIYKFRGKAWDWEVDTENGNYDYLMFADLDMDHPEVVTELKNWGTWYVNTTNIDGFRLDAVKHIKFSFMRDWLTYVRNQTGKNLFAVGEFWKNDLGALENYITKTNGSMSLFDAPLHNNFYTASKSSGYFDMRNLLNGTLVQRHPSHAVTLVDNHDTQPGQSLQSWVEPWFKPLAYAFILTRQEGYPCVFYGDYYGIPKYNIPGLKSKIDPLLIARRDYAYGTQRDYIDHQDIIGWTREGIDTKPNSGLAALITDGPGGSKRMYVGKKHAGKVFYDLTGNRSDTVTINADGNGTFKVNGGSVSIWVAK

SEQ ID NO: 33567 - protein, 480 aa, Bacillus sp.
APINETMMQYFEWDLPEDGTLWNRLHNNAQNLKNAGITALWLPPAYKGTSQSDVGYGVYDLYDLGEFNQKGTIRTKYGTKTQLERAIRSLKANGIQVYADVVFNHKAGADGTEFVDAVEVDPSNRNQEVSGTYQIEAWTKFDFPGRGNTYSSFKWRWYHFDGTDWDESRKLNRIYKFRGKAWDWEVDTENGNYDYLMFADLDMDHPEVVTELKNWGTWYVNTTNIDGFRLDAVKHIKFSFMRDWLTYVRNQTGKNLFAVGEFWKEDLGALENYITKTNGSMSLFDAPLHENFYTASKSSGYFDMRELLNGTLVERHPSHAVTLVDEHDTQPGQSLESWVEPWFKPLAYAFILTRQEGYPCVFYGDYYGIPKYEIPGLKSKIDPLLIARRDYAYGTQRDYIDHQDIIGWTREGIDTKPNSGLAALITDGPGGSKWMYVGKKHAGKVFYDLTGNRSDTVTINADGWGEFKVNGGSVSIWVAK

SEQ ID NO: 33568 - protein, 481 aa, Bacillus sp.
APINETMMQYFEWDLPNDGTLWNRLHNNAQNLKNAGITALWLPPAYKGTSQSDVGYGVYDLYDLGEFNQKGTIRTKYGTKTQLERAIRSLKANGIQVYADVVFNHKAGADGTEFVDAVEVDPSNRNQEVSGTYQIEAWTKFDFPGRGNTYSSFKWRWYHFDGTDWDESRALQNRIYKFRGKAWDWEVDTENGNYDYLMFADLDMDHPEVVTELNRWGTWYVNTTNIDGFRLDAVKHIKFSFMRDWLTYVRNQTGKNLFAVGEFWKNDLGALENYITKTNGSMSLFDAPLHNNFYTASKSDGYFDMRNLLNGTLVQRHPSHAVTFVDNHDTQPGQSLQSWVEEWFKPLAYAFILTRQEGYPCVFYGDYYGIPKYNIPGLKSKIDPLLIARRDYAYGTQRDYIDHQDIIGWTREGIDTKPNSGLAALITDGPGGSKWMYVGKKHAGKVFYDLTGNRSDTVTINADGWGEFKVNGGSVSIWVAK

SEQ ID NO: 33569 - protein, 483 aa, Bacillus sp. (in: firmicutes)
HHDGTNGTIMQYFEWNVPNDGQHWNRLHNNAQNLKNAGITAIWIPPAWKGTSQNDVGYGAYDLYDLGEFNQKGTVRTKYGTKAELERAIRSLKANGIQVYGDVVMNHKGGADFTERVQAVEVNPQNRNQEVSGTYQIEAWTGFNFPGRGNQHSSFKWRWHHFDGTDWDQSRQLANRIYKFRGKAWDWEVDTENGNYDYLLYADVDMDHPDVINELNRWGVWYANTLNLDGFRLDAVKHIKFSFMRDWLGHVRGQTGKNLFAVAEYWKNDLGALNNYLSKTNYTMSAFDVPLHYNLYQASNSSGNYDMRNLLNGTLVQSHPSHAVTFVDNHDTQPGEALESFVQGWFKPLAYATILTREQGYPQVFYGDYYGIPSDGVPSYRQQIDPLLKARQQYAYGRQHDYFDHHDVIGWTREGNASHPNSGLATIMSDGPGGSKTMYVGRQKAGEVWHDMTGNRSGTVTINQDGNGHFIVNKGSVSVWVKR

SEQ ID NO: 33570 - protein, 483 aa, Synthetic construct
HHNGTNGTMMQYFEWYLPNDGQHWRRLQNDASNLKSKGITAVWIPPAWKGTSQADVGYGAYDLYDLGEFHQKGTVRTKYGTKGELQAAIKSLHNNGINVYGDVVMNHKGGADATEDVTAVEVNPNNRNQVVTGEYLIKAWTHFHFPGRGSTYSDFKWYWYHFDGVDWDQSRRLNNRIYKFQGKAWDWPVDTENGNYDYLMYADIDMDHPEVVNELRNWGVWYANELQLDGFRIDAVKHIKYSFTRDWINHVRSATGKNMFAVAEFWKNDLGAIENYLQKTNWNHSVFDVPLHYNLYNASKSGGNYDMRNIFNGTVVQRHPSHAVTFVDNHDSQPEEALESFVEEWFKPLAYALILTRESGYPSVFYGDYYGIPTHGVPAMRSKIDPILEARQKYAYGPQHDYLDHPDVIGWTREGDSSHPKSGLATLITDGPGGSKRMYAGLKNAGETWYDITGNRSDTVKIGSDGWGEFHVNDGSVSIYVQK

SEQ ID NO: 33571 - protein, 482 aa, Synthetic construct
HHNGTNGTMMQYFEWYLPNDGNHWNRLNSDASNLASKGITAVWIPPAWKGTSQADVGYGAYNLYDLGEFNQKGTVRTKYGTRSQLQAAVTSLKNNGIQVYGDVVINHKAGADATEMVTAVEVNPNNRNQEVTGEHTIEAYTRFDFPGRGNTHSSFKWRWYHFDGVDWDESRSLNRIYKFRGKAWDWPVDTENGNYDYLMYADLDYDHPEVVNEIRNWGVWYTNTLGLDGFRLDAVKHIKFSFLRDWVNHVRSATGKNMFTVAEYWKNDLGAIENYLNFTNWNHSVFDVPLHYNLYAASTSGGNYDMRNIFNGTVVQRHPSHAVTFVDNHDSQPEEALESTVETWFKPLAYALTLTREQGYPSVFYGDYYGTPTHGIPALRSKIDPILEARQKYAYGPQHDYLDHPDIIGWTREGDSSHPNSGLATLITDGPGGAKRMYVGAKNAGETWHDITGNRSEPVVINSEGWGTFHVNKGSVSIYVQR

SEQ ID NO: 33572 - protein, 482 aa, Bacillus sp. SP70
HHNGTNGTMMQYFEWYLPNDGNHWNRLNSDASNLKSKGITAVWIPPAWKGASQNDVGYGAYDLYDLGEFNQKGTVRTKYGTRSQLQAAVTSLKNNGIQVYGDVVMNHKAGADETEVFKVIEVDPNDRTKEISEPFEIEGWTKFTFPGRGDQYSSFKWNSEHFNGTDFDAKGERTGVFRIAGKKWNWEVDTEFGNYDYLMFANIDYNHPDVVNELRNWGVWYTNTLGLDGFRIDAVKHIKYSFTRDWINHVRSATGKNMFAVAEFWKNDLGAIENYLQKTNWNHSVFDVPLHYNLYNASKSGGNYDMRNIFNGTVVQRHPSHAVTFVDNHDSQPEEALESFVEEWFKPLAYALTLTREQGYPSVFYGDYYGIPTHGVPAMRSKIDPILEARQKYAYGKQNDYLDHHNIIGWTREGNTAHPNSGLATIMSDGAGGSKWMFVGRNKAGQVWSDITGNRTGTVTINADGWGNFSVNGGSVSIWVNK

SEQ ID NO: 33573 - protein, 482 aa, Synthetic construct
NGTMMQYFEWYVPNDGQQWNRLRTDAPYLSSVGITAVWTPPAYKGTSQADVGYGPYDLYDLGEFNQKGTVRTKYGTKGELKSAVNTLHSNGIQVYGDVVMNHKAGADATEDVTAVEVNPANRNQETSEEYQIKAWTDFRFPGRGNTYSDFKWHWYHFDGADWDESRKISRIFKFRGEGKAWDWEVSSENGNYDYLMYADVDYDHPDVVNEMKKWGVWYANEVGLDGYRLDAVKHIKFSFLKDWVDNARAATGKEMFTVGEYWQNDLGALNNYLAKVNYNQSLFDAPLHYNFYAASTGGGYYDMRNILNNTLVASNPTKAVTLVENHDTQPGQSLESTVQPWFKPLAYAFILTRSGGYPSVFYGDMYGTKGTTTREIPALKSKIEPLLKARKDYAYGTQRDYIDNPDVIGWTREGDSTKAKSGLATVITDGPGGSKRMYVGTSNAGEIWYDLTGNRTDKITIGSDGYATFPVNGGSVSVWVQQ

SEQ ID NO: 33574 - protein, 481 aa, Bacillus sp. (in: firmicutes)
HDGTNGTIMQYFEWNVPNDGQHWNRLHNNAQNLKNAGITAIWIPPAWKGTSQSDTGYGAYDLYDLGEFNQKGTVRTKYGTKAELERAIRSLKANGIQVYGDVVMNHKAGADFTERVQAVEVNPQNRNQEVSGTYQIEAWTGFNFPGRGNQHSSFKWRWYHFDGTDWDESRKLNRIYKFRGKAWDWEVDTEFGNYDYLMYADLDMDHPEVINELNRWGVWYANTLNLDGFRLDAVKHIKFSFMRDWLGHVRGQTGKNLFAVAEYWKNDLGALENYLSKTNWTMSAFDVPLHYNLYQASNSSGNYDMRNLLNGTLVQRHPSHAVTFVDNHDTQPEEALESFVQGWFKPLAYATILTREQGYPQVFYGDYYGIPSDGVPSYRQQIDPLLAARQQYAYGRQHDYFDHWDVIGWTREGNASHPNSGLATIMSDGPGGSKWMYVGRQKAGEVWHDMTGNRSGTVTINQDGWGHFFVNGGSVSVWVKR

SEQ ID NO: 33575 - protein, 481 aa, Bacillus sp. (in: firmicutes)
HDGTNGTIMQYFEWNVPNDGQHWNRLHNNAQNLKNAGITAIWIPPAWKGTSQSDTGYGAYDLYDLGEFNQKGTVRTKYGTKAELERAIRSLKANGIQVYGDVVMNHKAGADFTERVQAVEVNPQNRNQEVSGTYQIEAWTGFNFPGRGNQHSSFKWRWYHFDGTDWDESRKLNRIYKFRGKAWDWEVDTEFGNYDYLMYADLDMDHPEVINELNRWGVWYANTLNLDGFRLDAVKHIKFSFMRDWLGHVRGQTGKNLFAVAEYWKNDLGALENYLSKTNWTMSAFDVPLHYNLYQASQSSGNYDMRNLLNGTLVQRHPSHAVTFVDNHDTQPGEALESFVQGWFKPLAYATILTREQGYPQVFYGDYYGIPSDGVPSYRQLIDPLLAARQQYAYGRQHDYFDHWDVIGWTREGNASHPNSGLATIMSDGPGGSKWMYVGRQKAGEVWHDMTGNRSGTVTINQDGWGHFFVNGGSVSVWVKR

SEQ ID NO: 33576 - protein, 481 aa, Bacillus sp. (in: firmicutes)
HDGTNGTIMQYFEWNVPNDGQHWNRLHNNAQNLKNAGITAIWIPPAWKGTSQSDTGYGAYDLYDLGEFNQKGTVRTKYGTKAELERAIRSLKANGIQVYGDVVMNHKAGADFTERVQAVEVNPQNRNQEVSGTYQIEAWTGFNFPGRGNQHSSFKWRWYHFDGTDWDESRKLNRIYKFRGKAWDWEVDTEFGNYDYLMYADLDMDHPEVINELNRWGVWYANTLNLDGFRLDAVKHIKFSFMRDWLGHVRGQTGKNLFAVAEYWKNDIGALENYLSKTNWTMSAFDVPLHYNLYQASNSSGNYDMRNLLNGTLVQRHPSHAVTFVDNHDTQPGEALESFVQGWFKPLAYATILTREQGYPQVFYGDYYGIPSDGVPSYRQQIDPLLAARQQYAYGRQHDYFDHWDVIGWTREGNASHPNSGLATIMSDGPGGSKWMYVGRQKAGEVWHDMTGNRSGTVTINQDGWGHFFVNGGSVSVWVKR

SEQ ID NO: 33577 - protein, 481 aa, Bacillus sp. (in: firmicutes)
HDGTNGTIMQYFEWNVPNDGQHWNRLHNNAQNLKNAGITAIWIPPAWKGTSQSDTGYGAYDLYDLGEFNQKGTVRTKYGTKAELERAIRSLKANGIQVYGDVVMNHKAGADFTERVQAVEVNPQNRNQEVSGTYQIEAWTGFNFPGRGNQHSSFKWRWYHFDGTDWDESRKLNRIYKFRGKAWDWEVDTEFGNYDYLMYADLDMDHPEVINELNRWGVWYANTLNLDGFRLDAVKHIKFSFMRDWLGHVRGQTGKNLFAVAEYWKNDLGSLENYLSKTNWTMSAFDVPLHYNLYQASNSSGNYDMRNLLNGTLVQRHPSHAVTFVDNHDTQPGEALESFVQGWFKPLAYATILTREQGYPQVFYGDYYGIPSDGVPSYRQQIDPLLAARQQYAYGRQHDYFDHWDVIGWTREGNASHPNSGLATIMSDGPGGSKWMYVGRQKAGEVWHDMTGNRSGTVTINQDGWGHFFVNGGSVSVWVKR

SEQ ID NO: 33578 - protein, 481 aa, Bacillus sp. (in: firmicutes)
HDGTNGTIMQYFEWNVPNDGQHWNRLHNNAQNLKNAGITAIWIPPAWKGTSQSDTGYGAYDFYDLGEFNQKGTVRTKYGTKAELERAIRSLKANGIQVYGDVVMNHKAGADFTERVQAVEVNPQNRNQEVSGTYQIEAWTGFNFPGRGNQHSSFKWRWYHFDGTDWDESRKLNRIYKFRGKAWDWEVDTEFGNYDYLMYADLDMDHPEVINELNRWGVWYANTLNLDGFRLDAVKHIKFSFMRDWLGHVRGQTGKNLFAVAEYWKNDLGALENYLSKTNWTMSAFDVPLHYNLYQASNSSGNYDMRNLLNGTLVQRHPSHAVTFVDNHDTQPGEALESFVQGWFKPLAYATILTREQGYPQVFYGDYYGIPSDGVPSYRQQIDPLLAARQQYAYGRQHDYFDHWDVIGWTREGNASHPNSGLATIMSDGPGGSKWMYVGRQKAGEVWHDMTGNRSGTVTINQDGWGHFFVNGGSVSVWVKR

SEQ ID NO: 33579 - protein, 481 aa, Bacillus sp. (in: firmicutes)
HDGTNGTIMQYFEWNVPNDGQHWNRLHNNAQNLKNAGITAIWIPPAWKGTSQSDIGYGAYDLYDLGEFNQKGTVRTKYGTKAELERAIRSLKANGIQVYGDVVMNHKAGADFTERVQAVEVNPQNANQEVSGTYQIEAWTGFNFPGRGNQHSSFKWRWYHFDGTDWDESRKLNRIYKFRGKAWDWEVDTEFGNYDYLMYADLDMDHPEVINELNRWGVWYANTLNLDGFRLDAVKHIKFSFMRDWLGHVRGQTGKNLFAVAEYWKNDLGALENYLSKTNWTMSAFDVPLHYNLYQASNSSGNYDMRNLLNGTLVQRHPSHAVTFVDNHDTQPGEALESFVQGWFKPLAYATILTREQGYPQVFYGDYYGIPSDGVPSYRQLIDPLLAARQQYAYGRQHDYFDHWDVIGWTREGNASHPNSGLATIMSDGPGGSKWMYVGRQKAGEVWHDMTGNRSGTVTINQDGWGHFFVNGGSVSVWVKR

SEQ ID NO: 33580 - protein, 481 aa, Bacillus sp. (in: firmicutes)
HDGTNGTIMQYFEWNVPNDGQHWNRLHNNAQNLKNAGITAIWIPPAWKGTSQSDTGYGAYDLYDLGEFNQKGTVRTKYGTKAELERAIRSLKANGIQVYGDVVMNHKAGADFTERVQAVEVNPQNRNQEVSGTYQIEAWTGFNFPGRGNQHSSFKWRWYHFDGTDWDESLKLNRIYKFRGKAWDWEVDTEFGNYDYLMYADLDMDHPEVINELNRWGVWYANTLNLDGFRLDAVKHIKFSFMRDWLGHVRGQTGKNLFAVAEYWKNDLGALENYLSKTNWTMSAFDVPLHYNLYQASNSSGNYDMRNLLNGTLVQRHPSHAVTFVDNHDTQPGEALESFVQGWFKPLAYATILTREQGYPQVFYGDYYGIPSDGVPSYRQQIDPLLAARQQYAYGRQHDYFDHWDVIGWTREGNASHPNSGLATIMSDGPGGSKWMYVGRQKAGEVWHDMTGNRSGTVTINQDGWGHFFVNGGSVSVWVKR

SEQ ID NO: 33581 - protein, 481 aa, Bacillus sp. (in: firmicutes)
HDGTNGTIMQYFEWNVPNDGQHWNRLHNNAQNLKNAGITAIWIPPAWKGTSQSDTGYGAYDLYDLGEFNQKGTVRTKYGTKAELERAIRSLKANGIQVYGDVVMNHKAGADFTERVQAVEVNPQNRNQEVSGTYQIEAWTGFNFPGRGNQHSSFKWRWYHFDGTDWDESRKLNRIYKFRGKAWDWEVDTEFGNYDYLMYADLDMNHPEVINELNRWGVWYANTLNLDGFRLDAVKHIKFSFMRDWLGHVRGQTGKNLFAVAEYWKNDLGALENYLSKTNWTMSAFDVPLHYNLYQASNSSGNYDMRNLLNGTLVQRHPSHAVTFVDNHDTQPGEALESFVQGWFKPLAYATILTREQGYPQVFYGDYYGIPSDGVPSYRQQIDPLLAARQQYAYGRQHDYFDHWDVIGWTREGNASHPNSGLATIMSDGPGGSKWMYVGRQKAGEVWHDMTGNRSGTVTINQDGWGHFFVNGGSVSVWVKR

SEQ ID NO: 33582 - protein, 481 aa, Bacillus sp. (in: firmicutes)
HDGTNGTIMQYFEWNVPNDGQHWNRLHNNAQNLKNAGITAIWIPPAWKGTSQSDTGYGAYDLYDLGEFNQKGTVRTKYGTKAELERAIRSLKANGIQVYGDVVMNHKAGADFTERVQAVEVNPQNRNQEVSGTYQIEAWTGFNFPGRGNQHSSFKWRWYHFDGTDWDESRKLNRIYKFRGKAWDWEVDTEFGNYDYLMYADLDMDHPEVINELNRWGVWYANTLNLDGFRLDAVKHIKFSFMRDWLGHVRGQTGKNLFAVAEYWKNDLGALENYLSKTNWTMSAFDVPLHYNLYQASKSSGNYDMRNLLNGTLVQRHPSHAVTFVDNHDTQPGEALESFVQGWFKPLAYATILTREQGYPQVFYGDYYGIPSDGVPSYRQQIDPLLAARQQYAYGRQHDYFDHWDVIGWTREGNASHPNSGLATIMSDGPGGSKWMYVGRQKAGEVWHDMTGNRSGTVTINQDGWGHFFVNGGSVSVWVKR

SEQ ID NO: 33583 - protein, 481 aa, Bacillus sp. (in: firmicutes)
HDGTNGTIMQYFEWNVPNDGQHWNRLHNNAQNLKNAGITAIWIPPAWKGTSQSDTGYGAYDLYDLGEFNQKGTVRTKYGTKAELERAIRSLKANGIQVYGDVVMNHKAGADFTERVQAVEVNPQNRNQEVSGTYQIEAWTGFNFPGRGNQHSSFKWRWYHFDGTDWDESRKLNRIYKFSGKAWDWEVDTEFGNYDYLMYADLDMDHPEVINELNRWGVWYANTLNLDGFRLDAVKHIKFSFMRDWLGHVRGQTGKNLFAVAEYWKNDLGALENYLSKTNWTMSAFDVPLHYNLYQASNSSGNYDMRNLLNGTLVQRHPSHAVTFVDNHDTQPGEALESFVQGWFKPLAYATILTREQGYPQVFYGDYYGIPSDGVPSYRQQIDPLLAARQQYAYGRQHDYFDHWDVIGWTREGNASHPNSGLATIMSDGPGGSKWMYVGRQKAGEVWHDMTGNRSGTVTINQDGWGHFFVNGGSVSVWVKR

SEQ ID NO: 33584 - protein, 481 aa, Bacillus sp. (in: firmicutes)
HDGTNGTIMQYFEWYVPNDGQHWNRLHNNAQNLKNAGITAIWIPPAWKGTSQSDTGYGAYDLYDLGEFNQKGTVRTKYGTKAELERAIRSLKANGIQVYGDVVMNHKAGADFTERVQAVEVNPQNRNQEVSGTYQIEAWTGFNFPGRGNQHSSFKWRWYHFDGTDWDESRKLNRIYKFRGKAWDWEVDTEFGNYDYLLYADLDMDHPEVINELNRWGVWYANTLNLDGFRLDAVKHIKFSFMRDWLGHVRGQTGKNLFAVAEYWKNDLGALENYLSKTNWTMSAFDVPLHYNLYQASNSSGNYDMRNLLNGTLVQRHPSHAVTFVDNHDTQPGEALESFVQGWFKPLAYATILTREQGYPQVFYGDYYGIPSDGVPSYRQQIDPLLAARQQYAYGRQHDYFDHWDVIGWTREGNASHPNSGLATIMSDGPGGSKWMYVGRQKAGEVWHDMTGNRSGTVTINQDGWGHFFVNGGSVSVWVKR

SEQ ID NO: 33585 - protein, 481 aa, Bacillus sp. (in: firmicutes)
HDGTNGTIMQYFEWNVPNDGQHWNRLHNNAQNLKNAGITAIWIPPAWKGTSQSDTGYGAYDLYDLGEFNQKGTVRTKYGTKAELERAIRSLKANGIQVYGDVVMNHKAGADFTERVQAVEVNPQNRNQEVSGTYQIEAWTGFNFPGRGNQHSSFKWRWYHFDGTDWDESRKLNRIYKFRGKAWDWEVDTEFGNYDYLMYADLDMDHPEVINELNRWGVWYANTLNLDGFRLDAVKHIKFSFMRDWLGHVRGQTGKNLFAVAEYWKNDLGALENYLSKTNWTMSAFDAPLHYNLYQASNSSGNYDMRNLLNGTLVQRHPSHAVTFVDNHDTQPGEALESFVQGWFKPLAYATILTREQGYPQVFYGDYYGIPSDGVPSYRQQIDPLLAARQQYAYGRQHDYFDHWDVIGWTREGNASHPNSGLATIMSDGPGGSKWMYVGRQKAGEVWHDMTGNRSGTVTINQDGWGHFFVNGGSVSVWVKR

SEQ ID NO: 33586 - protein, 481 aa, Bacillus sp. (in: firmicutes)
HDGTNGTIMQYFEWNVPNDGQHWNRLHNNAQNLKNAGITAIWIPPAWKGTSQSDTGYGAYDLYDLGEFNQKGTVRTKYGTKAELLRAIRSLKANGIQVYGDVVMNHKAGADFTERVQAVEVNPQNRNQEVSGTYQIEAWTGFNFPGRGNQHSSFKWRWYHFDGTDWDESRKLNRIYKFRGKAWDWEVDTEFGNYDYLMYADLDMDHPEVINELNRWGVWYANTLNLDGFRLDAVKHIKFSFMRDWLGHVRGQTGKNLFAVAEYWKNDLGALENYLSKTNWTMSAFDVPLHYNLYQASNSSGNYDMRNLLNGTLVQRHPSHAVTFVDNHDTQPGEALESFVQGWFKPLAYATILTREQGYPQVFYGDYYGIPSDGVPSYRQQIDPLLAARQQYAYGRQHDYFDHWDVIGWTREGNASHPNSGLATIMSDGPGGSKWMYVGRQKAGEVWHDMTGNRSGTVTINQDGWGHFFVNGGSVSVWVKR

SEQ ID NO: 33587 - protein, 481 aa, Bacillus sp. (in: firmicutes)
HDGTNGTIMQYFEWNVPNDGQHWNRLHNNAQNLKNAGITAIWIPPAWKGTSQSDTGYGAYDLYDLGEFNQKGTVRTKYGTKAELERAIRSLKANGIQVYGDVVMNHKAGADFTERVQAVEVNPQNNNQEVSGTYQIEAWTGFNFPGRGNQHSSFKWRWYHFDGTDWDESRKLNRIYKFRGKAWDWEVDTEFGNYDYLMYADLDMDHPEVINELNRWGVWYANTLNLDGFRLDAVKHIKFSFMRDWLGHVRGQTGKNLFAVAEYWKNDLGALENYLSKTNWTMSAFDVPLHYNLYQASNSSGNYDMRNLLNGTLVQRHPSHAVTFVDNHDTQPGEALESFVQGWFKPLAYATILTREQGYPQVFYGDYYGIPSDGVPSYRQQIDPLLAARQQYAYGRQHDYFDHWDVIGWTREGNASHPNSGLATIMSDGPGGSKWMYVGRQKAGEVWHDMTGNRSGTVTINQDGWGHFFVNGGSVSVWVKR

SEQ ID NO: 33588 - protein, 481 aa, Bacillus sp. (in: firmicutes)
HDGTNGTIMQYFEWNVPNDGQHWNRLHNNAQNLKNAGITAIWIPPAWKGTSQSDTGYGAYDLYDLGEFNQKGTVRTKYGAKAELERAIRSLKANGIQVYGDVVMNHKAGADFTERVQAVEVNPQNRNQEVSGTYQIEAWTGFNFPGRGNQHSSFKWRWYHFDGTDWDESRKLNRIYKFRGKAWDWEVDTEFGNYDYLMYADLDMDHPEVINELNRWGVWYANTLNLDGFRLDAVKHIKFSFMRDWLGHVRGQTGKNLFAVAEYWKNDLGALENYLSKTNWTMSAFDVPLHYNLYQASNSSGNYDMRNLLNGTLVQRHPSHAVTFVDNHDTQPGEALESFVQGWFKPLAYATILTREQGYPQVFYGDYYGIPSDGVPSYRQQIDPLLAARQQYAYGRQHDYFDHWDVIGWTREGNASHPNSGLATIMSDGPGGSKWMYVGRQKAGEVWHDMTGNRSGTVTINQDGWGHFFVNGGSVSVWVKR

SEQ ID NO: 33589 - protein, 481 aa, Bacillus sp. (in: firmicutes)
HDGTNGTIMQYFEWNVPNDGQHWNRLHNNAQNLKNAGITAIWIPPAWKGTSQSDTGYGAYDLYDLGEFNQKGTVRTKYGTKAELERAIRSLKANGIQVYGDVVMNHKAGADFTERVQAVEVNPQNRNQEVSGTYQIEAWTGFNFPGRGNQHSSFKWRWYHFDGTDWDESRKLNRIYKFRGKAWDWEVDTEFGNYDYLLYADLDMDHPEVINELNRWGVWYANTLNLDGFRLDAVKHIKFSFMRDWLGHVRGQTGKNLFAVAEYWKNDLGALENYLSKTNWTMSAFDVPLHYNLYQASNSSGNYDMRNLLNGTLVQRHPSHAVTFVDNHDTQPGEALESFVQGWFKPLAYATILTREQGYPQVFYGDYYGIPSDGVPSYRQQIDPLLAARQQYAYGRQHDYFDHWDVIGWTREGNASHPNSGLATIMSDGPGGSKWMYVGRQKAGEVWHDMTGNRSGTVTINQDGWGHFFVNGGSVSVWVKR

SEQ ID NO: 33590 - protein, 481 aa, Bacillus sp. (in: firmicutes)
HDGTNGTIMQYFEWNVPNDGQHWNRLHNNAQNLKNAGITAIWIPPAWKGTSQSDTGYGAYDLYDLGEFNQKGTVRTKYGTKAELERAIRSLKANGIQVYGDVVMNHKAGADFTERVQAVEVNPQNRNQEVSGTYQIEAWTGFNFPGRGNQHSSFKWRWYHFDGTDWDESRKLNRIYKFRGKAWDWEVDTEFGNYDYLMYADLDMDHPEVINELNRWGVWYANTLNLDGFRLDAVKHIKFSFMRDWLGHVRGQTGKNLFAVAEYWKNDLGAIENYLSKTNWTMSAFDVPLHYNLYQASNSSGNYDMRNLLNGTLVQRHPSHAVTFVDNHDTQPGEALESFVQGWFKPLAYATILTREQGYPQVFYGDYYGIPSDGVPSYRQQIDPLLAARQQYAYGRQHDYFDHWDVIGWTREGNASHPNSGLATIMSDGPGGSKWMYVGRQKAGEVWHDMTGNRSGTVTINQDGWGHFFVNGGSVSVWVKR

SEQ ID NO: 33591 - protein, 481 aa, Bacillus sp. (in: firmicutes)
HDGTNGTIMQYFEWNVPNDGQHWNRLHNNAQNLKNAGITAIWIPPAWKGTSQSDTGYGAYDLYDLGEFNQKGTVRTKYGTKAELERAIRSLKANGIQVYGDVVMNHKAGADFTERVQAVEVNPQNRNQEVSGTYQIEAWTGFNFPGRGNQHSSFKWRWYHFDGTDWDESRKLNRIYKFRGKAWDWEVDTEFGNYDYLMYADLDMDHPEVINELNRWGVWYANTLNLDGFRLDAVKHIKFSFMRDWLGHVRGQTGKNLFAVAEYWKNDLGAVENYLSKTNWTMSAFDVPLHYNLYQASNSSGNYDMRNLLNGTLVQRHPSHAVTFVDNHDTQPGEALESFVQGWFKPLAYATILTREQGYPQVFYGDYYGIPSDGVPSYRQQIDPLLAARQQYAYGRQHDYFDHWDVIGWTREGNASHPNSGLATIMSDGPGGSKWMYVGRQKAGEVWHDMTGNRSGTVTINQDGWGHFFVNGGSVSVWVKR

SEQ ID NO: 33592 - protein, 481 aa, Bacillus sp. (in: firmicutes)
HDGTNGTIMQYFEWNVPNDGQHWNRLHNNAQNLKNAGITAIWIPPAWKGTSQSDTGYGAYDLYDLGEFNQKGTVRTKYGTKAELERAIRSLKANGIQVYGDVVMNHKAGADFTERVQAVEVNPQNRNQEVSGTYQIEAWTGFNFPGRGNQHSSFKWRWYHFDGTDWDESRKLNRIYKFRGKAWDWEVDTEFGNYDYLMYADLDMDHPEVINELNRWGVWYANTLNLDGFRLDAVKHIKFSFMRDWLGHVRGQTGKNLFAVAEYWKNDLGALENYLSKTNWTMSAFDVPLHYNLYQASNSSGHYDMRNLLNGTLVQRHPSHAVTFVDNHDTQPGEALESFVQGWFKPLAYATILTREQGYPQVFYGDYYGIPSDGVPSYRQQIDPLLAARQQYAYGRQHDYFDHWDVIGWTREGNASHPNSGLATIMSDGPGGSKWMYVGRQKAGEVWHDMTGNRSGTVTINQDGWGHFFVNGGSVSVWVKR

SEQ ID NO: 33593 - protein, 481 aa, Bacillus sp. (in: firmicutes)
HDGTNGTIMQYFEWNVPNDGQHWNRLHNNAQNLKNAGITAIWIPPAWKGTSQSDTGYGSYDLYDLGEFNQKGTVRTKYGTKAELERAIRSLKANGIQVYGDVVMNHKAGADFTERVQAVEVNPQNRNQEVSGTYQIEAWTGFNFPGRGNQHSSFKWRWYHFDGTDWDESRKLNRIYKFRGKAWDWEVDTEFGNYDYLMYADLDMDHPEVINELNRWGVWYANTLNLDGFRLDAVKHIKFSFMRDWLGHVRGQTGKNLFAVAEYWKNDLGALENYLSKTNWTMSAFDVPLHYNLYQASNSSGNYDMRNLLNGTLVQRHPSHAVTFVDNHDTQPGEALESFVQGWFKPLAYATILTREQGYPQVFYGDYYGIPSDGVPSYRQQIDPLLAARQQYAYGRQHDYFDHWDVIGWTREGNASHPNSGLATIMSDGPGGSKWMYVGRQKAGEVWHDMTGNRSGTVTINQDGWGHFFVNGGSVSVWVKR

SEQ ID NO: 33594 - protein, 481 aa, Bacillus sp. (in: firmicutes)
HDGTNGTIMQYFEWNVPNDGQHWNRLHNNAQNLKNAGITAIYIPPAWKGTSQSDTGYGAYDLYDLGEFNQKGTVRTKYGTKAELERAIRSLKANGIQVYGDVVMNHKAGADFTERVQAVEVNPQNRNQEVSGTYQIEAWTGFNFPGRGNQHSSFKWRWYHFDGTDWDESRKLNRIYKFRGKAWDWEVDTEFGNYDYLMYADLDMDHPEVINELNRWGVWYANTLNLDGFRLDAVKHIKFSFMRDWLGHVRGQTGKNLFAVAEYWKNDLGALENYLSKTNWTMSAFDVPLHYNLYQASNSSGNYDMRNLLNGTLVQRHPSHAVTFVDNHDTQPGEALESFVQGWFKPLAYATILTREQGYPQVFYGDYYGIPSDGVPSYRQQIDPLLAARQQYAYGRQHDYFDHWDVIGWTREGNASHPNSGLATIMSDGPGGSKWMYVGRQKAGEVWHDMTGNRSGTVTINQDGWGHFFVNGGSVSVWVKR

SEQ ID NO: 33595 - protein, 481 aa, Bacillus sp. (in: firmicutes)
HDGTNGTIMQYFEWNVPNDGQHWNRLHNNAQNLKNAGITAIWIPPAWKGTSQSDTGYGAYDLYDLGEFNQKGTVRTKYGTKAELERAIRSLKANGIQVYGDVVMNHKAGADFTERVQAVEVNPQNRNQEVSGTYQIEAWTGFNFPGRGNQHSSFKWRWYHFDGTDWDESRKLNRIYKFRGKEWDWEVDTEFGNYDYLMYADLDMDHPEVINELNRWGVWYANTLNLDGFRLDAVKHIKFSFMRDWLGHVRGQTGKNLFAVAEYWKNDLGALENYLSKTNWTMSAFDVPLHYNLYQASNSSGNYDMRNLLNGTLVQRHPSHAVTFVDNHDTQPGEALESFVQGWFKPLAYATILTREQGYPQVFYGDYYGIPSDGVPSYRQQIDPLLAARQQYAYGRQHDYFDHWDVIGWTREGNASHPNSGLATIMSDGPGGSKWMYVGRQKAGEVWHDMTGNRSGTVTINQDGWGHFFVNGGSVSVWVKR

SEQ ID NO: 33596 - protein, 481 aa, Bacillus sp. (in: firmicutes)
HDGTNGTIMQYFEWNVPNDGQHWNRLHNNAQNLKNAGITAIWIPPAWKGTSQSDTGYGAYDLYDLGEFNQKGTVRTKYGTKAELERAIRSLKANGIQVYGDVVMNHKAGADFTERVQAVEVNPQNRNQEVSGTYQIEAWTGFNFPGRGNQHSSFKWRWYHFDGTDWDESRKLNRIYKFRGKAWDWEVDTEFGNYDYLMYADLDMDHPEVINELNRWGVWYANTLNLDGFRLDAVKHIKFSFMRDWLGHVRGQTGKNLFAVAEYWKNDLGALENYLSKTNWTMSAFDVPLHYNLYQASNSSGQYDMRNLLNGTLVQRHPSHAVTFVDNHDTQPGEALESFVQGWFKPLAYATILTREQGYPQVFYGDYYGIPSDGVPSYRQQIDPLLAARQQYAYGRQHDYFDHWDVIGWTREGNASHPNSGLATIMSDGPGGSKWMYVGRQKAGEVWHDMTGNRSGTVTINQDGWGHFFVNGGSVSVWVKR

SEQ ID NO: 33597 - protein, 481 aa, Bacillus sp. (in: firmicutes)
HDGTNGTIMQYFEWNVPNDGQHWNRLHNNAQNLKNAGITAIWIPPAWKGTSQSDTGYGAYDLYDLGEFNQKGTVRTKYGTKAELERAIRSLKANGIQVYGDVVMNHKAGADFTERVQAVEVNPQNRNQEVSGTYQIEAWTGFNFPGRGNQHSSFKWKWYHFDGTDWDESRKLNRIYKFRGKAWDWEVDTEFGNYDYLMYADLDMDHPEVINELNRWGVWYANTLNLDGFRLDAVKHIKFSFMRDWLGHVRGQTGKNLFAVAEYWKNDLGALENYLSKTNWTMSAFDVPLHYNLYQASNSSGNYDMRNLLNGTLVQRHPSHAVTFVDNHDTQPGEALESFVQGWFKPLAYATILTREQGYPQVFYGDYYGIPSDGVPSYRQQIDPLLAARQQYAYGRQHDYFDHWDVIGWTREGNASHPNSGLATIMSDGPGGSKWMYVGRQKAGEVWHDMTGNRSGTVTINQDGWGHFFVNGGSVSVWVKR

SEQ ID NO: 33598 - protein, 481 aa, Bacillus sp. (in: firmicutes)
HDGTNGTIMQYFEWNVPNDGQHWNRLHNNAQNLKNAGITAIWIPPAWKGTSQSDTGYGAYDLYDLGEFNQKGTVRTKYGTKAELERAIRSLKANGIQVYGDVVMNHKAGADFTERVQAVEVNPQNRNQEVSGTYQIEAWTGFNFPGRGNQHSSFKWRWYHFDGTDWDESRNKSRIYKFRGKAWDWEVDTEFGNYDYLMYADLDMDHPEVINELNRWGVWYANTLNLDGFRLDAVKHIKFSFMRDWLGHVRGQTGKNLFAVAEYWKNDLGALENYLSKTNWTMSAFDVPLHYNLYQASNSSGNYDMRNLLNGTLVQRHPSHAVTFVDNHDTQPGEALESFVQGWFKPLAYATILTREQGYPQVFYGDYYGIPSDGVPSYRQQIDPLLAARQQYAYGRQHDYFDHWDVIGWTREGNASHPNSGLATIMSDGPGGSKWMYVGRQKAGEVWHDMTGNRSGTVTINQDGWGHFFVNGGSVSVWVKR

SEQ ID NO: 33599 - protein, 481 aa, Bacillus sp. (in: firmicutes)
HDGTNGTIMQYFEWNVPNDGQHWNRLHNNAQNLKNAGITAIWIPPAWKGTSQSDTGYGAYDLYDLGEFNQKGTVRTKYGTKAELERAIRSLKANGIQVYGDVVMNHKAGADFTERVQAVEVNPQNRNQEVSGTYQIEAWTGFNFPGRGNQHSSFKWRWYHFDGTDWDESRKLNRIYKFRGKAWDWEVDTEFGNYDYLMYADLDMDHPEVINELNRWGVWYANTLNLDGFRLDAVKHIKFSFMRDWLGHVRGQTGKNLFAVAEYWKNDLGALENYLSKTNWTMSAFDVPVHYNLYQASNSSGNYDMRNLLNGTLVQRHPSHAVTFVDNHDTQPGEALESFVQGWFKPLAYATILTREQGYPQVFYGDYYGIPSDGVPSYRQQIDPLLAARQQYAYGRQHDYFDHWDVIGWTREGNASHPNSGLATIMSDGPGGSKWMYVGRQKAGEVWHDMTGNRSGTVTINQDGWGHFFVNGGSVSVWVKR

SEQ ID NO: 33600 - protein, 481 aa, Bacillus sp. (in: firmicutes)
HDGTNGTIMQYFEWNVPNDGQHWNRLHNNAQNLKNAGITAIWIPPAWKGTSQSDTGYGAYDLYDLGEFNQKGTVRTKYGTKAELERAIRSLKANGIQVYGDVVMNHKAGADFTERVQAVEVNPQNRNQEVSGTYQIEAWTGFNFPGRGNQHSSFKWRWYHFDGTDWDESYKLNRIYKFRGKAWDWEVDTEFGNYDYLMYADLDMDHPEVINELNRWGVWYANTLNLDGFRLDAVKHIKFSFMRDWLGHVRGQTGKNLFAVAEYWKNDLGALENYLSKTNWTMSAFDVPLHYNLYQASNSSGNYDMRNLLNGTLVQRHPSHAVTFVDNHDTQPGEALESFVQGWFKPLAYATILTREQGYPQVFYGDYYGIPSDGVPSYRQQIDPLLAARQQYAYGRQHDYFDHWDVIGWTREGNASHPNSGLATIMSDGPGGSKWMYVGRQKAGEVWHDMTGNRSGTVTINQDGWGHFFVNGGSVSVWVKR

SEQ ID NO: 33601 - protein, 481 aa, Bacillus sp. (in: firmicutes)
HDGTNGTIMQYFEWNVPNDGQHWNRLHNNAQNLKNAGITAIWIPPAWKGTSQSDTGYGAYDLYDLGEFNQKGTVRTKYGTKAELERAIRSLKANGIQVYGDVVMNHKAGADFTERVQAVEVNPQNRNQEVSGTYQIEAWTGFNFPGRGNQHSSFKWRWYHFDGTDWDESRSLSRIYKFRGKAWDWEVDTEFGNYDYLMYADLDMDHPEVINELNRWGVWYANTLNLDGFRLDAVKHIKFSFMRDWLGHVRGQTGKNLFAVAEYWKNDLGALENYLSKTNWTMSAFDVPLHYNLYQASNSSGNYDMRNLLNGTLVQRHPSHAVTFVDNHDTQPGEALESFVQGWFKPLAYATILTREQGYPQVFYGDYYGIPSDGVPSYRQQIDPLLAARQQYAYGRQHDYFDHWDVIGWTREGNASHPNSGLATIMSDGPGGSKWMYVGRQKAGEVWHDMTGNRSGTVTINQDGWGHFFVNGGSVSVWVKR

SEQ ID NO: 33602 - protein, 481 aa, Bacillus sp. (in: firmicutes)
HDGTNGTIMQYFEWNVPNDGQHWNRLHNNAQNLKNAGITAIWIPPAWKGTSQSDTGYGAYDLYDLGEFNQKGTVRTKYGTKAELERAIRSLKANGIQVYGDVVMNHKAGADFTEHVQAVEVNPQNRNQEVSGTYQIEAWTGFNFPGRGNQHSSFKWRWYHFDGTDWDESRKLNRIYKFRGKAWDWEVDTEFGNYDYLMYADLDMDHPEVINELNRWGVWYANTLNLDGFRLDAVKHIKFSFMRDWLGHVRGQTGKNLFAVAEYWKNDLGALENYLSKTNWTMSAFDVPLHYNLYQASNSSGNYDMRNLLQGTLVQRHPSHAVTFVDNHDTQPGEALESFVQGWFKPLAYATILTREQGYPQVFYGDYYGIPSDGVPSYRQLIDPLLAARQQYAYGRQHDYFDHWDVIGWTREGNASHPNSGLATIMSDGPGGSKWMYVGRQKAGEVWHDMTGNRSGTVTINQDGWGHFFVNGGSVSVWVKR

SEQ ID NO: 33603 - protein, 481 aa, Bacillus sp. (in: firmicutes)
HDGTNGTIMQYFEWNVPNDGQHWNRLHNNAQNLKNAGITAIWIPPAWKGTSQSDTGYGAYDLYDLGEFNQKGTVRTKYGTKAELERAIRSLKANGIQVYGDVVMNHKAGADFTERVQAVEVNPQNRNQEVSGTYQIEAWTGFNFPGRGNQHSSFKWRWYHFDGTDWDESRKLNRIYKFRGKAWDWEVDTEFGNYDYLLYADLDMDHPEVINELNRWGVWYANTLNLDGFRLDAVKHIKFSFMRDWLGHVRGQTGKNLFAVAEYWKNDLGALENYLSKTNWTMSAFDVPLHYNLYQASNSSGNYDMRNLLNGTLVQSHPSHAVTFVDNHDTQPGEALESFVQGWFKPLAYATILTREQGYPQVFYGDYYGIPSDGVPSYRQQIDPLLAARQQYAYGRQHDYFDHWDVIGWTREGNASHPNSGLATIMSDGPGGSKWMYVGRQKAGEVWHDMTGNRSGTVTINQDGWGHFFVNGGSVSVWVKR

SEQ ID NO: 33604 - protein, 481 aa, Bacillus sp. (in: firmicutes)
HDGTNGTIMQYFEWNVPDDGQHWNRLHNNAQNLKNAGITAIWIPPAWKGTSQSDTGYGAYDLYDLGEFNQKGTVRTKYGTKAELERAIRSLKANGIQVYGDVVMNHKAGADFTERVQAVEVNPQNRNQEVSGTYQIEAWTGFNFPGRGNQHSSFKWRWYHFDGTDWDESRKLNRIYKFRGKAWDWEVDTEFGNYDYLMYADLDMDHPEVINELNRWGVWYANTLNLDGFRLDAVKHIKFSFMRDWLGHVRGQTGKNLFAVAEYWKNDLGALENYLSKTNWTMSAFDVPLHYNLYQASNSSGNYDMRNLLNGTLVQRHPSHAVTFVDNHDTQPGEALESFVQGWFKPLAYATILTREQGYPQVFYGDYYGIPSDGVPSYRQQIDPLLAARQQYAYGRQHDYFDHWDVIGWTREGNASHPNSGLATIMSDGPGGSKWMYVGRQKAGEVWHDMTGNRSGTVTINQDGWGHFFVNGGSVSVWVKR

SEQ ID NO: 33605 - protein, 481 aa, Bacillus sp. (in: firmicutes)
HDGTNGTIMQYFEWNVPNDGQHWNRLHNNAQNLKNAGITAIWIPPAWKGTSQSDTGYGAYDLYDLGEFNQKGTVRTKYGTKAELERAIRSLKANGIQVYGDVVMNHKAGADFTERVQAVEVNPQNFNQEVSGTYQIEAWTGFNFPGRGNQHSSFKWRWYHFDGTDWDESRKLNRIYKFRGKAWDWEVDTEFGNYDYLMYADLDMDHPEVINELNRWGVWYANTLNLDGFRLDAVKHIKFSFMRDWLGHVRGQTGKNLFAVAEYWKNDLGALENYLSKTNWTMSAFDVPLHYNLYQASNSSGNYDMRNLLNGTLVQRHPSHAVTFVDNHDTQPGEALESFVQGWFKPLAYATILTREQGYPQVFYGDYYGIPSDGVPSYRQQIDPLLAARQQYAYGRQHDYFDHWDVIGWTREGNASHPNSGLATIMSDGPGGSKWMYVGRQKAGEVWHDMTGNRSGTVTINQDGWGHFFVNGGSVSVWVKR

SEQ ID NO: 33606 - protein, 481 aa, Bacillus sp. (in: firmicutes)
HDGTNGTIMQYFEWNVPNDGQHWTRLHNNAQNLKNAGITAIWIPPAWKGTSQSDTGYGAYDLYDLGEFNQKGTVRTKYGTKAELERAIRSLKANGIQVYGDVVMNHKAGADFTERVQAVEVNPQNRNQEVSGTYQIEAWTGFNFPGRGNQHSSFKWRWYHFDGTDWDESRKLNRIYKFRGKAWDWEVDTEFGNYDYLMYADLDMDHPEVINELNRWGVWYANTLNLDGFRLDAVKHIKFSFMRDWLGHVRGQTGKNLFAVAEYWKNDLGALENYLSKTNWTMSAFDVPLHYNLYQASNSSGNYDMRNLLNGTLVQRHPSHAVTFVDNHDTQPGEALESFVQGWFKPLAYATILTREQGYPQVFYGDYYGIPSDGVPSYRQQIDPLLAARQQYAYGRQHDYFDHWDVIGWTREGNASHPNSGLATIMSDGPGGSKWMYVGRQKAGEVWHDMTGNRSGTVTINQDGWGHFFVNGGSVSVWVKR

SEQ ID NO: 33607 - protein, 481 aa, Bacillus sp. (in: firmicutes)
HDGTNGTIMQYFEWNVPNDGQHWNRLHNNAQNLKNAGITAIWIPPAWKGTSQSDTGYGAYDLYDLGEFNQKGTVRTKYGTKAELERAIRSLKANGIQVYGDVVMNHKAGADFTERVQAVEVNPQNRNQEVSGTYQIEAWTGFNFPGRGNQHSSFKWSWYHFDGTDWDESRKLNRIYKFRGKAWDWEVDTEFGNYDYLMYADLDMDHPEVINELNRWGVWYANTLNLDGFRLDAVKHIKFSFMRDWLGHVRGQTGKNLFAVAEYWKNDLGALENYLSKTNWTMSAFDVPLHYNLYQASNSSGNYDMRNLLNGTLVQRHPSHAVTFVDNHDTQPGEALESFVQGWFKPLAYATILTREQGYPQVFYGDYYGIPSDGVPSYRQQIDPLLAARQQYAYGRQHDYFDHWDVIGWTREGNASHPNSGLATIMSDGPGGSKWMYVGRQKAGEVWHDMTGNRSGTVTINQDGWGHFFVNGGSVSVWVKR

SEQ ID NO: 33608 - protein, 481 aa, Bacillus sp. (in: firmicutes)
HDGTNGTIMQYFEWNVPNDGQHWNRLHNNAQNLKNAGITAIWIPPAWKGTSQSDTGYGAYDLYDLGEFNQKGTVRTKYGTKAELERAIRSLKANGIQVYGDVVMNHKAGADFTERVQAVEVNPQNRNQEVSGTYQIEAWTGFNFPGRGNQHSSFKWCWYHFDGTDWDESRKLNRIYKFRGKAWDWEVDTEFGNYDYLMYADLDMDHPEVINELNRWGVWYANTLNLDGFRLDAVKHIKFSFMRDWLGHVRGQTGKNLFAVAEYWKNDLGALENYLSKTNWTMSAFDVPLHYNLYQASNSSGNYDMRNLLNGTLVQRHPSHAVTFVDNHDTQPGEALESFVQGWFKPLAYATILTREQGYPQVFYGDYYGIPSDGVPSYRQQIDPLLAARQQYAYGRQHDYFDHWDVIGWTREGNASHPNSGLATIMSDGPGGSKWMYVGRQKAGEVWHDMTGNRSGTVTINQDGWGHFFVNGGSVSVWVKR

SEQ ID NO: 33609 - protein, 481 aa, Bacillus sp. (in: firmicutes)
HDGTNGTIMQYFEWNVPNDGQHWNRLHNNAQNLKNAGITAIWIPPAWKGTSQSDTGYGAYDLYDLGEFNQKGTVRTKYGTKAELERAIRSLKANGIQVYGDVVMNHKAGADFTERVQAVEVNPQNRNQEVSGTYQIEAWTGFNFPGRGNQHSSFKWRWYHFDGTDWDESRKLNRIYKFRGKAWDWEVDTEFGNYDYLMYADLDMDHPEVINELNRWGVWYANTLNLDGFRLDAVKHIKFSFMRDWLGHVRGQTGKNLFAVAEYWKNDLGALENYLSKTNWTMSAFDVPLHYNLYQASNSSGNYDMRNLLNGTLVQRHPSHAVTFVDNHDTQPDEALESFVQGWFKPLAYATILTREQGYPQVFYGDYYGIPSDGVPSYRQQIDPLLAARQQYAYGRQHDYFDHWDVIGWTREGNASHPNSGLATIMSDGPGGSKWMYVGRQKAGEVWHDMTGNRSGTVTINQDGWGHFFVNGGSVSVWVKR

SEQ ID NO: 33610 - protein, 481 aa, Bacillus sp. (in: firmicutes)
HDGTNGTIMQYFEWNVPNDGQHWNRLHNNAQNLKNAGITAIWIPPAWKGTSQSDTGYGAYDLYDLGEFNQKGTVRTKYGTKAELERAIRSLKANGIQVYGDVVMNHKAGADFTERVQAVEVNPQNRNQEVSGTYQIEAWTGFNFPGRGNQHSSFKWRWYHFDGTDFDQSRKLNRIYKFRGKAWDWEVDTEFGNYDYLMYADLDMDHPEVINELNRWGVWYANTLNLDGFRLDAVKHIKFSFMRDWLGHVRGQTGKNLFAVAEYWKNDLGALENYLSKTNWTMSAFDVPLHYNLYQASNSSGNYDMRNLLNGTLVQRHPSHAVTFVDNHDTQPGEALESFVQGWFKPLAYATILTREQGYPQVFYGDYYGIPSDGVPSYRQQIDPLLAARQQYAYGRQHDYFDHWDVIGWTREGNASHPNSGLATIMSDGPGGSKWMYVGRQKAGEVWHDMTGNRSGTVTINQDGWGHFFVNKGSVSVWVKR

SEQ ID NO: 33611 - protein, 481 aa, Bacillus sp. (in: firmicutes)
HDGTNGTIMQYFEWNVPNDGQHWNRLHNNAQNLKNAGITAIWIPPAWKGTSQSDTGYGAYDLYDLGEFNQKGTVRTKYGTKAELERAIRSLKANGIQVYGDVVMNHKAGADFTERVQAVEVNPQNRNQEVSGTYQIEAWTGFNFPGRGNQHSSFKWRWYHFDGTDWDESRKLNRIYKFRGKAWDWEVDTEFGNYDYLMYADLDMDHPEVINELNRWGVWYANTLNLDGFRLDAVKHIKFSFMRDWLGHVRGQTGKNLFAVAEYWKNDLGALENYLSKTNWTMSAFDVPLHYNLYQASNSSGRYDMRNLLNGTLVQRHPSHAVTFVDNHDTQPGEALESFVQGWFKPLAYATILTREQGYPQVFYGDYYGIPSDGVPSYRQLIDPLLAARQQYAYGRQHDYFDHWDVIGWTREGNASHPNSGLATIMSDGPGGSKWMYVGRQKAGEVWHDMTGNRSGTVTINQDGWGHFFVNGGSVSVWVKR

SEQ ID NO: 33612 - protein, 481 aa, Bacillus sp. (in: firmicutes)
HDGTNGTIMQYFEWNVPNDGQHWNRLHNNAQNLKNAGITAIWIPPAWKGTSQSDTGYGAYDLYDLGEFNQKGTVRTKYGTKAELERAIRSLKANGIQVYGDVVMNHKAGADFTERVQAVEVNPQNRNQEVSGTYQIEAWTGFNFPGRGNQHSSFKWRWHHFDGTDWDESRKLNRIYKFRGKAWDWEVDTEFGNYDYLMYADLDMDHPEVINELNRWGVWYANTLNLDGFRLDAVKHIKFSFMRDWLGHVRGQTGKNLFAVAEYWKNDLGALENYLSKTNWTMSAFDVPLHYNLYQASNSSGNYDMRNLLNGTLVQRHPSHAVTFVDNHDTQPGEALESFVQGWFKPLAYATILTREQGYPQVFYGDYYGIPSDGVPSYRQQIDPLLAARQQYAYGRQHDYFDHWDVIGWTREGNASHPNSGLATIMSDGPGGSKWMYVGRQKAGEVWHDMTGNRSGTVTINQDGWGHFFVNGGSVSVWVKR

SEQ ID NO: 33613 - protein, 481 aa, Bacillus sp. (in: firmicutes)
HDGTNGTIMQYFEWNVPNDGQHWNRLHNNAQNLKNAGITAIWIPPAWKGTSQSDTGYGAYDLYDLGEFNQKGTVRTKYGTKAELERAIRSLKANGIQVYGDVVMNHKAGADFTERVQAVEVNPQNRNQEVSGTYQIEAWTGFNFPGRGNQHSSFKWRWYHFDGTDWDESRKLNRIYKFRGKAWDWEVDTEFGNYDYLMYADLDMDHPEVINELNRWGVWYANTLNLDGFRLDAVKHIKFSFMRDWLGHVRGQTGKNLFAVAEYWMNDLGALENYLSKTNWTMSAFDVPLHYNLYQASNSSGNYDMRNLLNGTLVQRHPSHAVTFVDNHDTQPGEALESFVQGWFKPLAYATILTREQGYPQVFYGDYYGIPSDGVPSYRQQIDPLLAARQQYAYGRQHDYFDHWDVIGWTREGNASHPNSGLATIMSDGPGGSKWMYVGRQKAGEVWHDMTGNRSGTVTINQDGWGHFFVNGGSVSVWVKR

SEQ ID NO: 33614 - protein, 481 aa, Bacillus sp. (in: firmicutes)
HDGTNGTIMQYFEWNVPNDGQHWNRLHNNAQNLKNAGITAIWIPPAWKGTSQSDTGYGAYDLYDLGEFNQKGTVRTKYGTKAELERAIRSLKANGIQVYGDVVMNHKAGADFTERVQAVEVNPQNRNQEVSGTYQIEAWTGFNFPGRGNQHSSFKWRWYHFDGTDWDESRKLNRIYKFRGKAWDWEVDTEFGNYDYLMYADLDMDHPEVINELNRWGVWYANTLNLDGFRLDAAKHIKFSFMRDWLGHVRGQTGKNLFAVAEYWKNDLGALENYLSKTNWTMSAFDVPLHYNLYQASNSSGNYDMRNLLNGTLVQRHPSHAVTFVDNHDTQPGEALESFVQGWFKPLAYATILTREQGYPQVFYGDYYGIPSDGVPSYRQQIDPLLAARQQYAYGRQHDYFDHWDVIGWTREGNASHPNSGLATIMSDGPGGSKWMYVGRQKAGEVWHDMTGNRSGTVTINQDGWGHFFVNGGSVSVWVKR

SEQ ID NO: 33615 - protein, 481 aa, Bacillus sp. (in: firmicutes)
HDGTNGTIMQYFEWNVPNDGQHWNRLHNNAQNLKNAGITAIWIPPAWKGTSQSDTGYGAYDLYDLGEFNQKGTVRTKYGTKAELERAIRSLKANGIQVYGDVVMNHKAGADFTERVQAVEVNPQNTNQEVSGTYQIEAWTGFNFPGRGNQHSSFKWRWYHFDGTDWDESRKLNRIYKFRGKAWDWEVDTEFGNYDYLMYADLDMDHPEVINELNRWGVWYANTLNLDGFRLDAVKHIKFSFMRDWLGHVRGQTGKNLFAVAEYWKNDLGALENYLSKTNWTMSAFDVPLHYNLYQASNSSGNYDMRNLLNGTLVQRHPSHAVTFVDNHDTQPGEALESFVQGWFKPLAYATILTREQGYPQVFYGDYYGIPSDGVPSYRQQIDPLLAARQQYAYGRQHDYFDHWDVIGWTREGNASHPNSGLATIMSDGPGGSKWMYVGRQKAGEVWHDMTGNRSGTVTINQDGWGHFFVNGGSVSVWVKR

SEQ ID NO: 33616 - protein, 481 aa, Bacillus sp. (in: firmicutes)
HDGTNGTIMQYFEWNVPNDGQHWNRLHNNAQNLKNAGITAIWIPPAWKGTSQSDTGYGAYDLYDLGEFNQKGTVRTKYGTKAELERAIRSLKANGIQVYGDVVMNHKAGADFTERVQAVEVNPQNRNQEVSGTYQIEAWTGFNFPGRGNQHSSFKWRWYHFDGTDWDQSRSKSAIYKFRGKAWDWEVDTEFGNYDYLMYADLDMDHPEVINELNRWGVWYANTLNLDGFRLDAVKHIKFSFMRDWLGHVRGQTGKNLFAVAEYWKNDLGALENYLSKTNWTMSAFDVPLHYNLYQASNSSGNYDMRNLLNGTLVQRHPSHAVTFVDNHDTQPGEALESFVQGWFKPLAYATILTREQGYPQVFYGDYYGIPSDGVPSYRQQIDPLLAARQQYAYGRQHDYFDHWDVIGWTREGNASHPNSGLATIMSDGPGGSKWMYVGRQKAGEVWHDMTGNRSGTVTINQDGWGHFFVNGGSVSVWVKR

SEQ ID NO: 33617 - protein, 481 aa, Bacillus sp. (in: firmicutes)
HDGTNGTIMQYFEWNVPNDGQHWMRLHNNAQNLKNAGITAIWIPPAWKGTSQSDTGYGAYDLYDLGEFNQKGTVRTKYGTKAELERAIRSLKANGIQVYGDVVMNHKAGADFTERVQAVEVNPQNRNQEVSGTYQIEAWTGFNFPGRGNQHSSFKWRWYHFDGTDWDESRKLNRIYKFRGKAWDWEVDTEFGNYDYLMYADLDMDHPEVINELNRWGVWYANTLNLDGFRLDAVKHIKFSFMRDWLGHVRGQTGKNLFAVAEYWKNDLGALENYLSKTNWTMSAFDVPLHYNLYQASNSSGNYDMRNLLNGTLVQRHPSHAVTFVDNHDTQPGEALESFVQGWFKPLAYATILTREQGYPQVFYGDYYGIPSDGVPSYRQQIDPLLAARQQYAYGRQHDYFDHWDVIGWTREGNASHPNSGLATIMSDGPGGSKWMYVGRQKAGEVWHDMTGNRSGTVTINQDGWGHFFVNGGSVSVWVKR

SEQ ID NO: 33618 - protein, 481 aa, Bacillus sp. (in: firmicutes)
HDGTNGTIMQYFEWNVPNDGQHWNRLHNNAQNLKNAGITAIWIPPAWKGTSQSDTGYGAYDLYDLGEFNQKGTVRTKYGTKAELERAIQSLKANGIQVYGDVVMNHKAGADFTERVQAVEVNPQNRNQEVSGTYQIEAWTGFNFPGRGNQHSSFKWRWYHFDGTDWDESRKLNRIYKFRGKAWDWEVDTEFGNYDYLMYADLDMDHPEVINELNRWGVWYANTLNLDGFRLDAVKHIKFSFMRDWLGHVRGQTGKNLFAVAVYWKNDLGALENYLSKTNWTMSAFDVPLHYNLYQASNSSGNYDMRNLLNGTLVQRHPSHAVTFVDNHDTQPGEALESFVQGWFKPLAYATILTREQGYPQVFYGDYYGIPSDGVPSYRQLIDPLLAARQQYAYGRQHDYFDHWDVIGWTREGNASHPNSGLATIMSDGPGGSKWMYVGRQKAGEVWHDMTGNRSGTVTINQDGWGHFFVNGGSVSVWVKR

SEQ ID NO: 33619 - protein, 481 aa, Bacillus sp. (in: firmicutes)
HDGTNGTIMQYFEWNVPNDGQHWKRLHNNAQNLKNAGITAIWIPPAWKGTSQSDTGYGAYDLYDLGEFNQKGTVRTKYGTKAELERAIRSLKANGIQVYGDVVMNHKAGADFTERVQAVEVNPQNRNQEVSGTYQIEAWTGFNFPGRGNQHSSFKWRWYHFDGTDWDESRKLNRIYKFRGKAWDWEVDTEFGNYDYLMYADLDMDHPEVINELNRWGVWYANTLNLDGFRLDAVKHIKFSFMRDWLGHVRGQTGKNLFAVAEYWKNDLGALENYLSKTNWTMSAFDVPLHYNLYQASNSSGNYDMRNLLNGTLVQRHPSHAVTFVDNHDTQPGEALESFVQGWFKPLAYATILTREQGYPQVFYGDYYGIPSDGVPSYRQQIDPLLAARQQYAYGRQHDYFDHWDVIGWTREGNASHPNSGLATIMSDGPGGSKWMYVGRQKAGEVWHDMTGNRSGTVTINQDGWGHFFVNGGSVSVWVKR

SEQ ID NO: 33620 - protein, 481 aa, Bacillus sp. (in: firmicutes)
HDGTNGTIMQYFEWNVPNDGQHWNRLHNNAQNLKNAGITAIWIPPAWKGTSQSDTGYGAYDLYDLGEFNQKGTVRTKYGTKAELERAIRSLKANGIQVYGDVVMNHKAGADFTERVQAVEVNPQNRNQEVSGTYQIEAWTGFNFPGRGNQHSSFKWRWYHFDGTDWDESRKLNRIYKFRGKAWDWEVDTEFGNYDYLMYADLDMDHPEVINELNRWGVWYANTLNLDGFRLDAVKHIKFSFMRDWLGHVRGQTGKNLFAVAEYWKNDLGALENYLSKTNWTMSAFDVPLHYNLYQASNSSGNYDMRNLLNNTLVQRHPSHAVTFVDNHDTQPGEALESFVQGWFKPLAYATILTREQGYPQVFYGDYYGIPSDGVPSYRQLIDPLLAARQQYAYGRQHDYFDHWDVIGWTREGNASHPNSGLATIMSDGPGGSKWMYVGRQKAGEVWHDMTGNRSGTVTINQDGWGHFFVNGGSVSVWVKR

SEQ ID NO: 33621 - protein, 481 aa, Bacillus sp. (in: firmicutes)
HDGTNGTIMQYFEWNVPNDGQHWNRLHNNAQNLKNAGITAIWIPPAWKGTSQSDTGYGAYDLYDLGEFNQKGTVRTKYGTKAELERAIRSLKANGIQVYGDVVMNHKAGADFTERVQAVEVNPQNRNQEVSGTYQIEAWTGFNFPGRGNQHSSFKWRWYHFDGTDWDESRKLNRIYKFRGKAWDWEVDTEFGNYDYLMYADLDMDHPEVINELNRWGVWYANTLNLDGFRLDAVKHIKFSFMRDWLGHVRGQTGKNLFAVAEYWKNDLGALENYLSKTNWTMSAFDVPLHYNLYQASHSSGNYDMRNLLNGTLVQRHPSHAVTFVDNHDTQPGEALESFVQGWFKPLAYATILTREQGYPQVFYGDYYGIPSDGVPSYRQQIDPLLAARQQYAYGRQHDYFDHWDVIGWTREGNASHPNSGLATIMSDGPGGSKWMYVGRQKAGEVWHDMTGNRSGTVTINQDGWGHFFVNGGSVSVWVKR

SEQ ID NO: 33622 - protein, 481 aa, Bacillus sp. (in: firmicutes)
HDGTNGTIMQYFEWNVPNDGQHWNRLHNNAQNLKNAGITAIWIPPAWKGTSQSDTGYGAYDLYDLGEFNQKGTVRTKYGTKAELERAIRSLKANGIQVYGDVVMNHKAGADFTERVQAVEVNPQNRNQEVSGTYQIEAWTGFNFPGRGNQHSSFKWHWYHFDGTDWDESRKLNRIYKFRGKAWDWEVDTEFGNYDYLMYADLDMDHPEVINELNRWGVWYANTLNLDGFRLDAVKHIKFSFMRDWLGHVRGQTGKNLFAVAEYWKNDLGALENYLSKTNWTMSAFDVPLHYNLYQASNSSGNYDMRNLLNGTLVQRHPSHAVTFVDNHDTQPGEALESFVQGWFKPLAYATILTREQGYPQVFYGDYYGIPSDGVPSYRQQIDPLLAARQQYAYGRQHDYFDHWDVIGWTREGNASHPNSGLATIMSDGPGGSKWMYVGRQKAGEVWHDMTGNRSGTVTINQDGWGHFFVNGGSVSVWVKR

SEQ ID NO: 33623 - protein, 481 aa, Bacillus sp. (in: firmicutes)
HDGTNGTIMQYFEWNVPNDGQHWNRLHNNAQNLKNAGITAIWIPPAWKGTSQSDTGYGAYDLYDLGEFNQKGTVRTKYGTKAELERAIRSLKANGIQVYGDVVMNHKAGADFTERVQAVEVNPQNLNQEVSGTYQIEAWTGFNFPGRGNQHSSFKWRWYHFDGTDWDESRKLNRIYKFRGKAWDWEVDTEFGNYDYLMYADLDMDHPEVINELNRWGVWYANTLNLDGFRLDAVKHIKFSFMRDWLGHVRGQTGKNLFAVAEYWKNDLGALENYLSKTNWTMSAFDVPLHYNLYQASNSSGNYDMRNLLNGTLVQRHPSHAVTFVDNHDTQPGEALESFVQGWFKPLAYATILTREQGYPQVFYGDYYGIPSDGVPSYRQQIDPLLAARQQYAYGRQHDYFDHWDVIGWTREGNASHPNSGLATIMSDGPGGSKWMYVGRQKAGEVWHDMTGNRSGTVTINQDGWGHFFVNGGSVSVWVKR

SEQ ID NO: 33624 - protein, 481 aa, Bacillus sp. (in: firmicutes)
HDGTNGTIMQYFEWNVPNDGQHWNRLHNNAQNLKNAGITAIWIPPAWKGTSQSDTGYGAYDLYDLGEFNQKGTVRTKYGTKAELERAIRSLKANGIQVYGDVVMNHKAGADFTERVQAVEVNPQNRNQEVSGTYQIEAWTGFNFPGRGNQHSSFKWRWYHFDGTDWDESRKLNRIYKFRGKAWDWEVDTEFGNYDYLMYADLDMDHPEVINELNRWGVWYANTLNLDGFRLDAVKHIKFSFMRDWLGHVRGQTGKNLFAVAEYWKNDLGALENYLSKTNWTMSAFDVPLHYNLYQASNSSGNYDMRNLLNGTLVQRHPSHAVTFVDNHDTQPGEALESFVQGWFKPLAYATILTREQGYPQVFYGDYYGIPSDGVPSYRQQIDPLLAARQQYAYGRQHDYFDHWDVIGWTREGNASHPNSGLATIMSDGPGGSKWMYVGRQKAGEVWHDMTGNRSGTVTINQDGWGHFFVNKGSVSVWVKR

SEQ ID NO: 33625 - protein, 481 aa, Bacillus sp. (in: firmicutes)
HDGTNGTIMQYFEWNVPNDGQHWNRLHNNAQNLKNAGITAIWIPPAWKGTSQSDTGYGAYDLYDLGEFNQKGTVRTKYGTKAELERAIRSLKANGIQVYGDVVMNHKAGADFTERVQAVEVNPQNRNQEVSGTYQIEAWTGFNFPGRGNQHSSFKWRWYHFDGTDWDESRKLNRIYKFRGKAWDWEVDTEFGNYDYLMYADLDMDHPEVINELNRWGVWYANTLNLDGFRLDAVKHIKFSFMRDWLGHVRGQTGKNLFAVAEYWKNDLGALENYLSKTNWTMSAFDVPLHYNLYQASNSSGKYDMRNLLNGTLVQRHPSHAVTFVDNHDTQPGEALESFVQGWFKPLAYATILTREQGYPQVFYGDYYGIPSDGVPSYRQQIDPLLAARQQYAYGRQHDYFDHWDVIGWTREGNASHPNSGLATIMSDGPGGSKWMYVGRQKAGEVWHDMTGNRSGTVTINQDGWGHFFVNGGSVSVWVKR

SEQ ID NO: 33626 - protein, 481 aa, Bacillus sp. (in: firmicutes)
HDGTNGTIMQYFEWNVPNDGQHWNRLHNNAQNLKNAGITAIWIPPAWKGTSQSDTGYGAYDLYDLGEFNQKGTVRTKYGTKAELERAIRSLKANGIQVYGDVVMNHKAGADFTERVQAVEVNPQNRNQEVSGTYQIEAWTGFNFPGRGNQHSSFKWRWYHFDGTDWDESRKLNRIYKFRGKAWDWEVDTEFGNYDYLMYADLDMDHPEVINELNRWGVWYANTLNLDGFRLDAVKHIKFSFMRDWLGHVRGQTGKNLFAVAEYWKNDLGALENYLSKTNWTMSAFDVPLHYNLYQASNSSGRYDMRNLLNGTLVQRHPSHAVTFVDNHDTQPGEALESFVQGWFKPLAYATILTREQGYPQVFYGDYYGIPSDGVPSYRQQIDPLLAARQQYAYGRQHDYFDHWDVIGWTREGNASHPNSGLATIMSDGPGGSKWMYVGRQKAGEVWHDMTGNRSGTVTINQDGWGHFFVNGGSVSVWVKR

SEQ ID NO: 33627 - protein, 481 aa, Bacillus sp. (in: firmicutes)
HDGTNGTIMQYFEWNVPNDGQHWNRLHNNAQNLKNAGITAIWIPPAWKGTSQSDTGYGAYDLYDLGEFNQKGTVRTKYGTKAELERAIRSLKANGIQVYGDVVMNHKAGADFTERVQAVEVNPQNRNQEVSGTYQIEAWTGFNFPGRGNQHSSFKWRWYHFDGTDWDESRKLNRIYKFRGKHWDWEVDTEFGNYDYLMYADLDMDHPEVINELNRWGVWYANTLNLDGFRLDAVKHIKFSFMRDWLGHVRGQTGKNLFAVAEYWKNDLGALENYLSKTNWTMSAFDVPLHYNLYQASNSSGNYDMRNLLNGTLVQRHPSHAVTFVDNHDTQPGEALESFVQGWFKPLAYATILTREQGYPQVFYGDYYGIPSDGVPSYRQQIDPLLAARQQYAYGRQHDYFDHWDVIGWTREGNASHPNSGLATIMSDGPGGSKWMYVGRQKAGEVWHDMTGNRSGTVTINQDGWGHFFVNGGSVSVWVKR

SEQ ID NO: 33628 - protein, 482 aa, Bacillus sp. (in: firmicutes)
HDGTNGTIMQYFEWNVPNDGQHWNRLHNNAQNLKNAGITAIWIPPAWKGTSQSDTGYGAYDLYDLGEFNQKGTVRTKYGTKAELERAIRSLKANGIQVYGDVVMNHKAGADFTERVQAVEVNPQNRNQEVSGTYQIEAWTGFNFPGRGNQHSSFKWRWYHFDGTDWDESRKLNRIYKFRGKKAWDWEVDTEFGNYDYLMYADLDMDHPEVINELNRWGVWYANNLNLDGFRLDAVKHIKFSFMRDWLGHVRGQTGKNLFAVAEYWKNDLGALENYLSKTNWTMSAFDVPLHYNLYQASNSSGNYDMRNLLNGTLVQRHPSHAVTFVDNHDTQPGEALESFVQGWFKPLAYATILTREQGYPQVFYGDYYGIPSDGVPSYRQQIDPLLAARQQYAYGRQHDYFDHWDVIGWTREGNASHPNSGLATIMSDGPGGSKWMYVGRQKAGEVWHDMTGNRSGTVTINQDGWGHFFVNGGSVSVWVKR

SEQ ID NO: 33629 - protein, 481 aa, Bacillus licheniformis
LNGTLMQYFEWYMPNDGQHWRRLQNDSAYLAEHGITAVWIPPAYKGTSQADVGYGAYDLYDLGEFHQKGTVRTKYGTKGELQSAIKSLHSRDINVYGDVVINHKGGADATEDVTAVEVDPADRNRVISGEHLIKAWTHFHFPGRGSTYSDFHWHWYHFDGTDWDESRKLNRIYLFQGKAWDWEVSNENGNYDYLMYADYDYDYPDVAAEITRWGTWYANELQLDGFRLDAVKHIKFSFLRDWVNHVREKTGKPMFTVAEYWQNDLGALENYLNKTNFNHSVFDVPLHYQFHAASTQGGGYDMRKLLNGTVVSKHPLKSVTFVDNHDTQPGQSLESTVQTWFKPLAYAFILTRESGYPSVFYGDMYGTKGDSQREIPALKHKIEPILKARKQYAYGAQHDYFDHHDIVGWTREGVSSVANSGLAALITDGPGGAKWMYVGRQNAGETWHDITGNRSEPVVINSEGWGEFHVNGGSVSIYVQR

SEQ ID NO: 33630 - protein, 481 aa, Bacillus licheniformis
LNGTLMQYFEWYMPNDGQHWRRLQNDSAYLAEHGITAVWIPPAYKGTSQADVGYGAYDLYDLGEFHQKGTVRTKYGTKGELQSAIKSLHSRDINVYGDVVINHKGGADATEDVTAVEVDPADRNRVISGEHLIKAWTHFHFPGRGSTYSDFKWHWYHFDGTDWDESRKLNRIYLFQGKAWDWEVSNENGNYDYLMYADYDYDYPDVAAEITRWGTWYANELQLDGFRLDAVKHIKFSFLRDWVNHVREKTGKPMFTVAEYWQNDLGALENYLNKTNFNHSVFDVPLHYQFHAASTQGGGYDMRKLLNGTVVSKHPLLSVTFVDNHDTQPGQSLESTVQTWFKPLAYAFILTRESGYPSVFYGDMYGTKGDSQREIPALKHKIEPILKARKQYAYGAQHDYFDHHDIVGWTREGVSSVANSGLAALITDGPGGAKWMYVGRQNAGETWHDITGNRSEPVVINSEGWGEFHVNGGSVSIYVQR

SEQ ID NO: 33631 - protein, 481 aa, Bacillus licheniformis
LNGTLMQYFEWYMPNDGQHWRRLQNDSAYLAEHGITAVWIPPAYKGTSQADVGYGAYDLYDLGEFHQKGTVRTKYGTKGELQSAIKSLHSRDINVYGDVVINHKGGADATEDVTAVEVDPADRNRVISGEHLIKAWTHFHFPGRGSTYSDFKWHWYHFDGTDWDESRKLNRIYLFQGKAWDWPVSNENGNYDYLMYADYDYDYPDVAAEITRWGTWYANELQLDGFRLDAVKHIRFSFLRDWVNHVREKTGKEMFTVAEYWQNDLGALENYLNKTNFNHSVFDVPLHYQFHAASTQGGGYDMRKLLNGTVVSMHPLKSVTFVDNHDTQPGQSLESTVQTWFKPLAYAFILTRESGYPSVFYGDMYGTKGDSQREIPALKHKIEPILKARKQYAYGAQHDYFDHHDIVGWTREGVSSVANSGLAALITDGPGGAKWMYVGRQNAGETWHDITGNRSEPVVINSEGWGEFHVNGGSVSIYVQR

SEQ ID NO: 33632 - protein, 481 aa, Bacillus licheniformis
LNGTLMQYFEWYMPNDGQHWRRLQNDSAYLAEHGITAVWIPPAYKGTSQADVGYGAYDLYDLGEFHQKGTVRTKYGTKGELQSAIKSLHSRDINVYGDVVINHKGGADATEDVTAVEVDPADRNRVISGEHLIKAWTHFHFPGRGSTYSDFKWHWYHFDGTDWDESRSLNRIYLFQGKAWDWEVSNENGNYDYLMYADYDYDYPDVAAEITRWGTWYANELQLDGFRLDAVKHIKFSFLRDWVNHVREKTGKPMFTVAEYWQNDLGALENYLNKTNFNHSVFDVPLHYQFHAASTQGGGYDMRKLLNGTVVSKHPLKSVTFVDNHDTQPGQSLESTVQTWFKPLAYAFILTRESGYPSVFYGDMYGTKGDSQREIPALKHKIEPILKARKQYAYGAQHDYFDHHDIVGWTREGVSSVANSGLAALITDGPGGAKWMYVGRQNAGETWHDITGNRSEPVVINSEGWGEFHVNGGSVSIYVQR

SEQ ID NO: 33633 - protein, 481 aa, Bacillus licheniformis
LNGTLMQYFEWYMPNDGQHWRRLQNDSAYLAEHGITAVWIPPAYKGTSQADVGYGAYDLYDLGEFHQKGTVRTKYGTKGELQSAIKSLHSRDINVYGDVVINHKGGADATEDVTAVEVDPADRNRVISGEHLIKAWTHFHFPGRGSTYSDFKWHWYHFDGTDWDESRRLNRIYLFQGKAWDWPVSNENGNYDYLMYADYDYDYPDVAAEITRWGTWYANELQLDGFRLDAVKHIKFSFLRDWVNHVREKTGKEMFTVAEYWQNDLGALENYLNKTNFNHSVFDVPLHYQFHAASTQGGGYDMRKLLNGTVVSKHPLKSVTFVDNHDTQPGQSLESTVQTWFKPLAYAFILTRESGYPSVFYGDMYGTKGDSQREIPALKHKIEPILKARKQYAYGAQHDYFDHHDIVGWTREGVSSVANSGLAALITDGPGGAKWMYVGRQNAGETWHDITGNRSEPVVINSEGWGEFHVNGGSVSIYVQR

SEQ ID NO: 33634 - protein, 481 aa, Bacillus licheniformis
LNGTLMQYFEWYMPNDGQHWRRLQNDSAYLAEHGITAVWIPPAYKGTSQADVGYGAYDLYDLGEFHQKGTVRTKYGTKGELQSAIKSLHSRDINVYGDVVINHKGGADATEDVTAVEVDPADRNRVISGEHLIKAWTHFHFPGRGSTYSDFKWHWYHFDGTDWDESRKLNRIYLFQGKAWDWEVSNENGNYDYLMYADYDYDYPDVAAEITRWGTWYANELQLDGFRLDAVKHIRFSFLRDWVNHVREKTGKPMFTVAEYWQNDLGALENYLNKTNFNHSVFDVPLHYQFHAASTQGGGYDMRKLLNGTVVSKHPLKSVTFVDNHDTQPGQSLESTVQTWFKPLAYAFILTRESGYPSVFYGDMYGTKGDSQREIPALKHKIEPILKARKQYAYGAQHDYFDHHDIVGWTREGVSSVANSGLAALITDGPGGAKWMYVGRQNAGETWHDITGNRSEPVVINSEGWGEFHVNGGSVSIYVQR

SEQ ID NO: 33635 - protein, 481 aa, Bacillus licheniformis
LNGTLMQYFEWYMPNDGQHWRRLQNDSAYLAEHGITAVWIPPAYKGTSQADVGYGAYDLYDLGEFHQKGTVRTKYGTKGELQSAIKSLHSRDINVYGDVVINHKGGADATEDVTAVEVDPADRNRVISGEHLIKAWTHFHFPGRGSTYSDFKWHWYHFDGTDWDESRKLNRIYLFQGKAWDWPVSNENGNYDYLMYADYDYDYPDVAAEITRWGTWYANELQLDGFRLDAVTHIKFSFLRDWVNHVREKTGKEMFTVAEYWQNDLGALENYLNKTNFNHSVFDVPLHYQFHAASTQGGGYDMRKLLNGTVVSMHPLKSVTFVDNHDTQPGQSLESTVQTWFKPLAYAFILTRESGYPSVFYGDMYGTKGDSQREIPALKHKIEPILKARKQYAYGAQHDYFDHHDIVGWTREGVSSVANSGLAALITDGPGGAKWMYVGRQNAGETWHDITGNRSEPVVINSEGWGEFHVNGGSVSIYVQR

SEQ ID NO: 33636 - protein, 481 aa, Bacillus licheniformis
LNGTLMQYFEWYMPNDGQHWRRLQNDSAYLAEHGITAVWIPPAYKGTSQADVGYGAYDLYDLGEFHQKGTVRTKYGTKGELQSAIKSLHSRDINVYGDVVINHKGGADATEDVTAVEVDPADRNRVISGEHLIKAWTHFHFPGRGSTYSDFKWHWYHFDGTDWDESRSLNRIYLFQGKAWDWPVSNENGNYDYLMYADYDYDYPDVAAEITRWGTWYANELQLDGFRLDAVKHIKFSFLRDWVNHVREKTGKEMFTVAEYWQNDLGALENYLNKTNFNHSVFDVPLHYQFHAASTQGGGYDMRKLLNGTVVSKHPLKSVTFVDNHDTQPGQSLESTVQTWFKPLAYAFILTRESGYPSVFYGDMYGTKGDSQREIPALKHKIEPILKARKQYAYGAQHDYFDHHDIVGWTREGVSSVANSGLAALITDGPGGAKWMYVGRQNAGETWHDITGNRSEPVVINSEGWGEFHVNGGSVSIYVQR

SEQ ID NO: 33637 - protein, 481 aa, Bacillus licheniformis
LNGTLMQYFEWYMPNDGQHWRRLQNDSAYLAEHGITAVWIPPAYKGTSQADVGYGAYDLYDLGEFHQKGTVRTKYGTKGELQSAIKSLHSRDINVYGDVVINHKGGADATEDVTAVEVDPADRNRVISGEHLIKAWTHFHFPGRGSTYSDFKWHWYHFDGTDWDESRKLNRIYLFQGKAWDWPVSNENGNYDYLMYADYDYDYPDVAAEITRWGTWYANELQLDGFRLDAVKHIKFSFLRDWVNHVREKTGKEMFTVAEYWQNDLGALENYLNKTNFNHSVFDVPLHYQFHAASTQGGGYDMRKLLNGTVVSKHPLKSVTFVDNHDTQPGQSLESTVQTWFKPLAYAFILTRESGYPSVFYGDMYGTKGDSQREIPALKHKIEPILKARVDYAYGAQHDYFDHHDIVGWTREGVSSVANSGLAALITDGPGGAKWMYVGRQNAGETWHDITGNRSEPVVINSEGWGEFHVNGGSVSIYVQR

SEQ ID NO: 33638 - protein, 481 aa, Bacillus licheniformis
LNGTLMQYFEWYMPNDGQHWRRLQNDSAYLAEHGITAVWIPPAYKGTSQADVGYGAYDLYDLGEFHQKGTVRTKYGTKGELQSAIKSLHSRDINVYGDVVINHKGGADATEDVTAVEVDPADRNRVISGEHLIKAWTHFHFPGRGSTYSDFKWHWYHFDGTDWDESRKLNRIYLFQGKAWDWEVSNENGNYDYLMYADYDYDYPDVAAEITRWGTWYANELQLDGFRLDAVKHIKFSFLRDWVNHVREKTGKPMFTVAEYWQNDLGALENYLNKTNFNHSVFDVPLHYQFHAASTQGGGYDMRKLLNGTVVSKHPLKSVTFVDNHDTQPGQSLESTVQTWFKPLAYAFILTRESGYPSVFYGDMYGTKGDSQREIPALKHKIEPILKARVDYAYGAQHDYFDHHDIVGWTREGVSSVANSGLAALITDGPGGAKWMYVGRQNAGETWHDITGNRSEPVVINSEGWGEFHVNGGSVSIYVQR

SEQ ID NO: 33639 - protein, 481 aa, Bacillus licheniformis
LNGTLMQYFEWYMPNDGQHWRRLQNDSAYLAEHGITAVWIPPAYKGTSQADVGYGAYDLYDLGEFHQKGTVRTKYGTKGELQSAIKSLHSRDINVYGDVVINHKGGADATEDVTAVEVDPADRNRVISGEHLIKAWTHFHFPGRGSTYSDFKWHWYHFDGTDWDESRRLNRIYLFQGKAWDWEVSNENGNYDYLMYADYDYDYPDVAAEITRWGTWYANELQLDGFRLDAVKHIKFSFLRDWVNHVREKTGKPMFTVAEYWQNDLGALENYLNKTNFNHSVFDVPLHYQFHAASTQGGGYDMRKLLNGTVVSKHPLKSVTFVDNHDTQPGQSLESTVQTWFKPLAYAFILTRESGYPSVFYGDMYGTKGDSQREIPALKHKIEPILKARKQYAYGAQHDYFDHHDIVGWTREGVSSVANSGLAALITDGPGGAKWMYVGRQNAGETWHDITGNRSEPVVINSEGWGEFHVNGGSVSIYVQR

SEQ ID NO: 33640 - protein, 481 aa, Bacillus licheniformis
LNGTLMQYFEWYMPNDGQHWRRLQNDSAYLAEHGITAVWIPPAYKGTSQADVGYGAYDLYDLGEFHQKGTVRTKYGTKGELQSAIKSLHSRDINVYGDVVINHKGGADATEDVTAVEVDPADRNRVISGEHLIKAWTHFHFPGRGSTYSDFKWHWYHFDGTDWDESRKLNRIYLFQGKAWDWPVSNENGNYDYLMYADYDYDYPDVAAEITRWGTWYANELQLDGFRLDAVKHIKFSFLRDWVNHVREKTGKEMFTVAEYWQNDLGALENYLNKTNFNHSVFDVPLHYQFHAASTQGGGYDMRKLLNGTVVSKHPLLSVTFVDNHDTQPGQSLESTVQTWFKPLAYAFILTRESGYPSVFYGDMYGTKGDSQREIPALKHKIEPILKARKQYAYGAQHDYFDHHDIVGWTREGVSSVANSGLAALITDGPGGAKWMYVGRQNAGETWHDITGNRSEPVVINSEGWGEFHVNGGSVSIYVQR

SEQ ID NO: 33641 - protein, 481 aa, Bacillus licheniformis
LNGTLMQYFEWYMPNDGQHWRRLQNDSAYLAEHGITAVWIPPAYKGTSQADVGYGAYDLYDLGEFHQKGTVRTKYGTKGELQSAIKSLHSRDINVYGDVVINHKGGADATEDVTAVEVDPADRNRVISGEHLIKAWTHFHFPGRGSTYSDFSWHWYHFDGTDWDESRKLNRIYLFQGKAWDWEVSNENGNYDYLMYADYDYDYPDVAAEITRWGTWYANELQLDGFRLDAVKHIKFSFLRDWVNHVREKTGKPMFTVAEYWQNDLGALENYLNKTNFNHSVFDVPLHYQFHAASTQGGGYDMRKLLNGTVVSKHPLKSVTFVDNHDTQPGQSLESTVQTWFKPLAYAFILTRESGYPSVFYGDMYGTKGDSQREIPALKHKIEPILKARKQYAYGAQHDYFDHHDIVGWTREGVSSVANSGLAALITDGPGGAKWMYVGRQNAGETWHDITGNRSEPVVINSEGWGEFHVNGGSVSIYVQR

SEQ ID NO: 33642 - protein, 481 aa, Bacillus licheniformis
LNGTLMQYFEWYMPNDGQHWRRLQNDSAYLAEHGITAVWIPPAYKGTSQADVGYGAYDLYDLGEFHQKGTVRTKYGTKGELQSAIKSLHSRDINVYGDVVINHKGGADATEDVTAVEVDPADRNRVISGEHLIKAWTHFHFPGRGSTYSDFKWHWYHFDGTDWDESRKLNRIYLFQGKAWDWEVSNENGNYDYLMYADYDYDYPDVAAEITRWGTWYANELQLDGFRLDAVKHIKFSFLRDWVNHVREKTGKPMFTVAEYWQNDLGALENYLNKTNFNHSVFDVPLHYQFHAASTQGGGYDMRKLLNGTVVSKHPLKSVTFVDNHDTQPGQSLESTVQTWFKPLAYAFILTRESGYPSVFYGDMYGTKGDSQREIPALKHKIEPILKARVQYAYGAQHDYFDHHDIVGWTREGVSSVANSGLAALITDGPGGAKWMYVGRQNAGETWHDITGNRSEPVVINSEGWGEFHVNGGSVSIYVQR

SEQ ID NO: 33643 - protein, 481 aa, Bacillus licheniformis
LNGTLMQYFEWYMPNDGQHWRRLQNDSAYLAEHGITAVWIPPAYKGTSQADVGYGAYDLYDLGEFHQKGTVRTKYGTKGELQSAIKSLHSRDINVYGDVVINHKGGADATEDVTAVEVDPADRNRVISGEHLIKAWTHFHFPGRGSTYSDFKWHWYHFDGTDWDESRKLNRIYLFQGKAWDWPVSNENGNYDYLMYADYDYDYPDVAAEITRWGTWYANELQLDGFRLDAVKHIKFSFLRDWVNHVREKTGKEMFTVAEYWQNDLGALENYLNKTNFNHSVFDVPLHYQFHAASTQGGGYDMRKLLNGTVVSKHPLQSVTFVDNHDTQPGQSLESTVQTWFKPLAYAFILTRESGYPSVFYGDMYGTKGDSQREIPALKHKIEPILKARKQYAYGAQHDYFDHHDIVGWTREGVSSVANSGLAALITDGPGGAKWMYVGRQNAGETWHDITGNRSEPVVINSEGWGEFHVNGGSVSIYVQR

SEQ ID NO: 33644 - protein, 481 aa, Bacillus licheniformis
LNGTLMQYFEWYMPNDGQHWRRLQNDSAYLAEHGITAVWIPPAYKGTSQADVGYGAYDLYDLGEFHQKGTVRTKYGTKGELQSAIKSLHSRDINVYGDVVINHKGGADATEDVTAVEVDPADRNRVISGEHLIKAWTHFHFPGRGSTYSDFAWHWYHFDGTDWDESRKLNRIYLFQGKAWDWEVSNENGNYDYLMYADYDYDYPDVAAEITRWGTWYANELQLDGFRLDAVKHIKFSFLRDWVNHVREKTGKPMFTVAEYWQNDLGALENYLNKTNFNHSVFDVPLHYQFHAASTQGGGYDMRKLLNGTVVSKHPLKSVTFVDNHDTQPGQSLESTVQTWFKPLAYAFILTRESGYPSVFYGDMYGTKGDSQREIPALKHKIEPILKARKQYAYGAQHDYFDHHDIVGWTREGVSSVANSGLAALITDGPGGAKWMYVGRQNAGETWHDITGNRSEPVVINSEGWGEFHVNGGSVSIYVQR

SEQ ID NO: 33645 - protein, 481 aa, Bacillus licheniformis
LNGTLMQYFEWYMPNDGQHWRRLQNDSAYLAEHGITAVWIPPAYKGTSQADVGYGAYDLYDLGEFHQKGTVRTKYGTKGELQSAIKSLHSRDINVYGDVVINHKGGADATEDVTAVEVDPADRNRVISGEHLIKAWTHFHFPGRGSTYSDFKWHWYHFDGTDWDESRKLNRIYLFQGKAWDWPVSNENGNYDYLMYADYDYDYPDVAAEITRWGTWYANELQLDGFRLDAVKHIKFSFLRDWVNHVREKTGKEMFTVAEYWQNDLGALENYLNKTNFNHSVFDVPLHYQFHAASTQGGGYDMRKLLNGTVVSKHPLKSVTFVDNHDTQPGQSLESTVQTWFKPLAYAFILTRESGYPSVFYGDMYGTKGDSQREIPALKHKIEPILKARVQYAYGAQHDYFDHHDIVGWTREGVSSVANSGLAALITDGPGGAKWMYVGRQNAGETWHDITGNRSEPVVINSEGWGEFHVNGGSVSIYVQR

SEQ ID NO: 33646 - protein, 481 aa, Bacillus licheniformis
LNGTLMQYFEWYMPNDGQHWRRLQNDSAYLAEHGITAVWIPPAYKGTSQADVGYGAYDLYDLGEFHQKGTVRTKYGTKGELQSAIKSLHSRDINVYGDVVINHKGGADATEDVTAVEVDPADRNRVISGEHLIRAWTHFHFPGRGSTYSDFKWHWYHFDGTDWDESRKLNRIYLFQGKAWDWPVSNENGNYDYLMYADYDYDYPDVAAEITRWGTWYANELQLDGFRLDAVKHIKFSFLRDWVNHVREKTGKEMFTVAEYWQNDLGALENYLNKTNFNHSVFDVPLHYQFHAASTQGGGYDMRKLLNGTVVSKHPLKSVTFVDNHDTQPGQSLESTVQTWFKPLAYAFILTRESGYPSVFYGDMYGTKGDSQREIPALKHKIEPILKARKQYAYGAQHDYFDHHDIVGWTREGVSSVANSGLAALITDGPGGAKWMYVGRQNAGETWHDITGNRSEPVVINSEGWGEFHVNGGSVSIYVQR

SEQ ID NO: 33647 - protein, 481 aa, Bacillus licheniformis
LNGTLMQYFEWYMPNDGQHWRRLQNDSAYLAEHGITAVWIPPAYKGTSQADVGYGAYDLYDLGEFHQKGTVRTKYGTKGELQSAIKSLHSRDINVYGDVVINHKGGADATEDVTAVEVDPADRNRVISGEHLIKAWTHFHFPGRGSTYSDFKWHWYHFDGTDWDESRKLNRIYLFQGKAWDWEVSNENGNYDYLMYADYDYDYPDVAAEITRWGTWYANELQLDGFRLDAVKHIKFSFLRDWVNHVREKTGKPMFTVAEYWQNDLGALENYLNKTNFNHSVFDVPLHYQFHAASTQGGGYDMRKLLNGTVVSKHPLQSVTFVDNHDTQPGQSLESTVQTWFKPLAYAFILTRESGYPSVFYGDMYGTKGDSQREIPALKHKIEPILKARKQYAYGAQHDYFDHHDIVGWTREGVSSVANSGLAALITDGPGGAKWMYVGRQNAGETWHDITGNRSEPVVINSEGWGEFHVNGGSVSIYVQR

SEQ ID NO: 33648 - protein, 481 aa, Bacillus licheniformis
LNGTLMQYFEWYMPNDGQHWRRLQNDSAYLAEHGITAVWIPPAYKGTSQADVGYGAYDLYDLGEFHQKGTVRTKYGTKGELQSAIKSLHSRDINVYGDVVINHKGGADATEDVTAVEVDPADRNRVISGEHLIKAWTHFHFPGRGSTYSDFSWHWYHFDGTDWDESRKLNRIYLFQGKAWDWPVSNENGNYDYLMYADYDYDYPDVAAEITRWGTWYANELQLDGFRLDAVKHIKFSFLRDWVNHVREKTGKEMFTVAEYWQNDLGALENYLNKTNFNHSVFDVPLHYQFHAASTQGGGYDMRKLLNGTVVSKHPLKSVTFVDNHDTQPGQSLESTVQTWFKPLAYAFILTRESGYPSVFYGDMYGTKGDSQREIPALKHKIEPILKARKQYAYGAQHDYFDHHDIVGWTREGVSSVANSGLAALITDGPGGAKWMYVGRQNAGETWHDITGNRSEPVVINSEGWGEFHVNGGSVSIYVQR

SEQ ID NO: 33649 - protein, 481 aa, Bacillus licheniformis
LNGTLMQYFEWYMPNDGQHWRRLQNDSAYLAEHGITAVWIPPAYKGTSQADVGYGAYDLYDLGEFHQKGTVRTKYGTKGELQSAIKSLHSRDINVYGDVVINHKGGADATEDVTAVEVDPADRNRVISGEHLIKAWTHFHFPGRGSTYSDFAWHWYHFDGTDWDESRKLNRIYLFQGKAWDWPVSNENGNYDYLMYADYDYDYPDVAAEITRWGTWYANELQLDGFRLDAVKHIKFSFLRDWVNHVREKTGKEMFTVAEYWQNDLGALENYLNKTNFNHSVFDVPLHYQFHAASTQGGGYDMRKLLNGTVVSKHPLKSVTFVDNHDTQPGQSLESTVQTWFKPLAYAFILTRESGYPSVFYGDMYGTKGDSQREIPALKHKIEPILKARKQYAYGAQHDYFDHHDIVGWTREGVSSVANSGLAALITDGPGGAKWMYVGRQNAGETWHDITGNRSEPVVINSEGWGEFHVNGGSVSIYVQR

SEQ ID NO: 33650 - protein, 481 aa, Bacillus licheniformis
LNGTLMQYFEWYMPNDGQHWRRLQNDSAYLAEHGITAVWIPPAYKGTSQADVGYGAYDLYDLGEFHQKGTVRTKYGTKGELQSAIKSLHSRDINVYGDVVIDHKGGADATEDVTAVEVDPADRNRVISGEHLIKAWTHFHFPGRGSTYSDFKWHWYHFNGTDWDESRKLNRIYKFQGKNWNWEVSNENGNYDYLMYANIDYSHPDVAAEIKRWGTWYANELQLDGFRLDAVKHIPFWFLRDWVNHVREKTGKEMFTVAEYWQNDLGALENYLNKTNFNHSVFDVPLHYQFHAASTQGGGYDMRKLLNGTVVSKHPLKSVTFVDNHDTQPGQSLESTVQTWFKPLAYAFILTRESGYPQVFYGDMYGTKGDSQREIPALKHKIEPILKARKQYAYGAQHDYFDHHDIVGWTREGDSSVANSGLAALITDGPGGAKRMYVGRQNAGETWHDITGNRSEPVVINSEGWGEFHVNGGSVSIYVQR

SEQ ID NO: 33651 - protein, 481 aa, Bacillus licheniformis
LNGTLMQYFEWYMPNDGQHWRRLQNDSAYLAEHGITAVWIPPAYKGTSQADVGYGAYDLYDLGEFHQKGTVRTKYGTKGELQSAIKSLHSRDINVYGDVVINHKGGADATEDVTAVEVDPADRNRVISGEHLIKAWTHFHFPGRGSTYSDFKWHWYHFDGTDWDESRKLNRIYLFQGKAWDWEVSNENGNYDYLMYADYDYDYPDVAAEITRWGTWYANELQLDGFRLDAVTHIKFSFLRDWVNHVREKTGKPMFTVAEYWQNDLGALENYLNKTNFNHSVFDVPLHYQFHAASTQGGGYDMRKLLNGTVVSKHPLKSVTFVDNHDTQPGQSLESTVQTWFKPLAYAFILTRESGYPSVFYGDMYGTKGDSQREIPALKHKIEPILKARKQYAYGAQHDYFDHHDIVGWTREGVSSVANSGLAALITDGPGGAKWMYVGRQNAGETWHDITGNRSEPVVINSEGWGEFHVNGGSVSIYVQR

SEQ ID NO: 33652 - protein, 481 aa, Bacillus licheniformis
LNGTLMQYFEWYMPNDGQHWRRLQNDSAYLAEHGITAVWIPPAYKGTSQADVGYGAYDLYDLGEFHQKGTVRTKYGTKGELQSAIKSLHSRDINVYGDVVINHKGGADATEDVTAVEVDPADRNRVISGEHLIRAWTHFHFPGRGSTYSDFKWHWYHFDGTDWDESRKLNRIYLFQGKAWDWEVSNENGNYDYLMYADYDYDYPDVAAEITRWGTWYANELQLDGFRLDAVKHIKFSFLRDWVNHVREKTGKPMFTVAEYWQNDLGALENYLNKTNFNHSVFDVPLHYQFHAASTQGGGYDMRKLLNGTVVSKHPLKSVTFVDNHDTQPGQSLESTVQTWFKPLAYAFILTRESGYPSVFYGDMYGTKGDSQREIPALKHKIEPILKARKQYAYGAQHDYFDHHDIVGWTREGVSSVANSGLAALITDGPGGAKWMYVGRQNAGETWHDITGNRSEPVVINSEGWGEFHVNGGSVSIYVQR

SEQ ID NO: 33653 - protein, 481 aa, Bacillus licheniformis
LNGTLMQYFEWYMPNDGQHWRRLQNDSAYLAEHGITAVWIPPAYKGTSQADVGYGAYDLYDLGEFHQKGTVRTKYGTKGELQSAIKSLHSRDINVYGDVVINHKGGADATEDVTAVEVDPADRNRVISGEHLIKAWTHFHFPGRGSTYSDFHWHWYHFDGTDWDESRKLNRIYLFQGKAWDWPVSNENGNYDYLMYADYDYDYPDVAAEITRWGTWYANELQLDGFRLDAVKHIKFSFLRDWVNHVREKTGKEMFTVAEYWQNDLGALENYLNKTNFNHSVFDVPLHYQFHAASTQGGGYDMRKLLNGTVVSKHPLKSVTFVDNHDTQPGQSLESTVQTWFKPLAYAFILTRESGYPSVFYGDMYGTKGDSQREIPALKHKIEPILKARKQYAYGAQHDYFDHHDIVGWTREGVSSVANSGLAALITDGPGGAKWMYVGRQNAGETWHDITGNRSEPVVINSEGWGEFHVNGGSVSIYVQR

SEQ ID NO: 33654 - protein, 480 aa, Bacillus sp.
APINETMMQYFEWDLPDDGTLWNRLHNNAQNLKNAGITALWLPPAYKGTSQSDVGYGVYDLYDLGEFNQKGTIRTKYGTKTQLERAIRSLKANGIQVYADVVFNHKAGADGTEFVDAVEVDPSNRNQEVSGTYQIEAWTKFDFPGRGNTYSSFKWRWYHFDGTDWDESRSLNRIYKFRGKAWDWEVDTENGNYDYLMFADLDMDHPEVVTELQNWGTWYVNTTNIDGFRLDAVKHIKFSFMRDWLTYVRNQTGKNLFAVGEFWKDDLGALENYITKTNGSMSLFDAPLHNNFYTASKSDGYFDMRNLLNGTLVERHPSHAVTLVDEHDTQPGESLQSWVEPWFKPLAYAFILTRQEGYPCVFYGDYYGIPKYDIPGLKSKIDPLLIARRDYAYGTQRDYIDHQDIIGWTREGIDTKPNSGLAALITDGPGGSKWMYVGKKHAGKVFYDLTGNRSDTVTINADGWGEFKVNGGSVSIWVAK

SEQ ID NO: 33655 - protein, 480 aa, Bacillus sp.
APINETMMQYFEWDLPDDGTLWNRLHNNAQNLKNAGITALWLPPAYKGTSQSDVGYGVYDLYDLGEFNQKGTIRTKYGTKTQLERAIRSLKANGIQVYADVVFNHKAGADGTEFVDAVEVDPSNRNQEVSGTYQIEAWTKFDFPGRGNTYSSFKWRWYHFDGTDWDESRKLNRIYKFRGKAWDWEVDTENGNYDYLMFADLDMDHPEVVTELNRWGTWYVNTTNIDGFRLDAVKHIKFSFMRDWLTYVRNQTGKNLFAVGEFWKEDLGALENYITKTNGSMSLFDAPLHENFYTASKSSGYFDMRELLNGTLVQRHPSHAVTLVDEHDTQPGQSLESWVEPWFKPLAYAFILTRQEGYPCVFYGDYYGIPKYEIPGLKSKIDPLLIARRDYAYGTQRDYIDHQDIIGWTREGIDTKPNSGLAALITDGPGGSKWMYVGKKHAGKVFYDLTGNRSDTVTINADGWGEFKVNGGSVSIWVAK

SEQ ID NO: 33656 - protein, 493 aa, Aspergillus fumigatus
IRWSSFFLSCLAGTALAATPAQWRSQSIYFLLTDRFARTDGSTTASCDTSAREYCGGTWQGIIEQLDYIQGMGFTAIWITPVTKQLPQDTSEGTAYHGYWQQDIYSVNSNYGTADDLKALASALHDRGMYLMVDVVANHMGYAGAGDSVDYSVFNPFNSQTSFHPLCFISNYDNQTDVENCWLGDNSVPLPDLDTTNPDVQKIWYNWVNSLVSNYSIDGLRIDTVKHVQSDFWPGFNDAAGVYCIGEVFDGDPAYTCPYQEVLDGVLNYPIYYPLLKAFQSTSGSMSSLYDMINTVKSQCADSTLLGTFVENHDTPRFASYTKDMALAKNAAAFIIFSDGIPIIYAGQEQHYSGGADPANREAVWLSGYSTTSDLYKLIATANAIRSHAISKDPGYVTYKNNPIYKDTSTIAMRKGSDGAQIITVLSNLGASGSSYTLSLGGTGYEAGQQLTEMFSCTTVTVGSDKKVPVSMASGLPRVFYPTAGLNGSTVCT

SEQ ID NO: 33657 - protein, 482 aa, Bacillus sp.
HHNGTNGTLMQYFEWYLPNDGNHWNRLRSDASNLKDKGISAVWIPPAWKGASQNDVGYGAYDLYDLGEFNQKGTIRTKYGTRNQLQAAVNALKSNGIQVYGDVVMNHKAGADETEVFKVIEVDPNDRTKEISEPFEIEGWTKFTFPGRGDQYSSFKWNSEHFNGTDFDAKGERTGVFRIAGKKWNWEVDTEFGNYDYLMFANIDYNHPDVVNELRNWGVWYTNTLGLDGFRIDAVKHIKYSFTRDWINHVRSAIGKNMFAVAEFWKNDLGAIENYLNKTNWNHSVFDVPLHFNLYYASKSGGNYDMRQIFNGTVVQKHPTHAVTFVDNHDSQPEESLESFVREWFKPLAYALTLTREQGYPSVFYGDYYGIPTHGVPAMKSKIDPILEARQKYAYGRQNDYLDHHNIIGWTREGNTAHPNSGLATIMSDGAGGNKWMFVGRNKAGQVWTDITGNKAGTVTINADGWGNFSVNGGSVSIWVNK

SEQ ID NO: 33658 - protein, 482 aa, Synthetic construct
HHDGTNGTIMQYFEWNVPNDGQHWNRLHNNAQNLKNAGITAIWIPPAWKGTSQNDVGYGAYDLYDLGEFNQKGTVRTKYGTKAELERAIRSLKANGIQVYGDVVMNHKGGADATEDVTAVEVDPADRNRVISGEHLIKAWTHFHFPGRGSTYSDFKWHWYHFDGTDWDESRKLNRIYKFQGKAWDWEVSNEFGNYDYLMYADIDMDHPEVINELNRWGVWYANTLNLDGFRLDAVKHIKFSFMRDWLGHVRGQTGKNLFAVAEYWKNDLGALENYLSKTNWTMSAFDVPLHYNLYQASNSSGNYDMRNLLNGTLVQRHPSHAVTFVDNHDTQPGEALESFVQGWFKPLAYATILTREQGYPQVFYGDYYGIPSDGVPSYRQQIDPLLKARQQYAYGRQHDYFDHWDVIGWTREGNASHPNSGLATIMSDGPGGSKWMYVGRQKAGEVWHDMTGNRSGTVTINQDGWGHFFVNGGSVSVWVKR

SEQ ID NO: 33659 - protein, 484 aa, Bacillus sp.
HHNGTNGTMMQYFEWYLPNDGNHWNRLRSDASNLKDKGISAVWIPPAWKGASQNDVGYGAYDLYDLGEFNQKGTIRTKYGTRNQLQAAVNALKSNGIQVYGDVVMNHKAGADETEVFKVIEVDPNDRTKEISEPFEIEGWTKFTFPGRGDQYSSFKWNSEHFNGTDFDAKGERTGVFRIAGENKKWNENVDDEFGNYDYLMFANIDYNHPDVVNELRNWGVWYTNTLGLDGFRIDAVKHIKYSFTRDWINHVRSATGKNMFAVAEFWKNDLGAIENYLNKTNWNHSVFDVPLHYNLYNASKSGGNYDMRQIFNGTVVQRHPMHAVTFVDNHDSQPEEALESFVEEWFKPLAYALTLTREQGYPSVFYGDYYGIPTHGVPAMKSKIDPILEARQKYAYGRQNDYLDHHNIIGWTREGNTAHPNSGLATIMSDGAGGNKWMFVGRNKAGQVWTDITGNRAGTVTINADGWGNFSVNGGSVSIWVNK

SEQ ID NO: 33660 - protein, 481 aa, Bacillus sp. (in: firmicutes)
HDGTNGTIMQYFEWNVPNDGQHWNRLHNNAQNLKNAGITAIWIPPAWKGTSQSDTGYGAYDLYDLGEFNQKGTVRTKYGTKAELERAIRSLKANGIQVYGDVVMNHKAGADFTERVQAVEVNPQNRNQEVSGTYQIEAWTGFNFPGRGNQHSSFKWRWHHFDGTDWDESRKLNRIYKFRGKAWDWEVDTEFGNYDYLLYADLDMDHPEVINELNRWGVWYANTLNLDGFRLDAVKHIKFSFMRDWLGHVRGQTGKNLFAVAEYWKNDLGALENYLSKTNWTMSAFDVPLHYNLYQASNSSGNYDMRNLLNGTLVQRHPSHAVTFVDNHDTQPGEALESFVQGWFKPLAYATILTREQGYPQVFYGDYYGIPSDGVPSYRQQIDPLLAARQQYAYGRQHDYFDHWDVIGWTREGNASHPNSGLATIMSDGPGGSKWMYVGRQKAGEVWHDMTGNRSGTVTINQDGWGHFFVNGGSVSVWVKR

SEQ ID NO: 33661 - protein, 481 aa, Bacillus sp. (in: firmicutes)
HDGTNGTIMQYFEWNVPNDGQHWNRLHNNAQNLKNAGITAIWIPPAWKGTSQSDTGYGAYDLYDLGEFNQKGTVRTKYGTKAELERAIRSLKANGIQVYGDVVMNHKAGADFTERVQAVEVNPQNRNQEVSGTYQIEAWTGFNFPGRGNQHSSFKWRWYHFDGTDWDESRNLSRIYKFRGKAWDWEVDTEFGNYDYLMYADLDMDHPEVINELNRWGVWYANTLNLDGFRLDAVKHIKFSFMRDWLGHVRGQTGKNLFAVAEYWKNDLGALENYLSKTNWTMSAFDVPLHYNLYQASNSSGNYDMRNLLNGTLVQRHPSHAVTFVDNHDTQPGEALESFVQGWFKPLAYATILTREQGYPQVFYGDYYGIPSDGVPSYRQQIDPLLAARQQYAYGRQHDYFDHWDVIGWTREGNASHPNSGLATIMFDGPGGSKWMYVGRQKAGEVWHDMTGNRSGTVTINQDGWGHFFVNGGSVSVWVKR

SEQ ID NO: 33662 - protein, 481 aa, Bacillus sp. (in: firmicutes)
HDGTNGTIMQYFEWNVPNDGQHWNRLHNNAQNLKNAGITAIWIPPAWKGTSQSDTGYGAYDLYDLGEFNQKGTVRTKYGTKAELERAIRSLKANGIQVYGDVVMNHKAGADFTERVQAVEVNPQNRNQEVSGTYQIEAWTGFNFPGRGNQHSSFKWRWYHFDGTDWDESRKLNRIYKFRGKAWDWEVDTEFGNYDYLLYADLDMDHPEVINELNRWGVWYANTLNLDGFRLDAVKHIKFSFMRDWLGHVRGQTGKNLFAVAEYWKNDLGALENYLSKTNYTMSAFDVPLHYNLYQASNSSGNYDMRNLLNGTLVQRHPSHAVTFVDNHDTQPGEALESFVQGWFKPLAYATILTREQGYPQVFYGDYYGIPSDGVPSYRQQIDPLLAARQQYAYGRQHDYFDHWDVIGWTREGNASHPNSGLATIMSDGPGGSKWMYVGRQKAGEVWHDMTGNRSGTVTINQDGWGHFFVNGGSVSVWVKR

SEQ ID NO: 33663 - protein, 481 aa, Bacillus sp. (in: firmicutes)
HDGTNGTIMQYFEWNVPNDGQHWNRLHNNAQNLKNAGITAIWIPPAWKGTSQSDTGYGAYDLYDLGEFNQKGTVRTKYGTKAELERAIRSLKANGIQVYGDVVMNHKAGADFTERVQAVEVNPQNRNQEVSGTYQIEAWTGFNFPGRGNQHSSFKWRWYHFDGTDWDESRKLNRIYKFRGKAWDWEVDTEFGNYDYLMYADLDMDHPEVINELNRWGVWYANKLNLDGFRLDAVKHIKFSFMRDWLGHVRGQTGKNLFAVAEYWRNDLGALENYLSKTNWTMSAFDVPLHYNLYQASNSSGNYDMRNLLNGTLVQRHPSHAVTFVDNHDTQPGEALESFVQGWFKPLAYATILTREQGYPQVFYGDYYGIPSDGVPSYRQQIDPLLAARQQYAYGRQHDYFDHWDVIGWTREGNASHPNSGLATIMSDGPGGSKWMYVGRQKAGEVWHDMTGNRSGTVTINQDGWGHFFVNGGSVSVWVKR

SEQ ID NO: 33664 - protein, 481 aa, Bacillus licheniformis
LNGTLMQYFEWYMPNDGQHWRRLQNDSAYLAEHGITAVWIPPAYKGTSQADVGYGAYDLYDLGEFHQKGTVRTKYGTKGELQSAIKSLHSRDINVYGDVVINHKGGADATEDVTAVEVDPADRNRVISGEHLIKAWTHFHFPGRGSTYSDFKWHWYHFNGTDWDESRKLNRIYKFQNTNWNWEVSNENGNYDYLMYANIDYSHPDVAAEIKRWGTWYANELQLDGFRLDAVKHIPFWFLRDWVNHVREKTGKEMFTVAEYWQNDLGALENYLNKTNFNHSVFDVPLHYQFHAASTQGGGYDMRKLLNGTVVSKHPLKSVTFVDNHDTQPGQSLESTVQTWFKPLAYAFILTRESGYPQVFYGDMYGTKGDSQREIPALKHKIEPILKARKQYAYGAQHDYFDHHDIVGWTREGDSSVANSGLAALITDGPGGAKRMYVGRQNAGETWHDITGNRSEPVVINSEGWGEFHVNGGSVSIYVQR

SEQ ID NO: 33665 - protein, 481 aa, Bacillus sp.
APINETMMQYFEWDLPNDGTLWNRLHNNAQNLKNAGITALWLPPAYKGTSQSDVGYGVYDLYDLGEFNQKGTIRTKYGTKTQLERAIRSLKANGIQVYADVVFNHKAGADGTEFVDAVEVDPSNRNQEVSGTYQIEAWTKFDFPGRGNTYSSFKWRWYHFDGTDWDESRTLQNRIYKFRGKAWDWEVDTENGNYDYLMFADLDMDHPEVVTELQKWGTWYVNTTNIDGFRLDAVKHIKFSFMRDWLTYVRNQTGKNLFAVGEFWKNDLGALENYITKTNGSMSLFDAPLHNEFYTASKSNGYFDMRELLEGTLVQRHPSHAVTYVDNHDTQPEQSLQSWVEEWFKPLAYAFILTRQEGYPCVFYGDYYGIPKYNIPGLKSKIDPLLIARRDYAYGTQRDYIDHQDIIGWTREGIDTKPNSGLAALITDGPGGSKWMYVGKKHAGKVFYDLTGNRSDTVTINADGWGEFKVNGGSVSIWVAK

SEQ ID NO: 33666 - protein, 484 aa, Synthetic construct
LNGTLMQYFEWYMPNDGQHWKRLQNDSAYLAEHGITAVWIPPAYKGTSQADVGYGAYDLYDLGEFHQKGTVRTKYGTKGELQSAIKSLHSRDINVYGDVVINHRMGADATETISAVEVNPSNRNQVTSGAYNISAWTDFEFPGRGNTYSSFKWHSYYFDGVDWDQSRQLSGKIYQIQGTGKAWDWEVDSENGNYDYLMGADIDYDHPDVAAEIKRWGTWYANELQLDGFRLDAVKHIKFSFLRDWVNHVREKTGKEMFTVAEYWSYDLGALENYLNKTNFNHSVFDVPLHYQFHAASTQGGGYDMRKLLNGTVVSKHPLKSVTFVDNHDTQPGQSLESTVQTWFKPLAYAFILTRESGYPQVFYGDMYGTKGDSQREIPALKHKIEPILKARKQYAYGAQHDYFDHHDIVGWTREGDSSVANSGLAALITDGPGGAKRMYVGRQNAGETWHDITGNRSEPVVINSAGWGEFHVNGGSVSIYVQR

SEQ ID NO: 33667 - protein, 482 aa, Bacillus sp. (in: firmicutes)
HDGTNGTIMQYFEWNVPNDGQHWNRLHNNAQNLKNAGITAIWIPPAWKGTSQSDTGYGAYDLYDLGEFNQKGTVRTKYGTKAELERAIRSLKANGIQVYGDVVMNHKAGADQTEQVQAVEVNPQNRNQEVSGTYQIEAWTGFNFPGRGNQHSSFKWRWYHFDGTDFDQSRGLSNRIYKFRTKAWDWEVDTEFGNYDYLMYADLDMDHPEVINELNRWGVWYANTLNLDGFRLDAVKHIKFSFMRDWLGHVRGQTGKNLFAVAEYWKNDLGALENYLSKTNWTMSAFDVPLHYNLYQASNSSGNYDMRNLLNGTLVQRHPSHAVTFVDNHDTQPGEALESFVQGWFKPLAYATILTREQGYPQVFYGDYYGIPSDGVPSYRQQIDPLLAARQQYAYGRQHDYFDHWDVIGWTREGNASHPNSGLATIMSDGPGGSKWMYVGRQKAGEVWHDMTGNRSGTVTINQDGWGHFFVNKGSVSVWVKR

SEQ ID NO: 33668 - protein, 484 aa, Unidentified
HHNGTNGTMMQYFEWYLPNDGNHWNRLNSDASNLKSKGITAVWIPPAWKGASQNDVGYGAYDLYDLGEFNQKGTVRTKYGTRSQLQAAVTSLKNNGIQVYGDVVMNHKAGADETEVFKVIEVDPNDRTKEISEPFEIEGWTKFTFPGRGDQYSSFKWNSEHFNGTDFDAKGERTGVFRIAGENKKWNENVDDEFGNYDYLMFANIDYNHPDVVNELRNWGVWYTNTLGLDGFRIDAVKHIKYSFTRDWINHVRSATGKNMFAVAEFWKNDLGAIENYLQKTNWNHSVFDVPLHYNLYNASKSGGNYDMRNIFNGTVVQRHPSHAVTFVDNHDSQPEEALESFVEEWFKPLAYALTLTREQGYPSVFYGDYYGIPTHGVPAMRSKIDPILEARQKYAYGKQNDYLDHHNIIGWTREGNTAHPNSGLATIMSDGAGGSKWMFVGRNKAGQVWSDITGNRTGTVTINADGWGNFSVNGGSVSIWVNK

SEQ ID NO: 33669 - protein, 481 aa, Bacillus sp. (in: firmicutes)
HDGTNGTIMQYFEWNVPNDGQHWNRLHNNAQNLKNAGITAIWIPPAWKGTSQSDTGYGAYDLYDLGEFNQKGTVRTKYGTKAELERAIRSLKANGIQVYGDVVMNHKAGADFTERVQAVEVNPQNRNQEVSGTYQIEAWTGFNFPGRGNQHSSFKWRWYHFDGTDWDESRKLNRIYKFRGKAWDWEVDTEFGNYDYLMYADLDMDHPEVINELNRWGVWYANTLNLDGFRLDAVKHIKFSFMRDWLGHVRGQTGKNLFAVAEYWKNDLGALENYLSKTNWTMSAFDVPLHYNLEQASKGSGNYDMRNLLNGTLVQRHPSHAVTFVDNHDTQPGEALESFVQGWFKPLAYATILTREQGYPQVFYGDYYGIPSDGVPSYRQQIDPLLAARQQYAYGRQHDYFDHWDVIGWTREGNASHPNSGLATIMSDGPGGSKWMYVGRQKAGEVWHDMTGNRSGTVTINQDGWGHFFVNGGSVSVWVKR

SEQ ID NO: 33670 - protein, 481 aa, Bacillus licheniformis
LNGTLMQYFEWYMPNDGQHWRRLQNDSAYLAEHGITAVWIPPAYKGTSQADVGYGAYDLYDLGEFHQKGTVRTKYGTKGELQSAIKSLHSRDINVYGDVVINHKGGADATEDVTAVEVDPADRNRVISGEHLIKAWTHFHFPGRGSTYSDFKWHWYHFNGTDWDESRKLNRIYKFQGKNWNWEVSNENGNYDYLMYANIDYSHPDVAAEIKRWGTWYANELQLDGFRLDAVKHIPFWFLRDWVNHVREKTGKEMFTVAEYWQNDLGALENYLNKTNFNHSVFDVPLHYQFHAASTQGGGYDMRKLLNGTVVSKHPLKSVTFVDNHDTQPGQSLESTVQTWFKPLAYAFILTRESGYPQVFYGDMYGTKGDSQREIPALKHKIEPILKARKQYAYGAQHDYFDHWDIVGWTREGDSSVANSGLAALITNGPGGAKRMYVGRQNAGQTWHDITGNRSEPVVINSEGWGEFHVNGGSVSIYVKR

SEQ ID NO: 33671 - protein, 481 aa, Bacillus licheniformis
LNGTLMQYFEWYMPNDGQHWRRLQNDSAYLAEHGITAVWIPPAYKGTSQADVGYGAYDLYDLGEFHQKGTVRTKYGTKGELQSAIKSLHSRDINVYGDVVINHKGGADATEDVTAVEVDPADRNRVISGEHLIKAWTHFHFPGRGSTYSDFKWHWYHFNGTDWDESRKLNRIYKFQNTNWNWEVSNENGNYDYLMYANIDYSHPDVAAEIKRWGTWYANELQLDGFRLDAVKHIPFWFLRDWVNHVREKTGKEMFTVAEYWQNDLGALENYLNKTNFNHSVFDVPLHYQFHAASTQGGGYDMRKLLNGTVVSKHPLKSVTFVDNHDTQPGQSLESTVQTWFKPLAYAFILTRESGYPQVFYGDMYGTKGDSQREIPALKHKIEPILKARKQYAYGAQHDYFDHWDIVGWTREGDSSVANSGLAALITNGPGGAKRMYVGRQNAGETWHDITGNRSEPVVINSEGWGEFHVNGGSVSIYVQR

SEQ ID NO: 33672 - protein, 482 aa, Bacillus licheniformis
LNGTLMQYFEWYTPNDGQHWKRLQNDSAYLAEHGITAVWIPPAYKGASQNDVGYGAYDLYDLGEFHQKGTVRTKYGTKGELQSAIKSLHSRDINVYGDVVINHKGGADATEDVTAVEVDPADRNRVISGEHLIKAYTHFHFPGRGSTYSDFKWHWYHFDGVDWDQSRRLNNRIYKFQGKAWDWEVDTEFGNYDYLTYADIDYDHPDVAAEIKRWGTWYANELQLDGFRLDAVKHIKYSFLRDWVNHVREKTGKEMFTVAEFWKNDLGALENYLNKTNFNHSVFDVPLHYQFYAASKQGGGYDMRKLLNGTVVSKHPLKSVTFVDNHDTQPEEALESTVQTWFKPLAYAFILTRESGYPQVFYGDMYGTKGDSQREIPALKHKIEPILKARKQYAYGAQHDYFDHHDIVGWTREGDSSVANSGLAALITDGPGGAKRMYVGRQNAGETWHDITGNRSEPVVINSEGWGEFHVNGGSVSIYVQR

SEQ ID NO: 33673 - protein, 481 aa, Bacillus sp.
APINETMMQYFEWDLPNDGTLWNRLHNNAQNLKNAGITALWLPPAYKGTSQSDVGYGVYDLYDLGEFNQKGTIRTKYGTKTQLERAIRSLKANGIQVYADVVFNHKAGADGTEFVDAVEVDPSNRNQEVSGTYQIEAWTKFDFPGRGNTYSSFKWRWYHFDGTDWDESRALQNRIYKFRGKAWDWEVDTENGNYDYLMFADLDMDHPEVVTELQHWGTWYVNTTNIDGFRLDAVKHIKFSFMRDWLTYVRNQTGKNLFAVGEFWKNDLGALENYITKTNGSMSLFDAPLHENFYTASKSNGYFDMRDLLNGTLVQRHPSHAVTFVDNHDTDPEQSLDSWVEEWFKPLAYAFILTRQEGYPCVFYGDYYGIPKRNIPGLKSKIDPLLIARRDYAYGTQRDYIDHQDIIGWTREGIDTKPNSGLAALITDGPGGSKWMYVGKKHAGKVFYDLTGNRSDTVTINADGWGEFKVNGGSVSIWVAK

SEQ ID NO: 33674 - protein, 485 aa, Synthetic construct
HHDGTNGTIMQYFEWNVPNDGQHWNRLHNNAQNLKNAGITAIWIPPAWKGTSQNDVGYGAYDLYDLGEFNQKGTVRTKYGTKAELERAIRSLKANGIQVYGDVVMNHRMGADATETISAVEVNPSNRNQVTSGAYNISAWTDFEFPGRGNTYSSFKWHSYYFDGVDWDQSRQLSGKIYQIQGTGKAWDWEVDSENGNYDYLMGADIDMDHPEVINELNRWGVWYANTLNLDGFRLDAVKHIKFSFMRDWLGHVRGQTGKNLFAVAEYWKNDLGALENYLSKTNWTMSAFDVPLHYNLYQASNSSGNYDMRNLLNGTLVQRHPSHAVTFVDNHDTQPGEALESFVQGWFKPLAYATILTREQGYPQVFYGDYYGIPSDGVPSYRQQIDPLLKARQQYAYGRQHDYFDHWDVIGWTREGNASHPNSGLATIMSDGPGGSKWMYVGRQKAGEVWHDMTGNRSGTVTINQDGWGHFFVNGGSVSVWVKR

SEQ ID NO: 33675 - protein, 483 aa, Synthetic construct
HHDGTNGTIMQYFEWNVPNDGQHWNRLHNNAQNLKNAGITAIWIPPAWKGTSQNDVGYGAYDLYDLGEFNQKGTVRTKYGTKAELERAIRSLKANGIQVYGDVVMNHKGGADFTERVQAVEVNPQNRNQEVSGTYQIEAYTGFNFPGRGNQHSSFKWRWYHFDGTDWDQSRQLANRIYKFRGKAWDWEVDTEFGNYDYLMYADVDMDHPEVINELNRWGVWYANTLNLDGFRLDAVKHIKFSFMRDWLGHVRGQTGKGLFAVAEYWKNDLGALENYLSKTNWTMSAFDVPLHYNLYQASNSRGNYDMRNLLNGTLVQAHPSHAVTFVDNHDTQPGEALESFVQGWFKPLAYATILTREQGYPQVFYGDYYGIPSDGVPSYRQQIDPLLKARQQYAYGTQHDYLDNQDIIGWTREGDSAHAGSGLATIMSDGPGGSKTMYVGTAHAGQVWKDITGNRTDTVTINSAGNGTFPVNKGSVSIWVKQ

SEQ ID NO: 33676 - protein, 485 aa, Bacillus sp.
HHNGTNGTMMQYFEWYLPNDGNHWNSLRSNASDLKDTGISAVWIPPAWKGASQNDVGYGAYDLYDLGEFNQKGTIRTKYGTHNQLQAAVNALKSNGIQVYGDVVMDHKGGADATEMVRAVEVNPNNRYQEVSXEYTIEAWTKFDFPGRXXTHSNFKWRWFHFDGVDWDQSRKLNNRIFKFRTDGKAWDWEVDXENGNYDYLMLADIDMDHPEVXNELRNWGVWYTNTLGLNGFRIDAVKHIKYSFTRDWINHVRSAIDKNMFAVAEFWXXDXGAIENYLNKTDWNHSVFDVPLHXXLXXASKXGDNYDMRXIFXXTVLXRHPMHAVTFVDNHDSQPEEXLESFVXEWFKPLAYALTLTREEGYPSVFYGDYYGIPTHKVPAMRSKIDPILEARQKYAYGRQNDYLDHHNIIGWTREGNNAYPNSGLATIMSDGAGGHKWMLVGXQRYGQTWTDITGNRAGPVTINADGWGEFSVNGGSVSIYVQK

SEQ ID NO: 33677 - protein, 482 aa, Bacillus sp. (in: firmicutes)
HDGTNGTMMQYFEWNVPNDGQHWNRLHNNAQNLKNAGITAIWIPPAWKGTSQSDTGYGAYDLYDLGEFNQKGTVRTKYGTKAELERAIRSLKANGIQVYGDVVMNHKAGADGTEHVQAVEVNPQNRNQEVSGTYQIEAWTGFNFPGRGNQHSSFKWRWYHFHGTDWDESHKLSNRIYKFRTKAWDWEVDTEFGNYDYLLYADLDMDHPEVINELNRWGVWYANTLNLDGFRLDAVKHIKFSFLRDWLGHVRGQTGKNLFAVAEYWKNDLGAVENYLSKTNWTMSVFDVPLHYNLYQASNSSGNYDMRNLLNGTVVHRHPSKAVTFVDNHDTQPGEALESFVQGWFKPLAYATILTREQGYPSVFYGDYYGIPSDGVPSYRQQIDPLLAARQQYAYGRQHDYFDHWDVIGWTREGNASHPNSGLATIMSDGPGGSKWMYVGRQKAGEVWHDMTGNRSGTVTINQDGWGHFFVNGGSVSVWVKR

SEQ ID NO: 33678 - protein, 482 aa, Bacillus sp. (in: firmicutes)
HDGTNGTIMQYFEWNVPNDGQHWNRLHNNAQNLKNAGITAIWIPPAWKGTSQSDTGYGAYDLYDLGEFNQRGTVRTKYGTKAELERAIRSLKANGIQVYGDVVMNHKAGADQTEQVQAVEVNPQNRNQEVSGTYQIEAWTGFNFPGRGNQHSSFKWRWYHFDGTDFDQSRGLSNRIYKFRTKAWDWEVDTEFGNYDYLMYADLDMDHPEVINELNRWGVWYANTLNLDGFRLDAVKHIKFSFMRDWLGHVRGQTGKNLFAVAEYWKNDLGALENYLSKTNWTMSAFDVPLHYNLYQASNSSGNYDMRNLLNGTLVQRHPSHAVTFVDNHDTQPGEALESFVQGWFKPLAYATILTREQGYPQVFYGDYYGIPSDGVPSYRQQIDPLLAARQQYAYGRQHDYFDHWDVIGWTREGNASHPNSGLATIMSDGPGGSKWMYVGRQKAGEVWHDMTGNRSGTVTINQDGWGHFFVNKGSVSVWVKR

SEQ ID NO: 33679 - protein, 482 aa, Bacillus sp.
HDGTNGTIMQYFEWNVPNDGQHWNRLHNNAQNLKNAGITAIWIPPAWKGTSQSDTGYGAYDLYDLGEFNQRGTVRTKYGTKAELERAIRSLKANGIQVYGDVVMNHKAGADQTEQVQAVEVNPQNRNQEVSGTYQIEAWTGFNFPGRGNQHSSFKWRWYHFDGTDFDQSRGLSNRIYKFRTKAWDWEVDTEFGNYDYLMYADLDMDHPEVINELNRWGVWYANTLNLDGFRLDAVKHIKFSFMRDWLGHVRGQTGKNLFAVAEYWKNDLGALENYLSKTNWTMSAFDVPLHYNLYQASNSSGNYDMRNLLNGTLVQRHPSHAVTFVDNHDTQPGEALESFVQGWFKPLAYATILTREQGYPQVFYGDYYGIPSDGVPSYRQQIDPLLAARQQYAYGRQHDYFDHWDVIGWTREGNASHPNSGLATIMSDGPGGSKWMYVGRQKAGEVWHDMTGNRSGTVTINQDGWGHFRVNKGSVSVWVKR

SEQ ID NO: 33680 - protein, 481 aa, Synthetic construct
HHDGTNGTIMQYFEWNVPNDGQHWNRLHNNAQNLKNAGITAIWIPPAWKGTSQNDVGYGAYDLYDLGEFNQKGTVRTKYGTKAELERAIRSLKANGIQVYGDVVMNHKGGADFTERVQAVEVNPQNRNQEVSGTYQIEAYTGFNFPGRGNQHSSFKWRWYHFDGTDWDQSRQLANRIYKFRGKAWDWEVDTEFGNYDYLMYADVDMDHPEVINELNRWGVWYANTLNLDGFRLDAVKHIKFSFMRDWLGHVRGQTGKGLFAVAEYWKNDLGALENYLSKTNWTMSAFDVPLHYNLYQASNSRGNYDMRNLLNGTLVQAHPSHAVTFVDNHDTQPGEALESFVQGWFKPLAYATILTREQGYPQVFYGDYYGIPSDGVPSYRQQIDPLLKARQQYAYGTQHDYLDNQDIGWTREGDSAHAGSGLATMSDGPGGSKTMYVGTAHAGQVWKDITGNRTDTVTINSAGNGTFPVNKGSVSIWVKQ

SEQ ID NO: 33681 - protein, 482 aa, Bacillus licheniformis
LNGTLMQYFEWYTPNDGQHWKRLQNDSAYLAEHGITAVWIPPAYKGASQNDVGYGAYDLYDLGEFHQKGTVRTKYGTKGELQSAIKSLHSRDINVYGDVVINHKGGADATELVRAVEVNPNNRNQEVSGEYTIEAYTYFDFPGRGNTHSNFKWRWYHFDGVDWDQSRRLNNRIYKFRGKGWDWEVDTEFGNYDYLTYADIDYDHPDVAAEIKRWGTWYANELQLDGFRLDAVKHIKYSFLRDWVNHVREKTGKEMFTVAEFWKNDLGALENYLNKTNFNHSVFDVPLHYQFYAASKQGGGYDMRKLLNGTVVSKHPLKSVTFVDNHDTQPEEALESTVQTWFKPLAYAFILTRESGYPQVFYGDMYGTKGDSQREIPALKHKIEPILKARKQYAYGAQHDYFDHHDIVGWTREGDSSVANSGLAALITDGPGGAKRMYVGRQNAGETWHDITGNRSEPVVINSEGWGEFHVNGGSVSIYVQR

SEQ ID NO: 33682 - protein, 481 aa, Bacillus licheniformis
LNGTLMQYFEWYMPNDGQHWRRLQNDSAYLAEHGITAVWIPPAYKGTSQADVGYGAYDLYDLGEFHQKGTVRTKYGTKGELQSAIKSLHSRDINVYGDVVINHKGGADATEDVTAVEVDPADRNRVISGEHLIKAWTHFHFPGRGSTYSDFKWHWYHFNGTDWDESRKLNRIYKFQGKNWNWEVSNENGNYDYLMYANIDYSHPDVAAEIKRWGTWYANELQLDGFRLDAVKHIPFWFLRDWVNHVREKTGKEMFTVAEYWQNDLGALENYLNKTNFNHSVFDVPLHYQFHAASTQGGGYDMRKLLNGTVVSKHPLKSVTFVDNHDTQPGQSLESTVQTWFKPLAYAFILTRESGYPQVFYGDMYGTKGDSQREIPALKHKIEPILKARKQYAYGAQHDYFDHWDIVGWTREGDSSVANSGLAALITNGPGGAKRMYVGRQKAGQTWHDITGNRSEPVVINSEGWGEFHVNGGSVSIYVKR

SEQ ID NO: 33683 - protein, 481 aa, Bacillus licheniformis
LNGTLMQYFEWYMPNDGQHWRRLQNDSAYLAEHGITAVWIPPAYKGTSQADVGYGAYDLYDLGEFHQKGTVRTKYGTKGELQSAIKSLHSRDINVYGDVVIDHKGGADATEDVTAVEVDPADRNRVISGEHLIKAWTHFHFPGRGSTYSDFKWHWYHFNGTDWDESRKLNRIYKFQNTNWNWEVSNENGNYDYLMYANIDYSHPDVAAEIKRWGTWYANELQLDGFRLDAVKHIPFWFLRDWVNHVREKTGKEMFTVAEYWQNDLGALENYLNKTNFNHSVFDVPLHYQFHAASTQGGGYDMRKLLNGTVVSKHPLKSVTFVDNHDTQPGQSLESTVQTWFKPLAYAFILTRESGYPQVFYGDMYGTKGDSQREIPALKHKIEPILKARKQYAYGAQHDYFDHWDIVGWTREGDSSVANSGLAALITNGPGGAKRMYVGRQNAGETWHDITGNRSEPVVINSEGWGEFHVNGGSVSIYVQR

SEQ ID NO: 33684 - protein, 483 aa, Bacillus sp.
HHDGTNGTIMQYFEWNVPNDGQHWNRLHNNAQNLKNAGITAIWIPPAWKGTSQNDVGYGAYDLYDLGEFNQKGTVRTKYGTKAELERAIRSLKANGIQVYGDVVMNHKGGADFTERVQAVEVNPQNRNQEVSGTYQIEAWTGFNFPGRGNQHSSFKWRWYHFDGTDWDQSRQLANRIYKFRGKAWDWEVDTENGNYDYLMYADVDMDHPEVINELNRWGVWYANTLNLDGFRLDAVKHIKFSFMRDWLGHVRGQTGKNLFAVAEYWKNDLGALENYLSKTNWTMSAFDVPLHYNLYQASNSSGNYDMRNLLNGTLVQRHPSHAVTFVDNHDTQPGEALESFVQGWFKPLAYATILTREQGYPQVFYGDYYGIPSDGVPSYRQQIDPLLKARQQYAYGTQHDYLDNQDVIGWTREGDSAHAGSGLATVMSDGPGGSKTMYVGTAHAGQVFKDITGNRTDTVTINSAGNGTFPCNGGSVSIWVKQ

SEQ ID NO: 33685 - protein, 483 aa, Bacillus sp.
HHDGTNGTIMQYFEWNVPNDGQHWNRLHNNAQNLKNAGITAIWIPPAWKGTSQNDVGYGAYDLYDLGEFNQKGTVRTKYGTKAELERAIRSLKANGIQVYGDVVMNHKGGADQTEHVQAVEVNPQNRNQEVSGTYQIEAWTGFNFPGRGNQHSSFKWRWYHFDGTDWDQSRQLANRIYKFRGKAWDWEVDTENGNYDYLMYADVDMDHPEVINELNRWGVWYANTLNLDGFRLDAVKHIKFSFMRDWLGHVRGQTGKNLFAVAEYWKNDLGALENYLSKTNWTMSAFDVPLHYNLYQASNSSGNYDMRNLLNGTLVQRHPSHAVTFVDNHDTQPGEALESFVQGWFKPLAYATILTREQGYPQVFYGDYYGIPSDGVPSYRQQIDPLLKARQQYAYGTQHDYLDNQDVIGWTREGDSAHAGSGLATVMSDGPGGSKTMYVGTAHAGQVFKDITGNRTDTVTINSAGNGTFPCNGGSVSIWVKQ

SEQ ID NO: 33686 - protein, 483 aa, Bacillus sp.
HHDGTNGTIMQYFEWNVPNDGQHWNRLHNNAQNLKNAGITAIWIPPAWKGTSQNDVGYGAYDLYDLGEFNQKGTVRTKYGTKAELERAIRSLKANGIQVYGDVVMNHKGGADFTEQVQAVEVNPQNRNQEVSGTYQIEAWTGFNFPGRGNQHSSFKWRWYHFDGTDWDQSRQLANRIYKFRGKAWDWEVDTENGNYDYLMYADVDMDHPEVINELNRWGVWYANTLNLDGFRLDAVKHIKFSFMRDWLGHVRGQTGKNLFAVAEYWKNDLGALENYLSKTNWTMSAFDVPLHYNLYQASNSSGNYDMRNLLNGTLVQRHPSHAVTFVDNHDTQPGEALESFVQGWFKPLAYATILTREQGYPQVFYGDYYGIPSDGVPSYRQQIDPLLKARQQYAYGTQHDYLDNQDVIGWTREGDSAHAGSGLATVMSDGPGGSKTMYVGTAHAGQVFKDITGNRTDTVTINSAGNGTFPCNGGSVSIWVKQ

SEQ ID NO: 33687 - protein, 485 aa, unidentified
HHDGTNGTIMQYFEWNVPNDGQHWNRLHNNAQNLKNAGITAIWIPPAWKGTSQNDVGYGAYDLYDLGEFNQKGTVRTKYGTKAELERAIRSLKANGIQVYGDVVMNHKGGADFTERVQAVEVNPQNRNQEVSGTYQIEAWTGFNFPGRGNQHSSFKWRWYHFDGTDWDQSRQLANRIYKFRGDGKAWDWEVDTENGNYDYLMYADVDMDHPEVINELNRWGVWYANTLNLDGFRLDAVKHIKFSFMRDWLGHVRGQTGKNLFAVAEYWKNDLGALENYLSKTNWTMSAFDVPLHYNLYQASNSSGNYDMRNLLNGTLVQRHPSHAVTFVDNHDTQPGEALESFVQGWFKPLAYATILTREQGYPQVFYGDYYGIPSDGVPSYRQQIDPLLKARQQYAYGTQHDYLDNQDVIGWTREGDSAHAGSGLATVMSDGPGGSKTMYVGTAHAGQVFKDITGNRTDTVTINSAGNGTFPCNGGSVSIWVKQ

SEQ ID NO: 33688 - protein, 483 aa, Bacillus sp.
HHDGTNGTIMQYFEWNVPNDGQHWNRLHNNAQNLKNAGITAIWIPPAWKGTSQNDVGYGAYDLYDLGEFNQKGTVRTKYGTKAELERAIRSLKANGIQVYGDVVMNHKGGADFTERVQAVEVNPQNRNQEVSGTYQIEAWTGFNFPGRGNQHSSFKWRWYHFDGTDWDQSRQLANRIYKFRGKAWDWEVDTENGNYDYLMYADVDMDHPEVINELNRWGVWYANTLNLDGFRLDAVKHIKFSFMRDWLGHVRGQTGKNLFAVAEYWKNDLGALENYLSKTNWTMSAFDVPLHYNLYQASNSRGNYDMRNLLNGTLVQRHPSHAVTFVDNHDTQPGEALESFVQGWFKPLAYATILTREQGYPQVFYGDYYGIPSDGVPSYRQQIDPLLKARQQYAYGTQHDYLDNQDVIGWTREGDSAHAGSGLATVMSDGPGGSKTMYVGTAHAGQVFKDITGNRTDTVTINSAGNGTFPCNGGSVSIWVKQ

SEQ ID NO: 33689 - protein, 483 aa, Bacillus sp.
HHDGTNGTIMQYFEWNVPNDGQHWNRLHNNAQNLKNAGITAIWIPPAWKGTSQNDVGYGAYDLYDLGEFNQKGTVRTKYGTKAELERAIRSLKANGIQVYGDVVMNHKGGADFTERVQAVEVNPQNRNQEVSGTYQIEAWTGFNFPGRGNQHSSFKWRWYHFDGTDWDQSRQLANRIYKFRGKAWDWEVDTENGNYDYLMYADVDMDHPEVINELNRWGVWYANTLNLDGFRLDAVKHIKFSFMRDWLGHVRGQTGKNLFAVAEYWKNDLGALENYLSKTNWTMSAFDVPLHYNLYQASNSSGNYDMRNLLNGTLVQRHPSHAVTFVDNHDTQPGEALESFVQGWFKPLAYATILTREQGYPQVFYGDYYGIPSDGVPSYRQQIDPLLKARQQYAYGTQHDYLDNQDVIGWTREGDSAHAGSGLATVMSDGPGGSKTMYVGTAHAGQVFKDITGNRTDTVTINSAGNGTFRCNGGSVSIWVKQ

SEQ ID NO: 33690 - protein, 483 aa, Bacillus sp.
HHDGTNGTIMQYFEWNVPNDGQHWNRLHNNAQNLKNAGITAIWIPPAWKGTSQNDVGYGAYDLYDLGEFNQKGTVRTKYGTKAELERAIRSLKANGIQVYGDVVMNHKGGADFTERVQAVEVNPQNRNQEVSGTYQIEAWTGFNFPGRGNQHSSFKWRWYHFDGTDWDQSRQLANRIYKFRGKAWDWEVDTENGNYDYLMYADVDMDHPEVINELNRWGVWYANTLNLDGFRLDAVKHIKFSFMRDWLGHVRGQTGKNLFAVAEYWKNDLGALENYLSKTNWTMSAFDVPLHYNLYQASNSSGNYDMRNLLNGTLVQRHPSHAVTFVDNHDTQPGEALESFVQGWFKPLAYATILTREQGYPQVFYGDYYGIPSDGVPSYRQQIDPLLAARQQYAYGTQHDYLDNQDVIGWTREGDSAHAGSGLATVMSDGPGGSKTMYVGTAHAGQVFKDITGNRTDTVTINSAGNGTFPCNGGSVSIWVKQ

SEQ ID NO: 33691 - protein, 483 aa, Bacillus sp.
HHDGTNGTIMQYFEWNVPNDGQHWNRLHNNAQNLKNAGITAIWIPPAWKGTSQNDVGYGAYDLYDLGEFNQKGTVRTKYGTKAELERAIRSLKANGIQVYGDVVMNHKGGADFTERVQAVEVNPQNRNQEVSGTYQIEAWTGFNFPGRGNQHSSFKWRWYHFDGTDWDQSRQLANRIYKFRGKAWDWEVDTENGNYDYLMYADVDMDHPEVINELNRWGVWYANTLNLDGFRLDAVKHIKFSFMRDWLGHVRGQTGKNLFAVAEYWKNDLGALENYLSKTNWTMSAFDVPLHYNLYQASNSSGNYDMRNLLNGTLVQRHPAHAVTFVDNHDTQPGEALESFVQGWFKPLAYATILTREQGYPQVFYGDYYGIPSDGVPSYRQQIDPLLKARQQYAYGTQHDYLDNQDVIGWTREGDSAHAGSGLATVMSDGPGGSKTMYVGTAHAGQVFKDITGNRTDTVTINSAGNGTFPCNGGSVSIWVKQ

SEQ ID NO: 33692 - protein, 483 aa, Bacillus sp.
HHDGTNGTIMQYFEWNVPNDGQHWNRLHNNAQNLKNAGITAIWIPPAWKGTSQNDVGYGAYDLYDLGEFNQKGTVRTKYGTKAELERAIRSLKANGIQVYGDVVMNHKGGADFTERVQAVEVNPQNRNQEVSGTYQIEAWTGFNFPGRGNQHSSFKWRWYHFDGTDWDQSRQLSNRIYKFRGKAWDWEVDTENGNYDYLMYADVDMDHPEVINELNRWGVWYANTLNLDGFRLDAVKHIKFSFMRDWLGHVRGQTGKNLFAVAEYWKNDLGALENYLSKTNWTMSAFDVPLHYNLYQASNSSGNYDMRNLLNGTLVQRHPSHAVTFVDNHDTQPGEALESFVQGWFKPLAYATILTREQGYPQVFYGDYYGIPSDGVPSYRQQIDPLLKARQQYAYGTQHDYLDNQDVIGWTREGDSAHAGSGLATVMSDGPGGSKTMYVGTAHAGQVFKDITGNRTDTVTINSAGNGTFPCNGGSVSIWVKQ

SEQ ID NO: 33693 - protein, 483 aa, Bacillus sp.
HHDGTNGTIMQYFEWNVPNDGQHWNRLHNNAQNLKNAGITAIWIPPAWKGTSQNDVGYGAYDLYDLGEFNQKGTVRTKYGTKAELERAIRSLKANGIQVYGDVVMNHKGGADFTERVQAVEVNPQNRNQEVSGTYQIEAWTGFNFPGRGNQHSSFKWRWYHFDGTDWDQSRQLANRIYKFRGKAWDWEVDTEFGNYDYLMYADVDMDHPEVINELNRWGVWYANTLNLDGFRLDAVKHIKFSFMRDWLGHVRGQTGKNLFAVAEYWKNDLGALENYLSKTNWTMSVFDVPLHYNLYQASNSSGNYDMRNLLNGTLVQRHPSHAVTFVDNHDTQPGEALESFVQGWFKPLAYATILTREQGYPQVFYGDYYGIPSDGVPSYRQQIDPLLKARQQYAYGTQHDYLDNQDVIGWTREGDSAHAGSGLATVMSDGPGGSKTMYVGTAHAGQVFKDITGNRTDTVTINSAGNGTFPCNGGSVSIWVKQ

SEQ ID NO: 33694 - protein, 510 aa, Bacillus subtilis
LAFLLTALLFCPTGQPAKAAAPFNGTMMQYFEWYLSCDPQSFSEPPQCEVKVANLGITALWLPPAYKGTSRSDVGYGVYDLYDLGEFNQKGAVRTKYGTKAQYLQAIQAAHAAGMQVYADVVFNHKGGADGTEWVLQISWWVDAVNQEISGTYQIQAWTKFDFPGRGNTYSSFKWRWYHFDGVDWDESRKLSRIYKFRGIGKAWDFHFAYFEKAYYDSTENGDIDDHPEVVTELKSWGKWYVNTTNIDGFRLDAVKHIDFSFFPDWLSDVRSQTGKPLFTVGEYWSYDINKLHNYIMKTNGTMSLFDAPLHFHDRTASKSGDAYDMRTLMTNTLMKDQPTLAVTFVDNHDTEPGQALQSWVDPWFKPLAYAFILTVIDRRRDGYGGDYYGIPQYNPSLKSKIDPLLIARRDYAYGTGHDYLDHSHDIIGWTREGVTEKPGSGLAALITDGPGGSKWMYVGKQHAGGNRTTVGGMETALTNGSSCDRQEGYPCVFYVSVWVPRKTTVSTIA

SEQ ID NO: 33695 - protein, 482 aa, Bacillus sp. (in: firmicutes)
HDGTNGTIMQYFEWNVPNDGQHWNRLHNNAQNLKNAGITAIWIPPAWKGTSQSDTGYGAYDLYDLGEFNQRGTVRTKYGTKAELERAIRSLKANGIQVYGDVVMNHKAGADQTEQVQAVEVNPQNRNQEVSGTYQIEAWTGFNFPGRGNQHSSFKWRWYHFDGTDFDQSRGVSNRIYKFRTKAWDWEVDTEFGNYDYLMYADLDMDHPEVINELNRWGVWYANTLNLDGFRLDAVKHIKFSFMRDWLGHVRGQTAKNLFAVAEYWKNDLGALENYLSKTNWTMSAFDVPLHYNLYQASNSSGNYDMRNLLNGTLVQRHPSHAVTFVDNHDTQPGEALESFVQGWFKPLAYATILTREQGYPQVFYGDYYGIPSDGVPSYRQQIDPLLAARQQYAYGRQHDYFDHWDVIGWTREGNASHPNSGLATIMSDGPGGSKWMYVGRQKAGEVWHDMTGNRSGTVTINQDGWGHFFVNKGSVSVWVKR

SEQ ID NO: 33696 - protein, 482 aa, Bacillus sp.
HDGTNGTIMQYFEWNVPNDGQHWNRLHNNAQNLKNAGITAIWIPPAWKGTSQNDVGYGAYDLYDLGEFNQKGTVRTKYGTKAELERAIRSLKANGIQVYGDVVMNHKGGADFTERVQAVEVNPQNRNQEVSGTYQIEAWTGFNFPGRGNQHSSFKWRWYHFDGTDWDQSRQLANRIYKFRGKAWDWEVDTENGNYDYLMYADVDMDHPEVINELNRWGVWYANTLNLDGFRLDAVKHIKFSFMRDWLGHVRGQTGKNLFAVAEYWKNDLGALENYLSKTNWTMSAFDVPLHYNLYQASNSSGNYDMRNLLNGTLVQRHPSHAVTFVDNHDTQPGEALESFVQGWFKPLAYATILTREQGYPQVFYGDYYGIPSDGVPSYRQQIDPLLKARQQYAYGTQHDYLDNQDVIGWTREGDSAHAGSGLATVMSDGPGGSKTMYVGTAHAGQVFKDITGNRTDTVTINSAGNGTFPCNGGSVSIWVKQ

SEQ ID NO: 33697 - protein, 484 aa, unidentified
HHDGTNGTIMQYFEWNVPNDGQHWNRLHNNAQNLKNAGITAIWIPPAWKGTSQNDVGYGAYDLYDLGEFNQKGTVRTKYGTKAELERAIRSLKANGIQVYGDVVMNHKGGADFTERVQAVEVNPQNRNQEVSGTYQIEAWTGFNFPGRGNQHSSFKWRWYHFDGTDWDQSRQLANRIYKFRGDGKAWDWEVDTENGNYDYLMYADVDMDHPEVINELNRWGVWYANTLNLDGFRLDAVKHIKFSFMRDWLGHVRGQTGKNLFAVAEYWKNDLGALENYLSKTNWTMSAFDVPLHYNLYQASNSSGNYDMRNLLNGTLVQRHPSHAVTFVDNHDTQPGEALESFVQGWFKPLAYATILTREQGYPQVFYGDYYGIPSDGVPSYRQQIDPLLKARQQYAYGTQHDYLDNQDVIGWTREGDSAHAGSGLATVMSDGPGGSKTMYVGTAHAGQVFKDITGNRTDTVTINSAGNGTFPCNGGSVSWVKQ

SEQ ID NO: 33698 - protein, 482 aa, Synthetic construct
HANLNGTLMQYFEWYMPNDGQHWRRLQNDSAYLAEHGITAVWIPPAYKGTSQADVGYGAYDLYDLGEFNQKGTVRTKYGTRSQLQAAVTSLKNNGIQVYGDVVINHKAGADATEMVTAVEVNPNNRNQEVTGDYTIEAYTRFDFPGRGNTHSSFKWRWYHFDGVDWDQSRSLSNRIYKFRGKAWDWPVDTENGNYDYLMYADLDMDHPEVVNELRNWGVWYTNTLGLDGFRIDAVKHIKFSFTRDWINHVRSATGKNMFAVAEYWKNDLGAIENYLNKTNFNHSVFDVPLHYNLYAASNSGGNYDMRNIFNGTVVSKHPLKSVTFVDNHDTQPEESLESFVEEWFKPLAYALTLTREQGYPSVFYGDYYGIPTHGIPALRSKIDPILEARQKYAYGPQHDYLDHPDIIGWTREGDSSHPKSGLATLITDGPGGSKRMYAGLKNAGETWYDITGNRSDTVKIGSDGWGTFHVNKGSVSIYVQK

SEQ ID NO: 33699 - protein, 481 aa, Bacillus licheniformis
LNGTLMQYFEWYMPNDGQHWRRLQNDSAYLAEHGITAVWIPPAYKGTSQADVGYGAYDLYDLGEFHQKGTVRTKYGTKGELQSAIKSLHSRDINVYGDVVINHKGGADATEDVTAVEVDPADRNRVISGEHLIKAWTHFHFPGRGSTYSDFKWHWYHFNGTDWDESRKLNRIYKFQNTNWNWEVSNENGNYDYLMYANIDYSHPDVAAEIKRWGTWYANELQLDGFRLDAVKHIPFWFLRDWVNHVREKTGKEMFTVAEYWQNDLGALENYLNKTNFNHSVFDVPLHYQFHAASTQGGGYDMRKLLNGTVVSKHPLKSVTFVDNHDTQPGQSLESTVQTWFKPLAYAFILTRESGYPQVFYGDMYGTKGDSQREIPALKHKIEPILKARKQYAYGAQHDYFDHWDIVGWTREGDSSVANSGLAALITNGPGGAKRMYVGRQNAGQTWHDITGNRSEPVVINSEGWGEFHVNGGSVSIYVKR

SEQ ID NO: 33700 - protein, 483 aa, Bacillus sp.
HHDGTNGTIMQYFEWNVPNDGQHWNRLHNNAQNLKNAGITAIWIPPAWKGTSQNDVGYGAYDLYDLGEFNQKGTVRTKYGTKAELERAIRSLKANGIQVYGDVVMNHKGGADQTEQVQAVEVNPQNRNQEVSGTYQIEAWTGFNFPGRGNQHSSFKWRWYHFDGTDWDQSRQLANRIYKFRGKAWDWEVDTEFGNYDYLMYADVDMDHPEVINELNRWGVWYANTLNLDGFRLDAVKHIKFSFMRDWLGHVRGQTGKNLFAVAEYWKNDLGALENYLSKTNWTMSAFDVPLHYNLYQASNSSGNYDMRNLLNGTLVQRHPSHAVTFVDNHDTQPGEALESFVQGWFKPLAYATILTREQGYPQVFYGDYYGIPSDGVPSYRQQIDPLLKARQQYAYGTQHDYLDNQDVIGWTREGDSAHAGSGLATVMSDGPGGSKTMYVGTAHAGQVFKDITGNRTDTVTINSAGNGTFPCNGGSVSIWVKQ

SEQ ID NO: 33701 - protein, 483 aa, Bacillus sp.
HHDGTNGTIMQYFEWNVPNDGQHWNRLHNNAQNLKNAGITAIWIPPAWKGTSQNDVGYGAYDLYDLGEFNQKGTVRTKYGTKAELERAIRSLKANGIQVYGDVVMNHKGGADFTERVQAVEVNPQNRNQEVSGTYQIEAWTGFNFPGRGNQHSSFKWRWYHFDGTDWDQSRGLANRIYKFRGKAWDWEVDTENGNYDYLMYADVDMDHPEVINELNRWGVWYANTLNLDGFRLDAVKHIKFSFMRDWLGHVRGQTGKNLFAVAEYWKNDLGALENYLSKTNWTMSAFDVPLHYNLYQASNSSGNYDMRNLLNGTLVQRHPSHAVTFVDNHDTQPGEALESFVQGWFKPLAYATILTREQGYPQVFYGDYYGIPSDGVPSYRQQIDPLLKARQQYAYGTQHDYLDNQDVIGWTREGDSAHAGSGLATVMSDGPGGSKTMYVGTAHAGQVFKDITGNRTDTVTINSAGNGTFPCNGGSVSIWVKQ

SEQ ID NO: 33702 - protein, 483 aa, Bacillus sp.
HHDGTNGTIMQYFEWNVPNDGQHWNRLHNNAQNLKNAGITAIWIPPAWKGTSQNDVGYGAYDLYDLGEFNQKGTVRTKYGTKAELERAIRSLKANGIQVYGDVVMNHKGGADFTERVQAVEVNPQNRNQEVSGTYQIEAWTGFNFPGRGNQHSSFKWRWYHFDGTDFDQSRQLANRIYKFRGKAWDWEVDTENGNYDYLMYADVDMDHPEVINELNRWGVWYANTLNLDGFRLDAVKHIKFSFMRDWLGHVRGQTGKNLFAVAEYWKNDLGALENYLSKTNWTMSAFDVPLHYNLYQASNSSGNYDMRNLLNGTLVQRHPSHAVTFVDNHDTQPGEALESFVQGWFKPLAYATILTREQGYPQVFYGDYYGIPSDGVPSYRQQIDPLLKARQQYAYGTQHDYLDNQDVIGWTREGDSAHAGSGLATVMSDGPGGSKTMYVGTAHAGQVFKDITGNRTDTVTINSAGNGTFPCNGGSVSIWVKQ

SEQ ID NO: 33703 - protein, 483 aa, Bacillus sp.
HHDGTNATIMQYFEWNVPNDGQHWNRLHNNAQNLKNAGITAIWIPPAWKGTSQNDVGYGAYDLYDLGEFNQKGTVRTKYGTKAELERAIRSLKANGIQVYGDVVMNHKGGADFTERVQAVEVNPQNRNQEVSGTYQIEAWTGFNFPGRGNQHSSFKWRWYHFDGTDWDQSRQLANRIYKFRGKAWDWEVDTENGNYDYLMYADVDMDHPEVINELNRWGVWYANTLNLDGFRLDAVKHIKFSFMRDWLGHVRGQTGKNLFAVAEYWKNDLGALENYLSKTNWTMSAFDVPLHYNLYQASNSSGNYDMRNLLNGTLVQRHPSHAVTFVDNHDTQPGEALESFVQGWFKPLAYATILTREQGYPQVFYGDYYGIPSDGVPSYRQQIDPLLKARQQYAYGTQHDYLDNQDVIGWTREGDSAHAGSGLATVMSDGPGGSKTMYVGTAHAGQVFKDITGNRTDTVTINSAGNGTFPCNGGSVSIWVKQ

SEQ ID NO: 33704 - protein, 483 aa, Bacillus sp.
HHDGTNGTIMQYFEWNVPNDGQHWNRLHNNAQNLKNAGITAIWIPPAWKGTSQNDVGYGAYDLYDLGEFNQKGTVRTKYGTKAELERAIRSLKANGIQVYGDVVMNHKGGADQTERVQAVEVNPQNRNQEVSGTYQIEAWTGFNFPGRGNQHSSFKWRWYHFDGTDWDQSRQLANRIYKFRGKAWDWEVDTEFGNYDYLMYADVDMDHPEVINELNRWGVWYANTLNLDGFRLDAVKHIKFSFMRDWLGHVRGQTGKNLFAVAEYWKNDLGALENYLSKTNWTMSAFDVPLHYNLYQASNSSGNYDMRNLLNGTLVQRHPSHAVTFVDNHDTQPGEALESFVQGWFKPLAYATILTREQGYPQVFYGDYYGIPSDGVPSYRQQIDPLLKARQQYAYGTQHDYLDNQDVIGWTREGDSAHAGSGLATVMSDGPGGSKTMYVGTAHAGQVFKDITGNRTDTVTINSAGNGTFPCNGGSVSIWVKQ

SEQ ID NO: 33705 - protein, 483 aa, Bacillus sp.
HHDGTNGTIMQYFEWNVPNDGQHWNRLHNNAQNLKNAGITAIWIPPAWKGTSQNDVGYGAYDLYDLGEFNQKGTVRTKYGTKAELERAIRSLKANGIQVYGDVVMNHKGGADFTERVQAVEVNPQNRNQEVSGTYQIEAWTGFNFPGRGNQHSSFKWRWYHFDGTDWDQSRQLANRIYKFRGKAWDWEVDTEFGNYDYLMYADVDMDHPEVINELNRWGVWYANTLNLDGFRLDAVKHIKFSFMRDWLGHVRGQTGKNLFAVAEYWKNDLGALENYLSKTNWTMSAFDVPLHYNLYQASNSSGNYDMRNLLNGTLVQAHPSHAVTFVDNHDTQPGEALESFVQGWFKPLAYATILTREQGYPQVFYGDYYGIPSDGVPSYRQQIDPLLKARQQYAYGTQHDYLDNQDVIGWTREGDSAHAGSGLATVMSDGPGGSKTMYVGTAHAGQVFKDITGNRTDTVTINSAGNGTFPCNGGSVSIWVKQ

SEQ ID NO: 33706 - protein, 483 aa, Bacillus sp.
HHDGTNGTIMQYFEWNVPNDGQHWNRLHNNAQNLKNAGITAIWIPPAWKGTSQNDVGYGAYDLYDLGEFNQKGTVRTKYGTKAELERAIRSLKANGIQVYGDVVMNHKGGADFTERVQAVEVNPQNRNQEVSGTYQIEAWTGFNFPGRGNQHSSFKWRWYHFDGTDWDQSRQLANRIYKFRGKAWDWEVDTENGNYDYLMYADVDMDHPEVINELNRWGVWYANTLNLDGFRLDAVKHIKFQFMRDWLGHVRGQTGKNLFAVAEYWKNDLGALENYLSKTNWTMSAFDVPLHYNLYQASNSSGNYDMRNLLNGTLVQRHPSHAVTFVDNHDTQPGEALESFVQGWFKPLAYATILTREQGYPQVFYGDYYGIPSDGVPSYRQQIDPLLKARQQYAYGTQHDYLDNQDVIGWTREGDSAHAGSGLATVMSDGPGGSKTMYVGTAHAGQVFKDITGNRTDTVTINSAGNGTFPCNGGSVSIWVKQ

SEQ ID NO: 33707 - protein, 483 aa, Bacillus sp.
HHDGTNGTIMQYFEWNVPNDGQHWNRLHNNAQNLKNAGITAIWIPPAWKGTSQNDVGYGAYDLYDLGEFNQKGTVRTKYGTKAELERAIRSLKANGIQVYGDVVMNHKGGADFTERVQAVEVNPQNRNQEVSGTYQIEAWTGFNFPGRGNQHSSFKWRWYHFDGTDWDQSRQLANRIYKFRGKAWDWEVDTEFGNYDYLMYADVDMDHPEVINELNRWGVWYANTLNLDGFRLDAVKHIKFSFMRDWLGHVRGQTGKNLFAVAEYWKNDLGALENYLSKTNWTMSAFDVPLHYNLYQASNSSGNYDMRNLLNGTLVQRHPSHAVTFVDNHDTQPGEALESFVQGWFKPLAYATILTREQGYPQVFYGDYYGIPSDGVPSYRQQIDPLLAARQQYAYGTQHDYLDNQDVIGWTREGDSAHAGSGLATVMSDGPGGSKTMYVGTAHAGQVFKDITGNRTDTVTINSAGNGTFPCNGGSVSIWVKQ

SEQ ID NO: 33708 - protein, 483 aa, Bacillus sp.
HHDGTNGTIMQYFEWNVPNDGQHWNRLHNNAQNLKNAGITAIWIPPAWKGTSQNDVGYGAYDLYDLGEFNQKGTVRTKYGTKAELERAIRSLKANGIQVYGDVVMNHKGGADQTEHVQAVEVNPQNRNQEVSGTYQIEAWTGFNFPGRGNQHSSFKWRWYHFDGTDWDQSRQLANRIYKFRGKAWDWEVDTEFGNYDYLMYADVDMDHPEVINELNRWGVWYANTLNLDGFRLDAVKHIKFSFMRDWLGHVRGQTGKNLFAVAEYWKNDLGALENYLSKTNWTMSAFDVPLHYNLYQASNSSGNYDMRNLLNGTLVQRHPSHAVTFVDNHDTQPGEALESFVQGWFKPLAYATILTREQGYPQVFYGDYYGIPSDGVPSYRQQIDPLLKARQQYAYGTQHDYLDNQDVIGWTREGDSAHAGSGLATVMSDGPGGSKTMYVGTAHAGQVFKDITGNRTDTVTINSAGNGTFPCNGGSVSIWVKQ

SEQ ID NO: 33709 - protein, 483 aa, Bacillus sp.
HHDGTNGTIMQYFEWNVPNDGQHWNRLHNNAQNLKNAGITAIWIPPAWKGTSQNDVGYGAYDLYDLGEFNQKGTVRTKYGTKAELERAIRSLKANGIQVYGDVVMNHKGGADFTERVQAVEVNPQNRNQEVSGTYQIEAYTGFNFPGRGNQHSSFKWRWYHFDGTDWDQSRQLANRIYKFRGKAWDWEVDTENGNYDYLMYADVDMDHPEVINELNRWGVWYANTLNLDGFRLDAVKHIKFSFMRDWLGHVRGQTGKNLFAVAEYWKNDLGALENYLSKTNWTMSAFDVPLHYNLYQASNSSGNYDMRNLLNGTLVQRHPSHAVTFVDNHDTQPGEALESFVQGWFKPLAYATILTREQGYPQVFYGDYYGIPSDGVPSYRQQIDPLLKARQQYAYGTQHDYLDNQDVIGWTREGDSAHAGSGLATVMSDGPGGSKTMYVGTAHAGQVFKDITGNRTDTVTINSAGNGTFPCNGGSVSIWVKQ

SEQ ID NO: 33710 - protein, 483 aa, Bacillus sp.
HHDGTNGTIMQYFEWNVPNDGQHWNRLHNNAQNLKNAGITAIWIPPAWKGTSQNDVGYGAYDLYDLGEFNQKGTVRTKYGTKAELERAIRSLKANGIQVYGDVVMNHKGGADFTERVQAVEVNPQNRNQEVSGTYQIEAWTGFNFPGRGNQHSSFKWRWYHFDGTDWDQSRQLANRIYKFRGKAWDWEVDTEFGNYDYLMYADVDMDHPEVINELNRWGVWYANTLNLDGFRLDAVKHIKFSFMRDWLGHVRGQTGKNLFAVAEYWKNDLGALENYLSKTNWTMSAFDVPLHYNLYQASNSRGNYDMRNLLNGTLVQRHPSHAVTFVDNHDTQPGEALESFVQGWFKPLAYATILTREQGYPQVFYGDYYGIPSDGVPSYRQQIDPLLKARQQYAYGTQHDYLDNQDVIGWTREGDSAHAGSGLATVMSDGPGGSKTMYVGTAHAGQVFKDITGNRTDTVTINSAGNGTFPCNGGSVSIWVKQ

SEQ ID NO: 33711 - protein, 483 aa, Bacillus sp.
HHDGTNGTIMQYFEWNVPNDGQHWNRLHNNAQNLKNAGITAIWIPPAWKGTSQNDVGYGAYDLYDLGEFNQKGTVRTKYGTKAELERAIRSLKANGIQVYGDVVMNHKGGADFTERVQAVEVNPQNRNQEVSGTYQIEAWTGFNFPGRGNQHSSFKWRWYHFDGTDWDQSRQLANRIYKFRGKAWDWEVDTENGNYDYLMYADLDMDHPEVINELNRWGVWYANTLNLDGFRLDAVKHIKFSFMRDWLGHVRGQTGKNLFAVAEYWKNDLGALENYLSKTNWTMSAFDVPLHYNLYQASNSSGNYDMRNLLNGTLVQRHPSHAVTFVDNHDTQPGEALESFVQGWFKPLAYATILTREQGYPQVFYGDYYGIPSDGVPSYRQQIDPLLKARQQYAYGTQHDYLDNQDVIGWTREGDSAHAGSGLATVMSDGPGGSKTMYVGTAHAGQVFKDITGNRTDTVTINSAGNGTFPCNGGSVSIWVKQ

SEQ ID NO: 33712 - protein, 483 aa, Bacillus sp.
HHDGTNGTIMQYFEWNVPNDGQHWNRLHNNAQNLKNAGITAIWIPPAWKGTSQNDVGYGAYDLYDLGEFNQKGTVRTKYGTKAELERAIRSLKANGIQVYGDVVMNHKGGADFTERVQAVEVNPQNRNQEVSGTYQIEAWTGFNFPGRGNQHSSFKWRWYHFDGTDWDQSRQLANRIYKFRGKAWDWEVDTEFGNYDYLMYADVDMDHPEVINELNRWGVWYANTLNLDGFRLDAVKHIKFSFMRDWLGHVRGQTGKGLFAVAEYWKNDLGALENYLSKTNWTMSAFDVPLHYNLYQASNSSGNYDMRNLLNGTLVQRHPSHAVTFVDNHDTQPGEALESFVQGWFKPLAYATILTREQGYPQVFYGDYYGIPSDGVPSYRQQIDPLLKARQQYAYGTQHDYLDNQDVIGWTREGDSAHAGSGLATVMSDGPGGSKTMYVGTAHAGQVFKDITGNRTDTVTINSAGNGTFPCNGGSVSIWVKQ

SEQ ID NO: 33713 - protein, 483 aa, Bacillus sp.
HHDGTNGTIMQYFEWNVPNDGQHWNRLHNNAQNLKNAGITAIWIPPAWKGTSQNDVGYGAYDLYDLGEFNQKGTVRTKYGTKAELERAIRSLKANGIQVYGDVVMNHKGGADFTERVQAVEVNPQNRNQEVSGTYQIEAWTGFNFPGRGNQHSSFKWRWYHFDGTDWDQSRQLANRIYKFRGKAWDWEVDTENGNYDYLMYADVDMDHPEVINELNRWGVWYANTLNLDGFRLDAVKHIQFSFMRDWLGHVRGQTGKNLFAVAEYWKNDLGALENYLSKTNWTMSAFDVPLHYNLYQASNSSGNYDMRNLLNGTLVQRHPSHAVTFVDNHDTQPGEALESFVQGWFKPLAYATILTREQGYPQVFYGDYYGIPSDGVPSYRQQIDPLLKARQQYAYGTQHDYLDNQDVIGWTREGDSAHAGSGLATVMSDGPGGSKTMYVGTAHAGQVFKDITGNRTDTVTINSAGNGTFPCNGGSVSIWVKQ

SEQ ID NO: 33714 - protein, 483 aa, Bacillus sp.
HHDGTNGTIMQYFEWNVPNDGQHWNRLHNNAQNLKNAGITAIWIPPAFKGTSQNDVGYGAYDLYDLGEFNQKGTVRTKYGTKAELERAIRSLKANGIQVYGDVVMNHKGGADFTERVQAVEVNPQNRNQEVSGTYQIEAWTGFNFPGRGNQHSSFKWRWYHFDGTDWDQSRQLANRIYKFRGKAWDWEVDTENGNYDYLMYADVDMDHPEVINELNRWGVWYANTLNLDGFRLDAVKHIKFSFMRDWLGHVRGQTGKNLFAVAEYWKNDLGALENYLSKTNWTMSAFDVPLHYNLYQASNSSGNYDMRNLLNGTLVQRHPSHAVTFVDNHDTQPGEALESFVQGWFKPLAYATILTREQGYPQVFYGDYYGIPSDGVPSYRQQIDPLLKARQQYAYGTQHDYLDNQDVIGWTREGDSAHAGSGLATVMSDGPGGSKTMYVGTAHAGQVFKDITGNRTDTVTINSAGNGTFPCNGGSVSIWVKQ

SEQ ID NO: 33715 - protein, 483 aa, Bacillus sp.
HHDGTNGTIMQYFEWNVPNDGQHWNRLHNNAQNLKNAGITAIWIPPAWKGTSQNDTGYGAYDLYDLGEFNQKGTVRTKYGTKAELERAIRSLKANGIQVYGDVVMNHKGGADFTERVQAVEVNPQNRNQEVSGTYQIEAWTGFNFPGRGNQHSSFKWRWYHFDGTDWDQSRQLANRIYKFRGKAWDWEVDTENGNYDYLMYADVDMDHPEVINELNRWGVWYANTLNLDGFRLDAVKHIKFSFMRDWLGHVRGQTGKNLFAVAEYWKNDLGALENYLSKTNWTMSAFDVPLHYNLYQASNSSGNYDMRNLLNGTLVQRHPSHAVTFVDNHDTQPGEALESFVQGWFKPLAYATILTREQGYPQVFYGDYYGIPSDGVPSYRQQIDPLLKARQQYAYGTQHDYLDNQDVIGWTREGDSAHAGSGLATVMSDGPGGSKTMYVGTAHAGQVFKDITGNRTDTVTINSAGNGTFPCNGGSVSIWVKQ

SEQ ID NO: 33716 - protein, 483 aa, Bacillus sp.
HHDGTNGTIMQYFEWNVPNDGQHWNRLHNNAQNLKNAGITAIWIPPAWKGTSQSDVGYGAYDLYDLGEFNQKGTVRTKYGTKAELERAIRSLKANGIQVYGDVVMNHKGGADFTERVQAVEVNPQNRNQEVSGTYQIEAWTGFNFPGRGNQHSSFKWRWYHFDGTDWDQSRQLANRIYKFRGKAWDWEVDTENGNYDYLMYADVDMDHPEVINELNRWGVWYANTLNLDGFRLDAVKHIKFSFMRDWLGHVRGQTGKNLFAVAEYWKNDLGALENYLSKTNWTMSAFDVPLHYNLYQASNSSGNYDMRNLLNGTLVQRHPSHAVTFVDNHDTQPGEALESFVQGWFKPLAYATILTREQGYPQVFYGDYYGIPSDGVPSYRQQIDPLLKARQQYAYGTQHDYLDNQDVIGWTREGDSAHAGSGLATVMSDGPGGSKTMYVGTAHAGQVFKDITGNRTDTVTINSAGNGTFPCNGGSVSIWVKQ

SEQ ID NO: 33717 - protein, 483 aa, Bacillus sp.
HHDGTNGTIMQYFEWNVPNDGQHWNRLHNNAQNLKNAGITAIWIPPAWKGTSQNDVGYGAYDLYDLGEFNQKGTVRTKYGTKAELERAIRSLKANGIQVYGDVVMNHKGGADFTERVQAVEVNPQNRNQEVSGTYQIEAWTGFNFPGRGNQHSSFKWRWYHFDGTDWDQSRQLANRIYKFRGKEWDWEVDTENGNYDYLMYADVDMDHPEVINELNRWGVWYANTLNLDGFRLDAVKHIKFSFMRDWLGHVRGQTGKNLFAVAEYWKNDLGALENYLSKTNWTMSAFDVPLHYNLYQASNSSGNYDMRNLLNGTLVQRHPSHAVTFVDNHDTQPGEALESFVQGWFKPLAYATILTREQGYPQVFYGDYYGIPSDGVPSYRQQIDPLLKARQQYAYGTQHDYLDNQDVIGWTREGDSAHAGSGLATVMSDGPGGSKTMYVGTAHAGQVFKDITGNRTDTVTINSAGNGTFPCNGGSVSIWVKQ

SEQ ID NO: 33718 - protein, 483 aa, Bacillus sp.
HHDGTNGTIMQYFEWNVPNDGQHWNRLHNNAQNLKNAGITAIWIPPAWKGTSQNDVGYGAYDLYDLGEFNQKGTVRTKYGTKAELERAIRSLKANGIQVYGDVVMNHKGGADFTERVQAVEVNPQNRNQEVSGTYQIEAWTGFNFPGRGNQHSSFKWRWYHFDGTDWDQSRQLSNRIYKFRGKAWDWEVDTEFGNYDYLMYADVDMDHPEVINELNRWGVWYANTLNLDGFRLDAVKHIKFSFMRDWLGHVRGQTGKNLFAVAEYWKNDLGALENYLSKTNWTMSAFDVPLHYNLYQASNSSGNYDMRNLLNGTLVQRHPSHAVTFVDNHDTQPGEALESFVQGWFKPLAYATILTREQGYPQVFYGDYYGIPSDGVPSYRQQIDPLLKARQQYAYGTQHDYLDNQDVIGWTREGDSAHAGSGLATVMSDGPGGSKTMYVGTAHAGQVFKDITGNRTDTVTINSAGNGTFPCNGGSVSIWVKQ

SEQ ID NO: 33719 - protein, 483 aa, Bacillus sp.
HHDGTNGTIMQYFEWNVPNDGQHWNRLHNNAQNLKNAGITAIWIPPAWKGTSQNDVGYGAYDLYDLGEFNQKGTVRTKYGTKAELERAIRSLKANGIQVYGDVVMNHKGGADFTERVQAVEVNPQNRNQEVSGTYQIEAWTGFNFPGRGNQHSSFKWRWYHFDGTDWDQSRQLANRIYKFRGKAWDWEVDTENGNYDYLMYADVDMDHPEVINELNRWGVWYANTLNLDGFRLDAVKHIKFSFMRDWLGHVRGQTGKNLFAVAEYWKNDLGALENYLSKTNHTMSAFDVPLHYNLYQASNSSGNYDMRNLLNGTLVQRHPSHAVTFVDNHDTQPGEALESFVQGWFKPLAYATILTREQGYPQVFYGDYYGIPSDGVPSYRQQIDPLLKARQQYAYGTQHDYLDNQDVIGWTREGDSAHAGSGLATVMSDGPGGSKTMYVGTAHAGQVFKDITGNRTDTVTINSAGNGTFPCNGGSVSIWVKQ

SEQ ID NO: 33720 - protein, 483 aa, Bacillus sp.
HHDGTNGTIMQYFEWNVPNDGQHWNRLHNNAQNLKNAGITAIWIPPAWKGTSQNDVGYGAYDLYDLGEFNQKGTVRTKYGTKAELERAIRSLKANGIQVYGDVVMNHKGGADFTERVQAVEVNPQNRNQEVSGTYQIEAWTGFNFPGRGNQHSSFKWRWYHFDGTDWDQSRKLANRIYKFRGKAWDWEVDTENGNYDYLMYADVDMDHPEVINELNRWGVWYANTLNLDGFRLDAVKHIKFSFMRDWLGHVRGQTGKNLFAVAEYWKNDLGALENYLSKTNWTMSAFDVPLHYNLYQASNSSGNYDMRNLLNGTLVQRHPSHAVTFVDNHDTQPGEALESFVQGWFKPLAYATILTREQGYPQVFYGDYYGIPSDGVPSYRQQIDPLLKARQQYAYGTQHDYLDNQDVIGWTREGDSAHAGSGLATVMSDGPGGSKTMYVGTAHAGQVFKDITGNRTDTVTINSAGNGTFPCNGGSVSIWVKQ

SEQ ID NO: 33721 - protein, 483 aa, Bacillus sp.
HHDGTNGTIMQYFEWNVPNDGQHWNRLHNNAQNLKNAGITAIWIPPAWKGTSQNDVGYGAYDLYDLGEFNQKGTVRTKYGTKAELERAIRSLKANGIQVYGDVVMNHKGGADFTERVQAVEVNPQNRNQEVSGTYQIEAWTGFNFPGRGNQHSSFKWRWYHFDGTDWDQSRQLANRIYKFRGKDWDWEVDTENGNYDYLMYADVDMDHPEVINELNRWGVWYANTLNLDGFRLDAVKHIKFSFMRDWLGHVRGQTGKNLFAVAEYWKNDLGALENYLSKTNWTMSAFDVPLHYNLYQASNSSGNYDMRNLLNGTLVQRHPSHAVTFVDNHDTQPGEALESFVQGWFKPLAYATILTREQGYPQVFYGDYYGIPSDGVPSYRQQIDPLLKARQQYAYGTQHDYLDNQDVIGWTREGDSAHAGSGLATVMSDGPGGSKTMYVGTAHAGQVFKDITGNRTDTVTINSAGNGTFPCNGGSVSIWVKQ

SEQ ID NO: 33722 - protein, 483 aa, Bacillus sp.
HHDGTNGTIMQYFEWNVPNDGQHWNRLHNNAQNLKNAGITAIWIPPAWKGTSQNDVGYGAYDLYDLGEFNQKGTVRTKYGTKAELERAIRSLKANGIQVYGDVVMNHKGGADFTERVQAVEVNPQNRNQEVSGTYQIEAWTGFNFPGRGNQHSSFKWRWYHFDGTDWDQSRQLANRIYKFRGKAWDWEVDTENGNYDYLMYADVDMDHPEVINELNRWGVWYANTLNLDGFRLDAVKHIKFSFMRDWLGHVRGQTGKNLFAVAEYWKGDLGALENYLSKTNWTMSAFDVPLHYNLYQASNSSGNYDMRNLLNGTLVQRHPSHAVTFVDNHDTQPGEALESFVQGWFKPLAYATILTREQGYPQVFYGDYYGIPSDGVPSYRQQIDPLLKARQQYAYGTQHDYLDNQDVIGWTREGDSAHAGSGLATVMSDGPGGSKTMYVGTAHAGQVFKDITGNRTDTVTINSAGNGTFPCNGGSVSIWVKQ

SEQ ID NO: 33723 - protein, 483 aa, Bacillus sp.
HHDGTNGTIMQYFEWNVPNDGQHWNRLHNNAQNLKNAGITAIWIPPAWKGTSQNDVGYGAYDLYDLGEFNQKGTVRTKYGTKAELERAIRSLKANGIQVYGDVVMNHKGGADFTERVQAVEVNPQNRNQEVSGTYQIEAWTGFNFPGRGNQHSSFKWRWYHFDGTDWDQSRQLANRIYKFRGKAWDWEVDTENGNYDYLMYADVDMDHPEVINELNRWGVWYANTLNLDGFRLDAVKHIKFSFMRDWLGHVRGQTGKNLFAVAEYWKNDLGALENYLSKTNWTMSAVDVPLHYNLYQASNSSGNYDMRNLLNGTLVQRHPSHAVTFVDNHDTQPGEALESFVQGWFKPLAYATILTREQGYPQVFYGDYYGIPSDGVPSYRQQIDPLLKARQQYAYGTQHDYLDNQDVIGWTREGDSAHAGSGLATVMSDGPGGSKTMYVGTAHAGQVFKDITGNRTDTVTINSAGNGTFPCNGGSVSIWVKQ

SEQ ID NO: 33724 - protein, 483 aa, Bacillus sp.
HHDGTNGTIMQYFEWNVPNDGQHWNRLHNNAQNLKNAGITAIWIPPAWKGTSQNDVGYGAYDLYDLGEFNQKGTVRTKYGTKAELERAIRSLKANGIQVYGDVVMNHKGGADFTERVQAVEVNPQNRNQEVSGTYQIEAWTGFNFPGRGNQHSSFKWRWYHFDGTDWDQSRQLANRIYKFRGKQWDWEVDTENGNYDYLMYADVDMDHPEVINELNRWGVWYANTLNLDGFRLDAVKHIKFSFMRDWLGHVRGQTGKNLFAVAEYWKNDLGALENYLSKTNWTMSAFDVPLHYNLYQASNSSGNYDMRNLLNGTLVQRHPSHAVTFVDNHDTQPGEALESFVQGWFKPLAYATILTREQGYPQVFYGDYYGIPSDGVPSYRQQIDPLLKARQQYAYGTQHDYLDNQDVIGWTREGDSAHAGSGLATVMSDGPGGSKTMYVGTAHAGQVFKDITGNRTDTVTINSAGNGTFPCNGGSVSIWVKQ

SEQ ID NO: 33725 - protein, 483 aa, Bacillus sp.
HHDGTNGTIMQYFEWNVPNDGQHWNRLHNNAQNLKNAGITAIWIPPAWKGTSQNDVGYGAYDLYDLGEFNQKGTVRTKYGTKAELERAIRSLKANGIQVYGDVVMNHKAGADFTERVQAVEVNPQNRNQEVSGTYQIEAWTGFNFPGRGNQHSSFKWRWYHFDGTDWDQSRQLANRIYKFRGKAWDWEVDTENGNYDYLMYADVDMDHPEVINELNRWGVWYANTLNLDGFRLDAVKHIKFSFMRDWLGHVRGQTGKNLFAVAEYWKNDLGALENYLSKTNWTMSAFDVPLHYNLYQASNSSGNYDMRNLLNGTLVQRHPSHAVTFVDNHDTQPGEALESFVQGWFKPLAYATILTREQGYPQVFYGDYYGIPSDGVPSYRQQIDPLLKARQQYAYGTQHDYLDNQDVIGWTREGDSAHAGSGLATVMSDGPGGSKTMYVGTAHAGQVFKDITGNRTDTVTINSAGNGTFPCNGGSVSIWVKQ

SEQ ID NO: 33726 - protein, 483 aa, Bacillus sp.
HHDGTNGTIMQYFEWNVPNDGQHWNRLHNNAQNLKNAGITAIWIPPAWKGTSQNDVGYGAYDLYDLGEFNQKGTVRTKYGTKAELERAIRSLKANGIQVYGDVVMNHKGGADFTERVQAVEVNPQNRNQEVSGTYQIEAWTGFNFPGRGNQHSSFKWRWYHFDGTDWDQSRQLANRIYKFRGKNWDWEVDTENGNYDYLMYADVDMDHPEVINELNRWGVWYANTLNLDGFRLDAVKHIKFSFMRDWLGHVRGQTGKNLFAVAEYWKNDLGALENYLSKTNWTMSAFDVPLHYNLYQASNSSGNYDMRNLLNGTLVQRHPSHAVTFVDNHDTQPGEALESFVQGWFKPLAYATILTREQGYPQVFYGDYYGIPSDGVPSYRQQIDPLLKARQQYAYGTQHDYLDNQDVIGWTREGDSAHAGSGLATVMSDGPGGSKTMYVGTAHAGQVFKDITGNRTDTVTINSAGNGTFPCNGGSVSIWVKQ

SEQ ID NO: 33727 - protein, 483 aa, Bacillus sp.
HHDGTNGTIMQYFEWNVPNDGQHWNRLHNNAQNLKNAGITAIWIPPAWKGTSQNDVGYGAYDLYDLGEFNQKGTVRTKYGTKAELERAIRSLKANGIQVYGDVVMNHKGGADFTERVQAVEVNPQNRNQEVSGTYQIEAWTGFNFPGRGNQHSSFKWRWYHFDGTDWDQSRQLANRIYKFRGKAWDWEVDTENGNYDYLMYADVDMDHPEVINELNRWGVWYANTLNLDGFRLDAVKHIKFSFMRDWLGHVRGQTGKNLFAVAEYWKNDLGALENYLSKTNWTMSAFDVPLHYNLYQASNSSGNYDMRNLLNGTLVQRAPNHAVTFVDNHDTQPGEALESFVQGWFKPLAYATILTREQGYPQVFYGDYYGIPSDGVPSYRQQIDPLLKARQQYAYGTQHDYLDNQDVIGWTREGDSAHAGSGLATVMSDGPGGSKTMYVGTAHAGQVFKDITGNRTDTVTINSAGNGTFPCNGGSVSIWVKQ

SEQ ID NO: 33728 - protein, 483 aa, Bacillus sp.
HHDGTNGTIMQYFEWNVPNDGQHWNRLHNNAQNLKNAGITAIWIPPAWKGTSQNDVGYGAYDLYDLGEFNQKGTVRTKYGTKAELERAIRSLKANGIQVYGDVVMNHKGGADFTERVQAVEVNPQNRNQEVSGTYQIEAWTGFNFPGRGNQHSSFKWRWYHFDGTDWDQSRQLANRIYKFRGKAWDWEVDTEFGNYDYLMYADVDMDHPEVINELNRWGVWYANTLNLDGFRLDAVKHIKFSFVRDWLGHVRGQTGKNLFAVAEYWKNDLGALENYLSKTNWTMSAFDVPLHYNLYQASNSSGNYDMRNLLNGTLVQRHPSHAVTFVDNHDTQPGEALESFVQGWFKPLAYATILTREQGYPQVFYGDYYGIPSDGVPSYRQQIDPLLKARQQYAYGTQHDYLDNQDVIGWTREGDSAHAGSGLATVMSDGPGGSKTMYVGTAHAGQVFKDITGNRTDTVTINSAGNGTFPCNGGSVSIWVKQ

SEQ ID NO: 33729 - protein, 483 aa, Bacillus sp.
HHDGTNGTIMQYFEWNVPNDGQHWNRLHNNAQNLKNAGITAIWIPPAWKGTSQNDVGYGAYDLYDLGEFNQKGTVRTKYGTKAELERAIRSLKANGIQVYGDVVMNHKGGADFTERVQAVEVNPQNRNQEVSGTYQIEAWTGFNFPGRGNQHSSFKWRWYHFDGTDWDQSRQLANRIYKFRGKAWDWEVDTENGNYDYLMYADVDMDHPEVINELNRWGVWYANTLNLDGFRLDAVKHIKFSFMRDWLGHVRGQTGKNLFAVAEYWKNDLGALENYLSKTNWTMSAFDVPLHYNLYQASNSSGNYDMRNLLNGTLVQRHPSHAVTLVDNHDTQPGEALESFVQGWFKPLAYATILTREQGYPQVFYGDYYGIPSDGVPSYRQQIDPLLKARQQYAYGTQHDYLDNQDVIGWTREGDSAHAGSGLATVMSDGPGGSKTMYVGTAHAGQVFKDITGNRTDTVTINSAGNGTFPCNGGSVSIWVKQ

SEQ ID NO: 33730 - protein, 483 aa, Bacillus sp.
HHDGTNGTIMQYFEWNVPNDGQHWNRLHNNAQNLKNAGITAIWIPPAWKGTSQNDVGYGAYDLYDLGEFNQRGTVRTKYGTKAELERAIRSLKANGIQVYGDVVMNHKGGADFTERVQAVEVNPQNRNQEVSGTYQIEAWTGFNFPGRGNQHSSFKWRWYHFDGTDWDQSRQLANRIYKFRGKAWDWEVDTENGNYDYLMYADVDMDHPEVINELNRWGVWYANTLNLDGFRLDAVKHIKFSFMRDWLGHVRGQTGKNLFAVAEYWKNDLGALENYLSKTNWTMSAFDVPLHYNLYQASNSSGNYDMRNLLNGTLVQRHPSHAVTFVDNHDTQPGEALESFVQGWFKPLAYATILTREQGYPQVFYGDYYGIPSDGVPSYRQQIDPLLKARQQYAYGTQHDYLDNQDVIGWTREGDSAHAGSGLATVMSDGPGGSKTMYVGTAHAGQVFKDITGNRTDTVTINSAGNGTFPCNGGSVSIWVKQ

SEQ ID NO: 33731 - protein, 483 aa, Bacillus sp.
HHDGTNGTIMQYFEWNVPNDGQHWNRLHNNAQNLKNAGITAIWIPPAWKGTSQNDVGYGAYDLYDLGEFNQKGTVRTKYGTKAELERAIRSLKANGIQVYGDVVMNHKGGADFTERVQAVEVNPQNRNQEVSGTYQIEAWTGFNFPGRGNQHSSFKWRWYHFDGTDWDQSRQLANRIYKFRTKAWDWEVDTENGNYDYLMYADVDMDHPEVINELNRWGVWYANTLNLDGFRLDAVKHIKFSFMRDWLGHVRGQTGKNLFAVAEYWKNDLGALENYLSKTNWTMSAFDVPLHYNLYQASNSSGNYDMRNLLNGTLVQRHPSHAVTFVDNHDTQPGEALESFVQGWFKPLAYATILTREQGYPQVFYGDYYGIPSDGVPSYRQQIDPLLKARQQYAYGTQHDYLDNQDVIGWTREGDSAHAGSGLATVMSDGPGGSKTMYVGTAHAGQVFKDITGNRTDTVTINSAGNGTFPCNGGSVSIWVKQ

SEQ ID NO: 33732 - protein, 483 aa, Bacillus sp.
HHDGTNGTIMQYFEWNVPNDGQHWNRLHNNAQNLKNAGITAIWIPPAWKGTSQNDVGYGAYDLYDLGEFNQKGTVRTKYGTKAELERAIRSLKANGIQVYGDVVMNHKGGADFTERVQAVEVNPQNRNQEVSGTYQIEAWTGFNFPGRGNQHSSFKWRWYHFDGTDWDQSRQLANRIYKFRGKAWDWEVDTENGNYDYLMYADVDMDHPEVINELNRWGVWYANTLNLDGFRLDAVKHIKFSFMRDWLGHVRGQTGKNLFAVAEYWKNDLGALENYLSKTNWTMSAFDVPLHNNLYQASNSSGNYDMRNLLNGTLVQRHPSHAVTFVDNHDTQPGEALESFVQGWFKPLAYATILTREQGYPQVFYGDYYGIPSDGVPSYRQQIDPLLKARQQYAYGTQHDYLDNQDVIGWTREGDSAHAGSGLATVMSDGPGGSKTMYVGTAHAGQVFKDITGNRTDTVTINSAGNGTFPCNGGSVSIWVKQ

SEQ ID NO: 33733 - protein, 483 aa, Bacillus sp.
HHDGTNGTIMQYFEWNVPNDGQHWNRLHNNAQNLKNAGITAIWIPPAWKGTSQNDVGYGAYDLYDLGEFNQKGTVRTKYGTKAELERAIRSLKANGIQVYGDVVMNHKGGADFTERVQAVEVNPQNRNQEVSGTYQIEAWTGFNFPGRGNQHSSFKWRWYHFDGTDWDESRQLANRIYKFRGKAWDWEVDTENGNYDYLMYADVDMDHPEVINELNRWGVWYANTLNLDGFRLDAVKHIKFSFMRDWLGHVRGQTGKNLFAVAEYWKNDLGALENYLSKTNWTMSAFDVPLHYNLYQASNSSGNYDMRNLLNGTLVQRHPSHAVTFVDNHDTQPGEALESFVQGWFKPLAYATILTREQGYPQVFYGDYYGIPSDGVPSYRQQIDPLLKARQQYAYGTQHDYLDNQDVIGWTREGDSAHAGSGLATVMSDGPGGSKTMYVGTAHAGQVFKDITGNRTDTVTINSAGNGTFPCNGGSVSIWVKQ

SEQ ID NO: 33734 - protein, 483 aa, Bacillus sp.
HHDGTNGTIMQYFEWNVPNDGQHWNRLHNNAQNLKNAGITAIWIPPAYKGTSQNDVGYGAYDLYDLGEFNQKGTVRTKYGTKAELERAIRSLKANGIQVYGDVVMNHKGGADFTERVQAVEVNPQNRNQEVSGTYQIEAWTGFNFPGRGNQHSSFKWRWYHFDGTDWDQSRQLANRIYKFRGKAWDWEVDTENGNYDYLMYADVDMDHPEVINELNRWGVWYANTLNLDGFRLDAVKHIKFSFMRDWLGHVRGQTGKNLFAVAEYWKNDLGALENYLSKTNWTMSAFDVPLHYNLYQASNSSGNYDMRNLLNGTLVQRHPSHAVTFVDNHDTQPGEALESFVQGWFKPLAYATILTREQGYPQVFYGDYYGIPSDGVPSYRQQIDPLLKARQQYAYGTQHDYLDNQDVIGWTREGDSAHAGSGLATVMSDGPGGSKTMYVGTAHAGQVFKDITGNRTDTVTINSAGNGTFPCNGGSVSIWVKQ

SEQ ID NO: 33735 - protein, 483 aa, Bacillus sp.
HHDGTNGTIMQYFEWNVPNDGQHWNRLHNNAQNLKNAGITAIWIPPAWKGTSQNDVGYGAYDLYDLGEFNQKGTVRTKYGTKAELERAIRSLKANGIQVYGDVVMNHKGGADFTERVQAVEVNPQNRNQEVSGTYQIEAWTGFNFPGRGNQHSSFKWRWYHFDGTDWDQSRQLANRIYKFRGKAWDWEVDTEFGNYDYLMYADVDMDHPEVINELNRWGVWYANTLNLDGFRLDAVKHIKFSFMRDWLGHVRGQTGKNLFAVAEYWKNDLGALENYLSKTNWTMSAFDVPLHYNLYQASNSSGNYDMRNLLNGTLVQRHPSHAVTFVDNHDTQPGEALESFVQGWFKPLAYATILTREQGYPQVFYGDYYGIPSDGVPSYRQQIDPLLKARQQYAYGTQHDYLDNQDVIGWTREGDSAHAGSGLATVMSDGPGGSKTMYVGTAHAGQVFKDITGNRTDTVTINSAGNGTFPCNGGSVSIWVKQ

SEQ ID NO: 33736 - protein, 483 aa, Bacillus sp.
HHDGTNGTIMQYFEWNVPNDGQHWNRLHNNAQNLKNAGITAIWIPPAWKGTSQNDVGYGAYDLYDLGEFNQKGTVRTKYGTKAELERAIRSLKANGIQVYGDVVMNHKGGADFTERVQAVEVNPQNRNQEVSGTYQIEAWTGFNFPGRGNQHSSFKWRWYHFDGTDWDQSRQLANRIYKFRGKAWDWEVDTEFGNYDYLMYADVDMDHPEVINELNRWGVWYANTLNLDGFRLDAVKHIKFSFMRDWLGHVRGQTGKNLFAVAEYWKNDLGALENYLSKTNWTMSAFDVPLHYNLYQASNSSGNYDMRNLLNGTLVQRHPNHAVTFVDNHDTQPGEALESFVQGWFKPLAYATILTREQGYPQVFYGDYYGIPSDGVPSYRQQIDPLLKARQQYAYGTQHDYLDNQDVIGWTREGDSAHAGSGLATVMSDGPGGSKTMYVGTAHAGQVFKDITGNRTDTVTINSAGNGTFPCNGGSVSIWVKQ

SEQ ID NO: 33737 - protein, 482 aa, Synthetic construct
HDGTNGTIMQYFEWNVPNDGQHWNRLHNNAQNLKNAGITAIWIPPAWKGTSQNDVGYGAYDLYDLGEFNQKGTVRTKYGTKAELERAIRSLKANGIQVYGDVVMNHKGGADFTERVQAVEVNPQNRNQEVSGTYQIEAWTGFNFPGRGNQHSSFKWRWYHFDGTDWDQSRQLANRIYKFRGKAWDWEVDTEFGNYDYLLYADLDMDHPEVINELNRWGVWYANTLNLDGFRLDAVKHIKFSFMRDWLGHVRGQTGKNLFAVAEYWKNDLGALENYLSKTNWTMSAFDVPLHYNLYQASNSSGNYDMRNLLNGTLVQKHPSHAVTFVDNHDTQPGEALESFVQGWFKPLAYATILTREQGYPQVFYGDYYGIPSDGVPSYRQQIDPLLKARQQYAYGTQHDYLDNQDVIGWTREGDSAHAGSGLATVMSDGPGGSKTMYVGTAHAGQVFKDITGNKTDTVTINSAGNGTFPCNGGSVSIWVKQ

SEQ ID NO: 33738 - protein, 481 aa, Bacillus licheniformis
LNGTLMQYFEWYMPNDGQHWRRLQNDSAYLAEHGITAVWIPPAYKGTSQADVGYGAYDLYDLGEFHQKGTVRTKYGTKGELQSAIKSLHSRDINVYGDVVINHKGGADATEDVTAVEVDPADRNRVISGEHLIKAWTHFHFPGRGSTYSDFKWHWYHFNGTDWDESRKLNRIYKFQNTNWNWEVSNENGNYDYLMYANIDYSHPDVAAEIKRWGTWYANELQLDGFRLDAVKHIPFWFLRDWVNHVREKTGKEMFTVAEYWQNDLGALENYLNKTNFNHSVFDVPLHYQFHAASTQGGGYDMRKLLNGTVVSKHPLKSVTFVDNHDTQPGQSLESTVQTWFKPLAYAFILTRESGYPQVFYGDMYGTKGDSQREIPALKHKIEPILKARKQYAYGAQHDYFDHWDIVGWTREGDSSVANSGLAALITNGPGGAKRMYVGRQRAGKTWHDITGNRSEPVVINSEGWGEFHVNGGSVSIYVKR

SEQ ID NO: 33739 - protein, 481 aa, Bacillus licheniformis
LNGTLMQYFEWYMPNDGQHWRRLQNDSAYLAEHGITAVWIPPAYKGTSQADVGYGAYDLYDLGEFHQKGTVRTKYGTKGELQSAIKSLHSRDINVYGDVVINHKGGADATEDVTAVEVDPADRNRVISGEHLIKAWTHFHFPGRGSTYSDFKWHWYHFNGTDWDESRKLNRIYKFGNTNWNWEVSNENGNYDYLMYANIDYSHPDVAAEIKRWGTWYANELQLDGFRLDAVKHIPFWFLRDWVNHVREKTGKEMFTVAEYWQNDLGALENYLNKTNFNHSVFDVPLHYQFHAASTQGGGYDMRKLLNGTVVSKHPLKSVTFVDNHDTQPGQSLESTVQTWFKPLAYAFILTRESGYPQVFYGDMYGTKGDSQREIPALKHKIEPILKARKQYAYGAQHDYFDHWDIVGWTREGDSSVANSGLAALITNGPGGAKRMYVGRQKAGQTWHDITGNRSEPVVINSEGWGEFHVNGGSVSIYVKR

SEQ ID NO: 33740 - protein, 481 aa, Bacillus licheniformis
LNGTLMQYFEWYMPNDGQHWRRLQNDSAYLAEHGITAVWIPPAYKGTSQADVGYGAYDLYDLGEFHQKGTVRTKYGTKGELQSAIKSLHSRDINVYGDVVIDHKGGADATEDVTAVEVDPADRNRVISGEHLIKAWTHFHFPGRGSTYSDFKWHWYHFNGTDWDESRKLNRIYKFQNTNWNWEVSNENGNYDYLMYANIDYSHPDVAAEIKRWGTWYANELQLDGFRLDAVKHIPFWFLRDWVNHVREKTGKEMFTVAEYWQNDLGALENYLNKTNFNHSVFDVPLHYQFHAASTQGGGYDMRKLLNGTVVSKHPLKSVTFVDNHDTQPGQSLESTVQTWFKPLAYAFILTRESGYPQVFYGDMYGTKGDSQREIPALKHKIEPILKARKQYAYGAQHDYFDHWDIVGWTREGDSSVANSGLAALITNGPGGAKRMYVGRQNAGQTWHDITGNRSEPVVINSEGWGEFHVNGGSVSIYVKR

SEQ ID NO: 33741 - protein, 478 aa, Bacillus licheniformis
LNGTLMQYFEWYTPNDGQHWNRLRNDSAYLKEHGITAVWIPPAYKGTSQADVGYGAYDLYDLGEFNQKGTVRTKYGTKGQLQSAINSLKSNGINVYGDVVINHKGGADATEDVTAVEVDPADRNRVISGEHLIKAYTHFHFPGRGSTYSDFKWHWYHFDGTDWDESRKLNRIYKFQGKAWDWEVSNENGNYDYLTYADIDYDHPDVAAEIRNWGTWYANTLQLDGFRLDAVKHIKFSFLRDWVNHVRSATGKNMFTVAEYWQNDLGALENYLNKTNFNHSVFDVPLHYQFHAASTQGGGYDMQNLLNGTVVSKHPLHSVTFVDNHDTQPGQSLESTVEEWFKPLAYAFILTRESGYPQVFYGDMYGIPTHGVPALKHKIEPILEARQKYAYGAQHDYFDHHDIVGWTREGDSSVANSGLAALITDGPGGAKRMYVGRQNAGETWHDITGNRSEPVVINSEGWGEFHVNGGSVSIYVQR

SEQ ID NO: 33742 - protein, 483 aa, Bacillus sp.
HHDGTNGTIMQYFEWNVPNDGQHWNRLHNNAQNLKNAGITAIWIPPAWKGTSQNDVGYGAYDLYDLGEFNQKGTVRTKYGTKAELERAIRSLKANGIQVYGDVVMNHKGGADFTERVQAVEVNPQNRNQEVSGTYQIEAWTGFNFPGRGNQHSSFKWRWYHFDGTDWDQSRQLANRIYKFRGKAWDWEVDTEFGNYDYLMYADVDMDHPEVINELNRWGVWYANTLNLDGFRLDAVKHIKFSFMRDWLGHVRGQTGKNLFAVAEYWKNDLGALENYLSKTNWTMSAFDVPLHYNLYQASNSSGNYDMRNLLNGTLVQRHPSHAVTFVDNHDTQPGEALESFVQGWFKPLAYATILTREQGYPQVFYGDYYGIPSDGVPSYRQQIDPLLKARQQYAYGTQHDYLDNQDVIGWTREGDSAHAGSGLATVMSDGPGGSKTMYVGTAHAGQVFKDITGNRTDTVTINSAGNGTFPCNKGSVSIWVKQ

SEQ ID NO: 33743 - protein, 483 aa, Bacillus sp.
HHDGTNGTIMQYFEWNVPNDGQHWNRLHNNAQNLKNAGITAIWIPPAWKGTSQNDVGYGAYDLYDLGEFNQKGTVRTKYGTKAELERAIRSLKANGIQVYGDVVMNHKGGADFTERVQAVEVNPQNRNQEVSGTYQIEAWTGFNFPGRGNQHSSFKWRWYHFDGTDWDQSRQLANRIYKFRGKAWDWEVDTEFGNYDYLMYADLDMDHPEVINELNRWGVWYANTLNLDGFRLDAVKHIKFSFMRDWLGHVRGQTGKNLFAVAEYWKNDLGALENYLSKTNWTMSAFDVPLHYNLYQASNSSGNYDMRNLLNGTLVQRHPSHAVTFVDNHDTQPGEALESFVQGWFKPLAYATILTREQGYPQVFYGDYYGIPSDGVPSYRQQIDPLLKARQQYAYGTQHDYLDNQDVIGWTREGDSAHAGSGLATVMSDGPGGSKTMYVGTAHAGQVFKDITGNRTDTVTINSAGNGTFPCNGGSVSIWVKQ

SEQ ID NO: 33744 - protein, 483 aa, Bacillus sp.
HHDGTNGTIMQYFEWNVPNDGQHWNRLHNNAQNLKNAGITAIWIPPAWKGTSQSDVGYGAYDLYDLGEFNQKGTVRTKYGTKAELERAIRSLKANGIQVYGDVVMNHKGGADFTERVQAVEVNPQNRNQEVSGTYQIEAWTGFNFPGRGNQHSSFKWRWYHFDGTDWDQSRQLANRIYKFRGKAWDWEVDTEFGNYDYLMYADVDMDHPEVINELNRWGVWYANTLNLDGFRLDAVKHIKFSFMRDWLGHVRGQTGKNLFAVAEYWKNDLGALENYLSKTNWTMSAFDVPLHYNLYQASNSSGNYDMRNLLNGTLVQRHPSHAVTFVDNHDTQPGEALESFVQGWFKPLAYATILTREQGYPQVFYGDYYGIPSDGVPSYRQQIDPLLKARQQYAYGTQHDYLDNQDVIGWTREGDSAHAGSGLATVMSDGPGGSKTMYVGTAHAGQVFKDITGNRTDTVTINSAGNGTFPCNGGSVSIWVKQ

SEQ ID NO: 33745 - protein, 483 aa, Bacillus sp.
HHDGTNGTIMQYFEWNVPNDGQHWNRLHNNAQNLKNAGITAIWIPPAWKGTSQNDVGYGAYDLYDLGEFNQKGTVRTKYGTKAELERAIRSLKANGIQVYGDVVMNHKGGADFTERVQAVEVNPQNRNQEVSGTYQIEAWTGFNFPGRGNQHSSFKWRWYHFDGTDWDQSRQLANRIYKFRGKAWDWEVDTEFGNYDYLMYADFDMDHPEVINELNRWGVWYANTLNLDGFRLDAVKHIKFSFMRDWLGHVRGQTGKNLFAVAEYWKNDLGALENYLSKTNWTMSAFDVPLHYNLYQASNSSGNYDMRNLLNGTLVQRHPSHAVTFVDNHDTQPGEALESFVQGWFKPLAYATILTREQGYPQVFYGDYYGIPSDGVPSYRQQIDPLLKARQQYAYGTQHDYLDNQDVIGWTREGDSAHAGSGLATVMSDGPGGSKTMYVGTAHAGQVFKDITGNRTDTVTINSAGNGTFPCNGGSVSIWVKQ

SEQ ID NO: 33746 - protein, 483 aa, Bacillus sp.
HHDGTNGTIMQYFEWNVPNDGQHWNRLHNNAQNLKNAGITAIWIPPAYKGTSQNDVGYGAYDLYDLGEFNQKGTVRTKYGTKAELERAIRSLKANGIQVYGDVVMNHKGGADFTERVQAVEVNPQNRNQEVSGTYQIEAWTGFNFPGRGNQHSSFKWRWYHFDGTDWDQSRQLANRIYKFRGKAWDWEVDTEFGNYDYLMYADVDMDHPEVINELNRWGVWYANTLNLDGFRLDAVKHIKFSFMRDWLGHVRGQTGKNLFAVAEYWKNDLGALENYLSKTNWTMSAFDVPLHYNLYQASNSSGNYDMRNLLNGTLVQRHPSHAVTFVDNHDTQPGEALESFVQGWFKPLAYATILTREQGYPQVFYGDYYGIPSDGVPSYRQQIDPLLKARQQYAYGTQHDYLDNQDVIGWTREGDSAHAGSGLATVMSDGPGGSKTMYVGTAHAGQVFKDITGNRTDTVTINSAGNGTFPCNGGSVSIWVKQ

SEQ ID NO: 33747 - protein, 483 aa, Bacillus sp.
HHDGTNGTIMQYFEWNVPNDGQHWNRLHNNAQNLKNAGITAIWIPPAWKGTSQNDVGYGAYDLYDLGEFNQKGTVRTKYGTKAELERAIRSLKANGIQVYGDVVMNHKGGADFTERVQAVEVNPQNRNQEVSGTYQIEAWTGFNFPGRGNQHSSFKWRWYHFDGTDWDQSRQLANRIYKFRGKNWDWEVDTEFGNYDYLMYADVDMDHPEVINELNRWGVWYANTLNLDGFRLDAVKHIKFSFMRDWLGHVRGQTGKNLFAVAEYWKNDLGALENYLSKTNWTMSAFDVPLHYNLYQASNSSGNYDMRNLLNGTLVQRHPSHAVTFVDNHDTQPGEALESFVQGWFKPLAYATILTREQGYPQVFYGDYYGIPSDGVPSYRQQIDPLLKARQQYAYGTQHDYLDNQDVIGWTREGDSAHAGSGLATVMSDGPGGSKTMYVGTAHAGQVFKDITGNRTDTVTINSAGNGTFPCNGGSVSIWVKQ

SEQ ID NO: 33748 - protein, 483 aa, unidentified
HHDGTNGTIMQYFEWNVPNDGQHWNRLHNNAQNLKNAGITAIWIPPAWKGTSQNDVGYGAYDLYDLGEFNQKGTVRTKYGTKAELERAIRSLKANGIQVYGDVVMNHKGGADFTERVQAVEVNPQNRNQEVSGTYQIEAWTGFNFPGRGNQHSSFKWRWYHFDGTDWDQSRQLANRIYKFRGKAWDWEVDTENGNYDYLMYADVDMDHPEVINELNRWGVWYANTLNLDGFRLDAVKHIKFSFMRDWLGHVRGQTGKNLFAVAEYWKNDLGALENYLSKTNWTMSAFDVPLHYNLYQASNSSGNYDMRNLLNGTLVQRHPSHAVTFVDNHDTQPGEALESFVQGWFKPLAYATILTREQGYPQVFYGDYYGIPSDGVPSYRQQIDPLLKARQQYAYGAQHDYFDHHDIVGWTREGDSSVANSGLAALITDGPGGAKRMYVGRQNAGETWHDITGNRSEPVVINSEGWGEFHVNGGSVSIYVQR

SEQ ID NO: 33749 - protein, 483 aa, Bacillus sp.
HHDGTNGTIMQYFEWNVPNDGQHWNRLHNNAQNLKNAGITAIWIPPAWKGTSQNDVGYGAYDLYDLGEFNQKGTVRTKYGTKAELERAIRSLKANGIQVYGDVVMNHKAGADFTERVQAVEVNPQNRNQEVSGTYQIEAWTGFNFPGRGNQHSSFKWRWYHFDGTDWDQSRQLANRIYKFRGKAWDWEVDTEFGNYDYLMYADVDMDHPEVINELNRWGVWYANTLNLDGFRLDAVKHIKFSFMRDWLGHVRGQTGKNLFAVAEYWKNDLGALENYLSKTNWTMSAFDVPLHYNLYQASNSSGNYDMRNLLNGTLVQRHPSHAVTFVDNHDTQPGEALESFVQGWFKPLAYATILTREQGYPQVFYGDYYGIPSDGVPSYRQQIDPLLKARQQYAYGTQHDYLDNQDVIGWTREGDSAHAGSGLATVMSDGPGGSKTMYVGTAHAGQVFKDITGNRTDTVTINSAGNGTFPCNGGSVSIWVKQ

SEQ ID NO: 33750 - protein, 484 aa, Bacillus sp.
HHDGTNGTIMQYFEWNVPNDGQHWNRLHNNAQNLKNAGITAIWIPPAWKGTSQNDVGYGAYDLYDLGEFNQKGTVRTKYGTKAELERAIRSLKANGIQVYGDVVMNHKGGADFTERVQAVEVNPQNRNQEVSGTYQIEAWTGFNFPGRGNQHSSFKWRWYHFDGTDWDQSRQLANRIYKFRGGKAWDWEVDTEFGNYDYLMYADLDMDHPEVINELNRWGVWYANTLNLDGFRLDAVKHIKFSFMRDWLGHVRAQTGKNLFAVAEYWKNDLGALENYLSKTNWTMSAFDVPLHYNLYQASNSSGNYDMRNLLNGTLVQRHPSHAVTFVDNHDTQPGEALESFVQGWFKPLAYATILTREQGYPQVFYGDYYGIPSDGVPSYRQQIDPLLAARQPYAYGTQHDYLDNQDVIGWTREGDSAHAGSGLATVMSDGPGGSKTMYVGQAHAGQVFKDITGNRTDTVTINSAGNGTFRCNKGSVSIWVKQ

SEQ ID NO: 33751 - protein, 483 aa, Bacillus sp.
HHDGTNGTIMQYFEWNVPNDGQHWNRLHNNAQNLKNAGITAIWIPPAWKGTSQNDVGYGAYDLYDLGEFNQKGTVRTKYGTKAELERAIRSLKANGIQVYGDVVMNHKGGADFTERVQAVEVNPQNRNQEVSGTYQIEAWTGFNFPGRGNQHSSFKWRWYHFDGTDWDQSRQLANRIYKFRGKDWDWEVDTEFGNYDYLMYADVDMDHPEVINELNRWGVWYANTLNLDGFRLDAVKHIKFSFMRDWLGHVRGQTGKNLFAVAEYWKNDLGALENYLSKTNWTMSAFDVPLHYNLYQASNSSGNYDMRNLLNGTLVQRHPSHAVTFVDNHDTQPGEALESFVQGWFKPLAYATILTREQGYPQVFYGDYYGIPSDGVPSYRQQIDPLLKARQQYAYGTQHDYLDNQDVIGWTREGDSAHAGSGLATVMSDGPGGSKTMYVGTAHAGQVFKDITGNRTDTVTINSAGNGTFPCNGGSVSIWVKQ

SEQ ID NO: 33752 - protein, 483 aa, Bacillus sp.
HHDGTNGTIMQYFEWNVPNDGQHWNRLHNNAQNLKNAGITAIWIPPAWKGTSQNDVGYGAYDLYDLGEFNQKGTVRTKYGTKAELERAIRSLKANGIQVYGDVVMNHKGGADFTERVQAVEVNPQNRNQEVSGTYQIEAWTGFNFPGRGNQHSSFKWRWYHFDGTDWDQSRQLANRIYKFRGKAWDWEVDTEFGNYDYLMYADVDMDHPEVINELNRWGVWYANTLNLDGFRLDAVKHIKFSFMRDWLGHVRGQTGKNLFAVAEYWKNDLGALENYLSKTNHTMSAFDVPLHYNLYQASNSSGNYDMRNLLNGTLVQRHPSHAVTFVDNHDTQPGEALESFVQGWFKPLAYATILTREQGYPQVFYGDYYGIPSDGVPSYRQQIDPLLKARQQYAYGTQHDYLDNQDVIGWTREGDSAHAGSGLATVMSDGPGGSKTMYVGTAHAGQVFKDITGNRTDTVTINSAGNGTFPCNGGSVSIWVKQ

SEQ ID NO: 33753 - protein, 485 aa, Bacillus sp.
HHDGTNGTIMQYFEWNVPNDGQHWNRLHNNAQNLKNAGITAIWIPPAWKGTSQNDVGYGAYDLYDLGEFNQKGTVRTKYGTKAELERAIRSLKANGIQVYGDVVMNHKGGADFTERVQAVEVNPQNRNQEVSGTYQIEAWTGFNFPGRGNQHSSFKWRWYHFDGTDWDQSRQLANRIYKFRGDGKAWDWEVDTENGNYDYLMYADVDMDHPEVINELNRWGVWYANTLNLDGFRLDAVKHIKFSFMRDWLGHVRGQTGKNLFAVAEYWKNDLGALENYLSKTNWTMSAFDVPLHYNLYQASNSSGNYDMRNLLNGTLVQRHPSHAVTFVDNHDTQPGEALESFVQGWFKPLAYATILTREQGYPQVFYGDYYGIPSDGVPSYRQQIDPLLKARQQYAYGAQHDYFDHHDIVGWTREGDSSVANSGLAALITDGPGGAKRMYVGRQNAGETWHDITGNRSEPVVINSEGWGEFHVNGGSVSIYVQR

SEQ ID NO: 33754 - protein, 483 aa, Bacillus sp.
HHDGTNGTIMQYFEWNVPNDGQHWNRLHNNAQNLKNAGITAIWIPPAWKGTSQNDVGYGAYDLYDLGEFNQKGTVRTKYGTKAELERAIRSLKANGIQVYGDVVMNHKGGADFTERVQAVEVNPQNRNQEVSGTYQIEAYTGFNFPGRGNQHSSFKWRWYHFDGTDWDQSRQLANRIYKFRGKAWDWEVDTEFGNYDYLMYADVDMDHPEVINELNRWGVWYANTLNLDGFRLDAVKHIKFSFMRDWLGHVRGQTGKNLFAVAEYWKNDLGALENYLSKTNWTMSAFDVPLHYNLYQASNSSGNYDMRNLLNGTLVQRHPSHAVTFVDNHDTQPGEALESFVQGWFKPLAYATILTREQGYPQVFYGDYYGIPSDGVPSYRQQIDPLLKARQQYAYGTQHDYLDNQDVIGWTREGDSAHAGSGLATVMSDGPGGSKTMYVGTAHAGQVFKDITGNRTDTVTINSAGNGTFPCNGGSVSIWVKQ

SEQ ID NO: 33755 - protein, 483 aa, Bacillus sp.
HHDGTNGTIMQYFEWNVPNDGQHWNRLHNNAQNLKNAGITAIWIPPAWKGTSQNDVGYGAYDLYDLGEFNQKGTVRTKYGTKAELERAIRSLKANGIQVYGDVVMNHKGGADFTERVQAVEVNPQNRNQEVSGTYQIEAWTGFNFPGRGNQHSSFKWRWYHFDGTDWDQSRQLANRIYKFRGKAWDWEVDTEFGNYDYLMYADVDMDHPEVINELNRWGVWYANTLNLDGFRLDAVKHIKFSFMRDWLGHVRGQTGKNLFAVAEYWKNDLGALENYLSKTNWTMSAFDVPLHNNLYQASNSSGNYDMRNLLNGTLVQRHPSHAVTFVDNHDTQPGEALESFVQGWFKPLAYATILTREQGYPQVFYGDYYGIPSDGVPSYRQQIDPLLKARQQYAYGTQHDYLDNQDVIGWTREGDSAHAGSGLATVMSDGPGGSKTMYVGTAHAGQVFKDITGNRTDTVTINSAGNGTFPCNGGSVSIWVKQ

SEQ ID NO: 33756 - protein, 483 aa, Bacillus sp.
HHDGTNGTIMQYFEWNVPNDGQHWNRLHNNAQNLKNAGITAIWIPPAWKGTSQNDVGYGAYDLYDLGEFNQKGTVRTKYGTKAELERAIRSLKANGIQVYGDVVMNHKGGADFTERVQAVEVNPQNRNQEVSGTYQIEAWTGFNFPGRGNQHSSFKWRWYHFDGTDWDQSRQLANRIYKFRTKAWDWEVDTEFGNYDYLMYADVDMDHPEVINELNRWGVWYANTLNLDGFRLDAVKHIKFSFMRDWLGHVRGQTGKNLFAVAEYWKNDLGALENYLSKTNWTMSAFDVPLHYNLYQASNSSGNYDMRNLLNGTLVQRHPSHAVTFVDNHDTQPGEALESFVQGWFKPLAYATILTREQGYPQVFYGDYYGIPSDGVPSYRQQIDPLLKARQQYAYGTQHDYLDNQDVIGWTREGDSAHAGSGLATVMSDGPGGSKTMYVGTAHAGQVFKDITGNRTDTVTINSAGNGTFPCNGGSVSIWVKQ

SEQ ID NO: 33757 - protein, 483 aa, Bacillus sp.
HHDGTNGTIMQYFEWNVPNDGQHWNRLHNNAQNLKNAGITAIWIPPAWKGTSQSDTGYGAYDLYDLGEFNQKGTVRTKYGTKAELERAIRSLKANGIQVYGDVVMNHKGGADFTERVQAVEVNPQNRNQEVSGTYQIEAWTGFNFPGRGNQHSSFKWRWYHFDGTDWDQSRQLANRIYKFRGKAWDWEVDTENGNYDYLMYADVDMDHPEVINELNRWGVWYANTLNLDGFRLDAVKHIKFSFMRDWLGHVRGQTGKNLFAVAEYWKNDLGALENYLSKTNWTMSAFDVPLHYNLYQASNSSGNYDMRNLLNGTLVQRHPSHAVTFVDNHDTQPGEALESFVQGWFKPLAYATILTREQGYPQVFYGDYYGIPSDGVPSYRQQIDPLLKARQQYAYGTQHDYLDNQDVIGWTREGDSAHAGSGLATVMSDGPGGSKTMYVGTAHAGQVFKDITGNRTDTVTINSAGNGTFPCNGGSVSIWVKQ

SEQ ID NO: 33758 - protein, 483 aa, Bacillus sp.
HHDGTNGTIMQYFEWNVPNDGQHWNRLHNNAQNLKNAGITAIWIPPAWKGTSQNDVGYGAYDLYDLGEFNQKGTVRTKYGTKAELERAIRSLKANGIQVYGDVVMNHKGGADFTERVQAVEVNPQNRNQEVSGTYQIEAWTGFNFPGRGNQHSSFKWRWYHFDGTDWDQSRQLANRIYKFRGKAWDWEVDTEFGNYDYLMYADVDMDHPEVINELNRWGVWYANTLNLDGFRLDAVKHIKFSFMRDWLGHVRGQTGKNLFAVAEYWKNDLGALENYLSKTNWTMSAFDAPLHYNLYQASNSSGNYDMRNLLNGTLVQRHPSHAVTFVDNHDTQPGEALESFVQGWFKPLAYATILTREQGYPQVFYGDYYGIPSDGVPSYRQQIDPLLKARQQYAYGTQHDYLDNQDVIGWTREGDSAHAGSGLATVMSDGPGGSKTMYVGTAHAGQVFKDITGNRTDTVTINSAGNGTFPCNGGSVSIWVKQ

SEQ ID NO: 33759 - protein, 483 aa, Bacillus sp.
HHDGTNGTIMQYFEWNVPNDGQHWNRLHNNAQNLKNAGITAIWIPPAWKGTSQNDVGYGAYDLYDLGEFNQKGTVRTKYGTKAELERAIRSLKANGIQVYGDVVMNHKGGADFTERVQAVEVNPQNRNQEVSGTYQIEAWTGFNFPGRGNQHSSFKWRWYHFDGTDWDQSRQLANRIYKFRGKAWDWEVDTEFGNYDYLMYADVDMDHPEVINELNRWGVWYANTLNLDGFRLDAVKHIQFSFMRDWLGHVRGQTGKNLFAVAEYWKNDLGALENYLSKTNWTMSAFDVPLHYNLYQASNSSGNYDMRNLLNGTLVQRHPSHAVTFVDNHDTQPGEALESFVQGWFKPLAYATILTREQGYPQVFYGDYYGIPSDGVPSYRQQIDPLLKARQQYAYGTQHDYLDNQDVIGWTREGDSAHAGSGLATVMSDGPGGSKTMYVGTAHAGQVFKDITGNRTDTVTINSAGNGTFPCNGGSVSIWVKQ

SEQ ID NO: 33760 - protein, 483 aa, Bacillus sp.
HHDGTNGTIMQYFEWNVPNDGQHWNRLHNNAQNLKNAGITAIWIPPAWKGTSQNDVGYGAYDLYDLGEFNQKGTVRTKYGTKAELERAIRSLKANGIQVYGDVVMNHKGGADFTERVQAVEVNPQNRNQEVSGTYQIEAWTGFNFPGRGNQHSSFKWRWYHFDGTDWDQSRQLANRIYKFRGKEWDWEVDTEFGNYDYLMYADVDMDHPEVINELNRWGVWYANTLNLDGFRLDAVKHIKFSFMRDWLGHVRGQTGKNLFAVAEYWKNDLGALENYLSKTNWTMSAFDVPLHYNLYQASNSSGNYDMRNLLNGTLVQRHPSHAVTFVDNHDTQPGEALESFVQGWFKPLAYATILTREQGYPQVFYGDYYGIPSDGVPSYRQQIDPLLKARQQYAYGTQHDYLDNQDVIGWTREGDSAHAGSGLATVMSDGPGGSKTMYVGTAHAGQVFKDITGNRTDTVTINSAGNGTFPCNGGSVSIWVKQ

SEQ ID NO: 33761 - protein, 483 aa, Bacillus sp.
HHDGTNATIMQYFEWNVPNDGQHWNRLHNNAQNLKNAGITAIWIPPAWKGTSQNDVGYGAYDLYDLGEFNQKGTVRTKYGTKAELERAIRSLKANGIQVYGDVVMNHKGGADFTERVQAVEVNPQNRNQEVSGTYQIEAWTGFNFPGRGNQHSSFKWRWYHFDGTDWDQSRQLANRIYKFRGKAWDWEVDTEFGNYDYLMYADVDMDHPEVINELNRWGVWYANTLNLDGFRLDAVKHIKFSFMRDWLGHVRGQTGKNLFAVAEYWKNDLGALENYLSKTNWTMSAFDVPLHYNLYQASNSSGNYDMRNLLNGTLVQRHPSHAVTFVDNHDTQPGEALESFVQGWFKPLAYATILTREQGYPQVFYGDYYGIPSDGVPSYRQQIDPLLKARQQYAYGTQHDYLDNQDVIGWTREGDSAHAGSGLATVMSDGPGGSKTMYVGTAHAGQVFKDITGNRTDTVTINSAGNGTFPCNGGSVSIWVKQ

SEQ ID NO: 33762 - protein, 483 aa, Bacillus sp.
HHDGTNGTIMQYFEWNVPNDGQHWNRLHNNAQNLKNAGITAIWIPPAWKGTSQNDVGYGAYDLYDLGEFNQKGTVRTKYGTKAELERAIRSLKANGIQVYGDVVMNHKGGADFTERVQAVEVNPQNRNQEVSGTYQIEAWTGFNFPGRGNQHSSFKWRWYHFDGTDWDQSRQLANRIYKFRGKAWDWEVDTEFGNYDYLMYADVDMDHPEVINELNRWGVWYANTLNLDGFRLDAVKHIKFSFMRDWLGHVRGQTGKNLFAVAEYWKNDLGALENYLSKTNWTMSAFDVPLHYNLYQASNSSGNYDMRNLLNGTLVQRHPSHALTFVDNHDTQPGEALESFVQGWFKPLAYATILTREQGYPQVFYGDYYGIPSDGVPSYRQQIDPLLKARQQYAYGTQHDYLDNQDVIGWTREGDSAHAGSGLATVMSDGPGGSKTMYVGTAHAGQVFKDITGNRTDTVTINSAGNGTFPCNGGSVSIWVKQ

SEQ ID NO: 33763 - protein, 483 aa, Bacillus sp.
HHDGTNGTIMQYFEWNVPNDGQHWNRLHNNAQNLKNAGITAIWIPPAWKGTSQNDVGYGAYDLYDLGEFNQKGTVRTKYGTKAELERAIRSLKANGIQVYGDVVMNHKGGADFTERVQAVEVNPQNRNQEVSGTYQIEAWTGFNFPGRGNQHSSFKWRWYHFDGTDWDQSRQLANRIYKFRGKAWDWEVDTEFGNYDYLMYADVDMDHPEVINELNRWGVWYANTLNLDGFRLDAAKHIKFSFMRDWLGHVRGQTGKNLFAVAEYWKNDLGALENYLSKTNWTMSAFDVPLHYNLYQASNSSGNYDMRNLLNGTLVQRHPSHAVTFVDNHDTQPGEALESFVQGWFKPLAYATILTREQGYPQVFYGDYYGIPSDGVPSYRQQIDPLLKARQQYAYGTQHDYLDNQDVIGWTREGDSAHAGSGLATVMSDGPGGSKTMYVGTAHAGQVFKDITGNRTDTVTINSAGNGTFPCNGGSVSIWVKQ

SEQ ID NO: 33764 - protein, 483 aa, Bacillus sp.
HHDGTNGTIMQYFEWNVPNDGQHWNRLHNNAQNLKNAGITAIWIPPAWKGTSQNDVGYGAYDLYDLGEFNQKGTVRTKYGTKAELERAIRSLKANGIQVYGDVVMNHKGGADFTERVQAVEVNPQNRNQEVSGTYQIEAWTGFNFPGRGNQHSSFKWRWYHFDGTDWDESRQLANRIYKFRGKAWDWEVDTEFGNYDYLMYADVDMDHPEVINELNRWGVWYANTLNLDGFRLDAVKHIKFSFMRDWLGHVRGQTGKNLFAVAEYWKNDLGALENYLSKTNWTMSAFDVPLHYNLYQASNSSGNYDMRNLLNGTLVQRHPSHAVTFVDNHDTQPGEALESFVQGWFKPLAYATILTREQGYPQVFYGDYYGIPSDGVPSYRQQIDPLLKARQQYAYGTQHDYLDNQDVIGWTREGDSAHAGSGLATVMSDGPGGSKTMYVGTAHAGQVFKDITGNRTDTVTINSAGNGTFPCNGGSVSIWVKQ

SEQ ID NO: 33765 - protein, 483 aa, Bacillus sp.
HHDGTNGTIMQYFEWNVPNDGQHWNRLHNNAQNLKNAGITAIWIPPAWKGTSQNDVGYGAYDLYDLGEFNQKGTVRTKYGTKAELERAIRSLKANGIQVYGDVVMNHKGGADFTERVQAVEVNPQNRNQEVSGTYQIEAWTGFNFPGRGNQHSSFKWRWYHFDGTDFDQSRQLANRIYKFRGKAWDWEVDTEFGNYDYLMYADVDMDHPEVINELNRWGVWYANTLNLDGFRLDAVKHIKFSFMRDWLGHVRGQTGKNLFAVAEYWKNDLGALENYLSKTNWTMSAFDVPLHYNLYQASNSSGNYDMRNLLNGTLVQRHPSHAVTFVDNHDTQPGEALESFVQGWFKPLAYATILTREQGYPQVFYGDYYGIPSDGVPSYRQQIDPLLKARQQYAYGTQHDYLDNQDVIGWTREGDSAHAGSGLATVMSDGPGGSKTMYVGTAHAGQVFKDITGNRTDTVTINSAGNGTFPCNGGSVSIWVKQ

SEQ ID NO: 33766 - protein, 483 aa, Bacillus sp.
HHDGTNGTIMQYFEWNVPNDGQHWNRLHNNAQNLKNAGITAIWIPPAWKGTSQNDVGYGAYDLYDLGEFNQKGTVRTKYGTKAELERAIRSLKANGIQVYGDVVMNHKGGADFTERVQAVEVNPQNRNQEVSGTYQIEAWTGFNFPGRGNQHSSFKWRWYHFDGTDWDQSRQLANRIYKFRGKHWDWEVDTEFGNYDYLMYADVDMDHPEVINELNRWGVWYANTLNLDGFRLDAVKHIKFSFMRDWLGHVRGQTGKNLFAVAEYWKNDLGALENYLSKTNWTMSAFDVPLHYNLYQASNSSGNYDMRNLLNGTLVQRHPSHAVTFVDNHDTQPGEALESFVQGWFKPLAYATILTREQGYPQVFYGDYYGIPSDGVPSYRQQIDPLLKARQQYAYGTQHDYLDNQDVIGWTREGDSAHAGSGLATVMSDGPGGSKTMYVGTAHAGQVFKDITGNRTDTVTINSAGNGTFPCNGGSVSIWVKQ

SEQ ID NO: 33767 - protein, 483 aa, Bacillus sp.
HHDGTNGTIMQYFEWNVPNDGQHWNRLHNNAQNLKNAGITAIWIPPAWKGTSQNDVGYGAYDLYDLGEFNQKGTVRTKYGTKAELERAIRSLKANGIQVYGDVVMNHKGGADFTERVQAVEVNPQNRNQEVSGTYQIEAWTGFNFPGRGNQHSSFKWRWYHFDGTDWDQSRQLANRIYKFRGKAWDWEVDTEFGNYDYLMYADVDMDHPEVINELNRWGVWYANTLNLDGFRLDAVKHIKFSFMRDWLGHVRGQTGKNLFAVAEYWKNDLGALENYLSKTNWTMSAFDVPLHFNLYQASNSSGNYDMRNLLNGTLVQRHPSHAVTFVDNHDTQPGEALESFVQGWFKPLAYATILTREQGYPQVFYGDYYGIPSDGVPSYRQQIDPLLKARQQYAYGTQHDYLDNQDVIGWTREGDSAHAGSGLATVMSDGPGGSKTMYVGTAHAGQVFKDITGNRTDTVTINSAGNGTFPCNGGSVSIWVKQ

SEQ ID NO: 33768 - protein, 483 aa, Bacillus sp.
HHDGTNGTIMQYFEWNVPNDGQHWNRLHNNAQNLKNAGITAIWIPPAWKGTSQNDVGYGAYDLYDLGEFNQKGTVRTKYGTKAELERAIRSLKANGIQVYGDVVMNHKGGADFTERVQAVEVNPQNRNQEVSGTYQIEAWTGFNFPGRGNQHSSFKWRWYHFDGTDWDQSRQLANRIYKFRGKQWDWEVDTEFGNYDYLMYADVDMDHPEVINELNRWGVWYANTLNLDGFRLDAVKHIKFSFMRDWLGHVRGQTGKNLFAVAEYWKNDLGALENYLSKTNWTMSAFDVPLHYNLYQASNSSGNYDMRNLLNGTLVQRHPSHAVTFVDNHDTQPGEALESFVQGWFKPLAYATILTREQGYPQVFYGDYYGIPSDGVPSYRQQIDPLLKARQQYAYGTQHDYLDNQDVIGWTREGDSAHAGSGLATVMSDGPGGSKTMYVGTAHAGQVFKDITGNRTDTVTINSAGNGTFPCNGGSVSIWVKQ

SEQ ID NO: 33769 - protein, 483 aa, Bacillus sp.
HHDGTNGTIMQYFEWNVPNDGQHWNRLHNNAQNLKNAGITAIWIPPAWKGTSQNDVGYGAYDLYDLGEFNQKGTVRTKYGTKAELERAIRSLKANGIQVYGDVVMNHKGGADFTERVQAVEVNPQNRNQEVSGTYQIEAWTGFNFPGRGNQHSSFKWRWYHFDGTDWDQSRQLANRIYKFRGKAWDWPVDTEFGNYDYLMYADVDMDHPEVINELNRWGVWYANTLNLDGFRLDAVKHIKFSFMRDWLGHVRGQTGKNLFAVAEYWKNDLGALENYLSKTNWTMSAFDVPLHYNLYQASNSSGNYDMRNLLNGTLVQRHPSHAVTFVDNHDTQPGEALESFVQGWFKPLAYATILTREQGYPQVFYGDYYGIPSDGVPSYRQQIDPLLKARQQYAYGTQHDYLDNQDVIGWTREGDSAHAGSGLATVMSDGPGGSKTMYVGTAHAGQVFKDITGNRTDTVTINSAGNGTFPCNGGSVSIWVKQ

SEQ ID NO: 33770 - protein, 482 aa, Synthetic construct
HDGTNGTIMQYFEWNVPNDGQHWNRLHNNAQNLKNAGITAIWIPPAWKGTSQNDVGYGAYDLYDLGEFNQKGTVRTKYGTKAELERAIRSLKANGIQVYGDVVMNHKGGADFTERVQAVEVNPQNRNQEVSGTYQIEAWTGFNFPGRGNQHSSFKWRWYHFDGTDWDQSRQLANRIYKFRGKAWDWEVDTEFGNYDYLMYADYDMDHPEVINELNRWGVWYANTLNLDGFRLDAVKHIKFSFMRDWLGHVRGQTGKNLFAVAEYWKNDLGALENYLSKTNWTMSAFDVPLHYNLYQASNSSGNYDMRNLLNGTLVQRHPSHAVTFVDNHDTQPGEALESFVQGWFKPLAYATILTREQGYPQVFYGDYYGIPSDGVPSYRQQIDPLLKARQQYAYGTQHDYLDNQDVIGWTREGDSAHAGSGLATVMSDGPGGSKTMYVGTAHAGQVFKDITGNRTDTVTINSAGNGTFPCNGGSVSIWVKQ

SEQ ID NO: 33771 - protein, 482 aa, Bacillus sp.
HHDGTNGTIMQYFEWNVPNDGQHWNRLHNNAQNLKNAGITAIWIPPAWKGTSQNDVGYGAYDLYDLGEFNQKGTVRTKYGTKAELERAIRSLKANGIQVYGDVVMNHKGGADFTERVQAVEVNPQNRNQEVSGTYQIEAWTGFNFPGRGNQHSSFKWRWYHFDGTDWDESRKLNRIYKFRGKAWDWEVDTEFGNYDYLMYADVDMDHPEVINELNRWGVWYANTLNLDGFRLDAVKHIKFSFMRDWLGHVRGQTGKNLFAVAEYWKNDLGALENYLSKTNWTMSAFDVPLHYNLYQASNSSGNYDMRNLLNGTLVQRHPSHAVTFVDNHDTQPGEALESFVQGWFKPLAYATILTREQGYPQVFYGDYYGIPSDGVPSYRQQIDPLLKARQQYAYGTQHDYLDNQDVIGWTREGDSAHAGSGLATVMSDGPGGSKTMYVGTAHAGQVFKDITGNRTDTVTINSAGNGTFPCNGGSVSIWVKQ

SEQ ID NO: 33772 - protein, 482 aa, Bacillus sp.
HDGTNGTIMQYFEWNVPNDGQHWNRLHNNAQNLKNAGITAIWIPPAWKGTSQNDVGYGAYDLYDLGEFNQKGTVRTKYGTKAELERAIRSLKANGIQVYGDVVMNHKAGADFTERVQAVEVNPQNRNQEVSGTYQIEAWTGFNFPGRGNQHSSFKWRWYHFDGTDWDQSRQLANRIYKFRGKAWDWEVDTEFGNYDYLMYADVDMDHPEVINELNRWGVWYANTLNLDGFRLDAVKHIKFSFMRDWLGHVRGQTGKNLFAVAEYWKNDLGALENYLSKTNWTMSAFDVPLHYNLYQASNSSGNYDMRNLLNGTLVQRHPSHAVTFVDNHDTQPGEALESFVQGWFKPLAYATILTREQGYPQVFYGDYYGIPSDGVPSYRQQIDPLLAARQQYAYGTQHDYLDNQDVIGWTREGDSAHAGSGLATVMSDGPGGSKTMYVGTAHAGQVFKDITGNRTDTVTINSAGNGTFPCNGGSVSIWVKQ

SEQ ID NO: 33773 - protein, 482 aa, Bacillus sp. (in: firmicutes)
HDGTNGTIMQYFEWNVPNDGQHWNRLHNNAQNLKNAGITAIWIPPAWKGTSQSDTGYGAYDLYDLGEFNQRGTVRTKYGTKAELERAIRSLKANGIQVYGDVVMNHKAGADQTEQVQAVEVNPQNRNQEVSGTYQIEAWTGFNFPGRGNQHSSFKWRWYHFDGTDFDQSRGVSNRIYKFRTKAWDWEVDTEFGNYDYLMYADLDMDHPEVINELNRWGVWYANTLNLDGFRLDAVKHIKFSFMRDWLGHVRGQTAKNLFAVAEYWKNDLGALENYLSKTNWTMSAFDVPLHYNLYQASNSSGNYDMRNLLNGTLVQRHPSHAVTFVDNHDTQPGEALESFVQGWFKPLAYATILTREQGYPQVFYGDYYGIPSDGVPSYRQQIDPLLAARQQYAYGRPHDYFDHWDVIGWTREGNASHPNSGLATIMSDGPGGSKWMYVGRQKAGEVWHDMQGNRSGTVTINQDGWGHFFVNKGSVSVWVKR

SEQ ID NO: 33774 - protein, 481 aa, Bacillus licheniformis
LNGTLMQYFEWYMPNDGQHWRRLQNDSAYLAEHGITAVWIPPAYKGTSQADVGYGAYDLYDLGEFHQKGTVRTKYGTKGELQSAIKSLHSRDINVYGDVVIDHKGGADATEDVTAVEVDPADRNRVISGEHLIKAWTHFHFPGRGSTYSDFKWHWYHFNGTDWDESRKLNRIYKFQNTNWNWEVSNENGNYDYLMYANIDYSHPDVAAEIKRWGTWYANELQLDGFRLDAVKHIPFWFLRDWVNHVREKTGKEMFTVAEYWQNDLGALENYLNKTNFNHSVFDVPLHYQFHAASTQGGGYDMRKLLNGTVVSKHPLKSVTFVDNHDTQPGQSLESTVQTWFKPLAYAFILTRESGYPQVFYGDMYGTKGDSQREIPALKHKIEPILKARKQYAYGAQHDYFDHWDIVGWTREGDSSVANSGLAALITNGPGGAKRMYVGRQKAGQTWHDITGNRSEPVVINSEGWGEFHVNGGSVSIYVKR

SEQ ID NO: 33775 - protein, 481 aa, Bacillus licheniformis
LNGTLMQYFEWYMPNDGQHWRRLQNDSAYLAEHGITAVWIPPAYKGTSQADVGYGAYDLYDLGEFHQKGTVRTKYGTKGELQSAIKSLHSRDINVYGDVVIDHKGGADATEDVTAVEVDPADRNRVISGEHLIKAWTHFHFPGRGSTYSDFKWHWYHFNGTDWDESRKLNRIYKFQNTNWNWEVSNENGNYDYLMYANIDYSHPDVAAEIKRWGTWYANELQLDGFRLDAVKHIPFWFLRDWVNHVREKTGKEMFTVAEYWQNDLGALENYLNKTNFNHSVFDVPLHYQFHAASTQGGGYDMRKLLNGTVVSKHPLKSVTFVDNHDTQPGQSLESTVQTWFKPLAYAFILTRESGYPQVFYGDMYGTKGDSQREIPALKHKIEPILKARKQYAYGAQHDYFDHWDIVGWTREGDSSVANSGLAALITNGPGGAKRMYVGRQRAGKTWHDITGNRSEPVVINSEGWGEFHVNGGSVSIYVKR

SEQ ID NO: 33776 - protein, 483 aa, Bacillus sp.
HHDGTNGTIMQYFEWNVPNDGQHWNRLHNNAQNLKNAGITAIWIPPAWKGTSQNDVGYGAYDLYDLGEFNQKGTVRTKYGTKAELERAIRSLKANGIQVYGDVVMNHKGGADFTERVQAVEVNPQNRNQEVSGTYQIEAWTGFNFPGRGNQHSSFKWRWYHFDGTDWDQSRQLANRIYKFRGKAWDWEVDTEFGNYDYLMYADFDMDHPEVINELNRWGVWYANTLNLDGFRLDAVKHIKFSFMRDWLGHVRGQTGKPLFAVAEYWKNDLGALENYLSKTNWTMSAFDVPLHYNLYQASNSSGNYDMRNIINGTLVQAHPSHAVTFVDNHDTQPGEALESFVQGWFKPLAYALILTREQGYPQVFYGDYYGIPSDGVPSYRQQIDPILKARQQYAYGPQHDYLDNQDVIGWTREGDSAHAGSGLATVMSDGPGGSKTMYVGTAHAGQVFKDITGNRTDTVTINSAGNGTFPCNGGSVSIWVKQ

SEQ ID NO: 33777 - protein, 483 aa, Bacillus sp.
HHDGTNGTIMQYFEWNVPNDGQHWNRLHNNAQNLKNAGITAIWIPPAWKGTSQSDTGYGAYDLYDLGEFNQKGTVRTKYGTKAELERAIRSLKANGIQVYGDVVMNHKGGADFTERVQAVEVNPQNRNQEVSGTYQIEAWTGFNFPGRGNQHSSFKWRWYHFDGTDWDQSRQLANRIYKFRGKAWDWEVDTEFGNYDYLMYADVDMDHPEVINELNRWGVWYANTLNLDGFRLDAVKHIKFSFMRDWLGHVRGQTGKNLFAVAEYWKNDLGALENYLSKTNWTMSAFDVPLHYNLYQASNSSGNYDMRNLLNGTLVQRHPSHAVTFVDNHDTQPGEALESFVQGWFKPLAYATILTREQGYPQVFYGDYYGIPSDGVPSYRQQIDPLLKARQQYAYGTQHDYLDNQDVIGWTREGDSAHAGSGLATVMSDGPGGSKTMYVGTAHAGQVFKDITGNRTDTVTINSAGNGTFPCNGGSVSIWVKQ

SEQ ID NO: 33778 - protein, 483 aa, Bacillus sp.
HHDGTNGTIMQYFEWNVPNDGQHWNRLHNNAQNLKNAGITAIWIPPAWKGTSQNDVGYGAYDLYDLGEFNQKGTVRTKYGTKAELERAIRSLKANGIQVYGDVVMNHKGGADFTERVQAVEVNPQNRNQEVSGTYQIEAWTGFNFPGRGNQHSSFKWRWYHFDGTDWDESRKLANRIYKFRGKAWDWEVDTEFGNYDYLMYADVDMDHPEVINELNRWGVWYANTLNLDGFRLDAVKHIKFSFMRDWLGHVRGQTGKNLFAVAEYWKNDLGALENYLSKTNWTMSAFDVPLHYNLYQASNSSGNYDMRNLLNGTLVQRHPSHAVTFVDNHDTQPGEALESFVQGWFKPLAYATILTREQGYPQVFYGDYYGIPSDGVPSYRQQIDPLLKARQQYAYGTQHDYLDNQDVIGWTREGDSAHAGSGLATVMSDGPGGSKTMYVGTAHAGQVFKDITGNRTDTVTINSAGNGTFPCNGGSVSIWVKQ

SEQ ID NO: 33779 - protein, 478 aa, Bacillus licheniformis
NGTLMQYFEWYTPNDGQHWNRLRNDSAYLKEHGITAVWIPPAYKGASQNDVGYGAYDLYDLGEFNQKGTVRTKYGTKGQLQSAINSLKSNGINVYGDVVINHKGGADATELVRAVEVNPNNRNQEVSGEYTIEAYTYFDFPGRGNTHSNFKWRWYHFDGVDWDQSRRLNNRIYKFRGKGWDWEVDTEFGNYDYLTYADIDYDHPDVAAEIRNWGTWYANTLQLDGFRLDAVKHIKYSFLRDWVNHVRSATGKNMFTVAEFWKNDLGALENYLNKTNFNHSVFDVPLHYQFYAASKQGGGYDMQNLLNGTVVSKHPLHSVTFVDNHDTQPEEALESTVEEWFKPLAYAFILTRESGYPQVFYGDMYGIPTHGVPALKHKIEPILEARQKYAYGRQNDYFDHHDIVGWTREGNSSHANSGLAALITDGPGGAKWMYVGRQKAGQTWSDITGNRSGPVVINSEGWGNFSVNGGSVSIYVQR

SEQ ID NO: 33780 - protein, 482 aa, Synthetic construct
HDGTNGTIMQYFEWNVPNDGQHWNRLHNNAQNLKNAGITAIWIPPAWKGTSQNDVGYGAYDLYDLGEFNQKGTVRTKYGTKAELERAIRSLKANGIQVYGDVVMNHKAGADFTERVQAVEVNPQNRNQEVSGTYQIEAWTGFNFPGRGNQHSSFKWRWYHFDGTDWDQSRQLANRIYKFRGKAWDWEVDTEFGNYDYLMYADYDMDHPEVINELNRWGVWYANTLNLDGFRLDAVKHIKFSFMRDWLGHVRGQTGKNLFAVAEYWKNDLGALENYLSKTNWTMSAFDVPLHYNLYQASNSSGNYDMRNLLNGTLVQRHPSHAVTFVDNHDTQPGEALESFVQGWFKPLAYATILTREQGYPQVFYGDYYGIPSDGVPSYRQQIDPLLAARQQYAYGTQHDYLDNQDVIGWTREGDSAHAGSGLATVMSDGPGGSKTMYVGTAHAGQVFKDITGNRTDTVTINSAGNGTFPCNGGSVSIWVKQ

SEQ ID NO: 33781 - protein, 482 aa, Bacillus sp.
HDGTNGTIMQYFEWHLPNDGQHWNRLHNNAQNLKNAGITAIWIPPAWKGTSQSDTGYGAYDLYDLGEFNQKGTVRTKYGTKAELERAIRSLKANGIQVYGDVVMNHKAGADFTERVQAVEVNPQNRNQEVSGTYQIEAWTGFNFPGRGNQHSSFKWRWYHFDGTDWDQSRQLSNRIYKFRGKAWDWEVDTEFGNYDYLMYADLDMDHPEVINELNRWGVWYANTLNLDGFRLDAVKHIKFSFMRDWLGHVRGQTGKNLFAVAEYWKNDLGALENYLSKTNWTMSAFDVPLHYNLYQASNSSGNYDMRNLLNGTLVQRHPSHAVTFVDNHDTQPGEALESFVQGWFKPLAYATILTREQGYPQVFYGDYYGIPSHGVPSYRQQIDPLLAARQQYAYGTQHDYLDNQDVIGWTREGDSAHAGSGLATVMSDGPGGSKTMYVGTAHAGQVFKDITGNRTDTVTINSAGNGTFPCNKGSVSIWVKQ

SEQ ID NO: 33782 - protein, 483 aa, Bacillus sp.
HDGTNGTIMQYFEWNVPNDGQHWNRLHNNAQNLKNAGITAIWIPPAWKGTSQNDVGYGAYDLYDLGEFNQKGTVRTKYGTKAELERAIRSLKANGIQVYGDVVMNHKGGADFTERVQAVEVNPQNRNQEVSGTYQIEAWTGFNFPGRGNQHSSFKWRWYHFDGTDWDQSRQLANRIYKFRGGKAWDWEVDTEFGNYDYLMYADLDMDHPEVINELNRWGVWYANTLNLDGFRLDAVKHIKFSFMRDWLGHVRGQTGKNLFAVAEYWKNDLGALENYLSKTNWTMSAFDVPLHYNLYQASNSSGNYDMRNLLNGTLVQRHPSHAVTFVDNHDTQPGEALESFVQGWFKPLAYATILTREQGYPQVFYGDYYGIPSDGVPSYRQQIDPLLAARQQYAYGTQHDYLDNQDVIGWTREGDSAHAGSGLATVMSDGPGGSKTMYVGTAHAGQVFKDITGNRTDTVTINSAGNGTFPCNKGSVSIWVKQ

SEQ ID NO: 33783 - protein, 484 aa, Aspergillus rambellii
LSVASAALAATPAQWRSQSIYFLLTDRFARTDNSTTAACDTSDRVYCGGSWQGIINQLDYIQGMGFTAIWITPVTGQLPQDTAYGEAYHGYWQQDVDVLNSHYGTADDLKALADALHERRMYLMVDVVANHMGYDGAGDSVNYSVFKPFNSQDYFHPFCLIKDYSNQTQVEDCWLGDNTVSLPDLDTTQTDVQTVWYDWINSLVSNYSVDGLRIDTVKHVQKSFWPGYNDAAGVYCVGEVFDGDPDYTCPYQDCLDGVLNYPIYYPLLNAFKSTSGSISDLYNMINTVRSTCKDSTLLGNFIENHDNPRFAYYTDDMSLAKNVAGFVLLSDGIPILYAGQEQHYSGGNDPTNREATWLSGYSTTSELYTFIASTNAIRSHAIRKDDNYLTYKNYPIYQDTSTLAMRKGTNGSQVVTVLSNQGASGSSYTLSLTGAQYDAGLELVEIYTCASVTVRSDGTVPVPMKSGLPRVLYPRSLLSGSSIC

SEQ ID NO: 33784 - protein, 483 aa, Bacillus sp.
HHDGTNGTIMQYFEWNVPNDGQHWNRLHNNAQNLKNAGITAIWIPPAWKGTSQSDTGYGAYDLYDLGEFNQKGTVRTKYGTKAELERAIRSLKANGIQVYGDVVMNHKAGADFTERVQAVEVNPQNRNQEVSGTYQIEAWTGFNFPGRGNQHSSFKWRWYHFDGTDWDQSRQLANRIYKFRGKAWDWEVDTEFGNYDYLMYADVDMDHPEVINELNRWGVWYANTLNLDGFRLDAVKHIKFSFMRDWLGHVRGQTGKNLFAVAEYWKNDLGALENYLSKTNWTMSAFDVPLHYNLYQASNSSGNYDMRNLLNGTLVQRHPSHAVTFVDNHDTQPGEALESFVQGWFKPLAYATILTREQGYPQVFYGDYYGIPSDGVPSYRQQIDPLLKARQQYAYGTQHDYLDNQDVIGWTREGDSAHAGSGLATVMSDGPGGSKTMYVGTAHAGQVFKDITGNRTDTVTINSAGNGTFPCNGGSVSIWVKQ

SEQ ID NO: 33785 - protein, 483 aa, Bacillus sp.
HHDGTNGTIMQYFEWNVPNDGQHWNRLHNNAQNLKNAGITAIWIPPAWKGTSQNDVGYGAYDLYDLGEFNQKGTVRTKYGTKAELERAIRSLKANGIQVYGDVVMNHKAGADFTERVQAVEVNPQNRNQEVSGTYQIEAWTGFNFPGRGNQHSSFKWRWYHFDGTDWDQSRQLSNRIYKFRGKAWDWEVDTEFGNYDYLMYADLDMDHPEVINELNRWGVWYANTLNLDGFRLDAVKHIKFSFMRDWLGHVRGQTGKNLFAVAEYWKNDLGALENYLSKTNWTMSAFDVPLHYNLYQASNSSGNYDMRNLLNGTLVQRHPSHAVTFVDNHDTQPGEALESFVQGWFKPLAYATILTREQGYPQVFYGDYYGIPSDGVPSYRQQIDPLLAARQQYAYGTQHDYLDNQDVIGWTREGDSAHAGSGLATVMSDGPGGSKTMYVGTAHAGQVFKDITGNRTDTVTINSAGNGTFPCNKGSVSIWVKQ

SEQ ID NO: 33786 - protein, 483 aa, Bacillus sp.
HHDGTNGTIMQYFEWNVPNDGQHWNRLHNNAQNLKNAGITAIWIPPAWKGTSQNDVGYGAYDLYDLGEFNQKGTVRTKYGTKAELERAIRSLKANGIQVYGDVVMNHKAGADFTERVQAVEVNPQNRNQEVSGTYQIEAWTGFNFPGRGNQHSSFKWRWYHFDGTDWDQSRQLANRIYKFRGKAWDWEVDTEFGNYDYLMYADLDMDHPEVINELNRWGVWYANTLNLDGFRLDAVKHIKFSFMRDWLGHVRGQTGKNLFAVAEYWKNDLGALENYLSKTNWTMSAFDVPLHYNLYQASNSSGNYDMRNLLNGTLVQRHPSHAVTFVDNHDTQPGEALESFVQGWFKPLAYATILTREQGYPQVFYGDYYGIPSDGVPSYRQQIDPLLKARQQYAYGTQHDYLDNQDVIGWTREGDSAHAGSGLATVMSDGPGGSKTMYVGTAHAGQVFKDITGNRTDTVTINSAGNGTFPCNKGSVSIWVKQ

SEQ ID NO: 33787 - protein, 478 aa, Bacillus licheniformis
NGTLMQYFEWYTPNDGQHWNRLRNDSAYLKEHGITAVWIPPAYKGASQNDVGYGAYDLYDLGEFNQKGTVRTKYGTKGQLQSAINSLKSNGINVYGDVVINHKGGADATELVRAVEVNPANRNQEISGEYLIEAYTYFDFPGRGSTHSNFKWRWYHFDGVDWDQSRRLNNRIYKFRGKAWDWEVDTEFGNYDYLTYADIDYDHPDVAAEIRNWGTWYANTLQLDGFRLDAVKHIKYSFLRDWVNHVRSATGKNMFTVAEFWKNDLGALENYLNKTNFNHSVFDVPLHYQFYAASKQGGGYDMQNLLNGTVVSKHPLHSVTFVDNHDTQPEEALESTVEEWFKPLAYAFILTRESGYPQVFYGDMYGIPTHGVPALKHKIEPILEARQKYAYGRQNDYFDHHDIVGWTREGNSSHANSGLAALITDGPGGAKWMYVGRQKAGQTWSDITGNRSGPVVINSEGWGNFSVNGGSVSIYVQR

SEQ ID NO: 33788 - protein, 491 aa, Aspergillus clavatus
WSSLGLAYLAGTALAATPAEWRSQSVYFLLTDRFARSDGSTTAPCDTKDQGYCGGTWQGIIDQLDYIQGMGFTAIWITPVTEQLQEHTAYGSAYHGYWQQDIFAVNSNHGTEKDLKALSDALHKRGMYLMVDVVANHMGYAGAGNSVNYSVFNPFNSQEYFHSYCPVTDYKNQKQVEDCWLGDNTVSLPDLDTTKDEVKKIWYDWVGSLVSNYSIDGLRIDTVKHVQKDFWPGYNHAAGVYCIGEVFDGDPSYTCAYQEVMDGVLNYPIYYPLLKAFQSTSGSMDDLYNMIGTVKTACADTTLLGTFIENHDNPRFASYTDDVSLAKNVAAFTIFADGIPIIYAGQEQHYKGGEDPANREAVWLSGYSTTSDLYKLIAASNAIRNHAVSKDKAYVTYKQNAIYKDTSTIALRKGTDGSQVITVLSNLGASGKKYTLSLGGSGYKSGDKLTEIYTCTKVTVDSNGNIPVPMESGEPRVFYPTAGLEGSKICA

SEQ ID NO: 33789 - protein, 482 aa, Bacillus sp.
HDGTNGTIMQYFEWNVPNDGQHWNRLHNNAQNLKNAGITAIWIPPAWKGTSQSDVGYGAYDLYDLGEFNQKGTVRTKYGTKAELERAIRSLKANGIQVYGDVVMNHKAGADFTERVQAVEVNPQNRNQEVSGTYQIEAWTGFNFPGRGNQHSSFKWRWYHFDGTDWDQSRQLSNRIYKFRGKAWDWEVDTEFGNYDYLMYADLDMDHPEVINELNRWGVWYANTLNLDGFRLDAVKHIKFSFMRDWLGHVRGQTGKNLFAVAEYWKNDLGALENYLSKTNWTMSAFDVPLHYNLYQASNSSGNYDMRNLLNGTLVQRHPSHAVTFVDNHDTQPGEALESFVQGWFKPLAYATILTREQGYPQVFYGDYYGIPSHGVPSYRQQIDPLLAARQQYAYGTQHDYLDNQDVIGWTREGDSAHAGSGLATVMSDGPGGSKTMYVGTAHAGQVFKDITGNRTDTVTINSAGNGTFPCNKGSVSIWVKQ

SEQ ID NO: 33790 - protein, 482 aa, Bacillus sp.
HDGTNGTIMQYFEWNVPNDGQHWNRLHNNAQNLKNAGITAIWIPPAWKGTSQNDTGYGAYDLYDLGEFNQKGTVRTKYGTKAELERAIRSLKANGIQVYGDVVMNHKAGADFTERVQAVEVNPQNRNQEVSGTYQIEAWTGFNFPGRGNQHSSFKWRWYHFDGTDWDQSRQLSNRIYKFRGKAWDWEVDTEFGNYDYLMYADLDMDHPEVINELNRWGVWYANTLNLDGFRLDAVKHIKFSFMRDWLGHVRGQTGKNLFAVAEYWKNDLGALENYLSKTNWTMSAFDVPLHYNLYQASNSSGNYDMRNLLNGTLVQRHPSHAVTFVDNHDTQPGEALESFVQGWFKPLAYATILTREQGYPQVFYGDYYGIPSHGVPSYRQQIDPLLAARQQYAYGTQHDYLDNQDVIGWTREGDSAHAGSGLATVMSDGPGGSKTMYVGTAHAGQVFKDITGNRTDTVTINSAGNGTFPCNKGSVSIWVKQ

SEQ ID NO: 33791 - protein, 482 aa, Bacillus sp.
HDGTNGTIMQYFEWNVPNDGQHWNRLHNNAQNLKNAGITAIWIPPAWKGTSQSDTGYGAYDLYDLGEFNQKGTVRTKYGTKAELERAIRSLKANGIQVYGDVVMNHKAGADFTERVQAVEVNPQNRNQEVSGTYQIEAWTGFNFPGRGNQHSSFKWRWYHFDGTDWDQSRQLSNRIYKFRGKAWDWEVDTEFGNYDYLMYADVDMDHPEVINELNRWGVWYANTLNLDGFRLDAVKHIKFSFMRDWLGHVRGQTGKNLFAVAEYWKNDLGALENYLSKTNWTMSAFDVPLHYNLYQASNSSGNYDMRNLLNGTLVQRHPSHAVTFVDNHDTQPGEALESFVQGWFKPLAYATILTREQGYPQVFYGDYYGIPSHGVPSYRQQIDPLLAARQQYAYGTQHDYLDNQDVIGWTREGDSAHAGSGLATVMSDGPGGSKTMYVGTAHAGQVFKDITGNRTDTVTINSAGNGTFPCNKGSVSIWVKQ

SEQ ID NO: 33792 - protein, 482 aa, Bacillus sp.
HDGTNGTIMQYFEWNVPNDGQHWNRLHNNAQNLKNAGITAIWIPPAWKGTSQSDTGYGAYDLYDLGEFNQKGTVRTKYGTKAELERAIRSLKANGIQVYGDVVMNHKAGADFTERVQAVEVNPQNRNQEVSGTYQIEAWTGFNFPGRGNQHSSFKWRWYHFDGTDWDQSRQLSNRIYKFRGKAWDWEVDTEFGNYDYLMYADLDMDHPEVINELNRWGVWYANTLNLDGFRLDAVKHIKFSFMRDWLGHVRGQTGKNLFAVAEYWKNDLGALENYLSKTNWTMSAFDVPLHYNLYQASNSSGNYDMRNLLNGTLVQRHPSHAVTFVDNHDTQPGEALESFVQGWFKPLAYATILTREQGYPQVFYGDYYGIPSHGVPSYRQQIDPLLAARQQYAYGTQHDYLDNQDVIGWTREGDSAHAGSGLATVMSDGPGGSKTMYVGTAHAGQVFKDITGNRTDTVTINSAGNGTFPVNKGSVSIWVKQ

SEQ ID NO: 33793 - protein, 482 aa, Synthetic construct
HHDGTNGTIMQYFEWNVPNDGQHWNRLHNNAQNLKNAGITAIWIPPAWKGTSQNDVGYGAYDLYDLGEFNQKGTVRTKYGTKAELERAIRSLKANGIQVYGDVVMNHKGGADFTERVQAVEVNPQNRNQEVSGTYQIEAWTGFNFPGRANQHSSFKWRWYHFDGTDWDQSRQLANRIYKFRTKAWDWEVDTEFGNYDYLMYADLDMDHPEVINELNRWGVWYANTLNLDGFRLDAVKHIKFSFVRDWLGHVRGQGKNLFAVAEYWKNDLGALENYLSKTNWTMSAFDVPLHFNLYYASNSSGNYDMRNLLNGTLVQRHPSHAVTFVDNHDTQPGESLESFVRGWFKPLAYATILTREQGYPQVFYGDYYGIPSDGVPSYRQQIDPLLKARQQYAYGTQHDYLDNQDVIGWTREGDSAHAGSGLATVMSDGPGGSKTMYVGTAHAGQVFKDITGNKTDTVTINSAGNGTFPCNGGSVSIWVKQ

SEQ ID NO: 33794 - protein, 482 aa, Bacillus sp.
HDGTNGTIMQYFEWNVPNDGQHWNRLHNNAQNLKNAGITAIWIPPAWKGTSQSDTGYGAYDLYDLGEFNQKGTVRTKYGTKAELERAIRSLKANGIQVYGDVVMNHKAGADFTERVQAVEVNPQNRNQEVSGTYQIEAWTGFNFPGRGNQHSSFKWRWYHFDGTDWDQSRQLSNRIYKFRGKAWDWEVDTEFGNYDYLMYADVDMDHPEVINELNRWGVWYANTLNLDGFRLDAVKHIKFSFMRDWLGHVRGQTGKNLFAVAEYWKNDLGALENYLSKTNWTMSAFDVPLHYNLYQASNSSGNYDMRNLLNGTLVQRHPSHAVTFVDNHDTQPGEALESFVQGWFKPLAYATILTREQGYPQVFYGDYYGIPSDGVPSYRQQIDPLLAARQQYAYGTQHDYLDNQDVIGWTREGDSAHAGSGLATVMSDGPGGSKTMYVGTAHAGQVFKDITGNRTDTVTINSAGNGTFPCNGGSVSIWVKQ

SEQ ID NO: 33795 - protein, 482 aa, Synthetic construct
HDGTNGTIMQYFEWNVPNDGQHWNRLHNNAQNLKNAGITAIWIPPAWKGTSQSDTGYGAYDLYDLGEFNQKGTVRTKYGTKAELERAIRSLKANGIQVYGDVVMNHKAGADFTEQVQAVEVNPQNRNQEVSGTYQIEAWTGFNFPGRGNQHSSFKWRWYHFDGTDWDQSRQLSNRIYKFRGKAWDWEVDTEFGNYDYLMYADLDMDHPEVINELNRWGVWYANTLNLDGFRLDAVKHIKFSFMRDWLGHVRGQTGKNLFAVAEYWKNDLGALENYLSKTNWTMSAFDVPLHYNLYQASNSSGNYDMRNLLNGTLVQRHPSHAVTFVDNHDTQPGEALESFVQGWFKPLAYATILTREQGYPQVFYGDYYGIPSDGVPSYRQQIDPLLKARQQYAYGTQHDYLDNQDVIGWTREGDSAHPGSGLATVMSDGPGGSKTMYVGTAHAGQVFKDITGNRTDTVTINSAGNGTFPCNGGSVSIWVKQ

SEQ ID NO: 33796 - protein, 482 aa, Bacillus sp.
HDGTNGTIMQYFEWNVPNDGQHWNRLHNNAQNLKNAGITAIWIPPAWKGTSQNDVGYGAYDLYDLGEFNQKGTVRTKYGTKAELERAIRSLKANGIQVYGDVVMNHKAGADFTERVQAVEVNPQNRNQEVSGTYQIEAWTGFNFPGRGNQHSSFKWRWYHFDGTDWDQSRQLSNRIYKFRGKAWDWEVDTEFGNYDYLMYADLDMDHPEVINELNRWGVWYANTLNLDGFRLDAVKHIKFSFMRDWLGHVRGQTGKNLFAVAEYWKNDLGALENYLSKTNWTMSAFDVPLHYNLYQASNSSGNYDMRNLLNGTLVQRHPSHAVTFVDNHDTQPGEALESFVQGWFKPLAYATILTREQGYPQVFYGDYYGIPSDGVPSYRQQIDPLLAARQQYAYGTQHDYLDNQDVIGWTREGDSAHAGSGLATVMSDGPGGSKTMYVGTAHAGQVFKDITGNRTDTVTINSAGNGTFPCNKGSVSIWVKQ

SEQ ID NO: 33797 - protein, 482 aa, Bacillus sp.
HDGTNGTIMQYFEWNVPNDGQHWNRLHNNAQNLKNAGITAIWIPPAWKGTSQSDTGYGAYDLYDLGEFNQKGTVRTKYGTKAELERAIRSLKANGIQVYGDVVMNHKAGADFTERVQAVEVNPQNRNQEVSGTYQIEAWTGFNFPGRGNQHSSFKWRWYHFDGTDWDQSRQLSNRIYKFRGKAWDWEVDTEFGNYDYLMYADLDMDHPEVINELNRWGVWYANTLNLDGFRLDAVKHIKFSFMRDWLGHVRGQTGKNLFAVAEYWKNDLGALENYLSKTNWTMSAFDVPLHYNLYQASNSSGNYDMRNLLNGTLVQRHPSHAVTFVDNHDSQPGEALESFVQGWFKPLAYATILTREQGYPQVFYGDYYGIPSHGVPSYRQQIDPLLAARQQYAYGTQHDYLDNQDVIGWTREGDSAHAGSGLATVMSDGPGGSKTMYVGTAHAGQVFKDITGNRTDTVTINSAGNGTFPCNKGSVSIWVKQ

SEQ ID NO: 33798 - protein, 482 aa, Bacillus sp.
HDGTNGTIMQYFEWNVPNDGQHWNRLHNNAQNLKNAGITAIWIPPAWKGTSQSDTGYGAYDLYDLGEFNQKGTVRTKYGTKAELERAIRSLKANGIQVYGDVVMNHKAGADFTERVQAVEVNPQNRNQEVSGTYQIEAWTGFNFPGRGNQHSSFKWRWYHFDGTDWDQSRQLSNRIYKFRGKAWDWEVDTEFGNYDYLMYADLDMDHPEVINELNRWGVWYANTLNLDGFRLDAVKHIKFSFMRDWLGHVRGQTGKNLFAVAEYWKNDLGALENYLSKTNWTMSAFDVPLHYNLYQASNSSGNYDMRNLLNGTLVQRHPSHAVTFVDNHDTQPGEALESFVQGWFKPLAYATILTREQGYPQVFYGDYYGIPSHGVPSYRQQIDPLLAARQQYAYGTQHDYLDNQDVIGWTREGDSAHAGSGLATVMSDGPGGSKTMYVGTAHAGQVFKDITGNRTDTVTINSAGNGTFPCNGGSVSIWVKQ

SEQ ID NO: 33799 - protein, 482 aa, Synthetic construct
HDGTNGTIMQYFEWNVPNDGQHWNRLHNNAQNLKNAGITAIWIPPAWKGTSQSDTGYGAYDLYDLGEFNQKGTVRTKYGTKAELERAIRSLKANGIQVYGDVVMNHKAGADFTEHVQAVEVNPQNRNQEVSGTYQIEAWTGFNFPGRGNQHSSFKWRWYHFDGTDWDQSRQLSNRIYKFRGKAWDWEVDTEFGNYDYLMYADVDMDHPEVINELNRWGVWYANTLNLDGFRLDAVKHIKFSFMRDWLGHVRGQTGKNLFAVAEYWKNDLGALENYLSKTNWTMSAFDVPLHYNLYQASNSSGNYDMRNLLNGTLVQRHPSHAVTFVDNHDTQPGEALESFVQGWFKPLAYATILTREQGYPQVFYGDYYGIPSDGVPSYRQQIDPLLKARQQYAYGTQHDYLDNQDVIGWTREGDSAHAGSGLATVMSDGPGGSKTMYVGTAHAGQVFKDITGNRTDTVTINSAGNGTFPCNGGSVSIWVKQ

SEQ ID NO: 33800 - protein, 482 aa, Bacillus sp.
HDGTNGTIMQYFEWNVPNDGQHWNRLHNNAQNLKNAGITAIWIPPAWKGTSQSDTGYGAYDLYDLGEFNQKGTVRTKYGTKAELERAIRSLKANGIQVYGDVVMNHKGGADFTERVQAVEVNPQNRNQEVSGTYQIEAWTGFNFPGRGNQHSSFKWRWYHFDGTDWDQSRQLSNRIYKFRGKAWDWEVDTEFGNYDYLMYADLDMDHPEVINELNRWGVWYANTLNLDGFRLDAVKHIKFSFMRDWLGHVRGQTGKNLFAVAEYWKNDLGALENYLSKTNWTMSAFDVPLHYNLYQASNSSGNYDMRNLLNGTLVQRHPSHAVTFVDNHDTQPGEALESFVQGWFKPLAYATILTREQGYPQVFYGDYYGIPSHGVPSYRQQIDPLLAARQQYAYGTQHDYLDNQDVIGWTREGDSAHAGSGLATVMSDGPGGSKTMYVGTAHAGQVFKDITGNRTDTVTINSAGNGTFPCNKGSVSIWVKQ

SEQ ID NO: 33801 - protein, 482 aa, Bacillus sp.
HDGTNGTIMQYFEWHLPNDGQHWNRLHNNAQNLKNAGITAIWIPPAWKGTSQSDTGYGAYDLYDLGEFNQKGTVRTKYGTKAELERAIRSLKANGIQVYGDVVMNHKAGADFTERVQAVEVNPQNRNQEVSGTYQIEAWTGFNFPGRGNQHSSFKWRWYHFDGTDWDQSRQLSNRIYKFRGKAWDWEVDTEFGNYDYLMYADLDMDHPEVINELNRWGVWYANTLNLDGFRLDAVKHIKFSFMRDWLGHVRGQTGKNLFAVAEYWKNDLGALENYLSKTNWTMSAFDVPLHYNLYQASNSSGNYDMRNLLNGTLVQRHPSHAVTFVDNHDTQPGEALESFVQGWFKPLAYATILTREQGYPQVFYGDYYGIPSDGVPSYRQQIDPLLAARQQYAYGTQHDYLDNQDVIGWTREGDSAHAGSGLATVMSDGPGGSKTMYVGTAHAGQVFKDITGNRTDTVTINSAGNGTFPCNKGSVSIWVKQ

SEQ ID NO: 33802 - protein, 482 aa, Bacillus sp.
HDGTNGTIMQYFEWHLPNDGQHWNRLHNNAQNLKNAGITAIWIPPAWKGTSQSDTGYGAYDLYDLGEFNQKGTVRTKYGTKAELERAIRSLKANGIQVYGDVVMNHKAGADFTERVQAVEVNPQNRNQEVSGTYQIEAWTGFNFPGRGNQHSSFKWRWYHFDGTDWDQSRQLSNRIYKFRGKAWDWEVDTEFGNYDYLMYADLDMDHPEVINELNRWGVWYANTLNLDGFRLDAVKHIKFSFMRDWLGHVRGQTGKNLFAVAEYWKNDLGALENYLSKTNWTMSAFDVPLHYNLYQASNSSGNYDMRNLLNGTLVQRHPSHAVTFVDNHDTQPGEALESFVQGWFKPLAYATILTREQGYPQVFYGDYYGIPSDGVPSFRQQIDPLLAARQQYAYGTQHDYLDNQDVIGWTREGDSAHAGSGLATVMSDGPGGSKTMYVGTAHAGQVFKDITGNRTDTVTINSAGNGTFPCNKGSVSIWVKQ

SEQ ID NO: 33803 - protein, 482 aa, Bacillus sp.
HDGTNGTIMQYFEWNVPNDGQHWNRLHNNAQNLKNAGITAIWIPPAWKGTSQNDVGYGAYDLYDLGEFNQKGTVRTKYGTKAELERAIRSLKANGIQVYGDVVMNHKAGADFTERVQAVEVNPQNRNQEVSGTYQIEAWTGFNFPGRGNQHSSFKWRWYHFDGTDWDQSRQLANRIYKFRGKAWDWEVDTEFGNYDYLMYADLDMDHPEVINELNRWGVWYANTLNLDGFRLDAVKHIKFSFMRDWLGHVRGQTGKNLFAVAEYWKNDLGALENYLSKTNWTMSAFDVPLHYNLYQASNSSGNYDMRNLLNGTLVQRHPSHAVTFVDNHDTQPGEALESFVQGWFKPLAYATILTREQGYPQVFYGDYYGIPSDGVPSYRQQIDPLLAARQQYAYGTQHDYLDNQDVIGWTREGDSAHAGSGLATVMSDGPGGSKTMYVGTAHAGQVFKDITGNRTDTVTINSAGNGTFPCNKGSVSIWVKQ

SEQ ID NO: 33804 - protein, 482 aa, Bacillus sp.
NGTLMQYFEWYAPNDGNHWNRLRTDAENLAQKGITSVWIPPAYKGTTQNDVGYGAYDLYDLGEFNQKGTVRTKYGTKAQLKSAIDALHKKNIDVYGDVVMNHKGGADYTETVTAVEVDPSNRNVEVSGDYEISAWTGFNFPGRGDSYSNFKWKWYHFDGTDWDEGRKLNRIYKFRGIGKAWDWEVSSENGNYDYLMYADLDFDHPDVANEMKKWGTWYANELNLDGFRLDAVKHIDHEYLRDWVNHVRQQTGKEMFAVAEYWQNDIQTLNNYLAKVNYNQSVFDAPLHYNFHYASKGNGNYDMRNILKGTVVANHPTLAVTLVENHDSQPGQSLESVVSPWFKPLAYAFILTRAEGYPSVFYGDYYGTKGNSNYEIPALKDKIDPILTARKNYAYGPQHDYIDHPDVIGWTREGDSSAAKSGLAALITDGPGGSKRMYAGLKNAGETWYDITGNRSDTVKIGSDGWGEFHVNDGSVSIYVQK

SEQ ID NO: 33805 - protein, 482 aa, Synthetic construct
GTNGTLMQYFEWYLPNDGNHWNRLNSDASNLASKGITAVWIPPAYKGTSQADVGYGAYDLYDLGEFNQKGTVRTKYGTRSQLQAAVTSLKNNGIQVYGDVVINHKAGADATEMVTAVEVNPNNRNQEVTGEYTIEAYTRFDFPGRGNTHSSFKWRWYHFDGVDWDQSRSLNNRIYKFQGHGKAWPWEVDTENGNYDYLMYLDIDMDHPEVVNELRNWGVWYTNTLGLDGLRIDAVKHFKYLFTRDWINHVRSATGKNMFAVYEFWKNDLGAIENNFQKTNWNHSVFDVPLHYNAYNTSKSGGNYDMRNIFNGTVKQRHPSHAVTFVDNTDSQPSEALESQPEEWFKPLAYALTLTREQGYPSVFYGDYYGIPTIGVLAMRSKIDPILEARQKYAYGPQHDYLDHIDVIGWTREGDSSHPKSGLATLITDGPGGSKRMYAGLKNAGETWYDITGNRSDTVKIGSDGWGEFHKNDGSVSIYVQK

SEQ ID NO: 33806 - protein, 480 aa, unidentified
NGTLMQYFEWYAPNDGNHWNRLRTDAENLAQKGITSVWIPPAYKGTTQNDVGYGAYDLYDLGEFNQKGTVRTKYGTKAQLKSAIDALHKKNIDVYGDVVMNHKGGADYTETVTAVEVDPSNRNVEVSGDYEISAWTGFNFPGRGDSYSNFKWKWYHFDGTDWDEGRKLNRIYKFIGKAWDWEVSSENGNYDYLMYADLDFDHPDVANEMKKWGTWYANELNLDGFRLDAVKHIDHEYLRDWVNHVRQQTGKEMFAVAEYWQNDIQTLNNYLAKVNYNQSVFDAPLHYNFHYASKGNGNYDMRNILKGTVVANHPTLAVTLVENHDSQPGQSLESVVSPWFKPLAYAFILTRAEGYPSVFYGDYYGTKGNSNYEIPALKDKIDPILTARKNYAYGPQHDYIDHPDVIGWTREGDSSAAKSGLAALITDGPGGSKRMYAGLKNAGETWYDITGNRSDTVKIGSDGWGEFHVNDGSVSIYVQK

SEQ ID NO: 33807 - protein, 483 aa, Synthetic construct
HHDGTNGTIMQYFEWNVPNDGQHWNRLHNNAQNLKNAGITAIWIPPAWKGTSQNDVGYGAYDLYDLGEFNQKGTVRTKYGTKAELERAIRSLKANGIQVYGDVVMNHKGGADFTERVQAVEVNPQNRNQEVSGTYQIEAWTGFNFPGRANQHSSFKWRWYHFDGTDWDQSRQLANRIYKFRTKAWDWEVDTEFGNYDYLMYADLDMDHPEVINELNRWGVWYANTLNLDGFRLDAVKHIKFSFVRDWLGHVRGQIGKNLFAVAEYWKNDLGALENYLSKTNWTMSAFDVPLHFNLYYASNSSGNYDMRNLLNGTLVQRHPSHAVTFVDNHDTQPGESLESFVRGWFKPLAYATILTREQGYPQVFYGDYYGIPSDGVPSYRQQIDPLLKARQQYAYGTQHDYLDNQDVIGWTREGDSAHAGSGLATVMSDGPGGSKTMYVGTAHAGQVFKDITGNKTDTVTINSAGNGTFPCNGGSVSIWVKQ

SEQ ID NO: 33808 - protein, 483 aa, Bacillus sp.
HHDGTNGTIMQYFEWNVPNDGQHWNRLHNNAQNLKNAGITAIWIPPAWKGTSQSDTGYGAYDLYDLGEFNQKGTVRTKYGTKAELERAIRSLKANGIQVYGDVVMNHKAGADFTERVQAVEVNPQNRNQEVSGTYQIEAWTGFNFPGRGNQHSSFKWRWYHFDGTDWDQSRQLSNRIYKFRGKAWDWEVDTEFGNYDYLMYADVDMDHPEVINELNRWGVWYANTLNLDGFRLDAVKHIKFSFMRDWLGHVRGQTGKNLFAVAEYWKNDLGALENYLSKTNWTMSAFDVPLHYNLYQASNSSGNYDMRNLLNGTLVQRHPSHAVTFVDNHDTQPGEALESFVQGWFKPLAYATILTREQGYPQVFYGDYYGIPSDGVPSYRQQIDPLLAARQQYAYGTQHDYLDNQDVIGWTREGDSAHAGSGLATVMSDGPGGSKTMYVGTAHAGQVFKDITGNRTDTVTINSAGNGTFPCNKGSVSIWVKQ

SEQ ID NO: 33809 - protein, 483 aa, unidentified
HHDGTNGTIMQYFEWNVPNDGQHWNRLHNNAQNLKNAGITAIWIPPAWKGTSQNDVGYGAYDLYDLGEFNQKGTVRTKYGTKAELERAIRSLKANGIQVYGDVVMNHKGGADFTERVQAVEVNPQNRNQEVSGTYQIEAWTGFNFPGRGNQHSSFKWRWYHFDGTDWDQSRQLANRIYKFRGKAWDWEVDTENGNYDYLMYADVDMDHPEVINELNRWGVWYANTLNLDGFRLDAVKHIKFSFMRDWLGHVRGQTGKNLFAVAEYWKNDLGALENYLSKTNWTMSAFDVPLHYNLYQASNSSGNYDMRNLLNGTLVQRHPSHAVTFVDNHDTQPGEALESFVQGWFKPLAYATILTREQGYPQVFYGDYYGIPSDGVPSYRQQIDPLLKARQQYAYGPQHDYLDHPDVIGWTREGDSSHPKSGLATLITDGPGGSKRMYAGLKNAGETWYDITGNRSDTVKIGSDGWGEFHVNDGSVSIYVQK

SEQ ID NO: 33810 - protein, 482 aa, Bacillus sp.
HDGTNGTIMQYFEWNVPNDGQHWNRLHNNAQNLKNAGITAIWIPPAWKGTSQSDTGYGAYDLYDLGEFNQKGTVRTKYGTKAELERAIRSLKANGIQVYGDVVMNHKAGADFTERVQAVEVNPQNRNQEVSGTYQIEAWTGFNFPGRGNQHSSFKWRWYHFDGTDWDQSRQLANRIYKFRGKAWDWEVDTEFGNYDYLMYADLDMDHPEVINELNRWGVWYANTLNLDGFRLDAVKHIKFSFMRDWLGHVRGQTGKNLFAVAEYWKNDLGALENYLSKTNWTMSAFDVPLHYNLYQASNSSGNYDMRNLLNGTLVQRHPSHAVTFVDNHDTQPGEALESFVQGWFKPLAYATILTREQGYPQVFYGDYYGIPSDGVPSYRQQIDPLLAARQQYAYGTQHDYLDNQDVIGWTREGDSAHAGSGLATVMSDGPGGSKTMYVGTAHAGQVFKDITGNRTDTVTINSAGNGTFPCNGGSVSIWVKQ

SEQ ID NO: 33811 - protein, 482 aa, Bacillus sp.
HDGTNGTIMQYFEWNVPNDGQHWNRLHNNAQNLKNAGITAIWIPPAWKGTSQSDTGYGAYDLYDLGEFNQKGTVRTKYGTKAELERAIRSLKANGIQVYGDVVMNHKAGADFTERVQAVEVNPQNRNQEVSGTYQIEAWTGFNFPGRGNQHSSFKWRWYHFDGTDWDQSRQLANRIYKFRGKAWDWEVDTEFGNYDYLMYADVDMDHPEVINELNRWGVWYANTLNLDGFRLDAVKHIKFSFMRDWLGHVRGQTGKNLFAVAEYWKNDLGALENYLSKTNWTMSAFDVPLHYNLYQASNSSGNYDMRNLLNGTLVQRHPSHAVTFVDNHDTQPGEALESFVQGWFKPLAYATILTREQGYPQVFYGDYYGIPSDGVPSYRQQIDPLLAARQQYAYGTQHDYLDNQDVIGWTREGDSAHAGSGLATVMSDGPGGSKTMYVGTAHAGQVFKDITGNRTDTVTINSAGNGTFPCNKGSVSIWVKQ

SEQ ID NO: 33812 - protein, 482 aa, Bacillus sp.
HDGTNGTIMQYFEWNVPNDGQHWNRLHNNAQNLKNAGITAIWIPPAWKGTSQSDTGYGAYDLYDLGEFNQKGTVRTKYGTKAELERAIRSLKANGIQVYGDVVMNHKAGADFTERVQAVEVNPQNRNQEVSGTYQIEAWTGFNFPGRGNQHSSFKWRWYHFDGTDWDQSRQLSNRIYKFRGKAWDWEVDTEFGNYDYLMYADVDMDHPEVINELNRWGVWYANTLNLDGFRLDAVKHIKFSFMRDWLGHVRGQTGKNLFAVAEYWKNDLGALENYLSKTNWTMSAFDVPLHYNLYQASNSSGNYDMRNLLNGTLVQRHPSHAVTFVDNHDTQPGEALESFVQGWFKPLAYATILTREQGYPQVFYGDYYGIPSDGVPSYRQQIDPLLKARQQYAYGTQHDYLDNQDVIGWTREGDSAHAGSGLATVMSDGPGGSKTMYVGTAHAGQVFKDITGNRTDTVTINSAGNGTFPCNKGSVSIWVKQ

SEQ ID NO: 33813 - protein, 482 aa, Bacillus sp.
HDGTNGTIMQYFEWNVPNDGQHWNRLHNNAQNLKNAGITAIWIPPAWKGTSQNDAGYGAYDLYDLGEFNQKGTVRTKYGTKAELERAIRSLKANGIQVYGDVVMNHKAGADFTERVQAVEVNPQNRNQEVSGTYQIEAWTGFNFPGRGNQHSSFKWRWYHFDGTDWDQSRQLSNRIYKFRGKAWDWEVDTEFGNYDYLMYADLDMDHPEVINELNRWGVWYANTLNLDGFRLDAVKHIKFSFMRDWLGHVRGQTGKNLFAVAEYWKNDLGALENYLSKTNWTMSAFDVPLHYNLYQASNSSGNYDMRNLLNGTLVQRHPSHAVTFVDNHDTQPGEALESFVQGWFKPLAYATILTREQGYPQVFYGDYYGIPSDGVPSYRQQIDPLLKARQQYAYGTQHDYLDNQDVIGWTREGDSAHAGSGLATVMSDGPGGSKTMYVGTAHAGQVFKDITGNRTDTVTINSAGNGTFPCNKGSVSIWVKQ

SEQ ID NO: 33814 - protein, 482 aa, Bacillus sp.
HDGTNGTIMQYFEWNVPNDGQHWNRLHNNAQNLKNAGITAIWIPPAWKGTSQSDTGYGAYDLYDLGEFNQKGTVRTKYGTKAELERAIRSLKANGIQVYGDVVMNHKAGADFTERVQAVEVNPQNRNQEVSGTYQIEAWTGFNFPGRGNQHSSFKWRWYHFDGTDWDQSRQLSNRIYKFRGKAWDWEVDTEFGNYDYLMYADLDMDHPEVINELNRWGVWYANTLNLDGFRLDAVKHIKFSFIRDWLGHVRGQTGKNLFAVAEYWKNDLGALENYLSKTNWTMSAFDVPLHYNLYQASNSSGNYDMRNLLNGTLVQRHPSHAVTFVDNHDTQPGEALESFVQGWFKPLAYATILTREQGYPQVFYGDYYGIPSHGVPSYRQQIDPLLAARQQYAYGTQHDYLDNQDVIGWTREGDSAHAGSGLATVMSDGPGGSKTMYVGTAHAGQVFKDITGNRTDTVTINSAGNGTFPCNKGSVSIWVKQ

SEQ ID NO: 33815 - protein, 482 aa, Bacillus sp.
HDGTNGTIMQYFEWNVPNDGQHWNRLHNNAQNLKNAGITAIWIPPAGKGTSQNDVGYGAYDLYDLGEFNQKGTVRTKYGTKAELERAIRSLKANGIQVYGDVVMNHKAGADFTERVQAVEVNPQNRNQEVSGTYQIEAWTGFNFPGRGNQHSSFKWRWYHFDGTDWDQSRQLANRIYKFRGKAWDWEVDTEFGNYDYLMYADLDMDHPEVINELNRWGVWYANTLNLDGFRLDAVKHIKFSFMRDWLGHVRGQTGKNLFAVAEYWKNDLGALENYLSKTNWTMSAFDVPLHYNLYQASNSSGNYDMRNLLNGTLVQRHPSHAVTFVDNHDTQPGEALESFVQGWFKPLAYATILTREQGYPQVFYGDYYGIPSDGVPSYRQQIDPLLAARQQYAYGTQHDYLDNQDVIGWTREGDSAHAGSGLATVMSDGPGGSKTMYVGTAHAGQVFKDITGNRTDTVTINSAGNGTFPCNKGSVSIWVKQ

SEQ ID NO: 33816 - protein, 482 aa, Bacillus sp.
HDGTNGTIMQYFEWNVPNDGQHWNRLHNNAQNLKNAGITAIWIPPAWKGTSQSDTGYGAYDLYDLGEFNQKGTVRTKYGTKAELERAIRSLKANGIQVYGDVVMNHKAGADFTERVQAVEVNPQNRNQEVSGEYQIEAWTGFNFPGRGNQHSSFKWRWYHFDGTDWDQSRQLSNRIYKFRGKAWDWEVDTEFGNYDYLMYADLDMDHPEVINELNRWGVWYANTLNLDGFRLDAVKHIKFSFMRDWLGHVRGQTGKNLFAVAEYWKNDLGALENYLSKTNWTMSAFDVPLHYNLYQASNSSGNYDMRNLLNGTLVQRHPSHAVTFVDNHDTQPGEALESFVQGWFKPLAYATILTREQGYPQVFYGDYYGIPSDGVPSYRQQIDPLLAARQQYAYGTQHDYLDNQDVIGWTREGDSAHAGSGLATVMSDGPGGSKTMYVGTAHAGQVFKDITGNRTDTVTINSAGNGTFPVNKGSVSIWVKQ

SEQ ID NO: 33817 - protein, 482 aa, Bacillus sp.
HDGTNGTIMQYFEWNVPNDGQHWNRLHNNAQNLKNAGITAIWIPPAWKGTSQSDTGYGAYDLYDLGEFNQKGTVRTKYGTKAELERAIRSLKANGIQVYGDVVMNHKAGADFTERVQAVEVNPQNRNQEVSGTYQIEAWTGFNFPGRGNQHSSFKWRWYHFDGTDWDQSRQLSNRIYKFRGKAWDWEVDTEFGNYDYLMYADVDMDHPEVINELNRWGVWYANTLNLDGFRLDAVKHIKFSFMRDWLGHVRGQTGKNLFAVAEYWKNDLGALENYLSKTNWTMSAFDVPLHYNLYQASNSSGNYDMRNLLNGTLVQRHPSHAVTFVDNHDTQPGEALESFVQGWFKPLAYATILTREQGYPQVFYGDYYGIPSDGVPSYRQQIDPLLAARQQYAYGTQHDYLDNQDVIGWTREGDSAHAGSGLATVMSDGPGGSKTMYVGTAHAGQVFKDITGNRTDTVTINSAGNGTFPCNKGSVSIWVKQ

SEQ ID NO: 33818 - protein, 482 aa, Bacillus sp.
HDGTNGTIMQYFEWNVPNDGQHWNRLHNNAQNLKNRGITAIWIPPAWKGTSQSDTGYGAYDLYDLGEFNQKGTVRTKYGTKAELERAIRSLKANGIQVYGDVVMNHKAGADFTERVQAVEVNPQNRNQEVSGTYQIEAWTGFNFPGRGNQHSSFKWRWYHFDGTDWDQSRQLSNRIYKFRGKAWDWEVDTEFGNYDYLMYADLDMDHPEVINELNRWGVWYANTLNLDGFRLDAVKHIKFSFMRDWLGHVRGQTGKNLFAVAEYWKNDLGALENYLSKTNWTMSAFDVPLHYNLYQASNSSGNYDMRNLLNGTLVQRHPSHAVTFVDNHDTQPGEALESFVQGWFKPLAYATILTREQGYPQVFYGDYYGIPSDGVPSYRQQIDPLLAARQQYAYGTQHDYLDNQDVIGWTREGDSAHAGSGLATVMSDGPGGSKTMYVGTAHAGQVFKDITGNRTDTVTINSAGNGTFPCNKGSVSIWVKQ

SEQ ID NO: 33819 - protein, 482 aa, Bacillus sp.
HDGTNGTIMQYFEWNVPNDGQHWNRLHNNAQNLKNAGITAIWIPPAWKGTSQSDTGYGAYDLYDLGEFNQKGTVRTKYGTKAELERAIRSLKANGIQVYGDVVMNHKAGADFTERVQAVEVNPQNRNQEVSGTYQIEAWTGFNFPGRGNQHSSFKWRWYHFDGTDWDQSRQLSNRIYKFRGKAWDWEVDTEFGNYDYLMYADLDMDHPEVINELNRWGVWYANTLNLDGFRLDAVKHIKFSFMRDWLGHVRAATGKNLFAVAEYWKNDLGALENYLSKTNWTMSAFDVPLHYNLYQASNSSGNYDMRNLLNGTLVQRHPSHAVTFVDNHDTQPGEALESFVQGWFKPLAYATILTREQGYPQVFYGDYYGIPSDGVPSYRQQIDPLLAARQQYAYGTQHDYLDNQDVIGWTREGDSAHAGSGLATVMSDGPGGSKTMYVGTAHAGQVFKDITGNRTDTVTINSAGNGTFPCNKGSVSIWVKQ

SEQ ID NO: 33820 - protein, 482 aa, Bacillus sp.
HDGTNGTIMQYFEWNVPNDGQHWNRLHNNAQNLKNAGITAIWIPPAWKGTSQSDTGYGAYDLYDLGEFNQKGTVRTKYGTKAELERAIRSLKANGIQVYGDVVMNHKAGADFTERVQAVEVNPQNRNQEVSGTYQIEAWTGFNFPGRGNQHSSFKWRWYHFDGVDWDQSRQLSNRIYKFRGKAWDWEVDTEFGNYDYLMYADLDMDHPEVINELNRWGVWYANTLNLDGFRLDAVKHIKFSFMRDWLGHVRGQTGKNLFAVAEYWKNDLGALENYLSKTNWTMSAFDVPLHYNLYQASNSSGNYDMRNLLNGTLVQRHPSHAVTFVDNHDTQPGEALESFVQGWFKPLAYATILTREQGYPQVFYGDYYGIPSDGVPSYRQQIDPLLAARQQYAYGTQHDYLDNQDVIGWTREGDSAHAGSGLATVMSDGPGGSKTMYVGTAHAGQVFKDITGNRTDTVTINSAGNGTFPCNKGSVSIWVKQ

SEQ ID NO: 33821 - protein, 482 aa, Bacillus sp.
HDGTNGTIMQYFEWNVPNDGQHWNRLHNNAQNLKNAGITAIWIPPAWKGTSQSDTGYGAYDLYDLGEFNQKGTVRTKYGTKAELERAIRSLKANGIQVYGDVVMNHKAGADFTERVQAVEVNPQNRNQEVSGTYQIEAWTGFNFPGRGNQHSSFKWRWYHFDGGDWDQSRQLSNRIYKFRGKAWDWEVDTEFGNYDYLMYADLDMDHPEVINELNRWGVWYANTLNLDGFRLDAVKHIKFSFMRDWLGHVRGQTGKNLFAVAEYWKNDLGALENYLSKTNWTMSAFDVPLHYNLYQASNSSGNYDMRNLLNGTLVQRHPSHAVTFVDNHDTQPGEALESFVQGWFKPLAYATILTREQGYPQVFYGDYYGIPSHGVPSYRQQIDPLLAARQQYAYGTQHDYLDNQDVIGWTREGDSAHAGSGLATVMSDGPGGSKTMYVGTAHAGQVFKDITGNRTDTVTINSAGNGTFPCNKGSVSIWVKQ

SEQ ID NO: 33822 - protein, 482 aa, Bacillus sp.
HDGTNGTIMQYFEWNVPNDGQHWNRLHNNAQNLKNAGITAIWIPPAWKGTSQSDTGYGAYDLYDLGEFNQKGTVRTKYGTKAELERAIRSLKANGIQVYGDVVMNHKAGADFTERVQAVEVNPQNRNQEVSGTYQIEAWTGFNFPGRGNQHSSFKWRWYHFDGTDWDQSRQLQNRIYKFRGKAWDWEVDTEFGNYDYLMYADLDMDHPEVINELNRWGVWYANTLNLDGFRLDAVKHIKFSFMRDWLGHVRGQTGKNLFAVAEYWKNDLGALENYLSKTNWTMSAFDVPLHYNLYQASNSSGNYDMRNLLNGTLVQRHPSHAVTFVDNHDTQPGEALESFVQGWFKPLAYATILTREQGYPQVFYGDYYGIPSDGVPSYRQQIDPLLAARQQYAYGTQHDYLDNQDVIGWTREGDSAHAGSGLATVMSDGPGGSKTMYVGTAHAGQVFKDITGNRTDTVTINSAGNGTFPCNKGSVSIWVKQ

SEQ ID NO: 33823 - protein, 482 aa, Bacillus sp.
HDGTNGTIMQYFEWNVPNDGQHWNRLHNNAQNLKNAGITAIWIPPAWKGTSQSDTGYGAYDLYDLGEFNQKGTVRTKYGTKAELERAIRSLKANGIQVYGDVVMNHKAGADFTERVQAVEVNPQNRNQEVSGTYQIEAWTGFNFPGRGNQHSSFKWRWYHFDGTDWDQSRQLSNRIYKFRGKAWDWEVDTEFGNYDYLMYADLDMDHPEVINELNRWGVWYANTLNLDGFRLDAVKHIKFSFMRDWLGHVRAQTGKNLFAVAEYWKNDLGALENYLSKTNWTMSAFDVPLHYNLYQASNSSGNYDMRNLLNGTLVQRHPSHAVTFVDNHDTQPGEALESFVQGWFKPLAYATILTREQGYPQVFYGDYYGIPSHGVPSYRQQIDPLLAARQQYAYGTQHDYLDNQDVIGWTREGDSAHAGSGLATVMSDGPGGSKTMYVGTAHAGQVFKDITGNRTDTVTINSAGNGTFPCNKGSVSIWVKQ

SEQ ID NO: 33824 - protein, 482 aa, Bacillus sp.
HDGTNGTIMQYFEWNVPNDGQHWNRLHNNAQNLKNAGITAIWIPPAWKGTSQSDTGYGAYDLYDLGEFNQKGTVRTKYGTKAELERAIRSLKANGIQVYGDVVMNHKAGADFTERVRAVEVNPQNRNQEVSGTYQIEAWTGFNFPGRGNQHSSFKWRWYHFDGTDWDQSRQLSNRIYKFRGKAWDWEVDTEFGNYDYLMYADLDMDHPEVINELNRWGVWYANTLNLDGFRLDAVKHIKFSFMRDWLGHVRAQTGKNLFAVAEYWKNDLGALENYLSKTNWTMSAFDVPLHYNLYQASNSSGNYDMRNLLNGTLVQRHPSHAVTFVDNHDTQPGEALESFVQGWFKPLAYATILTREQGYPQVFYGDYYGIPSHGVPSYRQQIDPLLAARQQYAYGTQHDYLDNQDVIGWTREGDSAHAGSGLATVMSDGPGGSKTMYVGTAHAGQVFKDITGNRTDTVTINSAGNGTFPCNKGSVSIWVKQ

SEQ ID NO: 33825 - protein, 482 aa, Bacillus sp.
HDGTNGTIMQYFEWNVPNDGQHWNRLHNNAQNLKNAGITAIWIPPAWKGTSQSDTGYGAYDLYDLGEFNQKGTVRTKYGTKAELERAIRSLKANGIQVYGDVVMNHKAGADFTERVQAVEVNPQNRNQEVSGTYQIEAWTGFNFPGRGNQHSSFKWRWYHFDGTDWDQSRQLANRIYKFRGKAWDWEVDTEFGNYDYLMYADLDMDHPEVINELNRWGVWYANTLNLDGFRLDAVKHIKFSFMRDWLGHVRGQTGKNLFAVAEYWKNDLGALENYLSKTNWTMSAFDVPLHYNLYQASNSSGNYDMRNLLNGTLVQRHPSHAVTFVDNHDTQPGEALESFVQGWFKPLAYATILTREQGYPQVFYGDYYGIPSHGVPSYRQQIDPLLAARQQYAYGTQHDYLDNQDVIGWTREGDSAHAGSGLATVMSDGPGGSKTMYVGTAHAGQVFKDITGNRTDTVTINSAGNGTFPCNKGSVSIWVKQ

SEQ ID NO: 33826 - protein, 482 aa, Bacillus sp.
HDGTNGTIMQYFEWNVPNDGQHWNRLHNNAQNLKNAGITAIWIPPAWKGTSQSDVGYGAYDLYDLGEFNQKGTVRTKYGTKAELERAIRSLKANGIQVYGDVVMNHKAGADFTERVQAVEVNPQNRNQEVSGTYQIEAWTGFNFPGRGNQHSSFKWRWYHFDGTDWDQSRQLSNRIYKFRGKAWDWEVDTEFGNYDYLMYADLDMDHPEVINELNRWGVWYANTLNLDGFRLDAVKHIKFSFMRDWLGHVRGQTGKNLFAVAEYWKNDLGALENYLSKTNWTMSAFDVPLHYNLYQASNSSGNYDMRNLLNGTLVQRHPSHAVTFVDNHDTQPGEALESFVQGWFKPLAYATILTREQGYPQVFYGDYYGIPSDGVPSYRQQIDPLLAARQQYAYGTQHDYLDNQDVIGWTREGDSAHAGSGLATVMSDGPGGSKTMYVGTAHAGQVFKDITGNRTDTVTINSAGNGTFPCNKGSVSIWVKQ

SEQ ID NO: 33827 - protein, 482 aa, Bacillus sp.
HDGTNGTIMQYFEWNVPNDGQHWNRLHNNASNLKNAGITAIWIPPAWKGTSQSDTGYGAYDLYDLGEFNQKGTVRTKYGTKAELERAIRSLKANGIQVYGDVVMNHKAGADFTERVQAVEVNPQNRNQEVSGTYQIEAWTGFNFPGRGNQHSSFKWRWYHFDGTDWDQSRQLSNRIYKFRGKAWDWEVDTEFGNYDYLMYADLDMDHPEVINELNRWGVWYANTLNLDGFRLDAVKHIKFSFMRDWLGHVRGQTGKNLFAVAEYWKNDLGALENYLSKTNWTMSAFDVPLHYNLYQASNSSGNYDMRNLLNGTLVQRHPSHAVTFVDNHDTQPGEALESFVQGWFKPLAYATILTREQGYPQVFYGDYYGIPSDGVPSYRQQIDPLLAARQQYAYGTQHDYLDNQDVIGWTREGDSAHAGSGLATVMSDGPGGSKTMYVGTAHAGQVFKDITGNRTDTVTINSAGNGTFPCNKGSVSIWVKQ

SEQ ID NO: 33828 - protein, 482 aa, Bacillus sp.
HDGTNGTIMQYFEWNVPNDGQHWNRLHNNAQNLKNAGITAIWIPPAWKGTSQSDTGYGAYDLYDLGEFNQKGTVRTKYGTKAELERAIRSLKANGIQVYGDVVMNHKAGADFTERVQAVEVNPQNRNQEVSGTYQIEAWTGFNFPGRGNQHSSFKWRWYHFDGTDWDQSRQLSNRIYKFRGKAWDWEVDTEFGNYDYLMYADLDMDHPEVINELNRWGVWYANTLNLDGFRLDAVKHIKFSFMRDWLGHVRGQTGKNLFAVAEYWKNDLGALENYLSKTNWTMSAFDVPLHYNLYQASNSSGNYDMRNLLNGTLVQRHPSHAVTFVDNHDTQPGEALESFVQGWFKPLAYATILTREQGYPQVFYGDYYGIPSDGVPSYRQQIDPLLKARQQYAYGTQHDYLDNQDVIGWTREGDSAHAGSGLATVMSDGPGGSKTMYVGTAHAGQVFKDITGNRTDTVTINSAGNGTFPCNGGSVSIWVKQ

SEQ ID NO: 33829 - protein, 482 aa, Bacillus sp.
HDGTNGTIMQYFEWNVPNDGQHWNRLHNNAQNLKNAGITAIWIPPAWKGTSQSDTGYGAYDLYDLGEFNQKGTVRTKYGTKAELERAIRSLKANGIQVYGDVVMNHKAGADFTERVQAVEVNPQNRNQEVSGTYQIEAWTGFNFPGRGNQHSSFKWRWYHFDGTDWDQSRQLSNRIYKFRGKAWDWEVDTEFGNYDYLMYADLDMDHPEVINELNRWGVWYANTLNLDGFRLDAVKHIKFSFMRDWLGHVRGQTGKNLFAVAEYWKNDLGALENYLSKTNWTMSAFDVPLHYNLYQASNSSGNYDMRNLLNGTLVQRHPSHAVTFVDNHDTQPGEALESFVQGWFKPLAYATILTREQGYPQVFYGDYYGIPSHGVPSYRQQIDPLLAARQQYAYGTQHDYLDNQDVIGWTREGDSAHAGSGLATVMSDGPGGSKTMYVGTAHAGQVFKDITGNRTDTVTINSAGNGTFPCNKGSVSIWVKQ

SEQ ID NO: 33830 - protein, 482 aa, Bacillus sp.
HDGTNGTIMQYFEWNVPNDGQHWNRLHNNAQNLKNAGITAIWIPPAWKGTSQSDTGYGAYDLYDLGEFNQKGTVRTKYGTKAELERAIRSLKANGIQVYGDVVMNHKAGADFTERVQAVEVNPQNRNQEVSGTYQIEAWTGFNFPGRGNQHSSFKWRWYHFDGTDWDQSRQLSNRIYKFRGKAWDWEVDTEFGNYDYLMYADLDMDHPEVINELNRWGVWYANTLNLDGFRLDAVKHIKFSFMRDWLGHVRGQTGKNLFAVAEYWKNDLGALENYLSKTNWTMSAFDVPLHYNLYQASNSSGNYDMRNLLNGTLVQRHPSHAVTFVDNHDTQPGEALESFVQGWFKPLAYATILTREQGYPQVFYGDYYGIPSDGVPSYRQQIDPLLEARQQYAYGTQHDYLDNQDVIGWTREGDSAHAGSGLATVMSDGPGGSKTMYVGTAHAGQVFKDITGNRTDTVTINSAGNGTFPCNKGSVSIWVKQ

SEQ ID NO: 33831 - protein, 482 aa, Bacillus sp.
HDGTNGTIMQYFEWNVPNDGQHWNRLHNNAQNLKNAGITAIWIPPAWKGTSQSDTGYGAYDLYDLGEFNQKGTVRTKYGTKAELERAIRSLKANGIQVYGDVVMNHKAGADFTERVQAVEVNPQNRNQEVSGTYQIEAWTGFNFPGRGNQHSSFKWRWYHFDGTDWDQSRQLSNRIYKFRGKAWDWEVDTEFGNYDYLMYADLDMDHPEVINELNRWGVWYANTLNLDGFRVDAVKHIKFSFMRDWLGHVRGQTGKNLFAVAEYWKNDLGALENYLSKTNWTMSAFDVPLHYNLYQASNSSGNYDMRNLLNGTLVQRHPSHAVTFVDNHDTQPGEALESFVQGWFKPLAYATILTREQGYPQVFYGDYYGIPSHGVPSYRQQIDPLLAARQQYAYGTQHDYLDNQDVIGWTREGDSAHAGSGLATVMSDGPGGSKTMYVGTAHAGQVFKDITGNRTDTVTINSAGNGTFPCNKGSVSIWVKQ

SEQ ID NO: 33832 - protein, 482 aa, Bacillus sp.
HDGTNGTIMQYFEWNVPNDGNHWNRLHNNAQNLKNAGITAIWIPPAWKGTSQSDTGYGAYDLYDLGEFNQKGTVRTKYGTKAELERAIRSLKANGIQVYGDVVMNHKAGADFTERVQAVEVNPQNRNQEVSGTYQIEAWTGFNFPGRGNQHSSFKWRWYHFDGTDWDQSRQLSNRIYKFRGKAWDWEVDTEFGNYDYLMYADLDMDHPEVINELNRWGVWYANTLNLDGFRLDAVKHIKFSFMRDWLGHVRGQTGKNLFAVAEYWKNDLGALENYLSKTNWTMSAFDVPLHYNLYQASNSSGNYDMRNLLNGTLVQRHPSHAVTFVDNHDTQPGEALESFVQGWFKPLAYATILTREQGYPQVFYGDYYGIPSDGVPSYRQQIDPLLAARQQYAYGTQHDYLDNQDVIGWTREGDSAHAGSGLATVMSDGPGGSKTMYVGTAHAGQVFKDITGNRTDTVTINSAGNGTFPCNKGSVSIWVKQ

SEQ ID NO: 33833 - protein, 482 aa, Bacillus sp.
HDGTNGTIMQYFEWNVPNDGQHWNRLHNNAQNLKNAGITAIWIPPAWKGTSQSDTGYGAYDLYDLGEFNQKGTVRTKYGTKAELERAIRSLKANGIQVYGDVVMNHKAGADFTERVQAVEVNPQNRNQEVSGTYQIEAWTGFNFPGRGNQHSSFKWRWYHFDGTDWDQSRQLSNRIYKFRGKAWDWEVDTEFGNYDYLMYADLDMDHPEVINELNRWGVWYANTLNLDGFRLDAVKHIKFSFMRDWLGHVRGQTGKNLFAVAEMWKNDLGALENYLSKTNWTMSAFDVPLHYNLYQASNSSGNYDMRNLLNGTLVQRHPSHAVTFVDNHDTQPGEALESFVQGWFKPLAYATILTREQGYPQVFYGDYYGIPSHGVPSYRQQIDPLLAARQQYAYGTQHDYLDNQDVIGWTREGDSAHAGSGLATVMSDGPGGSKTMYVGTAHAGQVFKDITGNRTDTVTINSAGNGTFPCNKGSVSIWVKQ

SEQ ID NO: 33834 - protein, 482 aa, Bacillus sp.
HDGTNGTIMQYFEWNVPNDGQHWNRLHNNAQNLKNAGITAIWIPPAWKGTSQSDTGYGAYDLYDLGEFNQKGTVRTKYGTKAELERAIRSLKANGIQVYGDVVMNHKAGADFTERVQAVEVNPQNRNQEVSGTYQIEAWTGFNFPGRGNQHSSFKWRWYHFDGTDWDQSRQLSNRIYKFRGKAWDWEVDTEFGNYDYLMYADLDMDHPEVINELNRWGVWYANTLNLDGFRLDAVKHIKFSFMRDWLGHVRGQTGKNLFAVAEYWKNDLGALENYLSKTNWTMSAFDVPLHYNLYQASNSSGNYDMRNLLNGTLVQAHPNHAVTFVDNHDTQPGEALESFVQGWFKPLAYATILTREQGYPQVFYGDYYGIPSHGVPSYRQQIDPLLAARQQYAYGTQHDYLDNQDVIGWTREGDSAHAGSGLATVMSDGPGGSKTMYVGTAHAGQVFKDITGNRTDTVTINSAGNGTFPCNKGSVSIWVKQ

SEQ ID NO: 33835 - protein, 482 aa, Synthetic construct
HHDGTNGTIMQYFEWNVPNDGQHWNRLHNNAQNLKNAGITAIWIPPAWKGTSQNDVGYGAYDLYDLGEFNQKGTVRTKYGTKAELERAIRSLKANGIQVYGDVVMNHKGGADFTERVQAVEVNPQNRNQEVSGTYQIEAWTGFNFPGRANQHSSFKWRWYHFDGTDWDQSRQLANRIYKFRTKAWDWEVDTEFGNYDYLLYADLDMDHPEVINELNRWGVWYANTLNLDGFRLDAVKHIKFSFMRDWLGHVRGQGKNLFAVAEYWKNDLGALENYLSKTNWTMSAFDVPLHFNLYYASNSSGNYDMRNLLNGTLVQRHPSHAVTFVDNHDTQPGESLESFVRGWFKPLAYATILTREQGYPQVFYGDYYGIPSDGVPSYRQQIDPLLKARQQYAYGTQHDYLDNQDVIGWTREGDSAHAGSGLATVMSDGPGGSKTMYVGTAHAGQVFKDITGNKTDTVTINSAGNGTFPCNGGSVSIWVKQ

SEQ ID NO: 33836 - protein, 482 aa, Bacillus sp.
HDGTNGTIMQYFEWNVPNDGQHWNRLHNNAQNLKNAGITAIWIPPAWKGTSQSDTGYGAYDLYDLGEFNQKGTVRTKYGTKAELERAIRSLKANGIQVYGDVVMNHKAGADFTERVQAVEVNPQNRNQEVSGTYQIEAWTGFNFPGRGNQHSSFKWRWYHFDGTDWDQSRQLSNRIYKFRGKAWDWEVDTEFGNYDYLMYADLDMDHPEVINELNRWGVWYANTLNLDGFRLDAVKHIKFSFMRDWLGHVRGQTGKNLFAVAEYWKNDLGALENYLSKTNWTMSAFDVPLHYNLYQASNSSGNYDMRNLLNGTLVQRHPSHAVTFVDNHDTQPGEALESFVQGWFKPLAYATILTREQGYPQVFYGDYYGIPSHGVPSYRQQIDPLLKARQQYAYGTQHDYLDNQDVIGWTREGDSAHAGSGLATVMSDGPGGSKTMYVGTAHAGQVFKDITGNRTDTVTINSAGNGTFPCNKGSVSIWVKQ

SEQ ID NO: 33837 - protein, 482 aa, Bacillus sp.
HDGTNGTIMQYFEWNVPNDGQHWNRLHNNAQNLKNAGITAIWIPPAWKGTSQSDTGYGAYDLYDLGEFNQKGTVRTKYGTKAELERAIRSLKANGIQVYGDVVMNHKAGADFTERVQAVEVNPQNRNQEVSGTYQIEAWTGFNFPGRGNQHSSFKWRWYHFDGTDWDQSRQLSNRIYKFRGKAWDWEVDTEFGNYDYLMYADLDMDHPEVINELNRWGVWYANTLNLDGFRLDAVKHIKFSFMRDWLGHVRGQTGKNLFAVAEYWKNDLGALENYLSKTNWTMSAFDVPLHYNLYQASNSSGNYDMRNLLNGTLVQRHPSHAVTFVDNHDTQPGEALESFVQGWFKPLAYATILTREQGYPQVFYGDYYGIPSDGVPSMRQQIDPLLAARQQYAYGTQHDYLDNQDVIGWTREGDSAHAGSGLATVMSDGPGGSKTMYVGTAHAGQVFKDITGNRTDTVTINSAGNGTFPCNKGSVSIWVKQ

SEQ ID NO: 33838 - protein, 482 aa, Bacillus sp.
HDGTNGTIMQYFEWNVPNDGQHWNRLHNNAQNLKNAGITAIWIPPAWKGTSQSDTGYGAYDLYDLGEFNQKGTVRTKYGTKAELERAIRSLKANGIQVYGDVVMNHKAGADFTERVQAVEVNPQNRNQEVSGTYQIEAWTGFNFPGRGNQHSSFKWRWYHFDGTDWDQSRQLSNRIYKFRGKAWDWEVDTEFGNYDYLMYADLDMDHPEVINELNRWGVWYANTLNLDGFRLDAVKHIKFSFFRDWLGHVRGQTGKNLFAVAEYWKNDLGALENYLSKTNWTMSAFDVPLHYNLYQASNSSGNYDMRNLLNGTLVQRHPSHAVTFVDNHDTQPGEALESFVQGWFKPLAYATILTREQGYPQVFYGDYYGIPSHGVPSYRQQIDPLLAARQQYAYGTQHDYLDNQDVIGWTREGDSAHAGSGLATVMSDGPGGSKTMYVGTAHAGQVFKDITGNRTDTVTINSAGNGTFPCNKGSVSIWVKQ

SEQ ID NO: 33839 - protein, 482 aa, Bacillus sp.
HDGTNGTIMQYFEWNVPNDGQHWNRLHNNAQNLKNAGITAIWIPPAWKGTSQSDTGYGAYDLYDLGEFNQKGTVRTKYGTKAELERAIRSLKANGIQVYGDVVMNHKAGADFTEQVQAVEVNPQNRNQEVSGTYQIEAWTGFNFPGRGNQHSSFKWRWYHFDGTDWDQSRQLSNRIYKFRGKAWDWEVDTEFGNYDYLMYADLDMDHPEVINELNRWGVWYANTLNLDGFRLDAVKHIKFSFMRDWLGHVRGQTGKNLFAVAEYWKNDLGALENYLSKTNWTMSAFDVPLHYNLYQASNSSGNYDMRNLLNGTLVQRHPSHAVTFVDNHDTQPGEALESFVQGWFKPLAYATILTREQGYPQVFYGDYYGIPSDGVPSYRQQIDPLLAARQQYAYGTQHDYLDNQDVIGWTREGDSAHAGSGLATVMSDGPGGSKTMYVGQAHAGQVFKDITGNRTDTVTINSAGNGTFRCNKGSVSIWVKQ

SEQ ID NO: 33840 - protein, 482 aa, Bacillus sp.
HDGTNGTIMQYFEWNVPNDGQHWNRLHNNAQNLKNAGITAIWIPPAWKGTSQSDTGYGAYDLYDLGEFNQKGTVRTKYGTKAELERAIRSLKANGIQVYGDVVMNHKAGADFTERVQAVEVNPQNRNQEVSGTYQIEAWTGFNFPGRGNQHSSFKWRWYHFDGTDWDQSRQLSNRIYKFRGKAWDWEVDTEFGNYDYLMYADLDMDHPEVINELNRWGVWYANTLNLDGFRLDAVKHIKFSFMRDWLGHVRGQTGKNLFAVAEYWKNDLGALENYLSKTNWTMSAFDVPLHYNLYQASNSSGNYDMRNLLNGTLVQRHPSHAVTFVDNHDTQPGEALESFVQGWFKPLAYATILTREQGYPQVFYGDYYGIPSDGVPSYRQQIDPLLAARQQYAYGTQHDYLDNQDVIGWTREGDSAHAGSGLATVMSDGPGGSKTMYVGTAHAGQVFKDITGNRTDTVTINSAGNGTFPVNKGSVSIWVKQ

SEQ ID NO: 33841 - protein, 482 aa, Bacillus sp.
HDGTNGTIMQYFEWNVPNDGQHWNRLHNNAQNLKNAGITAIWIPPAWKGTSQSDTGYGAYDLYDLGEFNQKGTVRTKYGTKAELERAIRSLKANGIQVYGDVVMNHKAGADFTERVQAVEVNPQNRNQEVSGTYQIEAWTGFNFPGRGNQHSSFKWRWYHFDGTDWDQSRQLSNRIYKFRGKAWDWEVDTEFGNYDYLMYADLDMDHPEVINELNRWGVWYANTLNLDGFRIDAVKHIKFSFMRDWLGHVRGQTGKNLFAVAEYWKNDLGALENYLSKTNWTMSAFDVPLHYNLYQASNSSGNYDMRNLLNGTLVQRHPSHAVTFVDNHDTQPGEALESFVQGWFKPLAYATILTREQGYPQVFYGDYYGIPSDGVPSYRQQIDPLLAARQQYAYGTQHDYLDNQDVIGWTREGDSAHAGSGLATVMSDGPGGSKTMYVGTAHAGQVFKDITGNRTDTVTINSAGNGTFPCNKGSVSIWVKQ

SEQ ID NO: 33842 - protein, 482 aa, Bacillus sp.
HDGTNGTIMQYFEWNVPNDGQHWNRLHNNAQNLKNAGITAIWIPPAWKGTSQSDTGYGAYDLYDLGEFNQKGTVRTKYGTKAELERAIRSLKANGIQVYGDVVMNHKAGADQTERVQAVEVNPQNRNQEVSGTYQIEAWTGFNFPGRGNQHSSFKWRWYHFDGTDWDQSRQLSNRIYKFRGKAWDWEVDTEFGNYDYLMYADLDMDHPEVINELNRWGVWYANTLNLDGFRLDAVKHIKFSFMRDWLGHVRGQTGKNLFAVAEYWKNDLGALENYLSKTNWTMSAFDVPLHYNLYQASNSSGNYDMRNLLNGTLVQRHPSHAVTFVDNHDTQPGEALESFVQGWFKPLAYATILTREQGYPQVFYGDYYGIPSDGVPSYRQQIDPLLAARQQYAYGTQHDYLDNQDVIGWTREGDSAHAGSGLATVMSDGPGGSKTMYVGTAHAGQVFKDITGNRTDTVTINSAGNGTFPVNKGSVSIWVKQ

SEQ ID NO: 33843 - protein, 482 aa, Bacillus sp.
HDGTNGTIMQYFEWNVPNDGQHWNRLHNNAQNLKNAGITAIWIPPAWKGTSQNDTGYGAYDLYDLGEFNQKGTVRTKYGTKAELERAIRSLKANGIQVYGDVVMNHKAGADFTERVQAVEVNPQNRNQEVSGTYQIEAWTGFNFPGRGNQHSSFKWRWYHFDGTDWDQSRQLSNRIYKFRGKAWDWEVDTEFGNYDYLMYADLDMDHPEVINELNRWGVWYANTLNLDGFRLDAVKHIKFSFMRDWLGHVRGQTGKNLFAVAEYWKNDLGALENYLSKTNWTMSAFDVPLHYNLYQASNSSGNYDMRNLLNGTLVQRHPSHAVTFVDNHDTQPGEALESFVQGWFKPLAYATILTREQGYPQVFYGDYYGIPSDGVPSYRQQIDPLLAARQQYAYGTQHDYLDNQDVIGWTREGDSAHAGSGLATVMSDGPGGSKTMYVGTAHAGQVFKDITGNRTDTVTINSAGNGTFPCNKGSVSIWVKQ

SEQ ID NO: 33844 - protein, 482 aa, Bacillus sp.
HDGTNGTIMQYFEWNVPNDGQHWNRLHNNAQNLKNAGITAIWIPPAWKGTSQSDTGYGAYDLYDLGEFNQKGTVRTKYGTKAELERAIRSLKANGIQVYGDVVMNHKAGADFTERVQAVEVNPQNRNQEVSGTYQIEAWTGFNFPGRGNQHSSFKWRWYHFDGTDWDQSRQLSNRIYKFRGKAWDWEVDTEFGNYDYLMYADLDMDHPEVINELNRWGVWYANTLNLDGFRLDAVKHIKFSFMRDWLGHVRGQTGKNLFAVAEHWKNDLGALENYLSKTNWTMSAFDVPLHYNLYQASNSSGNYDMRNLLNGTLVQRHPSHAVTFVDNHDTQPGEALESFVQGWFKPLAYATILTREQGYPQVFYGDYYGIPSHGVPSYRQQIDPLLAARQQYAYGTQHDYLDNQDVIGWTREGDSAHAGSGLATVMSDGPGGSKTMYVGTAHAGQVFKDITGNRTDTVTINSAGNGTFPCNKGSVSIWVKQ

SEQ ID NO: 33845 - protein, 482 aa, Bacillus sp.
HDGTNGTIMQYFEWNVPNDGQHWNRLHNNAQNLKNAGITAIWIPPAWKGTSQSDTGYGAYDLYDLGEFNQKGTVRTKYGTKAELERAIRSLKANGIQVYGDVVMNHKAGADFTERVQAVEVNPQNRNQEVSGTYQIEAWTGFNFPGRGNQHSSFKWRWYHFDGTDWDQSRQLSNRIYKFRGKAWDWEVDTEFGNYDYLMYADLDMDHPEVINELNRWGVWYANTLNLDGFRLDAVKHIKFSFMRDWLGHVRGQTGKNLFAVAEYWKNDLGALENYLSKTNWTMSAFDVPLHYNLYQASNSSGNYDMRNLLNGTLVQRHPSHAVTFVDNHDTQPGEALESFVQGWFKPLAYATILTREQGYPSVFYGDYYGIPSDGVPSYRQQIDPLLAARQQYAYGTQHDYLDNQDVIGWTREGDSAHAGSGLATVMSDGPGGSKTMYVGTAHAGQVFKDITGNRTDTVTINSAGNGTFPCNKGSVSIWVKQ

SEQ ID NO: 33846 - protein, 482 aa, Bacillus sp.
HDGTNGTIMQYFEWNVPNDGQHWNRLHNNAQNLKNAGITAIWIPPAWKGTSQSDTGYGAYDLYDLGEFNQKGTVRTKYGTKAELERAIRSLKANGIQVYGDVVMNHKAGADFTEAVQAVEVNPQNRNQEVSGTYQIEAWTGFNFPGRGNQHSSFKWRWYHFDGTDWDQSRQLSNRIYKFRGKAWDWEVDTEFGNYDYLMYADLDMDHPEVINELNRWGVWYANTLNLDGFRLDAVKHIKFSFMRDWLGHVRGQTGKNLFAVAEYWKNDLGALENYLSKTNWTMSAFDVPLHYNLYQASNSSGNYDMRNLLNGTLVQRHPSHAVTFVDNHDTQPGEALESFVQGWFKPLAYATILTREQGYPQVFYGDYYGIPSDGVPSYRQQIDPLLAARQQYAYGTQHDYLDNQDVIGWTREGDSAHAGSGLATVMSDGPGGSKTMYVGQAHAGQVFKDITGNRTDTVTINSAGNGTFRCNKGSVSIWVKQ

SEQ ID NO: 33847 - protein, 482 aa, Synthetic construct
HHDGTNGTIMQYFEWNVPNDGQHWNRLHNNAQNLKNAGITAIWIPPAWKGTSQNDVGYGAYDLYDLGEFNQKGTVRTKYGTKAELERAIRSLKANGIQVYGDVVMNHKGGADFTERVQAVEVNPQNRNQEVSGTYQIEAWTGFNFPGRANQHSSFKWRWYHFDGTDWDQSRQLANRIYKFRTKAWDWEVDTENGNYDYLLYADLDMDHPEVINELNRWGVWYANTLNLDGFRLDAVKHIKFSFMRDWLGHVRGQGKNLFAVAEYWKNDLGALENYLSKTNWTMSAFDVPLHFNLYYASNSSGNYDMRNLLNGTLVQRHPSHAVTFVDNHDTQPGESLESFVRGWFKPLAYATILTREQGYPQVFYGDYYGIPSDGVPSYRQQIDPLLKARQQYAYGTQHDYLDNQDVIGWTREGDSAHAGSGLATVMSDGPGGSKTMYVGTAHAGQVFKDITGNRTDTVTINSAGNGTFPCNGGSVSIWVKQ

SEQ ID NO: 33848 - protein, 482 aa, Bacillus sp.
HDGTNGTIMQYFEWNVPNDGQHWNRLHNNAQNLKNAGITAIWIPPAWKGTSQSDTGYGAYDLYDLGEFNQKGTVRTKYGTKAELERAIRSLKANGIQVYGDVVMNHKAGADFTERVQAVEVNPQNRNQEVSGTYQIEAWTGFNFPGRGNQHSSFKWRWYHFDGTDWDQSRQLSNRIYKFRGKAWDWEVDTENGNYDYLMYADLDMDHPEVINELNRWGVWYANTLNLDGFRLDAVKHIKFSFMRDWLGHVRGQTGKNLFAVAEYWKNDLGALENYLSKTNWTMSAFDVPLHYNLYQASNSSGNYDMRNLLNGTLVQRHPSHAVTFVDNHDTQPGEALESFVQGWFKPLAYATILTREQGYPQVFYGDYYGIPSDGVPSYRQQIDPLLAARQQYAYGTQHDYLDNQDVIGWTREGDSAHAGSGLATVMSDGPGGSKTMYVGTAHAGQVFKDITGNRTDTVTINSAGNGTFPCNKGSVSIWVKQ

SEQ ID NO: 33849 - protein, 482 aa, Bacillus sp.
HDGTNGTIMQYFEWNVPNDGQHWNRLHNNAQNLKNAGITAIWIPPAWKGTSQSDTGYGAYDLYDLGEFNQKGTVRTKYGTKAELERAIRSLKANGIQVYGDVVMNHKAGADFTERVQAVEVNPQNRNQEVSGTYQIEAWTGFNFPGRGNQHSSFKWRWYHFDGTDWDQSRQLSNRIYKFRGKAWDWEVDTEFGNYDYLMYADLDMDHPEVINELNRWGVWYANTLNLDGFRLDAVKHIKFSFTRDWLGHVRGQTGKNLFAVAEYWKNDLGALENYLSKTNWTMSAFDVPLHYNLYQASNSSGNYDMRNLLNGTLVQRHPSHAVTFVDNHDTQPGEALESFVQGWFKPLAYATILTREQGYPQVFYGDYYGIPSDGVPSYRQQIDPLLAARQQYAYGTQHDYLDNQDVIGWTREGDSAHAGSGLATVMSDGPGGSKTMYVGTAHAGQVFKDITGNRTDTVTINSAGNGTFPCNKGSVSIWVKQ

SEQ ID NO: 33850 - protein, 482 aa, Bacillus sp.
HDGTNGTIMQYFEWNVPNDGQHWNRLHNNAQNLKNAGITAIWIPPAWKGTSQSDTGYGAYDLYDLGEFNQKGTVRTKYGTKAELERAIRSLKANGIQVYGDVVMNHKAGADFTERVQAVEVNPQNRNQEVSGEYQIEAWTGFNFPGRGNQHSSFKWRWYHFDGTDWDQSRQLSNRIYKFRGKAWDWEVDTEFGNYDYLMYADLDMDHPEVINELNRWGVWYANTLNLDGFRLDAVKHIKFSFMRDWLGHVRGQTGKNLFAVAEYWKNDLGALENYLSKTNWTMSAFDVPLHYNLYQASNSSGNYDMRNLLNGTLVQRHPSHAVTFVDNHDTQPGEALESFVQGWFKPLAYATILTREQGYPQVFYGDYYGIPSHGVPSYRQQIDPLLAARQQYAYGTQHDYLDNQDVIGWTREGDSAHAGSGLATVMSDGPGGSKTMYVGTAHAGQVFKDITGNRTDTVTINSAGNGTFPCNKGSVSIWVKQ

SEQ ID NO: 33851 - protein, 482 aa, Bacillus sp.
HDGTNGTIMQYFEWNVPNDGQHWNRLHNNAQNLKNAGITAIWIPPAWKGTSQSDTGYGAYDLYDLGEFNQKGTVRTKYGTKAELERAIRSLKANGIQVYGDVVMNHKAGADFTEAVQAVEVNPQNRNQEVSGTYQIEAWTGFNFPGRGNQHSSFKWRWYHFDGGDWDQSRQLSNRIYKFRGKAWDWEVDTEFGNYDYLMYADLDMDHPEVINELNRWGVWYANTLNLDGFRLDAVKHIKFSFMRDWLGHVRGQTGKNLFAVAEYWKNDLGALENYLSKTNWTMSAFDVPLHYNLYQASNSSGNYDMRNLLNGTLVQRHPSHAVTFVDNHDTQPGEALESFVQGWFKPLAYATILTREQGYPQVFYGDYYGIPSDGVPSYRQQIDPLLAARQQYAYGTQHDYLDNQDVIGWTREGDSAHAGSGLATVMSDGPGGSKTMYVGQAHAGQVFKDITGNRTDTVTINSAGNGTFRCNKGSVSIWVKQ

SEQ ID NO: 33852 - protein, 482 aa, Bacillus sp.
HDGTNGTIMQYFEWNVPNDGQHWNRLHNNAQNLKNAGITAIWIPPAWKGTSQSDTGYGAYDLYDLGEFNQKGTVRTKYGTKAELERAIRSLKANGIQVYGDVVMNHKAGADFTERVQAVEVNPQNRNQEVSGTYQIEAWTGFNFPGRGNQHSSFKWRWYHFDGTDWDQSRQLSNRIYKFRGKAWDWEVDTEFGNYDYLMYADLDMDHPEVINELNRWGVWYANTLNLDGFRLDAVKHIKFSFMRDWLGHVRGQTGKNLFAVAEYWKNDLGALENYLSKTNWTMSAFDVPLHYNLYQASNSSGNYDMRNLLNGTLVQRHPSHAVTFVDNHDSQPGEALESFVQGWFKPLAYATILTREQGYPQVFYGDYYGIPSDGVPSYRQQIDPLLAARQQYAYGTQHDYLDNQDVIGWTREGDSAHAGSGLATVMSDGPGGSKTMYVGTAHAGQVFKDITGNRTDTVTINSAGNGTFPCNKGSVSIWVKQ

SEQ ID NO: 33853 - protein, 482 aa, Bacillus sp.
HDGTNGTIMQYFEWNVPNDGQHWNRLHNNAQNLKNAGITAIWIPPAWKGTSQSDTGYGAYDLYDLGEFNQKGTVRTKYGTKAELERAIRSLKANGIQVYGDVVMNHKAGADFTERVQAVEVNPQNRNQEVSGTYQIEAWTGFNFPGRGNQHSSFKWRWYHFDGTDWDQSRQLSNRIYKFRGKAWDWEVDTEFGNYDYLMYADLDMDHPEVINELNRWGVWYANTLNLDGFRLDAVKHIKFSFMRDWLGHVRGQTGKNLFAVAEIWKNDLGALENYLSKTNWTMSAFDVPLHYNLYQASNSSGNYDMRNLLNGTLVQRHPSHAVTFVDNHDTQPGEALESFVQGWFKPLAYATILTREQGYPQVFYGDYYGIPSHGVPSYRQQIDPLLAARQQYAYGTQHDYLDNQDVIGWTREGDSAHAGSGLATVMSDGPGGSKTMYVGTAHAGQVFKDITGNRTDTVTINSAGNGTFPCNKGSVSIWVKQ

SEQ ID NO: 33854 - protein, 482 aa, Bacillus sp.
HDGTNGTIMQYFEWNVPNDGQHWNRLHNNAQNLKNAGITAIWIPPAWKGTSQSDTGYGAYDLYDLGEFNQKGTVRTKYGTKAELERAIRSLKANGIQVYGDVVMNHKAGADFTERVQAVEVNPQNRNQEVSGTYQIEAWTGFNFPGRGNQHSSFKWRWYHFDGTDWDQSRQLSNRIYKFRGKAWDWEVDTEFGNYDYLMYADLDMDHPEVINELNRWGVWYANTLNLDGFRLDAVKHIKFSFMRDWLGHVRGQTGKNLFAVAEYWKNDLGALENYLSKTNWTMSAFDVPLHYNLYQASNSSGNYDMRNLLNGTLVQRHPSHAVTFVDNHDTQPGEALESFVQGWFKPLAYALILTREQGYPQVFYGDYYGIPSDGVPSYRQQIDPLLAARQQYAYGTQHDYLDNQDVIGWTREGDSAHAGSGLATVMSDGPGGSKTMYVGTAHAGQVFKDITGNRTDTVTINSAGNGTFPCNKGSVSIWVKQ

SEQ ID NO: 33855 - protein, 482 aa, Bacillus sp.
HDGTNGTIMQYFEWNVPNDGQHWNRLHNNAQNLKNAGITAIWIPPAWKGTSQSDTGYGAYDLYDLGEFNQKGTVRTKYGTKAELERAIRSLKANGIQVYGDVVMNHKAGADFTERVQAVEVNPQNRNQEVSGTYQIEAWTGFNFPGRGNQHSSFKWRWYHFDGTDWDQSRQLSNRIYKFRGKAWDWEVDTEFGNYDYLMYADLDMDHPEVINELNRWGVWYANTLNLDGFRLDAVKHIKFSFMRDWLGHVRGQTGKNLFAVAEYWKNDLGALENYLSKTNWTFSAFDVPLHYNLYQASNSSGNYDMRNLLNGTLVQRHPSHAVTFVDNHDTQPGEALESFVQGWFKPLAYATILTREQGYPQVFYGDYYGIPSHGVPSYRQQIDPLLAARQQYAYGTQHDYLDNQDVIGWTREGDSAHAGSGLATVMSDGPGGSKTMYVGTAHAGQVFKDITGNRTDTVTINSAGNGTFPCNKGSVSIWVKQ

SEQ ID NO: 33856 - protein, 482 aa, Bacillus sp.
HDGTNGTIMQYFEWNVPNDGQHWNRLHNNAQNLKNAGITAIWIPPAWKGTSQSDTGYGAYDLYDLGEFNQKGTVRTKYGTKAELERAIRSLKANGIQVYGDVVMNHKSGADQTERVQAVEVNPQNRNQEVSGTYQIEAWTGFNFPGRGNQHSSFKWRWYHFDGTDWDQSRQLSNRIYKFRGKAWDWEVDTEFGNYDYLMYADLDMDHPEVINELNRWGVWYANTLNLDGFRLDAVKHIKFSFMRDWLGHVRGQTGKNLFAVAEYWKNDLGALENYLSKTNWTMSAFDVPLHYNLYQASNSSGNYDMRNLLNGTLVQRHPSHAVTFVDNHDTQPGEALESFVQGWFKPLAYATILTREQGYPQVFYGDYYGIPSDGVPSYRQQIDPLLAARQQYAYGTQHDYLDNQDVIGWTREGDSAHAGSGLATVMSDGPGGSKTMYVGQAHAGQVFKDITGNRTDTVTINSAGNGTFPCNKGSVSIWVKQ

SEQ ID NO: 33857 - protein, 482 aa, Bacillus sp.
HDGTNGTIMQYFEWNVPNDGQHWNRLHNNAQNLKNAGITAIWIPPAWKGTSQSDTGYGAYDLYDLGEFNQKGTVRTKYGTKAELERAIRSLKANGIQVYGDVVMNHKAGADFTERVQAVEVNPQNRNQEVSGTYQIEAWTGFNFPGRGNQHSSFKWRWYHFDGTDWDQSRQLSNRIYKFRGKAWDWEVDTEFGNYDYLMYADLDMDHPEVINELNRWGVWYANTLNLDGFRLDAVKHIKFSFMRDWLGHVRGQTGKNLFAVAEYWKNDLGALENYLSKTNWTMSAFDVPLHYNLYQASNSSGNYDMRNLLNGTLVQRHPSHAVTFVDNHDTQPGEALESFVQGWFKPLAYATILTREQGYPQVFYGDYYGIPSDGVPSYRQQIDPLLAARQQYAYGTQHDYLDNQDVIGWTREGDSAHAGSGLATVMSDGPGGSKTMYVGTAHAGQVFKDITGNRTDTVTINSAGNGTFPCNGGSVSIWVKQ

SEQ ID NO: 33858 - protein, 482 aa, Bacillus sp.
HDGTNGTIMQYFEWNVPNDGQHWNRLHNNAQNLKNAGITAIWIPPAWKGTSQSDTGYGAYDLYDLGEFNQKGTVRTKYGTKAELERAIRSLKANGIQVYGDVVMNHKAGADFTERVQAVEVNPQNRNQEVSGTYQIEAWTGFNFPGRGNQHSSFKWRWYHFDGTDWDQSRQLSNRIYKFRGKAWDWEVDTEFGNYDYLMYADLDMDHPEVINELNRWGVWYANTLNLDGFRLDAVKHIKFSFSRDWLGHVRGQTGKNLFAVAEYWKNDLGALENYLSKTNWTMSAFDVPLHYNLYQASNSSGNYDMRNLLNGTLVQRHPSHAVTFVDNHDTQPGEALESFVQGWFKPLAYATILTREQGYPQVFYGDYYGIPSHGVPSYRQQIDPLLAARQQYAYGTQHDYLDNQDVIGWTREGDSAHAGSGLATVMSDGPGGSKTMYVGTAHAGQVFKDITGNRTDTVTINSAGNGTFPCNKGSVSIWVKQ

SEQ ID NO: 33859 - protein, 482 aa, Bacillus sp.
HDGTNGTIMQYFEWNVPNDGQHWNRLHNNAQNLKNAGITAIWIPPAWKGTSQSDTGYGAYDLYDLGEFNQKGTVRTKYGTKAELERAIRSLKANGIQVYGDVVMNHKAGADFTERVQAVEVNPQNRNQEVSGTYQIEAWTGFNFPGRGNQHSSFKWRWYHFDGSDWDQSRQLSNRIYKFRGKAWDWEVDTEFGNYDYLMYADLDMDHPEVINELNRWGVWYANTLNLDGFRLDAVKHIKFSFMRDWLGHVRGQTGKNLFAVAEYWKNDLGALENYLSKTNWTMSAFDVPLHYNLYQASNSSGNYDMRNLLNGTLVQRHPSHAVTFVDNHDTQPGEALESFVQGWFKPLAYATILTREQGYPQVFYGDYYGIPSHGVPSYRQQIDPLLAARQQYAYGTQHDYLDNQDVIGWTREGDSAHAGSGLATVMSDGPGGSKTMYVGTAHAGQVFKDITGNRTDTVTINSAGNGTFPCNKGSVSIWVKQ

SEQ ID NO: 33860 - protein, 482 aa, Bacillus sp.
HDGTNGTIMQYFEWNVPNDGQHWNRLHNNAQNLKNAGITAIWIPPAWKGTSQSDTGYGAYDLYDLGEFNQKGTVRTKYGTKAELERAIRSLKANGIQVYGDVVMNHKAGADFTERVQAVEVNPQNRNQEVSGTYQIEAWTGFNFPGRGNQHSSFKWRWYHFDGTDWDQSRQLSNRIYKFRGKAWDWEVDTEFGNYDYLMYADLDMDHPEVINELNRWGVWYANTLNLDGFRADAVKHIKFSFMRDWLGHVRGQTGKNLFAVAEYWKNDLGALENYLSKTNWTMSAFDVPLHYNLYQASNSSGNYDMRNLLNGTLVQRHPSHAVTFVDNHDTQPGEALESFVQGWFKPLAYATILTREQGYPQVFYGDYYGIPSHGVPSYRQQIDPLLAARQQYAYGTQHDYLDNQDVIGWTREGDSAHAGSGLATVMSDGPGGSKTMYVGTAHAGQVFKDITGNRTDTVTINSAGNGTFPCNKGSVSIWVKQ

SEQ ID NO: 33861 - protein, 482 aa, Bacillus sp.
HDGTNGTIMQYFEWNVPNDGQHWNRLHNNAQNLKNAGITAIWIPPAWKGTSQSDTGYGAYDLYDLGEFNQKGTVRTKYGTKAELERAIRSLKANGIQVYGDVVMNHKAGADFTERVRAVEVNPQNRNQEVSGTYQIEAWTGFNFPGRGNQHSSFKWRWYHFDGTDWDQSRQLSNRIYKFRGKAWDWEVDTEFGNYDYLMYADLDMDHPEVINELNRWGVWYANTLNLDGFRLDAVKHIKFSFMRDWLGHVRGQTGKNLFAVAEYWKNDLGALENYLSKTNWTMSAFDVPLHYNLYQASNSSGNYDMRNLLNGTLVQRHPSHAVTFVDNHDTQPGEALESFVQGWFKPLAYATILTREQGYPQVFYGDYYGIPSHGVPSYRQQIDPLLAARQQYAYGTQHDYLDNQDVIGWTREGDSAHAGSGLATVMSDGPGGSKTMYVGTAHAGQVFKDITGNRTDTVTINSAGNGTFPCNKGSVSIWVKQ

SEQ ID NO: 33862 - protein, 482 aa, Bacillus sp.
HDGTNGTIMQYFEWNVPNDGQHWNRLHNNAQNLKNAGITAIWIPPAWKGTSQSDTGYGAYDLYDLGEFNQKGTVRTKYGTKAELERAIRSLKANGIQVYGDVVMNHKAGADQTERVQAVEVNPQNRNQEVSGTYQIEAWTGFNFPGRGNQHSSFKWRWYHFDGTDWDQSRQLSNRIYKFRGKAWDWEVDTEFGNYDYLMYADLDMDHPEVINELNRWGVWYANTLNLDGFRLDAVKHIKFSFMRDWLGHVRGQTGKNLFAVAEYWKNDLGALENYLSKTNWTMSAFDVPLHYNLYQASNSSGNYDMRNLLNGTLVQRHPSHAVTFVDNHDTQPGEALESFVQGWFKPLAYATILTREQGYPQVFYGDYYGIPSDGVPSYRQQIDPLLAARQQYAYGTQHDYLDNQDVIGWTREGDSAHAGSGLATVMSDGPGGSKTMYVGQAHAGQVFKDITGNRTDTVTINSAGNGTFRCNKGSVSIWVKQ

SEQ ID NO: 33863 - protein, 482 aa, Bacillus sp.
HDGTNGTIMQYFEWNVPNDGQHWNRLHNNAQNLKNAGITAIWIPPAWKGTSQSDTGYGAYDLYDLGEFNQKGTVRTKYGTKAELERAIRSLKANGIQVYGDVVMNHKAGADFTERVQAVEVNPQNRNQEVSGTYQIEAWTGFNFPGRGNQHSSFKWRWYHFDGTDWDQSRQLSNRIYKFRGKAWDWEVDTEFGNYDYLMYADLDMDHPEVINELNRWGVWYANTLNLDGFRLDAVKHIKFSFMRDWLGHVRGQTGKNLFAVAEYWKNDLGALENYLSKTNWTMSAFDVPLHYNLYQASNSSGNYDMRNLLNGTLVQRHPSHAVTFVDNHDTQPGEALESFVQGWFKPLAYATILTREQGYPQVFYGDYYGIPSDGVPSYRQQIDPLLAARQQYAYGTQHDYLDNQDVIGWTREGDSAHAGSGLATVMSDGPGGSKTMYVGQAHAGQVFKDITGNRTDTVTINSAGNGTFPCNKGSVSIWVKQ

SEQ ID NO: 33864 - protein, 482 aa, Bacillus sp.
HDGTNGTIMQYFEWNVPNDGQHWNRLHNNAQNLKNAGITAIWIPPAWKGTSQSDTGYGAYDLYDLGEFNQKGTVRTKYGTKAELERAIRSLKANGIQVYGDVVMNHKAGADFTERVRAVEVNPQNRNQEVSGEYQIEAWTGFNFPGRGNQHSSFKWRWYHFDGTDWDQSRQLSNRIYKFRGKAWDWEVDTEFGNYDYLMYADLDMDHPEVINELNRWGVWYANTLNLDGFRLDAVKHIKFSFMRDWLGHVRGQTGKNLFAVAEYWKNDLGALENYLSKTNWTMSAFDVPLHYNLYQASNSSGNYDMRNLLNGTLVQRHPSHAVTFVDNHDTQPGEALESFVQGWFKPLAYATILTREQGYPQVFYGDYYGIPSHGVPSYRQQIDPLLAARQQYAYGTQHDYLDNQDVIGWTREGDSAHAGSGLATVMSDGPGGSKTMYVGTAHAGQVFKDITGNRTDTVTINSAGNGTFPCNKGSVSIWVKQ

SEQ ID NO: 33865 - protein, 482 aa, Bacillus sp.
HDGTNGTIMQYFEWNVPNDGQHWNRLHNNAQNLKNAGITAIWIPPAWKGTSQSDTGYGAYDLYDLGEFNQKGTVRTKYGTKAELERAIRSLKANGIQVYGDVVMNHKAGADFTERVQAVEVNPQNRNQEVSGTYQIEAWTGFNFPGRGNQHSSFKWRWYHFDGTDWDQSRQLSNRIYKFRGKAWDWEVDTEFGNYDYLMYADLDMDHPEVINELNRWGVWYANTLNLDGFRLDAVKHIKFSFMRDWLGHVRGQTGKNLFAVAEYWKNDLGALENYLSKTNWTMSAFDVPLHYNLYQASNSSGNYDMRNLLNGTLVQRHPSHAVTFVDNHDTQPGEALESFVQGWFKPLAYATILTREQGYPQVFYGDYYGIPTDGVPSYRQQIDPLLAARQQYAYGTQHDYLDNQDVIGWTREGDSAHAGSGLATVMSDGPGGSKTMYVGTAHAGQVFKDITGNRTDTVTINSAGNGTFPCNKGSVSIWVKQ

SEQ ID NO: 33866 - protein, 482 aa, Bacillus sp.
HDGTNGTIMQYFEWNVPNDGQHWNRLHNNAQNLKNAGITAIWIPPAWKGTSQSDTGYGAYDLYDLGEFNQKGTVRTKYGTKAELERAIRSLKANGIQVYGDVVMNHKAGADFTERVQAVEVNPQNRNQEVSGTYQIEAWTGFNFPGRGNQHSSFKWRWYHFDGTDWDQSRQLSNRIYKFRGKAWDWEVDTEFGNYDYLMYADLDMDHPEVINELNRWGVWYANTLNLDGFRLDAVKHIKFSFMRDWLGHVRNQTGKNLFAVAEYWKNDLGALENYLSKTNWTMSAFDVPLHYNLYQASNSSGNYDMRNLLNGTLVQRHPSHAVTFVDNHDTQPGEALESFVQGWFKPLAYATILTREQGYPQVFYGDYYGIPSDGVPSYRQQIDPLLAARQQYAYGTQHDYLDNQDVIGWTREGDSAHAGSGLATVMSDGPGGSKTMYVGTAHAGQVFKDITGNRTDTVTINSAGNGTFPCNKGSVSIWVKQ

SEQ ID NO: 33867 - protein, 482 aa, Bacillus sp.
HDGTNGTIMQYFEWNVPNDGQHWNRLHNNASNLKNAGITAIWIPPAWKGTSQSDTGYGAYDLYDLGEFNQKGTVRTKYGTKAELERAIRSLKANGIQVYGDVVMNHKAGADFTERVQAVEVNPQNRNQEVSGTYQIEAWTGFNFPGRGNQHSSFKWRWYHFDGTDWDQSRQLSNRIYKFRGKAWDWEVDTEFGNYDYLMYADLDMDHPEVINELNRWGVWYANTLNLDGFRLDAVKHIKFSFMRDWLGHVRGQTGKNLFAVAEYWKNDLGALENYLSKTNWTMSAFDVPLHYNLYQASNSSGNYDMRNLLNGTLVQRHPSHAVTFVDNHDTQPGEALESFVQGWFKPLAYATILTREQGYPQVFYGDYYGIPSDGVPSYRQLIDPLLAARQQYAYGTQHDYLDNQDVIGWTREGDSAHAGSGLATVMSDGPGGSKTMYVGTAHAGQVFKDITGNRTDTVTINSAGNGTFPCNKGSVSIWVKQ

SEQ ID NO: 33868 - protein, 482 aa, Bacillus sp.
HDGTNGTIMQYFEWNVPNDGQHWNRLHNNAQNLKNAGITAIWIPPAWKGTSQSDTGYGAYDLYDLGEFNQKGTVRTKYGTKAELESAIRSLKANGIQVYGDVVMNHKAGADFTERVQAVEVNPQNRNQEVSGTYQIEAWTGFNFPGRGNQHSSFKWRWYHFDGTDWDQSRQLSNRIYKFRGKAWDWEVDTEFGNYDYLMYADLDMDHPEVINELNRWGVWYANTLNLDGFRLDAVKHIKFSFMRDWLGHVRGQTGKNLFAVAEYWKNDLGALENYLSKTNWTMSAFDVPLHYNLYQASNSSGNYDMRNLLNGTLVQRHPSHAVTFVDNHDTQPGEALESFVQGWFKPLAYATILTREQGYPQVFYGDYYGIPSDGVPSYRQQIDPLLAARQQYAYGTQHDYLDNQDVIGWTREGDSAHAGSGLATVMSDGPGGSKTMYVGTAHAGQVFKDITGNRTDTVTINSAGNGTFPCNKGSVSIWVKQ

SEQ ID NO: 33869 - protein, 482 aa, Bacillus sp.
HDGTNGTIMQYFEWNVPNDGQHWNRLHNNAQNLKNAGITAIWIPPAWKGTSQSDTGYGAYDLYDLGEFNQKGTVRTKYGTKAELERAIRSLKANGIQVYGDVVMNHKAGADFTERVQAVEVNPQNRNQEVSGTYQIEAWTGFNFPGRGNQHSSFKWRWYHFDGTDWDQSRQLSNRIYKFRGKAWDWEVDTEFGNYDYLMYADLDMDHPEVINELNRWGVWYANTLNLDGFRLDAVKHIKFSFVRDWLGHVRGQTGKNLFAVAEYWKNDLGALENYLSKTNWTMSAFDVPLHYNLYQASNSSGNYDMRNLLNGTLVQRHPSHAVTFVDNHDTQPGEALESFVQGWFKPLAYATILTREQGYPQVFYGDYYGIPSHGVPSYRQQIDPLLAARQQYAYGTQHDYLDNQDVIGWTREGDSAHAGSGLATVMSDGPGGSKTMYVGTAHAGQVFKDITGNRTDTVTINSAGNGTFPCNKGSVSIWVKQ

SEQ ID NO: 33870 - protein, 482 aa, Bacillus sp.
HDGTNGTIMQYFEWNVPNDGQHWNRLHNNAQNLKNAGITAIWIPPAWKGTSQSDTGYGAYDLYDLGEFNQKGTVRTKYGTKAELERAIRSLKANGIQVYGDVVMNHKAGADFTERVQAVEVNPQNRNQEVSGTYQIEAWTGFNFPGRGNQHSSFKWRWYHFDGTDWDQSRQLSNRIYKFRGKAWDWEVDTEFGNYDYLMYADLDMDHPEVINELNRWGVWYANTLNLDGFRLDAVKHIKFSFMRDWLGHVRGQTGKNLFAVAEYWKNDLGALENYLSKTNWTMSAFDVPLHYNLYQASNSSGNYDMRNLLNGTLVQRHPSHAVTFVDNHDTQPGEALESFVQGWFKPLAYATILTREQGYPQVFYGDYYGIPSDGVPAYRQQIDPLLAARQQYAYGTQHDYLDNQDVIGWTREGDSAHAGSGLATVMSDGPGGSKTMYVGTAHAGQVFKDITGNRTDTVTINSAGNGTFPCNKGSVSIWVKQ

SEQ ID NO: 33871 - protein, 482 aa, Bacillus sp.
HDGTNGTIMQYFEWNVPNDGQHWNRLHNNAQNLKNAGITAIWIPPAWKGTSQSDTGYGAYDLYDLGEFNQKGTVRTKYGTKAELERAIRSLKANGIQVYGDVVMNHKAGADFTERVQAVEVNPQNRNQEVSGTYQIEAWTGFNFPGRGNQHSSFKWRWYHFDGTDWDQSRQLANRIYKFRGKAWDWEVDTEFGNYDYLMYADLDMDHPEVINELNRWGVWYANTLNLDGFRLDAVKHIKFSFMRDWLGHVRGQTGKNLFAVAEYWKNDLGALENYLSKTNWTMSAFDVPLHYNLYQASNSSGNYDMRNLLNGTLVQRHPSHAVTFVDNHDTQPGEALESFVQGWFKPLAYATILTREQGYPQVFYGDYYGIPSDGVPSYRQQIDPLLKARQQYAYGTQHDYLDNQDVIGWTREGDSAHAGSGLATVMSDGPGGSKTMYVGTAHAGQVFKDITGNRTDTVTINSAGNGTFPCNGGSVSIWVKQ

SEQ ID NO: 33872 - protein, 482 aa, Bacillus sp.
HDGTNGTIMQYFEWNVPNDGQHWNRLHNNAQNLKNAGITAIWIPPAWKGTSQSDTGYGAYDLYDLGEFNQKGTVRTKYGTKAELERAIRSLKANGIQVYGDVVMNHKAGADFTERVRAVEVNPQNRNQEVSGEYQIEAWTGFNFPGRGNQHSSFKWRWYHFDGTDWDQSRQLSNRIYKFRGKAWDWEVDTEFGNYDYLMYADLDMDHPEVINELNRWGVWYANTLNLDGFRLDAVKHIKFSFMRDWLGHVRAQTGKNLFAVAEYWKNDLGALENYLSKTNWTMSAFDVPLHYNLYQASNSSGNYDMRNLLNGTLVQRHPSHAVTFVDNHDTQPGEALESFVQGWFKPLAYATILTREQGYPQVFYGDYYGIPSHGVPSYRQQIDPLLAARQQYAYGTQHDYLDNQDVIGWTREGDSAHAGSGLATVMSDGPGGSKTMYVGTAHAGQVFKDITGNRTDTVTINSAGNGTFPCNKGSVSIWVKQ

SEQ ID NO: 33873 - protein, 481 aa, Bacillus sp.
HDGTNGTLMQYFEWNVPNDGQHWNRLHNNAQNLKNAGITAIWIPPAWKGTSQSDTGYGAYDLYDLGEFNQKGTVRTKYGTKAELERAIRSLKANGIQVYGDVVMNHKAGADFTERVQAVEVNPSNRNQETSGTYQIEAWTGFNFPGRGNQHSSFKWRWYHFDGTDWDQSRQLNRIYKFRGKAWDWEVDTENGNYDYLMYADLDMDHPEVINELNRWGVWYANTLNLDGFRLDAVKHIKFSFMRDWLGHVRGQTGKNLFAVAEFWKNDLGALENYLSKTNWTMSAHDVPLHYNLYQASNSSGNYDMRNLLNGTLVQRHPSHAVTFVDNHDTQPGEALESFVQGWFKPLAYATILTREEGYPQVFYGDYYGIPSDGVPSYRQQIDPLLAARQQYAYGTQHDYLDNQDVIGWTREGDSAHAGSGLATVMSDGPGGSKTMYVGTAHAGQVFKDITGNRTDTVTINSAGNGTFPCNKGSVSIWVKQ

SEQ ID NO: 33874 - protein, 481 aa, Bacillus sp.
HDGTNGTIMQYFEWNVPNDGQHWNRLHNNAQNLKNAGITAIWIPPAWKGTSQNDVGYGAYDLYDLGEFNQKGTVRTKYGTKAELERAIRSLKANGIQVYGDVVMNHKAGADFTERVQAVEVNPQNRNQEVSGTYQIEAWTGFNFPGRGNQHSSFKWRWYHFDGTDWDESRKLNRIYKFRGKAWDWEVDTEFGNYDYLMYADLDMDHPEVINELNRWGVWYANTLNLDGFRLDAVKHIKFSFMRDWLGHVRGQTGKNLFAVAEYWKNDLGALENYLSKTNWTMSAFDVPLHYNLYQASNSSGNYDMRNLLNGTLVQRHPSHAVTFVDNHDTQPGEALESFVQGWFKPLAYATILTREQGYPQVFYGDYYGIPSDGVPSYRQQIDPLLAARQQYAYGTQHDYLDNQDVIGWTREGDSAHAGSGLATVMSDGPGGSKTMYVGTAHAGQVFKDITGNRTDTVTINSAGNGTFPCNKGSVSIWVKQ

SEQ ID NO: 33875 - protein, 481 aa, Bacillus sp.
HDGTNGTIMQYFEWNVPNDGQHWNRLHNNAQNLKNAGITAIWIPPAWKGTSQSDTGYGAYDLYDLGEFNQKGTVRTKYGTKAELERAIRSLKANGIQVYGDVVMNHKAGADFTERVQAVEVNPQNRNQEVSGTYQIEAWTGFNFPGRGNQHSSFKWRWYHFDGTDWDQSRQLNRIYKFRGKAWDWEVDTEFGNYDYLMYADLDMDHPEVINELNRWGVWYANTLNLDGFRLDAVKHIKFSFMRDWLGHVRGQTGKNLFAVAEYWKNDLGALENYLSKTNWTMSAFDVPLHYNLYQASNSSGNYDMRNLLNGTLVQRHPSHAVTFVDNHDTQPGEALESFVQGWFKPLAYATILTREQGYPQVFYGDYYGIPSDGVPSYRQQIDPLLAARQQYAYGTQHDYLDNQDVIGWTREGDSAHAGSGLATVMSDGPGGSKTMYVGTAHAGQVFKDITGNRTDTVTINSAGNGTFPCNKGSVSIWVKQ

SEQ ID NO: 33876 - protein, 481 aa, Bacillus licheniformis
VNGTLMQYFEWYTPNDGQHWKRLQNDAEHLSDIGITAVWIPPAYKAISQADVGYGAYDLYDLGEFHQKGTVRTKYGTKGELQSAIKSLHSRDINVYGDVVIDHKAGADETEVFKVIEVDPNDRTKEISEPFEIEGWTKFTFPGRGDTYSSFKWNSEHFNGVDFDAKGERTGVFRIAGKAWNWEVDTEFGNYDYLMFANIDYNHPDVVAEIKRWGTWYANELQLDGFRLDAVKHIKFSFLRDWVNHVREKTGKEMFTVAEYWSNDLGALENYLNKTNFNHSVFDVPLHYQFHAASTQGGGYDMRKLLNGTVVSKHPLKSVTFVDNHDTQPGQSLESTVQTWFKPLAYAFILTRESGYPQVFYGDMYGTKGDSQREIPALKHKIEPILKARKQYAYGAQHDYFDHHDIVGWTREGDSSVANSGLAALITDGPGGAKRMYVGRQNAGETWHDITGNRSEPVVINSEGWGEFHVNGGSVSIYVQR

SEQ ID NO: 33877 - protein, 480 aa, Bacillus sp.
HDGTNGTIMQYFEWNVPNDGQHWNRLHNNAQNLKNAGITAIWIPPAWKGTSQSDTGYGAYDLYDLGEFNQKGTVRTKYGTKAELERAIRSLKANGIQVYGDVVMNHKAGADFTERVQAVEVNPQNRNQEVSGTYQIEAWTGFNFPGRGNQHSSFKWRWYHFDGTDWDQSRQLSNRIYKFRGKAWDWEVDTEFGNYDYLMYADLDMDHPEVINELNRWGVWYANTLNLDGFRLDAVKHIKFSFMRDWLGHVRGQTGKNLFAVAEYWKNDLGALENYLSKTNWTMSAFDVPLHYNLYQASNSSGNYDMRNLLNGTLVQRHPSHAVTFVDNHDTQPGEALESFVQGWFKPLAYATILTREQGYPQVFYGDYYGIPSDGVPSYRQQIDPLLAARQQYAYGTQHDYLDNQDVIGWTREGDSAHAGSGLATVMSDGPGGSKTMYVGTAHAGQVFKDITGNRTDTVTINSAGNGTFPCNKGSVSIWV

SEQ ID NO: 33878 - protein, 482 aa, Synthetic construct
GTNGTLMQYFEWYLPNDGNHWNRLNSDASNLASKGITAVWIPPAYKGTSQADVGYGAYDLYDLGEFNQKGTVRTKYGTRSQLQAAVTSLKNNGIQVYGDVVINHKAGADATEMVQAVEVNPNNRNQEVTGEYTIEAYTRFDFPGRGNTHSSFKWRWYHFDGVDWDQSRSLNNRIYKFQGHGKAWPWEVDTENGNYDYLMYLDIDMDHPIVVNELRNWGVWYTNTLGLDGLRIDAVKHFKYLFTRDWINHVRSATGKNMFAVYEFWKNDLGAIENNFQKTNWNHSVFDVPLHYNAYNTSKSGGNYDMRNIFNGTVKQRHPSHAVTFVDNTDSQPSEALESQPEEWFKPLAYALTLTREQGYPSVFYGDYYGIPTIGVLAMRSKIDPILEARQKYAYGPQHDYLDHIDVIGWTREGDSSHPKSGLATLITDGPGGSKRMYAGLKNAGETWYDITGNRSDTVKIGSDGWGEFHKNDGSVSIYVQK

SEQ ID NO: 33879 - protein, 485 aa, Bacillus sp.
HHDGTNGTIMQYFEWNVPNDGQHWNRLHNNAQNLKNAGITAIWIPPAWKGTSQNDVGYGAYDLYDLGEFNQKGTVRTKYGTKAELERAIRSLKANGIQVYGDVVMNHKGGADFTERVQAVEVNPQNRNQEVSGTYQIEAWTGFNFPGRGNQHSSFKWRWYHFDGTDWDQSRQLANRIYKFRGDGKAWDWEVDTENGNYDYLMYADVDMDHPEVINELNRWGVWYANTLNLDGFRLDAVKHIKFSFMRDWLGHVRGQTGKNLFAVAEYWKNDLGALENYLSKTNWTMSAFDVPLHYNLYQASNSSGNYDMRNLLNGTLVQRHPSHAVTFVDNHDTQPGEALESFVQGWFKPLAYATILTREQGYPQVFYGDYYGIPSDGVPSYRQQIDPLLKARQQYAYGPQHDYLDHPDVIGWTREGDSSHPKSGLATLITDGPGGSKRMYAGLKNAGETWYDITGNRSDTVKIGSDGWGEFHVSDGSVSIYVQK

SEQ ID NO: 33880 - protein, 483 aa, Bacillus sp.
HHDGTNGTIMQYFEWNVPNDGQHWNRLHNNAQNLKNAGITAIWIPPAWKGTSQSDTGYGAYDLYDLGEFNQKGTVRTKYGTKAELERAIRSLKANGIQVYGDVVMNHKAGADFTERVQAVEVNPQNRNQEVSGTYQIEAWTGFNFPGRGNQHSSFKWRWYHFDGTDWDQSRQLSNRIYKFRGKAWDWEVDTEFGNYDYLMYADLDMDHPEVINELNRWGVWYANTLNLDGFRLDAVKHIKFSFMRDWLGHVRGQTGKNLFAVAEYWKNDLGALENYLSKTNWTMSAFDVPLHYNLYQASNSSGNYDMRNLLNGTLVQRHPSHAVTFVDNHDTQPGEALESFVQGWFKPLAYATILTREQGYPQVFYGDYYGIPSDGVPSYRQQIDPLLAARQQYAYGTQHDYLDNQDVIGWTREGDSAHAGSGLATVMSDGPGGSKTMYVGTAHAGQVFKDITGNRTDTVTINSAGNGTFPCNKGSVSIWVKQ

SEQ ID NO: 33881 - protein, 483 aa, Synthetic construct
HHDGTNGTIMQYFEWNVPNDGQHWNRLHNNAQNLKNAGITAIWIPPAWKGTSQNDVGYGAYDLYDLGEFNQKGTVRTKYGTKAELERAIRSLKANGIQVYGDVVMNHKGGADFTERVQAVEVNPQNRNQEVSGTYQIEAWTGFNFPGRANQHSSFKWRWYHFDGTDWDQSRQLANRIYKFRTKAWDWEVDTEFGNYDYLLYADLDMDHPEVINELNRWGVWYANTLNLDGFRLDAVKHIKFSFMRDWLGHVRGQIGKNLFAVAEYWKNDLGALENYLSKTNWTMSAFDVPLHFNLYYASNSSGNYDMRNLLNGTLVQRHPSHAVTFVDNHDTQPGESLESFVRGWFKPLAYATILTREQGYPQVFYGDYYGIPSDGVPSYRQQIDPLLKARQQYAYGTQHDYLDNQDVIGWTREGDSAHAGSGLATVMSDGPGGSKTMYVGTAHAGQVFKDITGNKTDTVTINSAGNGTFPCNGGSVSIWVKQ

SEQ ID NO: 33882 - protein, 483 aa, Bacillus sp.
HHDGTNGTIMQYFEWNVPNDGQHWNRLHNNAQNLKNAGITAIWIPPAWKGTSQSDTGYGAYDLYDLGEFNQKGTVRTKYGTKAELERAIRSLKANGIQVYGDVVMNHKAGADFTERVQAVEVNPQNRNQEVSGTYQIEAWTGFNFPGRGNQHSSFKWRWYHFDGTDWDQSRQLANRIYKFRGKAWDWEVDTEFGNYDYLMYADLDMDHPEVINELNRWGVWYANTLNLDGFRLDAVKHIKFSFMRDWLGHVRGQTGKNLFAVAEYWKNDLGALENYLSKTNWTMSAFDVPLHYNLYQASNSSGNYDMRNLLNGTLVQRHPSHAVTFVDNHDTQPGEALESFVQGWFKPLAYATILTREQGYPQVFYGDYYGIPSDGVPSYRQQIDPLLTARQQYAYGTQHDYLDNQDVIGWTREGDSAHAGSGLATVMSDGPGGSKTMYVGTAHAGQVFKDITGNRTDTVTINSAGNGTFPCNKGSVSIWVKQ

SEQ ID NO: 33883 - protein, 483 aa, Synthetic construct
HHDGTNGTIMQYFEWNVPNDGQHWNRLHNNAQNLKNAGITAIWIPPAWKGTSQNDVGYGAYDLYDLGEFNQKGTVRTKYGTKAELERAIRSLKANGIQVYGDVVMNHKGGADFTERVQAVEVNPQNRNQEVSGTYQIEAWTGFNFPGRANQHSSFKWRWYHFDGTDWDQSRQLANRIYKFRTKAWDWEVDTENGNYDYLLYADLDMDHPEVINELNRWGVWYANTLNLDGFRLDAVKHIKFSFMRDWLGHVRGQIGKNLFAVAEYWKNDLGALENYLSKTNWTMSAFDVPLHFNLYYASNSSGNYDMRNLLNGTLVQRHPSHAVTFVDNHDTQPGESLESFVRGWFKPLAYATILTREQGYPQVFYGDYYGIPSDGVPSYRQQIDPLLKARQQYAYGTQHDYLDNQDVIGWTREGDSAHAGSGLATVMSDGPGGSKTMYVGTAHAGQVFKDITGNRTDTVTINSAGNGTFPCNGGSVSIWVKQ

SEQ ID NO: 33884 - protein, 485 aa, Bacillus sp.
HHDGTNGTIMQYFEWNVPNDGQHWNRLHNNAQNLKNAGITAIWIPPAWKGTSQNDVGYGAYDLYDLGEFNQKGTVRTKYGTKAELERAIRSLKANGIQVYGDVVMNHKGGADFTERVQAVEVNPQNRNQEVSGTYEIEAWTGFNFPGRGNQHSSFKWRWYHFDGTDWDQSRQLSNRIYKFRGDGKAWDWEVDTENGNYDYLMYADVDMDHPEVINELNRWGVWYANTLNLDGFRLDAVKHIQFSFMRNWLGHVRGQTGKNLFAVAEYWKNDLGALENYLSKTNWTMSAFDVPLHYNLYQASNSGGNYDMRNLLNGTLVQRHPSHAVTFVDNHDTQPGEALESFVQGWFKPLAYATILTREQGYPQVFYGDYYGIPSDGVPSYRQQIDPLLKARQKYAYGPQHDYLDHPDVIGWTREGDSSHPKSGLATLITDGPGGSKRMYAGLKNAGETWYDITGNRSDTVKIGSDGWGEFHVNDGSVSIYVQK

SEQ ID NO: 33885 - protein, 482 aa, Bacillus sp.
HDGTNGTIMQYFEWNVPNDGQHWNRLHNNAQNLKNAGITAIWIPPAWKGTSQSDTGYGAYDLYDLGEFNQKGTVRTKYGTKAELERAIRSLKANGIQVYGDVVMNHKAGADFTESVQAVEVNPQNRNQEVSGTYQIEAWTGFNFPGRGNQHSSFKWRWYHFDGTDWDQSRQLSNRIYKFRGKAWDWEVDTEFGNYDYLMYADLDMDHPEVINELNRWGVWYANTLNLDGFRLDAVKHIKFSFMRDWLGHVRGQTGKNLFAVAEYWKNDLGALENYLSKTNWTMSAFDVPLHYNLYQASNSSGNYDMRNLLNGTLVQRHPSHAVTFVDNHDTQPGEALESFVQGWFKPLAYATILTREQGYPQVFYGDYYGIPSDGVPSYRQQIDPLLAARQQYAYGTQHDYLDNQDVIGWTREGDSAHAGSGLATVMSDGPGGSKTMYVGTAHAGQVFKDITGNRTDTVTINSAGNGTFPCNKGSVSIWVKQ

SEQ ID NO: 33886 - protein, 482 aa, Synthetic construct
HDGTNGTIMQYFEWNVPNDGQHWNRLHNNAQNLKNAGITAIWIPPAWKGTSQSDTGYGAYDLYDLGEFNQKGTVRTKYGTKAELERAIRSLKANGIQVYGDVVMNHKAGADFTEHVQAVEVNPQNRNQEVSGTYQIEAWTGFNFPGRGNQHSSFKWRWYHFDGTDWDQSRQLSNRIYKFRGKAWDWEVDTEFGNYDYLMYADLDMDHPEVINELNRWGVWYANTLNLDGFRLDAVKHIKFSFMRDWLGHVRGQTGKNLFAVAEYWKNDLGALENYLSKTNWTMSAFDVPLHYNLYQASNSSGNYDMRNLLNGTLVQRHPSHAVTFVDNHDTQPGEALESFVQGWFKPLAYATILTREQGYPQVFYGDYYGIPSDGVPSYRQQIDPLLAARQQYAYGTQHDYLDNQDVIGWTREGDSAHAGSGLATVMSDGPGGSKTMYVGTAHAGQVFKDITGNRTDTVTINSAGNGTFPCNKGSVSIWVKQ

SEQ ID NO: 33887 - protein, 482 aa, Bacillus sp.
HDGTNGTIMQYFEWNVPNDGQHWNRLHNNAQNLKNAGITAIWIPPAWKGTSQSDTGYGAYDLYDLGEFNQKGTVRTKYGTKAELERAIRSLKANGIQVYGDVVMNHKAGADFTERVQAVEVNPQNRNQEVSGTYQIEAWTGFNFPGRGNQHSSFKWRWYHFDGTDWDQSRQLSNRIYKFRGKAWDWEVDTEFGNYDYLMYADLDMDHPEVINELNRWGVWYANTLNLDGFRVDAVKHIKFSFMRDWLGHVRGQTGKNLFAVAEYWKNDLGALENYLSKTNWTMSAFDVPLHYNLYQASNSSGNYDMRNLLNGTLVQRHPSHAVTFVDNHDTQPGEALESFVQGWFKPLAYATILTREQGYPQVFYGDYYGIPSDGVPSYRQQIDPLLAARQQYAYGTQHDYLDNQDVIGWTREGDSAHAGSGLATVMSDGPGGSKTMYVGTAHAGQVFKDITGNRTDTVTINSAGNGTFPCNKGSVSIWVKQ

SEQ ID NO: 33888 - protein, 482 aa, Bacillus sp.
HDGTNGTIMQYFEWNVPNDGQHWNRLHNNAQNLKNAGITAIWIPPAWKGTSQSDTGYGAYDLYDLGEFNQKGTVRTKYGTKAELERAIRSLKANGIQVYGDVVMNHKAGADFTERVQAVEVNPQNRNQEVSGTYQIEAWTGFNFPGRGNQHSSFKWRWYHFDGTDWDQSRQLSNRIYKFRGKAWDWEVDTEFGNYDYLMYSDLDMDHPEVINELNRWGVWYANTLNLDGFRLDAVKHIKFSFMRDWLGHVRGQTGKNLFAVAEYWKNDLGALENYLSKTNWTMSAFDVPLHYNLYQASNSSGNYDMRNLLNGTLVQRHPSHAVTFVDNHDTQPGEALESFVQGWFKPLAYATILTREQGYPQVFYGDYYGIPSHGVPSYRQQIDPLLAARQQYAYGTQHDYLDNQDVIGWTREGDSAHAGSGLATVMSDGPGGSKTMYVGTAHAGQVFKDITGNRTDTVTINSAGNGTFPCNKGSVSIWVKQ

SEQ ID NO: 33889 - protein, 482 aa, Bacillus sp.
HDGTNGTIMQYFEWNVPNDGQHWNRLHNNAQNLKNAGITAIWIPPAWKGTSQSDTGYGAYDLYDLGEFNQKGTVRTKYGTKAELERAIRSLKANGIQVYGDVVMNHKAGADFTERVQAVEVNPQNRNQEVSGTYQIEAWTGFNFPGRGNQHSSFKWRWYHFDGTDWDQSRQLSNRIYKFRGKAWDWEVDTEFGNYDYLMYADLDMDHPEVINELNRWGVWYANTLNLDGFRLDAVKHIKFSFMRDWLGHVRGQTGKNLFAVAEYWKNDLGALENYLSKTNWLMSAFDVPLHYNLYQASNSSGNYDMRNLLNGTLVQRHPSHAVTFVDNHDTQPGEALESFVQGWFKPLAYATILTREQGYPQVFYGDYYGIPSDGVPSYRQQIDPLLAARQQYAYGTQHDYLDNQDVIGWTREGDSAHAGSGLATVMSDGPGGSKTMYVGTAHAGQVFKDITGNRTDTVTINSAGNGTFPCNKGSVSIWVKQ

SEQ ID NO: 33890 - protein, 482 aa, Bacillus sp.
HDGTNGTIMQYFEWNVPNDGQHWNRLHNNAQNLKNAGITAIWIPPAWKGTSQSDTGYGAYDLYDLGEFNQKGTVRTKYGTKAELERAIRSLKANGIQVYGDVVMNHKAGADFTERVQAVEVNPQNRNQEVSGTYQIEAWTGFNFPGRGNQHSSFKWRWYHFDGTDWDQSRQLSNRIYKFRGKAWDWEVDTEFGNYDYLMYADLDMDHPEVINELNRWGVWYANTLNLDGFRLDAVKHIKFSFMRDWLGHVRGQTGKNLFAVAEYWKNDLGALENYLSKTNWTMSAFDVPLHYNLYQASNSSGNYDMRNLLNGTLVQRHPSHAVTFVDNHDTQPGEALESFVQGWFKPLAYATILTREQGYPQVFYGDYYGIPSDGVPSYRQQIDPLLAARQPYAYGTQHDYLDNQDVIGWTREGDSAHAGSGLATVMSDGPGGSKTMYVGTAHAGQVFKDITGNRTDTVTINSAGNGTFPCNKGSVSIWVKQ

SEQ ID NO: 33891 - protein, 482 aa, Bacillus sp.
HDGTNGTIMQYFEWNVPNDGQHWNRLHNNAQNLKNAGITAIWIPPAWKGTSQSDTGYGAYDLYDLGEFNQKGTVRTKYGTKAELERAIRSLKANGIQVYGDVVMNHKAGADFTELVQAVEVNPQNRNQEVSGTYQIEAWTGFNFPGRGNQHSSFKWRWYHFDGTDWDQSRQLSNRIYKFRGKAWDWEVDTEFGNYDYLMYADLDMDHPEVINELNRWGVWYANTLNLDGFRLDAVKHIKFSFMRDWLGHVRGQTGKNLFAVAEYWKNDLGALENYLSKTNWTMSAFDVPLHYNLYQASNSSGNYDMRNLLNGTLVQRHPSHAVTFVDNHDTQPGEALESFVQGWFKPLAYATILTREQGYPQVFYGDYYGIPSDGVPSYRQQIDPLLAARQQYAYGTQHDYLDNQDVIGWTREGDSAHAGSGLATVMSDGPGGSKTMYVGTAHAGQVFKDITGNRTDTVTINSAGNGTFPCNKGSVSIWVKQ

SEQ ID NO: 33892 - protein, 482 aa, Bacillus sp.
HDGTNGTIMQYFEWNVPNDGQHWNRLHNNAQNLKNAGITAIWIPPAWKGTSQSDTGYGAYDLYDLGEFNQKGTVRTKYGTKAELERAIRSLKANGIQVYGDVVMNHKAGADFTERVQAVEVNPQNRNQEVSGTYQIEAWTGFNFPGRGNQHSSFKWRWYHFDGTDWDQSRQLSNRIYKFRGKAWDWEVDTEFGNYDYLMYADLDMDHPEVINELNRWGVWYANTLNLDGFRLDAVKHIKFSFMRDWLGHVRGQTGKNLFAVAEYWKNDLGALENYLSKTNWTMSAFDVPLHYNLYQASNSSGNYDMRNLLNGTLVQRHPSHAVTFVDNHDTQPGEALESFVQGWFKPLAYATILTREQGYPQVFYGDYYGIPSDGVPSYRQQIDPLLAARQQYAYGTQHDYLDNQDVIGWTREGDSAHAGSGLATVMSDGPGGSKTMYVGTAHAGQVFKDITGNRTDTVTINSAGNGTFRCNKGSVSIWVKQ

SEQ ID NO: 33893 - protein, 482 aa, Bacillus sp.
HDGTNGTIMQYFEWNVPNDGQHWNRLHNNAQNLKNAGITAIWIPPAWKGTSQSDTGYGAYDLYDLGEFNQKGTVRTKYGTKAELERAIRSLKANGIQVYGDVVMNHKAGADFTERVNAVEVNPQNRNQEVSGTYQIEAWTGFNFPGRGNQHSSFKWRWYHFDGTDWDQSRQLSNRIYKFRGKAWDWEVDTEFGNYDYLMYADLDMDHPEVINELNRWGVWYANTLNLDGFRLDAVKHIKFSFMRDWLGHVRGQTGKNLFAVAEYWKNDLGALENYLSKTNWTMSAFDVPLHYNLYQASNSSGNYDMRNLLNGTLVQRHPSHAVTFVDNHDTQPGEALESFVQGWFKPLAYATILTREQGYPQVFYGDYYGIPSDGVPSYRQQIDPLLAARQQYAYGTQHDYLDNQDVIGWTREGDSAHAGSGLATVMSDGPGGSKTMYVGTAHAGQVFKDITGNRTDTVTINSAGNGTFPCNKGSVSIWVKQ

SEQ ID NO: 33894 - protein, 482 aa, Bacillus sp.
HDGTNGTIMQYFEWNVPNDGQHWNRLHNNAQNLKNAGITAIWIPPAWKGTSQSDTGYGAYDLYDLGEFNQKGTVRTKYGTKAELERAIRSLKANGIQVYGDVVMNHKAGADQTERVQAVEVNPQNRNQEVSGTYQIEAWTGFNFPGRGNQHSSFKWRWYHFDGTDWDQSRQLSNRIYKFRGKAWDWEVDTEFGNYDYLMYADLDMDHPEVINELNRWGVWYANTLNLDGFRLDAVKHIKFSFMRDWLGHVRGQTGKNLFAVAEYWKNDLGALENYLSKTNWTMSAFDVPLHYNLYQASNSSGNYDMRNLLNGTLVQRHPSHAVTFVDNHDTQPGEALESFVQGWFKPLAYATILTREQGYPQVFYGDYYGIPSDGVPSYRQQIDPLLAARQQYAYGTQHDYLDNQDVIGWTREGDSAHAGSGLATVMSDGPGGSKTMYVGTAHAGQVFKDITGNRTDTVTINSAGNGTFPCNKGSVSIWVKQ

SEQ ID NO: 33895 - protein, 482 aa, Bacillus sp.
HDGTNGTIMQYFEWNVPNDGQHWNRLNNNAQNLKNAGITAIWIPPAWKGTSQSDTGYGAYDLYDLGEFNQKGTVRTKYGTKAELERAIRSLKANGIQVYGDVVMNHKAGADFTERVQAVEVNPQNRNQEVSGTYQIEAWTGFNFPGRGNQHSSFKWRWYHFDGTDWDQSRQLSNRIYKFRGKAWDWEVDTEFGNYDYLMYADLDMDHPEVINELNRWGVWYANTLNLDGFRLDAVKHIKFSFMRDWLGHVRGQTGKNLFAVAEYWKNDLGALENYLSKTNWTMSAFDVPLHYNLYQASNSSGNYDMRNLLNGTLVQRHPSHAVTFVDNHDTQPGEALESFVQGWFKPLAYATILTREQGYPQVFYGDYYGIPSDGVPSYRQQIDPLLAARQQYAYGTQHDYLDNQDVIGWTREGDSAHAGSGLATVMSDGPGGSKTMYVGTAHAGQVFKDITGNRTDTVTINSAGNGTFPCNKGSVSIWVKQ

SEQ ID NO: 33896 - protein, 482 aa, Bacillus sp.
HDGTNGTIMQYFEWNVPNDGQHWNRLHNNAQNLKNAGITAIWIPPAWKGTSQSDTGYGAYDLYDLGEFNQKGTVRTKYGTKAELERAIRSLKANGIQVYGDVVVNHKAGADFTERVQAVEVNPQNRNQEVSGTYQIEAWTGFNFPGRGNQHSSFKWRWYHFDGTDWDQSRQLSNRIYKFRGKAWDWEVDTEFGNYDYLMYADLDMDHPEVINELNRWGVWYANTLNLDGFRLDAVKHIKFSFMRDWLGHVRGQTGKNLFAVAEYWKNDLGALENYLSKTNWTMSAFDVPLHYNLYQASNSSGNYDMRNLLNGTLVQRHPSHAVTFVDNHDTQPGEALESFVQGWFKPLAYATILTREQGYPQVFYGDYYGIPSHGVPSYRQQIDPLLAARQQYAYGTQHDYLDNQDVIGWTREGDSAHAGSGLATVMSDGPGGSKTMYVGTAHAGQVFKDITGNRTDTVTINSAGNGTFPCNKGSVSIWVKQ

SEQ ID NO: 33897 - protein, 482 aa, Bacillus sp.
HDGTNGTIMQYFEWNVPNDGQHWNRLHNNAQNLKNAGITAIWIPPAWKGTSQSDTGYGAYDLYDLGEFNQKGTVRTKYGTKAELERAIRSLKANGIQVYGDVVMNHKAGADFTERVQAVEVNPQNRNQEVSGTYQIEAWTGFNFPGRGNQHSSFKWRWYHFDGTDWDQSRQLSNRIYKFRGKAWDWEVDTEFGNYDYLMYADLDMDHPEVINELNRWGVWYANTLNLDGFRLDAVKHIKFSFMRDWFGHVRGQTGKNLFAVAEYWKNDLGALENYLSKTNWTMSAFDVPLHYNLYQASNSSGNYDMRNLLNGTLVQRHPSHAVTFVDNHDTQPGEALESFVQGWFKPLAYATILTREQGYPQVFYGDYYGIPSHGVPSYRQQIDPLLAARQQYAYGTQHDYLDNQDVIGWTREGDSAHAGSGLATVMSDGPGGSKTMYVGTAHAGQVFKDITGNRTDTVTINSAGNGTFPCNKGSVSIWVKQ

SEQ ID NO: 33898 - protein, 482 aa, Bacillus sp.
HDGTNGTIMQYFEWNVPNDGQHWNRLHNNAQNLKNAGITAIWIPPAWKGTSQSDTGYGAYDLYDLGEFNQKGTVRTKYGTKAELERAIRSLKANGIQVYGDVVMNHKAGADFTERVQAVEVNPQNRNQEVSGTYQIEAWTGFNFPGRGNQHSSFKWRWYHFDGTDWDQSRQLSNRIYKFRGKAWDWEVDTEFGNYDYLMYADLDMDHPEVINELNRWGVWYANTLNLDGFRLDAVKHIKFSFMRDWLGHVRGQTGKNLFAVAEYWKNDLGALENYLSKTNWTMSAFDVPLHYNLYQASNSSGNYDMRNLLNGTLVQRHPSHAVTFVDNHDTQPGEALESFVQGWFKPLAYATILTREQGYPQVFYGDYYGIPHDGVPSYRQQIDPLLAARQQYAYGTQHDYLDNQDVIGWTREGDSAHAGSGLATVMSDGPGGSKTMYVGTAHAGQVFKDITGNRTDTVTINSAGNGTFPCNKGSVSIWVKQ

SEQ ID NO: 33899 - protein, 482 aa, Bacillus sp.
HDGTNGTIMQYFEWNVPNDGQHWNRLHNNAQNLKNAGITAIWIPPAWKGTSQSDTGYGAYDLYDLGEFNQKGTVRTKYGTKAELERAIRSLKANGIQVYGDVVMNHKAGADQTERVQAVEVNPQNRNQEVSGTYQIEAWTGFNFPGRGNQHSSFKWRWYHFDGTDWDQSRRVSNRIYKFRGKAWDWEVDTEFGNYDYLMYADLDMDHPEVINELNRWGVWYANTLNLDGFRLDAVKHIKFSFMRDWLGHVRGQTGKNLFAVAEYWKNDLGALENYLSKTNWTMSAFDVPLHYNLYQASNSSGNYDMRNLLNGTLVQRHPSHAVTFVDNHDTQPGEALESFVQGWFKPLAYATILTREQGYPQVFYGDYYGIPSDGVPSYRQQIDPLLAARQQYAYGTQHDYLDNQDVIGWTREGDSAHAGSGLATVMSDGPGGSKTMYVGQAHAGQVFKDITGNRTDTVTINSAGNGTFPCNKGSVSIWVKQ

SEQ ID NO: 33900 - protein, 482 aa, Bacillus sp.
HDGTNGTIMQYFEWNVPNDGQHWNRLHNNAQNLKNAGITAIWIPPAWKGTSQSDTGYGAYDLYDLGEFNQKGTVRTKYGTKAELERAIRSLKANGIQVYGDVVMNHKAGADFTERVKAVEVNPQNRNQEVSGTYQIEAWTGFNFPGRGNQHSSFKWRWYHFDGTDWDQSRQLSNRIYKFRGKAWDWEVDTEFGNYDYLMYADLDMDHPEVINELNRWGVWYANTLNLDGFRLDAVKHIKFSFMRDWLGHVRGQTGKNLFAVAEYWKNDLGALENYLSKTNWTMSAFDVPLHYNLYQASNSSGNYDMRNLLNGTLVQRHPSHAVTFVDNHDTQPGEALESFVQGWFKPLAYATILTREQGYPQVFYGDYYGIPSDGVPSYRQQIDPLLAARQQYAYGTQHDYLDNQDVIGWTREGDSAHAGSGLATVMSDGPGGSKTMYVGTAHAGQVFKDITGNRTDTVTINSAGNGTFPCNKGSVSIWVKQ

SEQ ID NO: 33901 - protein, 482 aa, Bacillus sp.
HDGTNGTIMQYFEWNVPNDGQHWNRLHNNAQNLKNAGITAIWIPPAWKGTSQSDTGYGAYDLYDLGEFNQKGTVRTKYGTKAELERAIRSLKANGIQVYGDVVMNHKAGADFTERVQAVEVNPQNRNQEVSGTYQIEAWTGFNFPGRGNQHSSFKWRWYHFDGTDWDQSRQLSNRIYKFRGKAWDWEVDTEFGNYDYLMYADLDMDHPEVINELNRWGVWYANTLNLDGFRLDAVKHIKFSFMRDWLGHVRGQTGKNLFAVAEYWKNDLGALENYLSKTNWTMSAFDVPLHYNLYQASNSSGNYDMRNLLNGTLVQRHPSHAVTFVDNHDTQPGEALESFVQGWFKPLAYATILTREQGYPQVFYGDYYGIPSDGVPSYRQQIDPLLRARQQYAYGTQHDYLDNQDVIGWTREGDSAHAGSGLATVMSDGPGGSKTMYVGTAHAGQVFKDITGNRTDTVTINSAGNGTFPCNKGSVSIWVKQ

SEQ ID NO: 33902 - protein, 482 aa, Bacillus sp.
HDGTNGTIMQYFEWNVPNDGQHWNRLHNNAQNLKNAGITAIWIPPAWKGTSQSDTGYGAYDLYDLGEFNQKGTVRTKYGTKAELERAIRSLKANGIQVYGDVVMNHKAGADQTEHVQAVEVNPQNRNQEVSGTYQIEAWTGFNFPGRGNQHSSFKWRWYHFDGTDWDQSRGLSNRIYKFRGKAWDWEVDTEFGNYDYLMYADLDMDHPEVINELNRWGVWYANTLNLDGFRLDAVKHIKFSFMRDWLGHVRGQTGKNLFAVAEYWKNDLGALENYLSKTNWTMSAFDVPLHYNLYQASNSSGNYDMRNLLNGTLVQRHPSHAVTFVDNHDTQPGEALESFVQGWFKPLAYATILTREQGYPQVFYGDYYGIPSDGVPSYRQQIDPLLAARQQYAYGTQHDYLDNQDVIGWTREGDSAHAGSGLATVMSDGPGGSKTMYVGQAHAGQVFKDITGNRTDTVTINSAGNGTFPCNKGSVSIWVKQ

SEQ ID NO: 33903 - protein, 482 aa, Bacillus sp.
HDGTNGTIMQYFEWNVPNDGQHWNRLHNNAQNLKNAGITAIWIPPAWKGTSQSDTGYGAYDLYDLGEFNQKGTVRTKYGTKAELERAIRSLKANGIQVYGDVVMNHKAGADFTERVQAVEVNPQNRNQEVSGTYQIEAWTGFNFPGRGNQHSSFKWRWYHFDGTDWDQSRQGSNRIYKFRGKAWDWEVDTEFGNYDYLMYADLDMDHPEVINELNRWGVWYANTLNLDGFRLDAVKHIKFSFMRDWLGHVRGQTGKNLFAVAEYWKNDLGALENYLSKTNWTMSAFDVPLHYNLYQASNSSGNYDMRNLLNGTLVQRHPSHAVTFVDNHDTQPGEALESFVQGWFKPLAYATILTREQGYPQVFYGDYYGIPSDGVPSYRQQIDPLLAARQQYAYGTQHDYLDNQDVIGWTREGDSAHAGSGLATVMSDGPGGSKTMYVGTAHAGQVFKDITGNRTDTVTINSAGNGTFPCNKGSVSIWVKQ

SEQ ID NO: 33904 - protein, 482 aa, Bacillus sp.
HDGTNGTIMQYFEWNVPNDGQHWNRLHNNAQNLKNAGITAIWIPPAWKGTSQSDTGYGAYDLYDLGEFNQKGTVRTKYGTKAELERAIRSLKANGIQVYGDVVMNHKAGADFTERVQAVEVNPQNRNQEVSGTYQIEAWTGFNFPGRGNQHSSFKWRWYHFDGTDWDQSRQLANRIYKFRGKAWDWEVDTEFGNYDYLMYADLDMDHPEVINELNRWGVWYANTLNLDGFRLDAVKHIKFSFMRDWLGHVRGQTGKNLFAVAEYWKNDLGALENYLSKTNWTMSAFDVPLHYNLYQASNSSGNYDMRNLLNGTLVQRHPSHAVTFVDNHDTQPGEALESFVQGWFKPLAYATILTREQGYPQVFYGDYYGIPSDGVPSYRQQIDPLLAARQQYAYGTQHDYLDNQDVIGWTREGDSAHAGSGLATVMSDGPGGSKTMYVGTAHAGQVFKDITGNRTDTVTINSAGNGTFPCNKGSVSIWVKQ

SEQ ID NO: 33905 - protein, 482 aa, Bacillus sp.
HDGTNGTIMQYFEWNVPNDGQHWNRLHNNAQNLKNAGITAIWIPPAWKGTSQSDTGYGAYDLYDLGEFNQKGTVRTKYGTKAELERAIRSLKANGIQVYGDVVMNHKAGADFTERVQAVEVNPQNRNQEVSGTYQIEAWTGFNFPGRGNQHSSFKWRWYHFDGTDWDQSRQLSNRIYKFRGKAWDWEVDTEFGNYDYLMYADLDMDHPEVINELNRWGVWYANTLNLDGFRLDAVKHIKFSFMRDWLGHVRGQTGKNLFAVAEYWKNDLGALENYLLKTNWTMSAFDVPLHYNLYQASNSSGNYDMRNLLNGTLVQRHPSHAVTFVDNHDTQPGEALESFVQGWFKPLAYATILTREQGYPQVFYGDYYGIPSDGVPSYRQQIDPLLAARQQYAYGTQHDYLDNQDVIGWTREGDSAHAGSGLATVMSDGPGGSKTMYVGTAHAGQVFKDITGNRTDTVTINSAGNGTFPCNKGSVSIWVKQ

SEQ ID NO: 33906 - protein, 482 aa, Bacillus sp.
HDGTNGTIMQYFEWNVPNDGQHWNRLHNNAQNLKNAGITAIWIPPAWKGTSQSDTGYGAYDLYDLGEFNQKGTVRTKYGTKAELERAIRSLKANGIQVYGDVVMNHKAGADFTEIVQAVEVNPQNRNQEVSGTYQIEAWTGFNFPGRGNQHSSFKWRWYHFDGTDWDQSRQLSNRIYKFRGKAWDWEVDTEFGNYDYLMYADLDMDHPEVINELNRWGVWYANTLNLDGFRLDAVKHIKFSFMRDWLGHVRGQTGKNLFAVAEYWKNDLGALENYLSKTNWTMSAFDVPLHYNLYQASNSSGNYDMRNLLNGTLVQRHPSHAVTFVDNHDTQPGEALESFVQGWFKPLAYATILTREQGYPQVFYGDYYGIPSDGVPSYRQQIDPLLAARQQYAYGTQHDYLDNQDVIGWTREGDSAHAGSGLATVMSDGPGGSKTMYVGTAHAGQVFKDITGNRTDTVTINSAGNGTFPCNKGSVSIWVKQ

SEQ ID NO: 33907 - protein, 482 aa, Bacillus sp.
HDGTNGTIMQYFEWNVPNDGQHWNRLHNNAQNLKNAGITAIWIPPAWKGTSQSDTGYGAYDLYDLGEFNQKGTVRTKYGTKAELERAIRSLKANGIQVYGDVVMNHKAGADFTERVQAVEVNPQNRNQEVSGTYQIEAWTGFNFPGRGNQHSSFKWRWYHFDGTDWDQSRQLSNRIYKFRGKAWDWEVDTEFGNYDYLMYADLDMDHPEVINELNRWGVWYANTLNLDGFRLDAVKHIKFSFMRDWLGHVRGQTGKNLFAVAEYWKNDLGALENYLSKTNWTMSAFDVPLHYNLYQASNSSGNYDMRNLLNGTLVQRHPSHAVTFVDNHDTQPGEALESFVQGWFKPLAYATILTREQGYPQVFYGDYYGIPSDGVPSYRQQIDPLLQARQQYAYGTQHDYLDNQDVIGWTREGDSAHAGSGLATVMSDGPGGSKTMYVGTAHAGQVFKDITGNRTDTVTINSAGNGTFPCNKGSVSIWVKQ

SEQ ID NO: 33908 - protein, 482 aa, Bacillus sp.
HDGTNGTIMQYFEWNVPNDGQHWNRLHNNAQNLKNAGITAIWIPPAWKGTSQSDTGYGAYDLYDLGEFNQKGTVRTKYGTKAELERAIRSLKANGIQVYGDVVMNHKSGADQTEQVQAVEVNPQNRNQEVSGTYQIEAWTGFNFPGRGNQHSSFKWRWYHFDGTDWDQSRQLSNRIYKFRGKAWDWEVDTEFGNYDYLMYADLDMDHPEVINELNRWGVWYANTLNLDGFRLDAVKHIKFSFMRDWLGHVRGQTGKNLFAVAEYWKNDLGALENYLSKTNWTMSAFDVPLHYNLYQASNSSGNYDMRNLLNGTLVQRHPSHAVTFVDNHDTQPGEALESFVQGWFKPLAYATILTREQGYPQVFYGDYYGIPSDGVPSYRQQIDPLLAARQQYAYGTQHDYLDNQDVIGWTREGDSAHAGSGLATVMSDGPGGSKTMYVGTAHAGQVFKDITGNRTDTVTINSAGNGTFPCNKGSVSIWVKQ

SEQ ID NO: 33909 - protein, 482 aa, Bacillus sp.
HDGTNGTIMQYFEWNVPNDGQHWNRLHSNAQNLKNAGITAIWIPPAWKGTSQSDTGYGAYDLYDLGEFNQKGTVRTKYGTKAELERAIRSLKANGIQVYGDVVMNHKAGADFTERVQAVEVNPQNRNQEVSGTYQIEAWTGFNFPGRGNQHSSFKWRWYHFDGTDWDQSRQLSNRIYKFRGKAWDWEVDTEFGNYDYLMYADLDMDHPEVINELNRWGVWYANTLNLDGFRLDAVKHIKFSFMRDWLGHVRGQTGKNLFAVAEYWKNDLGALENYLSKTNWTMSAFDVPLHYNLYQASNSSGNYDMRNLLNGTLVQRHPSHAVTFVDNHDTQPGEALESFVQGWFKPLAYATILTREQGYPQVFYGDYYGIPSDGVPSYRQQIDPLLAARQQYAYGTQHDYLDNQDVIGWTREGDSAHAGSGLATVMSDGPGGSKTMYVGTAHAGQVFKDITGNRTDTVTINSAGNGTFPCNKGSVSIWVKQ

SEQ ID NO: 33910 - protein, 482 aa, Bacillus sp.
HDGTNGTIMQYFEWNVPNDGQHWNRLHNNAQNLKNAGITAIWIPPAWKGTSQSDTGYGAYDLYDLGEFNQKGTVRTKYGTKAELERAIRSLKANGIQVYGDVVMNHKAGADFTERVQAVEVNPQNRNQEVSGTYQIEAWTGFNFPGRGNQHSSFKWRWYHFDGTDWDQSRQLSNRIYKFRGKAWDWEVDTEFGNYDYLMYADLDMDHPEVINELNRWGVWYANTLNLDGFRLDAVKHIKFSFMRDWLGHVRGQTGKNLFAVAEYWKNDLGALENYLTKTNWTMSAFDVPLHYNLYQASNSSGNYDMRNLLNGTLVQRHPSHAVTFVDNHDTQPGEALESFVQGWFKPLAYATILTREQGYPQVFYGDYYGIPSDGVPSYRQQIDPLLAARQQYAYGTQHDYLDNQDVIGWTREGDSAHAGSGLATVMSDGPGGSKTMYVGTAHAGQVFKDITGNRTDTVTINSAGNGTFPCNKGSVSIWVKQ

SEQ ID NO: 33911 - protein, 482 aa, Bacillus sp.
HDGTNGTIMQYFEWNVPNDGQHWNRLHNNAQNLKNAGITAIWIPPAWKGTSQSDTGYGAYDLYDLGEFNQKGTVRTKYGTKAELERAIRSLKANGIQVYGDVVMNHKAGADFTERVQAVEVNPQNRNQEVSGTYQIEAWTGFNFPGRGNQHSSFKWRWYHFDGTDWDQSRQLSNRIYKFRGKAWDWEVDTEFGNYDYLMYADLDMDHPEVINELNRWGVWYANTLNLDGFRLDAVKHIKFSFMRDWLGHVRGQTGKNLFAVAEHWKNDLGALENYLSKTNWTMSAFDVPLHYNLYQASNSSGNYDMRNLLNGTLVQRHPSHAVTFVDNHDTQPGEALESFVQGWFKPLAYATILTREQGYPQVFYGDYYGIPSDGVPSYRQQIDPLLAARQQYAYGTQHDYLDNQDVIGWTREGDSAHAGSGLATVMSDGPGGSKTMYVGTAHAGQVFKDITGNRTDTVTINSAGNGTFPCNKGSVSIWVKQ

SEQ ID NO: 33912 - protein, 482 aa, Bacillus sp.
HDGTNGTIMQYFEWNVPNDGQHWNRLHNNAQNLKNAGITAIWIAPAWKGTSQSDTGYGAYDLYDLGEFNQKGTVRTKYGTKAELERAIRSLKANGIQVYGDVVMNHKAGADFTERVQAVEVNPQNRNQEVSGTYQIEAWTGFNFPGRGNQHSSFKWRWYHFDGTDWDQSRQLSNRIYKFRGKAWDWEVDTEFGNYDYLMYADLDMDHPEVINELNRWGVWYANTLNLDGFRLDAVKHIKFSFMRDWLGHVRGQTGKNLFAVAEYWKNDLGALENYLSKTNWTMSAFDVPLHYNLYQASNSSGNYDMRNLLNGTLVQRHPSHAVTFVDNHDTQPGEALESFVQGWFKPLAYATILTREQGYPQVFYGDYYGIPSDGVPSYRQQIDPLLAARQQYAYGTQHDYLDNQDVIGWTREGDSAHAGSGLATVMSDGPGGSKTMYVGTAHAGQVFKDITGNRTDTVTINSAGNGTFPVNKGSVSIWVKQ

SEQ ID NO: 33913 - protein, 482 aa, Bacillus sp.
HDGTNGTIMQYFEWNVPNDGQHWNRLHNNAQNLKNAGITAIWIPPAWKGTSQSDTGYGAYDLYDLGEFNQRGTVRTKYGTKAELERAIRSLKANGIQVYGDVVMNHKAGADFTERVRAVEVNPQNRNQEVSGTYQIEAWTGFNFPGRGNQHSSFKWRWYHFDGTDWDQSRQLSNRIYKFRGKAWDWEVDTEFGNYDYLMYADLDMDHPEVINELNRWGVWYANTLNLDGFRLDAVKHIKFSFMRDWLGHVRGQTGKNLFAVAEYWKNDLGALENYLSKTNWTMSAFDVPLHYNLYQASNSSGNYDMRNLLNGTLVQRHPSHAVTFVDNHDTQPGEALESFVQGWFKPLAYATILTREQGYPQVFYGDYYGIPSHGVPSYRQQIDPLLAARQQYAYGTQHDYLDNQDVIGWTREGDSAHAGSGLATVMSDGPGGSKTMYVGTAHAGQVFKDITGNRTDTVTINSAGNGTFPCNKGSVSIWVKQ

SEQ ID NO: 33914 - protein, 482 aa, Bacillus sp.
HDGTNGTIMQYFEWNVPNDGQHWNRLHNNAQNLKNAGITAIWIPPAWKGTSQSDTGYGAYDLYDLGEFNQKGTVRTKYGTKAELERAIRSLKANGIQVYGDVVMNHKAGADFTERVQAVEVNPQNRNQEVSGTYQIEAWTGFNFPGRGNQHSSFKWRWYHFDGTDWDQSRQLSNRIYKFRGKAWDWEVDTEFGNYDYLMYADLDMDHPEVINELNRWGVWYANTLNLDGFRLDAVKHIKFSFMRDWLGHVRGQTGKNLFAVAEYWKNDLGALENYLSKTNWTMSAFDVPLHYNLYVASNSSGNYDMRNLLNGTLVQRHPSHAVTFVDNHDTQPGEALESFVQGWFKPLAYATILTREQGYPQVFYGDYYGIPSDGVPSYRQQIDPLLAARQQYAYGTQHDYLDNQDVIGWTREGDSAHAGSGLATVMSDGPGGSKTMYVGTAHAGQVFKDITGNRTDTVTINSAGNGTFPCNKGSVSIWVKQ

SEQ ID NO: 33915 - protein, 482 aa, Bacillus sp.
HDGTNGTIMQYFEWNVPNDGQHWNRLHNNAQNLKNAGITAIWIPPAWKGTSQSDTGYGAYDLYDLGEFNQKGTVRTKYGTKAELERAIRSLKANGIQVYGDVVMNHKAGADQTEHVQAVEVNPQNRNQEVSGTYQIEAWTGFNFPGRGNQHSSFKWRWYHFDGGDWDQSRGLSNRIYKFRGKAWDWEVDTEFGNYDYLMYADLDMDHPEVINELNRWGVWYANTLNLDGFRLDAVKHIKFSFMRDWLGHVRGQTGKNLFAVAEYWKNDLGALENYLSKTNWTMSAFDVPLHYNLYQASNSSGNYDMRNLLNGTLVQRHPSHAVTFVDNHDTQPGEALESFVQGWFKPLAYATILTREQGYPQVFYGDYYGIPSDGVPSYRQQIDPLLAARQQYAYGTQHDYLDNQDVIGWTREGDSAHAGSGLATVMSDGPGGSKTMYVGQAHAGQVFKDITGNRTDTVTINSAGNGTFPCNKGSVSIWVKQ

SEQ ID NO: 33916 - protein, 482 aa, Bacillus sp.
HDGTNGTIMQYFEWNVPNDGQHWNRLHNNAQNLKNHGITAIWIPPAWKGTSQSDTGYGAYDLYDLGEFNQKGTVRTKYGTKAELERAIRSLKANGIQVYGDVVMNHKAGADFTERVQAVEVNPQNRNQEVSGTYQIEAWTGFNFPGRGNQHSSFKWRWYHFDGTDWDQSRQLSNRIYKFRGKAWDWEVDTEFGNYDYLMYADLDMDHPEVINELNRWGVWYANTLNLDGFRLDAVKHIKFSFMRDWLGHVRGQTGKNLFAVAEYWKNDLGALENYLSKTNWTMSAFDVPLHYNLYQASNSSGNYDMRNLLNGTLVQRHPSHAVTFVDNHDTQPGEALESFVQGWFKPLAYATILTREQGYPQVFYGDYYGIPSDGVPSYRQQIDPLLAARQQYAYGTQHDYLDNQDVIGWTREGDSAHAGSGLATVMSDGPGGSKTMYVGTAHAGQVFKDITGNRTDTVTINSAGNGTFPCNKGSVSIWVKQ

SEQ ID NO: 33917 - protein, 482 aa, Bacillus sp.
HDGTNGTIMQYFEWNVPNDGQHWNRLHNNAQNLKNAGITAIWIPPAWKGTSQSDTGYGAYDLYDLGEFNQKGTVRTKYGTKAELERAIRSLKANGIQVYGDVVMNHKAGADFTERVQAVEVNPQNRNQEVSGTYQIEAWTGFNFPGRGNQHSSFKWRWYHFDGTDWDQSRQLSNRIYKFRGKAWDWEVDTEFGNYDYLMYADLDMDHPEVINELNRWGVWYANTLNLDGFRLDATKHIKFSFMRDWLGHVRGQTGKNLFAVAEYWKNDLGALENYLSKTNWTMSAFDVPLHYNLYQASNSSGNYDMRNLLNGTLVQRHPSHAVTFVDNHDTQPGEALESFVQGWFKPLAYATILTREQGYPQVFYGDYYGIPSHGVPSYRQQIDPLLAARQQYAYGTQHDYLDNQDVIGWTREGDSAHAGSGLATVMSDGPGGSKTMYVGTAHAGQVFKDITGNRTDTVTINSAGNGTFPCNKGSVSIWVKQ

SEQ ID NO: 33918 - protein, 482 aa, Bacillus sp.
HDGTNGTIMQYFEWNVPNDGQHWNRLHNNAQNLKNAGITAIWIPPAWKGTSQSDTGYGAYDLYDLGEFNQKGTVRTKYGTKAELERAIRSLKANGIQVYGDVVMNHKAGADFTERVQAVEVNPQNRNQEVSGTYQIEAWTGFNFPGRGNQHSSFKWRWYHFDGTDWDQSRQLSNRIYKFRGKAWDWEVDTEFGNYDYLMYADLDMDHPEVENELNRWGVWYANTLNLDGFRLDAVKHIKFSFMRDWLGHVRGQTGKNLFAVAEYWKNDLGALENYLSKTNWTMSAFDVPLHYNLYQASNSSGNYDMRNLLNGTLVQRHPSHAVTFVDNHDTQPGEALESFVQGWFKPLAYATILTREQGYPQVFYGDYYGIPSDGVPSYRQQIDPLLAARQQYAYGTQHDYLDNQDVIGWTREGDSAHAGSGLATVMSDGPGGSKTMYVGTAHAGQVFKDITGNRTDTVTINSAGNGTFPCNKGSVSIWVKQ

SEQ ID NO: 33919 - protein, 482 aa, Bacillus sp.
HDGTNGTIMQYFEWNVPNDGQHWNRLHNNAQNLKNAGITAIWIPPAWKGTSQSDTGYGAYDLYDLGEFNQKGTVRTKYGTKAELERAIRSLKANGIQVYGDVVMNHKAGADFTERVQAVEVNPQNRNQEVSGTYQIEAWTGFNFPGRGNQHSSFKWRWYHFDGTDWDQSRQLSNRIYKFRGKAWDWEVDTEFGNYDYLMYADLDMDHPEVINELNRWGVWYANTLNLDGFRLDAVKHIKFSFMRDWLGHVRGQTGKNLFAVAEYWKNDLGALENYLSKTNWQMSAFDVPLHYNLYQASNSSGNYDMRNLLNGTLVQRHPSHAVTFVDNHDTQPGEALESFVQGWFKPLAYATILTREQGYPQVFYGDYYGIPSDGVPSYRQQIDPLLAARQQYAYGTQHDYLDNQDVIGWTREGDSAHAGSGLATVMSDGPGGSKTMYVGTAHAGQVFKDITGNRTDTVTINSAGNGTFPCNKGSVSIWVKQ

SEQ ID NO: 33920 - protein, 482 aa, Bacillus sp.
HDGTNGTIMQYFEWNVPNDGQHWNRLHNNAQNLKNAGITAIWIPPAWKGTSQSDTGYGAYDLYDLGEFNQKGTVRTKYGTKAELERAIRSLKANGIQVYGDVVMNHKAGADFTERVQAVEVNPQNRNQEVSGTYQIEAWTGFNFPGRGNQHSSFKWRWYHFDGTDWDQSRQLSNRIYKFRGKAWDWEVDTEFGNYDYLMYADLDMDHPEVINELNRWGVWYANTLNLDGFRLDAVKHIKFSFMRDWLGHVRGQTGKNLFAVAEYWKNDLGALENYLSKTNWTMSAFDGPLHYNLYQASNSSGNYDMRNLLNGTLVQRHPSHAVTFVDNHDTQPGEALESFVQGWFKPLAYATILTREQGYPQVFYGDYYGIPSHGVPSYRQQIDPLLAARQQYAYGTQHDYLDNQDVIGWTREGDSAHAGSGLATVMSDGPGGSKTMYVGTAHAGQVFKDITGNRTDTVTINSAGNGTFPCNKGSVSIWVKQ

SEQ ID NO: 33921 - protein, 482 aa, Bacillus sp.
HDGTNGTIMQYFEWNVPNDGQHWNRLHNNAQNLKNAGITAIWIPPAWKGTSQSDTGYGAYDLYDLGEFNQKGTVRTKYGTKAELERAIRSLKANGIQVYGDVVMNHKAGADFTERVQAVEVNPQNRNQEVSGTYQIEAWTGFNFPGRGNQHSSFKWRWYHFDGGDWDQSRQLSNRIYKFRGKAWDWEVDTEFGNYDYLMYADLDMDHPEVINELNRWGVWYANTLNLDGFRLDAVKHIKFSFMRDWLGHVRGQTGKNLFAVAEYWKNDLGALENYLSKTNWTMSAFDVPLHYNLYQASNSSGNYDMRNLLNGTLVQRHPSHAVTFVDNHDTQPGEALESFVQGWFKPLAYATILTREQGYPQVFYGDYYGIPSDGVPSYRQQIDPLLAARQQYAYGTQHDYLDNQDVIGWTREGDSAHAGSGLATVMSDGPGGSKTMYVGTAHAGQVFKDITGNRTDTVTINSAGNGTFPCNKGSVSIWVKQ

SEQ ID NO: 33922 - protein, 482 aa, Bacillus sp.
HDGTNGTIMQYFEWNVPNDGQHWNRLHNNAQNLKNAGITAIWIPPAWKGTSQSDTGYGAYDLYDLGEFNQRGTVRTKYGTKAELERAIRSLKANGIQVYGDVVMNHKAGADFTERVQAVEVNPQNRNQEVSGEYQIEAWTGFNFPGRGNQHSSFKWRWYHFDGTDWDQSRQLSNRIYKFRGKAWDWEVDTEFGNYDYLMYADLDMDHPEVINELNRWGVWYANTLNLDGFRLDAVKHIKFSFMRDWLGHVRAQTGKNLFAVAEYWKNDLGALENYLSKTNWTMSAFDVPLHYNLYQASNSSGNYDMRNLLNGTLVQRHPSHAVTFVDNHDTQPGEALESFVQGWFKPLAYATILTREQGYPQVFYGDYYGIPSDGVPSYRQQIDPLLAARQQYAYGTQHDYLDNQDVIGWTREGDSAHAGSGLATVMSDGPGGSKTMYVGTAHAGQVFKDITGNRTDTVTINSAGNGTFPVNKGSVSIWVKQ

SEQ ID NO: 33923 - protein, 482 aa, Bacillus sp.
HDGTNGTIMQYFEWNVPNDGQHWNRLHNNAQNLKNAGITAIWIPPAWKGTSQSDTGYGAYDLYDLGEFNQKGTVRTKYGTKAELERAIRSLKANGIQVYGDVVMNHKAGADFTERVRAVEVNPQNRNQEVSGEYQIEAWTGFNFPGRGNQHSSFKWRWYHFDGTDWDQSRQLSNRIYKFRGKAWDWEVDTEFGNYDYLMYADLDMDHPEVINELNRWGVWYANTLNLDGFRLDAVKHIKFSFMRDWLGHVRGQTGKNLFAVAEYWKNDLGALENYLSKTNWTMSAFDVPLHYNLYQASNSSGNYDMRNLLNGTLVQRHPSHAVTFVDNHDTQPGEALESFVQGWFKPLAYATILTREQGYPQVFYGDYYGIPSDGVPSYRQQIDPLLAARQQYAYGTQHDYLDNQDVIGWTREGDSAHAGSGLATVMSDGPGGSKTMYVGTAHAGQVFKDITGNRTDTVTINSAGNGTFPCNKGSVSIWVKQ

SEQ ID NO: 33924 - protein, 482 aa, Bacillus sp.
HDGTNGTIMQYFEWNVPNDGQHWNRLHNNAQNLKNVGITAIWIPPAWKGTSQSDTGYGAYDLYDLGEFNQKGTVRTKYGTKAELERAIRSLKANGIQVYGDVVMNHKAGADFTEQVQAVEVNPQNRNQEVSGTYQIEAWTGFNFPGRGNQHSSFKWRWYHFDGGDWDQSRQLSNRIYKFRGKAWDWEVDTEFGNYDYLMYADLDMDHPEVINELNRWGVWYANTLNLDGFRLDAVKHIKFSFFRDWLGHVRGQTGKNLFAVAEYWKNDLGALENYLSKTNWTMSAFDVPLHYNLYQASNSSGNYDMRNLLNGTLVQRHPSHAVTFVDNHDTQPGEALESFVQGWFKPLAYATILTREQGYPQVFYGDYYGIPSDGVPSYRQQIDPLLAARQQYAYGTQHDYLDNQDVIGWTREGDSAHAGSGLATVMSDGPGGSKTMYVGTAHAGQVFKDITGNRTDTVTINSAGNGTFPCNKGSVSIWVKQ

SEQ ID NO: 33925 - protein, 482 aa, Bacillus sp.
HDGTNGTIMQYFEWNVPNDGQHWNRLHNNAQNLKNAGITAIWIPPAWKGTSQSDTGYGAYDLYDLGEFNQKGTVRTKYGTKAELERAIRSLKANGIQVYGDVVMNHKAGADFTERVQAVEVNPQNRNQEVSGTYQIEAWTGFNFPGRGNQHSSFKWRWYHFDGTDWDQSRQLSNRIYKFRGKAWDWEVDTEFGNYDYLMYADLDMDHPEVINELNRWGVWYANTLNLDGFRLDAVKHIKFSFMRDWLGHVRGQTGKNLFAVAEYWKNDLGALENYLSKTNWTMSAFDVPLHYNLYQASNSSGNYDMRNLLNGTLVQAHPSHAVTFVDNHDTQPGEALESFVQGWFKPLAYATILTREQGYPQVFYGDYYGIPSDGVPSYRQQIDPLLAARQQYAYGTQHDYLDNQDVIGWTREGDSAHAGSGLATVMSDGPGGSKTMYVGTAHAGQVFKDITGNRTDTVTINSAGNGTFPCNKGSVSIWVKQ

SEQ ID NO: 33926 - protein, 482 aa, Bacillus sp.
HDGTNGTIMQYFEWNVPNDGQHWNRLHNNAQNLKNAGITAIWIPPAWKGTSQSDTGYGAYDLYDLGEFNQKGTVRTKYGTKAELERAIRSLKANGIQVYGDVVMNHKAGADFTERVQAVEVNPQNRNQEVSGTYQIEAWTGFNFPGRGNQHSSFKWRWYHFDGTDWDQSRQLSNRIYKFRGKAWDWEVDTEFGNYDYLMYADLDMDHPEVINELNRWGVWYANTLNLDGFRLDAVKHIKFSFMRDWLGHVRGQTGKNLFAVAELWKNDLGALENYLSKTNWTMSAFDVPLHYNLYQASNSSGNYDMRNLLNGTLVQRHPSHAVTFVDNHDTQPGEALESFVQGWFKPLAYATILTREQGYPQVFYGDYYGIPSDGVPSYRQQIDPLLAARQQYAYGTQHDYLDNQDVIGWTREGDSAHAGSGLATVMSDGPGGSKTMYVGTAHAGQVFKDITGNRTDTVTINSAGNGTFPCNKGSVSIWVKQ

SEQ ID NO: 33927 - protein, 482 aa, Bacillus sp.
HDGTNGTIMQYFEWNVPNDGQHWNRLHNNAQNLKNAGITAIWIPPAWKGTSQSDTGYGAYDLYDLGEFNQKGTVRTKYGTKAELERAIRSLKANGIQVYGDVVMNHKAGADFTERVQAVEVNPQNRNQEVSGTYQIEAWTGFNFPGRGNQHSSFKWRWYHFDGTDWDQSRQLSNRIYKFRGKAWDWEVDTEFGNYDYLMYADLDMDHPEVINELNRWGVWYANTLNLDGFRLDAVKHIKFSFMRDWLGHVRGQTGKNLFAVAEYWKNDLGALENYLSKTNWTMSAFDTPLHYNLYQASNSSGNYDMRNLLNGTLVQRHPSHAVTFVDNHDTQPGEALESFVQGWFKPLAYATILTREQGYPQVFYGDYYGIPSHGVPSYRQQIDPLLAARQQYAYGTQHDYLDNQDVIGWTREGDSAHAGSGLATVMSDGPGGSKTMYVGTAHAGQVFKDITGNRTDTVTINSAGNGTFPCNKGSVSIWVKQ

SEQ ID NO: 33928 - protein, 482 aa, Bacillus sp.
HDGTNGTIMQYFEWNVPNDGQHWNRLHNNAQNLKNAGITAIWIPPAWKGTSQSDTGYGAYDLYDLGEFNQKGTVRTKYGTKAELERAIRSLKANGIQVYGDVVMNHKAGADQTEHVQAVEVNPQNRNQEVSGTYQIEAWTGFNFPGRGNQHSSFKWRWYHFDGTDWDQSRGLSNRIYKFRGKAWDWEVDTEFGNYDYLMYADLDMDHPEVINELNRWGVWYANTLNLDGFRLDAVKHIKFSFMRDWLGHVRGQTGKNLFAVAEYWKNDLGALENYLSKTNWTMSAFDVPLHYNLYQASNSSGNYDMRNLLNGTLVQRHPSHAVTFVDNHDTQPGEALESFVQGWFKPLAYATILTREQGYPQVFYGDYYGIPSDGVPSYRQQIDPLLAARQQYAYGTQHDYLDNQDVIGWTREGDSAHAGSGLATVMSDGPGGSKTMYVGTAHAGQVFKDITGNRTDTVTINSAGNGTFPCNGGSVSIWVKQ

SEQ ID NO: 33929 - protein, 482 aa, Bacillus sp.
HDGTNGTIMQYFEWNVPNDGQHWNRLHNNAQNLKNAGITAIWIPPAWKGTSQSDTGYGAYDLYDLGEFNQKGTVRTKYGTKAELERAIRSLKANGIQVYGDVVMNHKAGADFTERVQAVEVNPQNRNQEVSGTYQIEAWTGFNFPGRGNQHSSFKWRWYHFDGTDWDQSRQLSNRIYKFRGKAWDWEVDTEFGNYDYLMYADLDMDHPEVINELNRWGVWYANTLNLDGFRLDAVKHIKFSFMRDWLGHVRGQTGKNLFAVAEYWKNDLGALENYLAKTNWTMSAFDVPLHYNLYQASNSSGNYDMRNLLNGTLVQRHPSHAVTFVDNHDTQPGEALESFVQGWFKPLAYATILTREQGYPQVFYGDYYGIPSDGVPSYRQQIDPLLAARQQYAYGTQHDYLDNQDVIGWTREGDSAHAGSGLATVMSDGPGGSKTMYVGTAHAGQVFKDITGNRTDTVTINSAGNGTFPCNKGSVSIWVKQ

SEQ ID NO: 33930 - protein, 482 aa, Bacillus sp.
HDGTNGTIMQYFEWNVPNDGQHWNRLHNNAQNLKNAGITAIWIPPAWKGTSQSDTGYGAYDLYDLGEFNQKGTVRTKYGTKAELERAIRSLKANGIQVYGDVVMNHKAGADFTERVQAVEVNPQNRNQEVSGTYQIEAWTGFNFPGRGNQHSSFKWRWYHFDGTDWDQSRQLSNRIYKFRGKAWDWEVDTEFGNYDYLMYADLDMDHPEVINELNRWGVWYANTLNLDGFRLDAVKHIKFSFMRDWLGHVRGQTGKNLFAVAEIWKNDLGALENYLSKTNWTMSAFDVPLHYNLYQASNSSGNYDMRNLLNGTLVQRHPSHAVTFVDNHDTQPGEALESFVQGWFKPLAYATILTREQGYPQVFYGDYYGIPSDGVPSYRQQIDPLLAARQQYAYGTQHDYLDNQDVIGWTREGDSAHAGSGLATVMSDGPGGSKTMYVGTAHAGQVFKDITGNRTDTVTINSAGNGTFPCNKGSVSIWVKQ

SEQ ID NO: 33931 - protein, 482 aa, Bacillus sp.
HDGTNGTIMQYFEWNVPNDGQHWNRLHNNAQNLKNAGITAIWIPPAWKGTSQSDTGYGAYDLYDLGEFNQKGTVRTKYGTKAELERAIRSLKANGIQVYGDVVMNHKAGADFTERVQAVEVNPQNRNQEVSGTYQIEAWTGFNFPGRGNQHSSFKWRWYHFDGTDWDQSRQLSNRIYKFRGKAWDWEVDTEFGNYDYLMYADLDMDHPEVINELNRWGVWYANTLNLDGFRLDAVKHIKFSFMRDWLGHVRGQTGKNLFAVAEYWKNDLGALENYLSKTNWTMSAFDVPLHYNLYQASNSSGNYDMRNLLNGTLVQRHPSHAVTFVDNHDTQPGEALESFVQGWFKPLAYATILTREQGYPQVFYGDYYGIPSDGVPSYRQQIDPLLAARQQYAYGTQHDYLDNQDVIGWTREGDSAHAGSGLATVMSDGPGGSKTMYVGTAHAGQVFKDITGNRTDTVTINSAGNGTFTCNKGSVSIWVKQ

SEQ ID NO: 33932 - protein, 482 aa, Bacillus sp.
HDGTNGTIMQYFEWNVPNDGQHWNRLHNNAQNLKNAGITAIWIPPAWKGTSQSDTGYGAYDLYDLGEFNQKGTVRTKYGTKAELERAIRSLKANGIQVYGDVVMNHKAGADFTERVQAVEVNPQNRNQEVSGTYQIEAWTGFNFPGRGNQHSSFKWRWYHFDGTDWDQSRQLSNRIYKFRGKAWDWEVDTEFGNYDYLMYADLDMDHPEVINELNRWGVWYANTLNLDGFRLDAVKHIKFSFMRDWLGHVRGQTGKNLFAVAEYWKNDLGALENYLSKTNWTMSAFDVPLHYNLYQASNSSGNYDMRNLLNGTLVQRHPSHAVTFVDNHDTQPGEALESFVQGWFKPLAYAFILTREQGYPQVFYGDYYGIPSDGVPSYRQQIDPLLAARQQYAYGTQHDYLDNQDVIGWTREGDSAHAGSGLATVMSDGPGGSKTMYVGTAHAGQVFKDITGNRTDTVTINSAGNGTFPCNKGSVSIWVKQ

SEQ ID NO: 33933 - protein, 482 aa, Bacillus sp.
HDGTNGTIMQYFEWNVPNDGQHWNRLHNNAQNLKNAGITAIWIPPAWKGTSQSDTGYGAYDLYDLGEFNQKGTVRTKYGTKAELERAIRSLKANGIQVYGDVVMNHKAGADFTERVQAVEVNPTNRNQEVSGTYQIEAWTGFNFPGRGNQHSSFKWRWYHFDGTDWDQSRQLSNRIYKFRGKAWDWEVDTEFGNYDYLMYADLDMDHPEVINELNRWGVWYANTLNLDGFRLDAVKHIKFSFMRDWLGHVRGQTGKNLFAVAEYWKNDLGALENYLSKTNWTMSAFDVPLHYNLYQASNSSGNYDMRNLLNGTLVQRHPSHAVTFVDNHDTQPGEALESFVQGWFKPLAYATILTREQGYPQVFYGDYYGIPSDGVPSYRQQIDPLLAARQQYAYGTQHDYLDNQDVIGWTREGDSAHAGSGLATVMSDGPGGSKTMYVGTAHAGQVFKDITGNRTDTVTINSAGNGTFPCNKGSVSIWVKQ

SEQ ID NO: 33934 - protein, 482 aa, Bacillus sp.
HDGTNGTIMQYFEWNVPNDGQHWNRLHNNAQNLKNAGITAIWIPPAWKGTSQSDTGYGAYDLYDLGEFNQKGTVRTKYGTKAELERAIRSLKANGIQVYGDVVMNHKAGADFTERVQAVEVNPPNRNQEVSGTYQIEAWTGFNFPGRGNQHSSFKWRWYHFDGTDWDQSRQLSNRIYKFRGKAWDWEVDTEFGNYDYLMYADLDMDHPEVINELNRWGVWYANTLNLDGFRLDAVKHIKFSFMRDWLGHVRGQTGKNLFAVAEYWKNDLGALENYLSKTNWTMSAFDVPLHYNLYQASNSSGNYDMRNLLNGTLVQRHPSHAVTFVDNHDTQPGEALESFVQGWFKPLAYATILTREQGYPQVFYGDYYGIPSDGVPSYRQQIDPLLAARQQYAYGTQHDYLDNQDVIGWTREGDSAHAGSGLATVMSDGPGGSKTMYVGTAHAGQVFKDITGNRTDTVTINSAGNGTFPCNKGSVSIWVKQ

SEQ ID NO: 33935 - protein, 482 aa, Bacillus sp.
HDGTNGTIMQYFEWNVPNDGQHWNRLHNNAQNLKNAGITAIWIPPAWKGTSQSDTGYGAYDLYDLGEFNQKGTVRTKYGTKAELERAIRSLKANGIQVYGDVVMNHKAGADFTERVQAVEVNPQNRNQEVSSTYQIEAWTGFNFPGRGNQHSSFKWRWYHFDGTDWDQSRQLSNRIYKFRGKAWDWEVDTEFGNYDYLMYADVDMDHPEVINELNRWGVWYANTLNLDGFRLDAVKHIKFSFMRDWLGHVRGQTGKNLFAVAEYWKNDLGALENYLSKTNWTMSAFDVPLHYNLYQASNSSGNYDMRNLLNGTLVQRHPSHAVTFVDNHDTQPGEALESFVQGWFKPLAYATILTREQGYPQVFYGDYYGIPSDGVPSYRQQIDPLLAARQQYAYGTQHDYLDNQDVIGWTREGDSAHAGSGLATVMSDGPGGSKTMYVGTAHAGQVFKDITGNRTDTVTINSAGNGTFPCNHGSVSIWVKQ

SEQ ID NO: 33936 - protein, 482 aa, Bacillus sp.
HDGTNGTIMQYFEWNVPNDGQHWNRLHNNAQNLKNAGITAIWIPPAWKGTSQSDTGYGAYDLYDLGEFNQKGTVRTKYGTKAELERAIRSLKANGIQVYGDVVMNHKAGADFTERVQAVEVNPSNRNQEVSGTYQIEAWTGFNFPGRGNQHSSFKWRWYHFDGTDWDQSRQLSNRIYKFRGKAWDWEVDTEFGNYDYLMYADLDMDHPEVINELNRWGVWYANTLNLDGFRLDAVKHIKFSFMRDWLGHVRGQTGKNLFAVAEYWKNDLGALENYLSKTNWTMSAFDVPLHYNLYQASNSSGNYDMRNLLNGTLVQRHPSHAVTFVDNHDTQPGEALESFVQGWFKPLAYATILTREQGYPQVFYGDYYGIPSDGVPSYRQQIDPLLAARQQYAYGTQHDYLDNQDVIGWTREGDSAHAGSGLATVMSDGPGGSKTMYVGTAHAGQVFKDITGNRTDTVTINSAGNGTFPCNKGSVSIWVKQ

SEQ ID NO: 33937 - protein, 482 aa, Bacillus sp.
HDGTNGTIMQYFEWNVPNDGQHWNRLHNNAQNLKNAGITAIWIPPAWKGTSQSDTGYGAYDLYDLGEFNQKGTVRTKYGTKAELERAIRSLKANGIQVYGDVVMNHKAGADFTERVQAVEVNPQNRNQEVSGTYQIEAWTGFNFPGRGNQHSSFKWRWYHFDGTDWDQSRQLSNRIYKFRGKAWDWEVDTEFGNYDYLMYADLDMDHPEVINELNRWGVWYANTLNLDGFRLDAVKHIKFSFMRDWLGHVRGQTGKNLFAVAEYWKNDLGALENYLSKTNWTMSAFDVPLHYNLYQASNSSGNYDMRNLLNGTLVQRHPSHAVTFVDNHDTQPGEALESFVQGWFKPLAYATILTREQGYPQVFYGDYYGIPSDGVPSIRQQIDPLLAARQQYAYGTQHDYLDNQDVIGWTREGDSAHAGSGLATVMSDGPGGSKTMYVGTAHAGQVFKDITGNRTDTVTINSAGNGTFPCNKGSVSIWVKQ

SEQ ID NO: 33938 - protein, 482 aa, Bacillus sp.
HDGTNGTIMQYFEWNVPNDGQHWNRLHNNAQNLKNAGITAIWIPPAWKGTSQSDTGYGAYDLYDLGEFNQKGTVRTKYGTKAELERAIRSLKANGIQVYGDVVMNHKAGADFTEEVQAVEVNPQNRNQEVSGTYQIEAWTGFNFPGRGNQHSSFKWRWYHFDGTDWDQSRQLSNRIYKFRGKAWDWEVDTEFGNYDYLMYADLDMDHPEVINELNRWGVWYANTLNLDGFRLDAVKHIKFSFMRDWLGHVRGQTGKNLFAVAEYWKNDLGALENYLSKTNWTMSAFDVPLHYNLYQASNSSGNYDMRNLLNGTLVQRHPSHAVTFVDNHDTQPGEALESFVQGWFKPLAYATILTREQGYPQVFYGDYYGIPSDGVPSYRQQIDPLLAARQQYAYGTQHDYLDNQDVIGWTREGDSAHAGSGLATVMSDGPGGSKTMYVGTAHAGQVFKDITGNRTDTVTINSAGNGTFPCNKGSVSIWVKQ

SEQ ID NO: 33939 - protein, 482 aa, Bacillus sp.
HDGTNGTIMQYFEWNVPNDGQHWNRLHNNAQNLKNAGITAIWIPPAWKGTSQSDTGYGAYDLYDLGEFNQRGTVRTKYGTKAELERAIRSLKANGIQVYGDVVMNHKAGADFTERVRAVEVNPQNRNQEVSGTYQIEAWTGFNFPGRGNQHSSFKWRWYHFDGTDWDQSRQLSNRIYKFRGKAWDWEVDTEFGNYDYLMYADLDMDHPEVINELNRWGVWYANTLNLDGFRLDAVKHIKFSFMRDWLGHVRAQTGKNLFAVAEYWKNDLGALENYLSKTNWTMSAFDVPLHYNLYQASNSSGNYDMRNLLNGTLVQRHPSHAVTFVDNHDTQPGEALESFVQGWFKPLAYATILTREQGYPQVFYGDYYGIPSHGVPSYRQQIDPLLAARQQYAYGTQHDYLDNQDVIGWTREGDSAHAGSGLATVMSDGPGGSKTMYVGTAHAGQVFKDITGNRTDTVTINSAGNGTFPCNKGSVSIWVKQ

SEQ ID NO: 33940 - protein, 482 aa, Bacillus sp.
HDGTNGTIMQYFEWNVPNDGQHWNRLHNNAQNLKNAGITAIWIPPAWKGTSQSDTGYGAYDLYDLGEFNQKGTVRTKYGTKAELERAIRSLKANGIQVYGDVVMNHKAGADFTERVQAVEVNPQNRNQEVSGTYQIEAWTGFNFPGRGNQHSSFKWRWYHFDGTDWDQSRQVRNRIYKFRGKAWDWEVDTEFGNYDYLMYADLDMDHPEVINELNRWGVWYANTLNLDGFRLDAVKHIKFSFMRDWLGHVRGQTGKNLFAVAEYWKNDLGALENYLSKTNWTMSAFDVPLHYNLYQASNSSGNYDMRNLLNGTLVQRHPSHAVTFVDNHDTQPGEALESFVQGWFKPLAYATILTREQGYPQVFYGDYYGIPSDGVPSYRQQIDPLLAARQQYAYGTQHDYLDNQDVIGWTREGDSAHAGSGLATVMSDGPGGSKTMYVGTAHAGQVFKDITGNRTDTVTINSAGNGTFPCNKGSVSIWVKQ

SEQ ID NO: 33941 - protein, 482 aa, Bacillus sp.
HDGTNGTIMQYFEWNVPNDGQHWNRLHNNAQNLKNAGITAIWIPPAWKGTSQSDTGYGAYDLYDLGEFNQKGTVRTKYGTKAELERAIRSLKANGIQVYGDVVMNHKAGADFTERVQAVEVNPQNRNQEVSGTYQIEAWTGFNFPGRGNQHSSFKWRWYHFDGTDWDQSRQLSNRIYKFRGKAWDWEVDTEFGNYDYLMYADLDMDHPEVINELNRWGVWYANTLNLDGFRLDAVKHIKFSFMRDWLGHVRGQTGKNLFAVAEYWKNDLGALENYLQKTNWTMSAFDVPLHYNLYQASNSSGNYDMRNLLNGTLVQRYPSHAVTFVDNHDTQPGEALESFVQGWFKPLAYATILTREQGYPQVFYGDYYGIPSDGVPSYRQQIDPLLAARQQYAYGTQHDYLDNQDVIGWTREGDSAHAGSGLATVMSDGPGGSKTMYVGTAHAGQVFKDITGNRTDTVTINSAGNGTFPVNKGSVSIWVKQ

SEQ ID NO: 33942 - protein, 482 aa, Bacillus sp.
HDGTNGTIMQYFEWNVPNDGQHWNRLHNNAQNLKNAGITAIWIPPAWKGTSQSDTGYGAYDLYDLGEFNQKGTVRTKYGTKAELERAIRSLKANGIQVYGDVVMNHKAGADFTERVQAVEVNPQNRNQEVSGTYQIEAWTGFNFPGRGNQHSSFKWRWYHFDGTDWDQSRQLSNRIYKFRGKAWDWEVDTEFGNYDYLMYADLDMDHPEVINELNRWGVWYANTLNLDGFRLDAVKHIKFSFMRDWLGHVRGQTGKNLFAVAEYWKNDLGALENYLSKTNWTMSAFDVPLHYNLYQASNSSGNYDMRNLLNGTLVQRHPSHAVTLVDNHDTQPGEALESFVQGWFKPLAYATILTREQGYPQVFYGDYYGIPSHGVPSYRQQIDPLLAARQQYAYGTQHDYLDNQDVIGWTREGDSAHAGSGLATVMSDGPGGSKTMYVGTAHAGQVFKDITGNRTDTVTINSAGNGTFPCNKGSVSIWVKQ

SEQ ID NO: 33943 - protein, 482 aa, Bacillus sp.
HDGTNGTIMQYFEWNVPNDGQHWNRLHNNAQNLKNAGITAIWIPPAWKGTSQSDTGYGAYDLYDLGEFNQKGTVRTKYGTKAELERAIRSLKANGIQVYGDVVMNHKAGADFTERVQAVEVNPQNRNQEVSGTYQIEAWTGFNFPGRGNQHSSFKWRWYHFDGTDWDQSRQLSNRIYKFRGKAWDWEVDTEFGNYDYLMYADLDMDHPEVINELNRWGVWYANTLNLDGFRLDAVKHIKFSFMRDWLGHVRGQTGKNLFAVAEYWKNDLGALENYLSKTNWTMSAFDVPLHYNLYQASNSSGNYDMRNLLNGTLVQRHPSHAVTFVDNHDTQPGEALESFVQGWFKPLAYATILTREQGYPQVFYGDYYGIPSDGVPSYRQQIDPLLAARQQYAYGTQHDYLDNQDVIGWTREGDSAHAGSGLATVMSDGPGGSKTMYVGAAHAGQVFKDITGNRTDTVTINSAGNGTFPCNKGSVSIWVKQ

SEQ ID NO: 33944 - protein, 482 aa, Bacillus sp.
HDGTNGTIMQYFEWNVPNDGQHWNRLHNNAQNLKNAGITAIWIPPAWKGTSQSDTGYGAYDLYDLGEFNQKGTVRTKYGTKAELERAIRSLKANGIQVYGDVVMNHKAGADFTERVQAVEVNPQNRNQEVSGTYQIEAWTGFNFPGRGNQHSSFKWRWYHFDGTDWDQSRQLTNRIYKFRGKAWDWEVDTEFGNYDYLMYADLDMDHPEVINELNRWGVWYANTLNLDGFRLDAVKHIKFSFMRDWLGHVRGQTGKNLFAVAEYWKNDLGALENYLSKTNWTMSAFDVPLHYNLYQASNSSGNYDMRNLLNGTLVQRHPSHAVTFVDNHDTQPGEALESFVQGWFKPLAYATILTREQGYPQVFYGDYYGIPSDGVPSYRQQIDPLLAARQQYAYGTQHDYLDNQDVIGWTREGDSAHAGSGLATVMSDGPGGSKTMYVGTAHAGQVFKDITGNRTDTVTINSAGNGTFPCNKGSVSIWVKQ

SEQ ID NO: 33945 - protein, 482 aa, Bacillus sp.
HDGTNGTIMQYFEWNVPNDGQHWNRLHNNAQNLKNAGITAIWIPPAWKGTSQSDTGYGAYDLYDLGEFNQKGTVRTKYGTKAELERAIRSLKANGIQVYGDVVMNHKAGADFTERVQAVEVNPQNRNQEVSGTYQIEAWTGFNFPGRGNQHSSFKWRWYHFDGTDWDQSRQLNNRIYKFRGKAWDWEVDTEFGNYDYLMYADLDMDHPEVINELNRWGVWYANTLNLDGFRLDAVKHIKFSFMRDWLGHVRGQTGKNLFAVAEYWKNDLGALENYLSKTNWTMSAFDVPLHYNLYQASNSSGNYDMRNLLNGTLVQRHPSHAVTFVDNHDTQPGEALESFVQGWFKPLAYATILTREQGYPQVFYGDYYGIPSDGVPSYRQQIDPLLAARQQYAYGTQHDYLDNQDVIGWTREGDSAHAGSGLATVMSDGPGGSKTMYVGTAHAGQVFKDITGNRTDTVTINSAGNGTFPCNKGSVSIWVKQ

SEQ ID NO: 33946 - protein, 482 aa, Bacillus sp.
HDGTNGTIMQYFEWNVPNDGQHWNRLHNNAQNLKNAGITAIWIPPAWKGTSQSDTGYGAYDLYDLGEFNQKGTVRTKYGTKAELERAIRSLKANGIQVYGDVVMNHKAGADFTEAVQAVEVNPQNRNQEVSGTYQIEAWTGFNFPGRGNQHSSFKWRWYHFDGTDWDQSRQLSNRIYKFRGKAWDWEVDTEFGNYDYLMYADLDMDHPEVINELNRWGVWYANTLNLDGFRLDAVKHIKFSFMRDWLGHVRGQTGKNLFAVAEYWKNDLGALENYLSKTNWTMSAFDVPLHYNLYQASNSSGNYDMRNLLNGTLVQRHPSHAVTFVDNHDTQPGEALESFVQGWFKPLAYATILTREQGYPQVFYGDYYGIPSDGVPSYRQQIDPLLAARQQYAYGTQHDYLDNQDVIGWTREGDSAHAGSGLATVMSDGPGGSKTMYVGTAHAGQVFKDITGNRTDTVTINSAGNGTFPCNKGSVSIWVKQ

SEQ ID NO: 33947 - protein, 482 aa, Bacillus sp.
HDGTNGTIMQYFEWNVPNDGQHWNRLHNNAQNLKNAGITAIWIPPAWKGTSQSDTGYGAYDLYDLGEFNQKGTVRTKYGTKAELERAIRSLKANGIQVYGDVVMNHKAGADQTEQVQAVEVNPQNRNQEVSGTYQIEAWTGFNFPGRGNQHSSFKWRWYHFDGGDWDQSRGLSNRIYKFRGKAWDWEVDTEFGNYDYLMYADLDMDHPEVINELNRWGVWYANTLNLDGFRLDAVKHIKFSFMRDWLGHVRGQTGKNLFAVAEYWKNDLGALENYLSKTNWTMSAFDVPLHYNLYQASNSSGNYDMRNLLNGTLVQRHPSHAVTFVDNHDTQPGEALESFVQGWFKPLAYATILTREQGYPQVFYGDYYGIPSDGVPSYRQQIDPLLAARQQYAYGTQHDYLDNQDVIGWTREGDSAHAGSGLATVMSDGPGGSKTMYVGQAHAGQVFKDITGNRTDTVTINSAGNGTFPCNKGSVSIWVKQ

SEQ ID NO: 33948 - protein, 482 aa, Bacillus sp.
HDGTNGTIMQYFEWNVPNDGQHWNRLHNNAQNLKNAGITAIWIPPAWKGTSQSDTGYGAYDLYDLGEFNQKGTVRTKYGTKAELERAIRSLKANGIQVYGDVVMNHKAGADFTERVQAVEVNPQNRNQEVSGTYQIEAWTGFNFPGRGNQHSSFKWRWYHFDGTDWDQSRQLSNRIYKFRGKAWDWEVDTEFGNYDYLMYADSDMDHPEVINELNRWGVWYANTLNLDGFRLDAVKHIKFSFMRDWLGHVRGQTGKNLFAVAEYWKNDLGALENYLSKTNWTMSAFDVPLHYNLYQASNSSGNYDMRNLLNGTLVQRHPSHAVTFVDNHDTQPGEALESFVQGWFKPLAYATILTREQGYPQVFYGDYYGIPSDGVPSYRQQIDPLLAARQQYAYGTQHDYLDNQDVIGWTREGDSAHAGSGLATVMSDGPGGSKTMYVGTAHAGQVFKDITGNRTDTVTINSAGNGTFPCNKGSVSIWVKQ

SEQ ID NO: 33949 - protein, 482 aa, Bacillus sp.
HDGTNGTIMQYFEWNVPNDGQHWNRLHNNAQNLKNAGITAIWIPPAWKGTSQSDTGYGAYDLYDLGEFNQKGTVRTKYGTKAELERAIRSLKANGIQVYGDVVMNHKAGADFTERVQAVEVNPQNRNQEVSGTYQIEAWTGFNFPGRGNQHSSFKWRWYHFDGTDWDQSRQLSNRIYKFRGKAWDWEVDTEFGNYDYLMYADLDMDHPEVINELNRWGVWYANTLNLDGFRLDAVKHIKFSFMRDWLGHVRGQTGKNLFAVAEYWKNDLGALENYLSKTNWTMSAFDVPLHYNLYQASNSSGNYDMRNLLNGTLVQRHPSHAVTFVDNHDTQPGEALESFVQGWFKPLAYATILTREQGYPQVFYGDYYGIPSDGVPSYRQQIDPLLAARQQYAYGTQHDYLDNQDVIGWTREGDSSHAGSGLATVMSDGPGGSKTMYVGTAHAGQVFKDITGNRTDTVTINSAGNGTFPCNKGSVSIWVKQ

SEQ ID NO: 33950 - protein, 482 aa, Bacillus sp.
HDGTNGTIMQYFEWNVPNDGQHWNRLHNNAQNLKNAGITAIWIPPAWKGTSQSDTGYGAYDLYDLGEFNQRGTVRTKYGTKAELERAIRSLKANGIQVYGDVVMNHKAGADFTERVQAVEVNPQNRNQEVSGTYQIEAWTGFNFPGRGNQHSSFKWRWYHFDGTDWDQSRQLQNRIYKFRGKAWDWEVDTEFGNYDYLMYADLDMDHPEVINELNRWGVWYANTLNLDGFRLDAVKHIKFSFMRDWLGHVRGQTGKNLFAVAEYWKNDLGALENYLSKTNWTMSAFDVPLHYNLYQASNSSGNYDMRNLLNGTLVQRHPSHAVTFVDNHDTQPGEALESFVQGWFKPLAYATILTREQGYPQVFYGDYYGIPSDGVPSYRQQIDPLLAARQQYAYGTQHDYLDNQDVIGWTREGDSAHAGSGLATVMSDGPGGSKTMYVGTAHAGQVFKDITGNRTDTVTINSAGNGTFPCNKGSVSIWVKQ

SEQ ID NO: 33951 - protein, 482 aa, Bacillus sp.
HDGTNGTIMQYFEWNVPNDGQHWNRLHNNAQNLKNAGITAIWIPPAWKGTSQSDTGYGAYDLYDLGEFNQKGTVRTKYGTKAELERAIRSLKANGIQVYGDVVMNHKAGADFTERVQAVEVNPQNRNQEVSGTYQIEAWTGFNFPGRGNQHSSFKWRWYHFDGTDWDQSRQLVNRIYKFRGKAWDWEVDTEFGNYDYLMYADLDMDHPEVINELNRWGVWYANTLNLDGFRLDAVKHIKFSFMRDWLGHVRGQTGKNLFAVAEYWKNDLGALENYLSKTNWTMSAFDVPLHYNLYQASNSSGNYDMRNLLNGTLVQRHPSHAVTFVDNHDTQPGEALESFVQGWFKPLAYATILTREQGYPQVFYGDYYGIPSDGVPSYRQQIDPLLAARQQYAYGTQHDYLDNQDVIGWTREGDSAHAGSGLATVMSDGPGGSKTMYVGTAHAGQVFKDITGNRTDTVTINSAGNGTFPCNKGSVSIWVKQ

SEQ ID NO: 33952 - protein, 482 aa, Bacillus sp.
HDGTNGTIMQYFEWNVPNDGQHWNRLHNNAQNLKNAGITAIWIPPAWKGTSQSDTGYGAYDLYDLGEFNQKGTVRTKYGTKAELERAIRSLKANGIQVYGDVVMNHKAGADFTERVQAVEVNPQNRNQEVSGTYQIEAWTGFNFPGRGNQHSSFKWRWYHFDGTDWDQSRQLSNRIYKFRGKAWDWEVDTEFGNYDYLMYADLDMDHPEVINELNRWGVWYANTLNLDGFRLDAVKHIKFSFMRDWLGHVRGQTGKNLFAVAEYWKNDLGALENYLSKTNWTMSAFDVPLHYNLYQASNSSGNYDMRNLLNGTLVQRHPSHAVTFVDNHDTQPGEALESFVQGWFKPLAYATILTREQGYPQVFYGDYYGIPSDGVPSYRQQIDPLLAARQQYAYGTQHDYLDNQDVIGWTREGDSQHAGSGLATVMSDGPGGSKTMYVGTAHAGQVFKDITGNRTDTVTINSAGNGTFPCNKGSVSIWVKQ

SEQ ID NO: 33953 - protein, 482 aa, Bacillus sp.
HDGTNGTIMQYFEWNVPNDGQHWNRLHNNAQNLKNAGITAIWIPPAWKGTSQSDTGYGAYDLYDLGEFNQKGTVRTKYGTKAELESAIRSLKANGIQVYGDVVMNHKAGADFTERVQAVEVNPQNRNQEVSGTYQIEAWTGFNFPGRGNQHSSFKWRWYHFDGTDWDQSHQLSNRIYKFRGKAWDWEVDTEFGNYDYLMYADLDMDHPEVINELNRWGVWYANTLNLDGFRLDAVKHIKFSFMRDWLGHVRGQTGKNLFAVAEYWKNDLGALENYLSKTNWTMSAFDVPLHYNLYQASNSSGNYDMRNLLNGTLVQRHPSHAVTFVDNHDTQPGEALESFVQGWFKPLAYATILTREQGYPQVFYGDYYGIPSDGVPSYRQQIDPLLAARQQYAYGTQHDYLDNQDVIGWTREGDSAHAGSGLATVMSDGPGGSKTMYVGTAHAGQVFKDITGNRTDTVTINSAGNGTFPCNKGSVSIWVKQ

SEQ ID NO: 33954 - protein, 482 aa, Bacillus sp.
HDGTNGTIMQYFEWNVPNDGQHWNRLHNNAQNLKNAGITAIWIPPAWKGTSQSDTGYGAYDLYDLGEFNQKGTVRTKYGTKAELERAIRSLKANGIQVYGDVVMNHKAGADFTERVQAVEVNPQNRNQEVSGTYQIEAWTGFNFPGRGNQHSSFKWRWYHFDGTDWDQSRQLSNRIYKFRGKAWDWEVDTEFGNYDYLMYADLDMDHPEVINELNRWGVWYANTLNLDGFRLDAVKHIKFSFMRDWLGHVRGQTGKNLFAVAEYWKNDLGALENYLSKTNWTMSAFDVPLHYNLYQASNSSGNYDMRNLLNGTLVQRHPSHAVTFVDNHDTQPGEALESFVQGWFKPLAYATILTREQGYPQVFYGDYYGIPSDGVPSYRQQIDPLLHARQQYAYGTQHDYLDNQDVIGWTREGDSAHAGSGLATVMSDGPGGSKTMYVGTAHAGQVFKDITGNRTDTVTINSAGNGTFPCNKGSVSIWVKQ

SEQ ID NO: 33955 - protein, 482 aa, Bacillus sp.
HDGTNGTIMQYFEWNVPNDGQHWNRLHNNAQNLKNVGITAIWIPPAWKGTSQSDTGYGAYDLYDLGEFNQKGTVRTKYGTKAELERAIRSLKANGIQVYGDVVMNHKAGADFTERVQAVEVNPQNRNQEVSGTYQIEAWTGFNFPGRGNQHSSFKWRWYHFDGTDWDQSRQLSNRIYKFRGKAWDWEVDTEFGNYDYLMYADLDMDHPEVINELNRWGVWYANTLNLDGFRLDAVKHIKFSFMRDWLGHVRGQTGKNLFAVAEYWKNDLGALENYLSKTNWTMSAFDVPLHYNLYQASNSSGNYDMRNLLNGTLVQRHPSHAVTFVDNHDTQPGEALESFVQGWFKPLAYATILTREQGYPQVFYGDYYGIPSDGVPSYRQQIDPLLAARQQYAYGTQHDYLDNQDVIGWTREGDSAHAGSGLATVMSDGPGGSKTMYVGTAHAGQVFKDITGNRTDTVTINSAGNGTFPCNKGSVSIWVKQ

SEQ ID NO: 33956 - protein, 482 aa, Bacillus sp.
HDGTNGTIMQYFEWNVPNDGQHWNRLHNNAQNLKNAGITAIWIPPAWKGTSQSDTGYGAYDLYDLGEFNQKGTVRTKYGTKAELERAIRSLKANGIQVYGDVVMNHKAGADFTERVQAVEVNPQNRNQEVSGTYQIEAWTGFNFPGRGNQHSSFKWRWYHFDGTDWDQSRQLSNRIYKFRGKAWDWEVDTEFGNYDYLMYADLDMDHPEVINELNRWGVWYANTLNLDGFRLDAVKHIKFSFMRDWLGHVRSQTGKNLFAVAEYWKNDLGALENYLSKTNWTMSAFDVPLHYNLYQASNSSGNYDMRNLLNGTLVQRHPSHAVTFVDNHDTQPGEALESFVQGWFKPLAYATILTREQGYPQVFYGDYYGIPSDGVPSYRQQIDPLLAARQQYAYGTQHDYLDNQDVIGWTREGDSAHAGSGLATVMSDGPGGSKTMYVGTAHAGQVFKDITGNRTDTVTINSAGNGTFPCNKGSVSIWVKQ

SEQ ID NO: 33957 - protein, 482 aa, Bacillus sp.
HDGTNGTIMQYFEWNVPNDGQHWNRLHNNAQNLKNAGITAIWIPPAWKGTSQSDTGYGAYDLYDLGEFNQKGTVRTKYGTKAELERAIRSLKANGIQVYGDVVMNHKAGADFTERVQAVEVNPQNRNQEVSGTYQIEAWTGFNFPGRGNQHSSFKWRWYHFDGTDWDQSRQLRNRIYKFRGKAWDWEVDTEFGNYDYLMYADLDMDHPEVINELNRWGVWYANTLNLDGFRLDAVKHIKFSFMRDWLGHVRGQTGKNLFAVAEYWKNDLGALENYLSKTNWTMSAFDVPLHYNLYQASNSSGNYDMRNLLNGTLVQRHPSHAVTFVDNHDTQPGEALESFVQGWFKPLAYATILTREQGYPQVFYGDYYGIPSDGVPSYRQQIDPLLAARQQYAYGTQHDYLDNQDVIGWTREGDSAHAGSGLATVMSDGPGGSKTMYVGTAHAGQVFKDITGNRTDTVTINSAGNGTFPCNKGSVSIWVKQ

SEQ ID NO: 33958 - protein, 482 aa, Bacillus sp.
HDGTNGTIMQYFEWNVPNDGQHWNRLHNNAQNLKNAGITAIWIPPAWKGTSQSDTGYGAYDLYDLGEFNQKGTVRTKYGTKAELERAIRSLKANGIQVYGDVVMNHKAGADFTERVQAVEVNPQNRNQEVSGTYQIEAWTGFNFPGRGNQHSSFKWRWYHFDGTDWDQSRQLSNRIYKFRGKAWDWEVDTEFGNYDYLMYADFDMDHPEVINELNRWGVWYANTLNLDGFRLDAVKHIKFSFMRDWLGHVRGQTGKNLFAVAEYWKNDLGALENYLSKTNWTMSAFDVPLHYNLYQASNSSGNYDMRNLLNGTLVQRHPSHAVTFVDNHDTQPGEALESFVQGWFKPLAYATILTREQGYPQVFYGDYYGIPSDGVPSYRQQIDPLLAARQQYAYGTQHDYLDNQDVIGWTREGDSAHAGSGLATVMSDGPGGSKTMYVGTAHAGQVFKDITGNRTDTVTINSAGNGTFPCNKGSVSIWVKQ

SEQ ID NO: 33959 - protein, 482 aa, Bacillus sp.
HDGTNGTIMQYFEWNVPNDGQHWNRLHNNAQNLKNAGITAIWIPPAWKGTSQSDTGYGAYDLYDLGEFNQKGTVRTKYGTKAELERAIRSLKANGIQVYGDVVMNHKAGADFTERVQAVEVNPQNRNQEVSGTYQIEAWTGFNFPGRGNQHSSFKWRWYHFDGTDWDQSRQLSNRIYKFRGKAWDWEVDTEFGNYDYLMYADLDMDHPEVHNELNRWGVWYANTLNLDGFRLDAVKHIKFSFMRDWLGHVRGQTGKNLFAVAEYWKNDLGALENYLSKTNWTMSAFDVPLHYNLYQASNSSGNYDMRNLLNGTLVQRHPSHAVTFVDNHDTQPGEALESFVQGWFKPLAYATILTREQGYPQVFYGDYYGIPSDGVPSYRQQIDPLLAARQQYAYGTQHDYLDNQDVIGWTREGDSAHAGSGLATVMSDGPGGSKTMYVGTAHAGQVFKDITGNRTDTVTINSAGNGTFPCNKGSVSIWVKQ

SEQ ID NO: 33960 - protein, 482 aa, Bacillus sp.
HDGTNGTIMQYFEWNVPNDGQHWNRLHNNAQNLKNAGITAIWIPPAWKGTSQSDTGYGAYDLYDLGEFNQKGTVRTKYGTKAELERAIRSLKANGIQVYGDVVMNHKAGADFTERVQAVEVNPQNRNQEVSGTYQIEAWTGFNFPGRGNQHSSFKWRWYHFDGTDWDQSRQLSNRIYKFRGKAWDWEVDTEFGNYDYLMYADLDMDHPEVINELNRWGVWYANTLNLDGFRLDAVKHIKFSFMRDWLGHVRGQTGKNLFAVAEYWKNDLGALENYLSKTNWTMSAFDVPLHYNLYQASNSSGNYDMRNLLNGTLVQRHPSHAVTFVDNHDTQPGEALESFVQSWFKPLAYATILTREQGYPQVFYGDYYGIPSDGVPSYRQQIDPLLAARQQYAYGTQHDYLDNQDVIGWTREGDSAHAGSGLATVMSDGPGGSKTMYVGTAHAGQVFKDITGNRTDTVTINSAGNGTFPCNKGSVSIWVKQ

SEQ ID NO: 33961 - protein, 482 aa, Bacillus sp.
HDGTNGTIMQYFEWNVPNDGQHWNRLHNNAQNLKNHGITAIWIPPAWKGTSQSDTGYGAYDLYDLGEFNQKGTVRTKYGTKAELERAIRSLKANGIQVYGDVVMNHKAGADFTEHVQAVEVNPQNRNQEVSGTYQIEAWTGFNFPGRGNQHSSFKWRWYHFDGGDWDQSRQLSNRIYKFRGKAWDWEVDTEFGNYDYLMYADLDMDHPEVINELNRWGVWYANTLNLDGFRLDAVKHIKFSFFRDWLGHVRGQTGKNLFAVAEYWKNDLGALENYLSKTNWTMSAFDVPLHYNLYQASNSSGNYDMRNLLNGTLVQRHPSHAVTFVDNHDTQPGEALESFVQGWFKPLAYATILTREQGYPQVFYGDYYGIPSDGVPSYRQQIDPLLAARQQYAYGTQHDYLDNQDVIGWTREGDSAHAGSGLATVMSDGPGGSKTMYVGTAHAGQVFKDITGNRTDTVTINSAGNGTFPCNKGSVSIWVKQ

SEQ ID NO: 33962 - protein, 482 aa, Bacillus sp.
HDGTNGTIMQYFEWNVPNDGQHWNRLHNNAQNLKNAGITAIWIPPAWKGTSQSDTGYGAYDLYDLGEFNQKGTVRTKYGTKAELERAIRSLKANGIQVYGDVVMNHKAGADQTERVQAVEVNPQNRNQEVSGTYQIEAWTGFNFPGRGNQHSSFKWRWYHFDGTDWDQSRNLSNRIYKFRGKAWDWEVDTEFGNYDYLMYADLDMDHPEVINELNRWGVWYANTLNLDGFRLDAVKHIKFSFMRDWLGHVRGQTGKNLFAVAEYWKNDLGALENYLSKTNWTMSAFDVPLHYNLYQASNSSGNYDMRNLLNGTLVQRHPSHAVTFVDNHDTQPGEALESFVQGWFKPLAYATILTREQGYPQVFYGDYYGIPSDGVPSYRQQIDPLLAARQQYAYGTQHDYLDNQDVIGWTREGDSAHAGSGLATVMSDGPGGSKTMYVGQAHAGQVFKDITGNRTDTVTINSAGNGTFPCNKGSVSIWVKQ

SEQ ID NO: 33963 - protein, 482 aa, Bacillus sp.
HDGTNGTIMQYFEWNVPNDGQHWNRLHNNAQNLKNAGITAIWIPPAWKGTSQSDTGYGAYDLYDLGEFNQKGTVRTKYGTKAELERAIRSLKANGIQVYGDVVMNHKAGADFTERVQAVEVNPQNRNQEVSGEYQIEAWTGFNFPGRGNQHSSFKWRWYHFDGTDWDQSRQLSNRIYKFRGKAWDWEVDTEFGNYDYLMYADLDMDHPEVINELNRWGVWYANTLNLDGFRLDAVKHIKFSFMRDWLGHVRGQTGKNLFAVAEYWKNDLGALENYLSKTNWTMSAFDVPLHYNLYQASNSSGNYDMRNLLNGTLVQAHPNHAVTFVDNHDTQPGEALESFVQGWFKPLAYATILTREQGYPQVFYGDYYGIPSDGVPSYRQQIDPLLAARQQYAYGTQHDYLDNQDVIGWTREGDSAHAGSGLATVMSDGPGGSKTMYVGTAHAGQVFKDITGNRTDTVTINSAGNGTFPCNKGSVSIWVKQ

SEQ ID NO: 33964 - protein, 482 aa, Bacillus sp.
HDGTNGTIMQYFEWNVPNDGQHWNRLHNNAQNLKNAGITAIWIPPAWKGTSQSDTGYGAYDLYDLGEFNQKGTVRTKYGTKAELERAIRSLKANGIQVYGDVVMNHKAGADFTEGVQAVEVNPQNRNQEVSGTYQIEAWTGFNFPGRGNQHSSFKWRWYHFDGTDWDQSRQLSNRIYKFRGKAWDWEVDTEFGNYDYLMYADLDMDHPEVINELNRWGVWYANTLNLDGFRLDAVKHIKFSFMRDWLGHVRGQTGKNLFAVAEYWKNDLGALENYLSKTNWTMSAFDVPLHYNLYQASNSSGNYDMRNLLNGTLVQRHPSHAVTFVDNHDTQPGEALESFVQGWFKPLAYATILTREQGYPQVFYGDYYGIPSDGVPSYRQQIDPLLAARQQYAYGTQHDYLDNQDVIGWTREGDSAHAGSGLATVMSDGPGGSKTMYVGTAHAGQVFKDITGNRTDTVTINSAGNGTFPCNKGSVSIWVKQ

SEQ ID NO: 33965 - protein, 482 aa, Bacillus sp.
HDGTNGTIMQYFEWNVPNDGQHWNRLHNNAQNLKNAGITAIWIPPAWKGTSQSDTGYGAYDLYDLGEFNQKGTVRTKYGTKAELERAIRSLKANGIQVYGDVVMNHKAGADFTERVQAVEVNPQNRNQEVSGTYQIEAWTGFNFPGRGNQHSSFKWRWYHFDGTDWDQSRQLSNRIYKFRGKAWDWEVDTEFGNYDYLMYADLDMDHPEVINELNRWGVWYANTLNLDGFRLDAVKHIKFSFMRDWLGHVRGQTGKNLFAVAEYWKNDLGALENYLSKTNWTMSAFDVPLHYNLYQASNSSGNYDMRNLLNGTLVQRHPSHAVTFVDNHDTQPGEALESFVQGWFKPLAYATILTREQGYPQVFYGDYYGIPSDGVPSYRQQIDPLLAARQQYAYGTQHDYLDNQDVIGWTREGDSKHAGSGLATVMSDGPGGSKTMYVGTAHAGQVFKDITGNRTDTVTINSAGNGTFPCNKGSVSIWVKQ

SEQ ID NO: 33966 - protein, 482 aa, Bacillus sp.
HDGTNGTIMQYFEWNVPNDGQHWNRLHNNAQNLKNAGITAIWIPPAWKGTSQSDTGYGAYDLYDLGEFNQKGTVRTKYGTKAELERAIRSLKANGIQVYGDVVMNHKAGADFTERVSAVEVNPQNRNQEVSGTYQIEAWTGFNFPGRGNQHSSFKWRWYHFDGTDWDQSRQLSNRIYKFRGKAWDWEVDTEFGNYDYLMYADLDMDHPEVINELNRWGVWYANTLNLDGFRLDAVKHIKFSFMRDWLGHVRGQTGKNLFAVAEYWKNDLGALENYLSKTNWTMSAFDVPLHYNLYQASNSSGNYDMRNLLNGTLVQRHPSHAVTFVDNHDTQPGEALESFVQGWFKPLAYATILTREQGYPQVFYGDYYGIPSDGVPSYRQQIDPLLAARQQYAYGTQHDYLDNQDVIGWTREGDSAHAGSGLATVMSDGPGGSKTMYVGTAHAGQVFKDITGNRTDTVTINSAGNGTFPCNKGSVSIWVKQ

SEQ ID NO: 33967 - protein, 482 aa, Bacillus sp.
HDGTNGTIMQYFEWNVPNDGQHWNRLHNNAQNLKNAGITAIWIPPAWKGTSQSDTGYGAYDLYDLGEFNQKGTVRTKYGTKAELERAIRSLKANGIQVYGDVVMNHKAGADFTERVQAVEVNPQNRNQEVSGTYQIEAWTGFNFPGRGNQHSSFKWRWYHFDGTDWDQSRQLSNRIYKFRGKAWDWEVDTEFGNYDYLMYADLDMDHPEVWNELNRWGVWYANTLNLDGFRLDAVKHIKFSFMRDWLGHVRGQTGKNLFAVAEYWKNDLGALENYLSKTNWTMSAFDVPLHYNLYQASNSSGNYDMRNLLNGTLVQRHPSHAVTFVDNHDTQPGEALESFVQGWFKPLAYATILTREQGYPQVFYGDYYGIPSDGVPSYRQQIDPLLAARQQYAYGTQHDYLDNQDVIGWTREGDSAHAGSGLATVMSDGPGGSKTMYVGTAHAGQVFKDITGNRTDTVTINSAGNGTFPCNKGSVSIWVKQ

SEQ ID NO: 33968 - protein, 482 aa, Bacillus sp.
HDGTNGTIMQYFEWNVPNDGQHWNRLHNNAQNLKNAGITAIWIPPAWKGTSQSDTGYGAYDLYDLGEFNQKGTVRTKYGTKAELERAIRSLKANGIQVYGDVVMNHKAGADFTERVQAVEVNPQNRNQEVSGTYQIEAWTGFNFPGRGNQHSSFKWRWYHFDGTDWDQSRQLSNRIYKFRGKAWDWEVDTEFGNYDYLMYADLDMDHPEVINELNRWGVWYANTLNLDGFRLDAVKHIKFSFMRDWLGHVRGQTGKNLFAVAEYWKNDLGALENYLSKTNWTMSAFDVPLHYNLYQASNSSGNYDMRNLLNGTLVQRHPSHAVTFVDNHDTQPGEALESFVQGWFKPLAYATILTREQGYPQVFYGDYYGIPSAGVPSYRQQIDPLLAARQQYAYGTQHDYLDNQDVIGWTREGDSAHAGSGLATVMSDGPGGSKTMYVGTAHAGQVFKDITGNRTDTVTINSAGNGTFPCNKGSVSIWVKQ

SEQ ID NO: 33969 - protein, 482 aa, Bacillus sp.
HDGTNGTIMQYFEWNVPNDGQHWNRLNSNAQNLKNAGITAIWIPPAWKGTSQSDTGYGAYDLYDLGEFNQKGTVRTKYGTKAELERAIRSLKANGIQVYGDVVMNHKAGADFTERVQAVEVNPQNRNQEVSGTYQIEAWTGFNFPGRGNQHSSFKWRWYHFDGTDWDQSRQLSNRIYKFRGKAWDWEVDTEFGNYDYLMYADLDMDHPEVINELNRWGVWYANTLNLDGFRLDAVKHIKFSFMRDWLGHVRGQTGKNLFAVAEYWKNDLGALENYLSKTNWTMSAFDVPLHYNLYQASNSSGNYDMRNLLNGTLVQRHPSHAVTFVDNHDTQPGEALESFVQGWFKPLAYATILTREQGYPQVFYGDYYGIPSDGVPSYRQQIDPLLAARQQYAYGTQHDYLDNQDVIGWTREGDSAHAGSGLATVMSDGPGGSKTMYVGTAHAGQVFKDITGNRTDTVTINSAGNGTFPCNKGSVSIWVKQ

SEQ ID NO: 33970 - protein, 482 aa, Bacillus sp.
HDGTNGTIMQYFEWNVPNDGQHWNRLHNNAQNLKNAGITAIWIPPAWKGTSQSDTGYGVYDLYDLGEFNQKGTVRTKYGTKAELERAIRSLKANGIQVYGDVVMNHKAGADFTEQVQAVEVNPQNRNQEVSGTYQIEAWTGFNFPGRGNQHSSFKWRWYHFDGGDWDQSRQLSNRIYKFRGKAWDWEVDTEFGNYDYLMYADLDMDHPEVINELNRWGVWYANTLNLDGFRLDAVKHIKFSFMRDWLGHVRGQTGKNLFAVAEYWKNDLGALENYLSKTNWTMSAFDVPLHYNLYQASNSSGNYDMRNLLNGTLVQRHPSHAVTFVDNHDTQPGEALESFVQGWFKPLAYATILTREQGYPQVFYGDYYGIPSDGVPSYRQQIDPLLAARQQYAYGTQHDYLDNQDVIGWTREGDSAHAGSGLATVMSDGPGGSKTMYVGQAHAGQVFKDITGNRTDTVTINSAGNGTFRCNKGSVSIWVKQ

SEQ ID NO: 33971 - protein, 482 aa, Bacillus sp.
HDGTNGTIMQYFEWNVPNDGQHWNRLHNNAQNLKNAGITAIWIPPAWKGTSQSDTGYGAYDLYDLGEFNQKGTVRTKYGTKAELERAIRSLKANGIQVYGDVVMNHKAGADFTERVQAVEVNPQNRNQEVSGTYQIEAWTGFNFPGRGNQHSSFKWRWYHFDGTDWDQSRQLSNRIYKFRGKAWDWEVDTEFGNYDYLMYADLDMDHPEVINELNRWGVWYANTLNLDGFRLDAVKHIKFSFMRDWVGHVRGQTGKNLFAVAEYWKNDLGALENYLSKTNWTMSAFDVPLHYNLYQASNSSGNYDMRNLLNGTLVQRHPSHAVTFVDNHDTQPGEALESFVQGWFKPLAYATILTREQGYPQVFYGDYYGIPSHGVPSYRQQIDPLLAARQQYAYGTQHDYLDNQDVIGWTREGDSAHAGSGLATVMSDGPGGSKTMYVGTAHAGQVFKDITGNRTDTVTINSAGNGTFPCNKGSVSIWVKQ

SEQ ID NO: 33972 - protein, 482 aa, Bacillus sp.
HDGTNGTIMQYFEWNVPNDGQHWNRLHNNAQNLKNAGITAIWIPPAWKGTSQSDTGYGAYDLYDLGEFNQKGTVRTKYGTKAELERAIRSLKANGIQVYGDVVMNHKAGADFTERVQAVEVNPQNRNQEVSGTYQIEAWTGFNFPGRGNQHSSFKWRWYHFDGTDWDQSRQLSNRIYKFRGKAWDWEVDTEFGNYDYLMYADLDMDHPEVINELNRWGVWYANTLNLDGFRLDAVKHIKFSFMRDWLGHVRGQTGKNLFAVAEYWKNDLGALENYLSKTNWTMSAFDVPLHYNLYQASNSSGNYDMRNLLNGTLVQRHPSHAVTFVDNHDTQPGEALESFVQGWFKPLAYATILTREQGYPQVFYGDYYGIPSQGVPSYRQQIDPLLAARQQYAYGTQHDYLDNQDVIGWTREGDSAHAGSGLATVMSDGPGGSKTMYVGTAHAGQVFKDITGNRTDTVTINSAGNGTFPCNKGSVSIWVKQ

SEQ ID NO: 33973 - protein, 482 aa, Bacillus sp.
HDGTNGTIMQYFEWNVPNDGQHWNRLHNNAQNLKNAGITAIWIPPAWKGTSQSDTGYGAYDLYDLGEFNQKGTVRTKYGTKAELERAIRSLKANGIQVYGDVVMNHKAGADFTERVQAVEVNPQNRNQEVSGTYQIEAWTGFNFPGRGNQHSSFKWRWYHFDGTDWDQSRQLSNRIYKFRGKAWDWEVDTEFGNYDYLMYADLDMDHPEVINELNRWGVWYANTLNLDGFRLDAVKHIKFSFMRDWLGHVRGQTGKNLFAVAEYWKNDLGALENYLSKTNWTMSAFDVPLHYNLYQASNSSGNYDMRNLLNGTLVQRHPSHAVTFVDNHDTQPGEALESFVQGWFKPLAYATILTREQGYPQVFYGDYYGIPSDGVPSYRQQIDPLLAARQQYAYGTQHDYLDNQDVIGWTREGDSLHAGSGLATVMSDGPGGSKTMYVGTAHAGQVFKDITGNRTDTVTINSAGNGTFPCNKGSVSIWVKQ

SEQ ID NO: 33974 - protein, 482 aa, Bacillus sp.
HDGTNGTIMQYFEWNVPNDGQHWNRLHNNAQNLKNAGITAIWIPPAWKGTSQSDTGYGAYDLYDLGEFNQKGTVRTKYGTKAELERAIRSLKANGIQVYGDVVMNHKAGADFTERVQAVEVNPQNRNQEVSGTYQIEAWTGFNFPGRGNQHSSFKWRWYHFDGTDWDQSRQASNRIYKFRGKAWDWEVDTEFGNYDYLMYADLDMDHPEVINELNRWGVWYANTLNLDGFRLDAVKHIKFSFMRDWLGHVRGQTGKNLFAVAEYWKNDLGALENYLSKTNWTMSAFDVPLHYNLYQASNSSGNYDMRNLLNGTLVQRHPSHAVTFVDNHDTQPGEALESFVQGWFKPLAYATILTREQGYPQVFYGDYYGIPSDGVPSYRQQIDPLLAARQQYAYGTQHDYLDNQDVIGWTREGDSAHAGSGLATVMSDGPGGSKTMYVGTAHAGQVFKDITGNRTDTVTINSAGNGTFPCNKGSVSIWVKQ

SEQ ID NO: 33975 - protein, 482 aa, Bacillus sp.
HDGTNGTIMQYFEWNVPNDGQHWNRLHNNAQNLKNAGITAIWIPPAWKGTSQSDTGYGAYDLYDLGEFNQKGTVRTKYGTKAELERAIRSLKANGIQVYGDVVMNHKAGADFTERVQAVEVNPQNRNQEVSGTYQIEAWTGFNFPGRGNQHSSFKWRWYHFDGTDWDQSRQLSNRIYKFRGKAWDWEVDTEFGNYDYLMYTDLDMDHPEVINELNRWGVWYANTLNLDGFRLDAVKHIKFSFMRDWLGHVRGQTGKNLFAVAEYWKNDLGALENYLSKTNWTMSAFDVPLHYNLYQASNSSGNYDMRNLLNGTLVQRHPSHAVTFVDNHDTQPGEALESFVQGWFKPLAYATILTREQGYPQVFYGDYYGIPSHGVPSYRQQIDPLLAARQQYAYGTQHDYLDNQDVIGWTREGDSAHAGSGLATVMSDGPGGSKTMYVGTAHAGQVFKDITGNRTDTVTINSAGNGTFPCNKGSVSIWVKQ

SEQ ID NO: 33976 - protein, 482 aa, Bacillus sp.
HDGTNGTIMQYFEWNVPNDGQHWNRLHNNAQNLKNAGITAIWIPPAWKGTSQSDTGYGAYDLYDLGEFNQKGTVRTKYGTKAELERAIRSLKANGIQVYGDVVMNHKAGADFTERVQAVEVNPQNRNQEVSGTYQIEAWTGFNFPGRGNQHSSFKWRWYHFDGTDWDQSRQLANRIYKFRGKAWDWEVDTEFGNYDYLMYADLDMDHPEVINELNRWGVWYANTLNLDGFRLDAVKHIKFSFMRDWLGHVRGQTGKNLFAVAEYWKNDLGALENYLSKTNWTMSAFDVPLHYNLYQASNSSGNYDMRNLLNGTLVQRHPSHAVTFVDNHDTQPGEALESFVQGWFKPLAYATILTREQGYPQVFYGDYYGIPSDGVPSYRQQIDPLLKARQQYAYGTQHDYLDNQDVIGWTREGDSAHAGSGLATVMSDGPGGSKTMYVGTAHAGQVFKDITGNRTDTVTINSAGNGTFPCNKGSVSIWVKQ

SEQ ID NO: 33977 - protein, 482 aa, Bacillus sp.
HDGTNGTIMQYFEWNVPNDGQHWNRLHNNAQNLKNAGITAIWIPPAWKGTSQSDTGYGAYDLYDLGEFNQKGTVRTKYGTKAELERAIRSLKANGIQVYGDVVMNHKAGADFTEMVQAVEVNPQNRNQEVSGTYQIEAWTGFNFPGRGNQHSSFKWRWYHFDGTDWDQSRQLSNRIYKFRGKAWDWEVDTEFGNYDYLMYADLDMDHPEVINELNRWGVWYANTLNLDGFRLDAVKHIKFSFMRDWLGHVRGQTGKNLFAVAEYWKNDLGALENYLSKTNWTMSAFDVPLHYNLYQASNSSGNYDMRNLLNGTLVQRHPSHAVTFVDNHDTQPGEALESFVQGWFKPLAYATILTREQGYPQVFYGDYYGIPSDGVPSYRQQIDPLLAARQQYAYGTQHDYLDNQDVIGWTREGDSAHAGSGLATVMSDGPGGSKTMYVGTAHAGQVFKDITGNRTDTVTINSAGNGTFPCNKGSVSIWVKQ

SEQ ID NO: 33978 - protein, 482 aa, Bacillus sp.
HDGTNGTIMQYFEWNVPNDGQHWNRLHNNAQNLKNAGITAIWIPPAWKGTSQSDTGYGAYDLYDLGEFNQKGTVRTKYGTKAELERAIRSLKANGIQVYGDVVMNHKAGADFTERVQAVEVNPQNRNQEVSGTYQIEAWTGFNFPGRGNQHSSFKWRWYHFDGTDWDQSRQLFNRIYKFRGKAWDWEVDTEFGNYDYLMYADLDMDHPEVINELNRWGVWYANTLNLDGFRLDAVKHIKFSFMRDWLGHVRGQTGKNLFAVAEYWKNDLGALENYLSKTNWTMSAFDVPLHYNLYQASNSSGNYDMRNLLNGTLVQRHPSHAVTFVDNHDTQPGEALESFVQGWFKPLAYATILTREQGYPQVFYGDYYGIPSDGVPSYRQQIDPLLAARQQYAYGTQHDYLDNQDVIGWTREGDSAHAGSGLATVMSDGPGGSKTMYVGTAHAGQVFKDITGNRTDTVTINSAGNGTFPCNKGSVSIWVKQ

SEQ ID NO: 33979 - protein, 482 aa, Bacillus sp.
HDGTNGTIMQYFEWNVPNDGQHWNRLHNNAQNLKNAGITAIWIPPAWKGTSQSDTGYGAYDLYDLGEFNQKGTVRTKYGTKAELERAIRSLKANGIQVYGDVVMNHKAGADFTERVQAVEVNPQNRNQEVSGTYQIEAWTGFNFPGRGNQHSSFKWRWYHFDGTDWDQSRQLSNRIYKFRGKAWDWEVDTEFGNYDYLMYADLDMDHPEVSNELNRWGVWYANTLNLDGFRLDAVKHIKFSFMRDWLGHVRGQTGKNLFAVAEYWKNDLGALENYLSKTNWTMSAFDVPLHYNLYQASNSSGNYDMRNLLNGTLVQRHPSHAVTFVDNHDTQPGEALESFVQGWFKPLAYATILTREQGYPQVFYGDYYGIPSDGVPSYRQQIDPLLAARQQYAYGTQHDYLDNQDVIGWTREGDSAHAGSGLATVMSDGPGGSKTMYVGTAHAGQVFKDITGNRTDTVTINSAGNGTFPCNKGSVSIWVKQ

SEQ ID NO: 33980 - protein, 482 aa, Bacillus sp.
HDGTNGTIMQYFEWNVPNDGQHWNRLHNNAQNLKNAGITAIWIPPAWKGTSQSDTGYGAYDLYDLGEFNQKGTVRTKYGTKAELERAIRSLKANGIQVYGDVVMNHKAGADFTERVQAVEVNPQNRNQEVSGTYQIEAWTGFNFPGRGNQHSSFKWRWYHFDGTDWDQSRQLSNRIYKFRGKAWDWEVDTEFGNYDYLMYADLDMDHPEVINELNRWGVWYANTLNLDGFRLDAVKHIKFSFMRDWIGHVRGQTGKNLFAVAEYWKNDLGALENYLSKTNWTMSAFDVPLHYNLYQASNSSGNYDMRNLLNGTLVQRHPSHAVTFVDNHDTQPGEALESFVQGWFKPLAYATILTREQGYPQVFYGDYYGIPSHGVPSYRQQIDPLLAARQQYAYGTQHDYLDNQDVIGWTREGDSAHAGSGLATVMSDGPGGSKTMYVGTAHAGQVFKDITGNRTDTVTINSAGNGTFPCNKGSVSIWVKQ

SEQ ID NO: 33981 - protein, 482 aa, Bacillus sp.
HDGTNGTIMQYFEWNVPNDGQHWNRLHNNAQNLKNAGITAIWIPPAWKGTSQSDTGYGAYDLYDLGEFNQKGTVRTKYGTKAELERAIRSLKANGIQVYGDVVMNHKAGADFTERVQAVEVNPQNRNQEVSGTYQIEAWTGFNFPGRGNQHSSFKWRWYHFDGTDWDQSRQLSNRIYKFRGKAWDWEVDTEFGNYDYLMYADLDMDHPEVINELNRWGVWYANTLNLDGFRLDAVKHIKFSFSRDWLGHVRGQTGKNLFAVAEYWKNDLGALENYLSKTNWTMSAFDVPLHYNLYQASNSSGNYDMRNLLNGTLVQRHPSHAVTFVDNHDTQPGEALESFVQGWFKPLAYATILTREQGYPQVFYGDYYGIPSDGVPSYRQQIDPLLAARQQYAYGTQHDYLDNQDVIGWTREGDSAHAGSGLATVMSDGPGGSKTMYVGTAHAGQVFKDITGNRTDTVTINSAGNGTFPCNKGSVSIWVKQ

SEQ ID NO: 33982 - protein, 482 aa, Bacillus sp.
HDGTNGTIMQYFEWNVPNDGQHWNRLHNNAQNLKNAGITAIWIPPAWKGTSQSDTGYGAYDLYDLGEFNQKGTVRTKYGTKAELERAIRSLKANGIQVYGDVVMNHKAGADFTERVQAVEVNPQNRNQEVSGTYQIEAWTTFNFPGRGNQHSSFKWRWYHFDGTDWDQSRQLSNRIYKFRGKAWDWEVDTEFGNYDYLMYADLDMDHPEVINELNRWGVWYANTLNLDGFRLDAVKHIKFSFMRDWLGHVRGQTGKNLFAVAEYWKNDLGALENYLSKTNWTMSAFDVPLHYNLYQASNSSGNYDMRNLLNGTLVQRHPSHAVTFVDNHDTQPGEALESFVQGWFKPLAYATILTREQGYPQVFYGDYYGIPSDGVPSYRQQIDPLLAARQQYAYGTQHDYLDNQDVIGWTREGDSAHAGSGLATVMSDGPGGSKTMYVGTAHAGQVFKDITGNRTDTVTINSAGNGTFPCNKGSVSIWVKQ

SEQ ID NO: 33983 - protein, 482 aa, Bacillus sp.
HDGTNGTIMQYFEWNVPNDGQHWNRLHNNAQNLKNAGITAIWIPPAWKGTSQSDTGYGAYDLYDLGEFNQKGTVRTKYGTKAELERAIRSLKANGIQVYGDVVMNHKAGADQTEQVQAVEVNPQNRNQEVSGTYQIEAWTGFNFPGRGNQHSSFKWRWYHFDGTDWDQSRMLSNRIYKFRGKAWDWEVDTEFGNYDYLMYADLDMDHPEVINELNRWGVWYANTLNLDGFRLDAVKHIKFSFMRDWLGHVRGQTGKNLFAVAEYWKNDLGALENYLSKTNWTMSAFDVPLHYNLYQASNSSGNYDMRNLLNGTLVQRHPSHAVTFVDNHDTQPGEALESFVQGWFKPLAYATILTREQGYPQVFYGDYYGIPSDGVPSYRQQIDPLLAARQQYAYGTQHDYLDNQDVIGWTREGDSAHAGSGLATVMSDGPGGSKTMYVGQAHAGQVFKDITGNRTDTVTINSAGNGTFPCNKGSVSIWVKQ

SEQ ID NO: 33984 - protein, 482 aa, Bacillus sp.
HDGTNGTIMQYFEWNVPNDGQHWNRLHNNAQNLKNAGITAIWIPPAWKGTSQSDTGYGAYDLYDLGEFNQKGTVRTKYGTKAELERAIRSLKANGIQVYGDVVMNHKAGADFTERVQAVEVNPQNRNQEVSGTYQIEAWTGFNFPGRGNQHSSFKWRWYHFDGTDWDQSRQLSNRIYKFRGKAWDWEVDTEFGNYDYLMYADLDMDHPEVINELNRWGVWYANTLNLDGFRLDAVKHIKFSFVRDWLGHVRGQTGKNLFAVAEYWKNDLGALENYLSKTNWTMSAFDVPLHYNLYQASNSSGNYDMRNLLNGTLVQRHPSHAVTFVDNHDTQPGEALESFVQGWFKPLAYATILTREQGYPQVFYGDYYGIPSDGVPSYRQQIDPLLAARQQYAYGTQHDYLDNQDVIGWTREGDSAHAGSGLATVMSDGPGGSKTMYVGTAHAGQVFKDITGNRTDTVTINSAGNGTFPCNKGSVSIWVKQ

SEQ ID NO: 33985 - protein, 482 aa, Bacillus sp.
HDGTNGTIMQYFEWNVPNDGQHWNRLHNNAQNLKNAGITAIWIPPAWKGTSQSDTGYGAYDLYDLGEFNQKGTVRTKYGTKAELERAIRSLKANGIQVYGDVVMNHKAGADFTERVQAVEVNPQNRNQEVSGTYQIEAWTGFNFPGRGNQHSSFKWRWYHFDGTDWDQSRQLSNRIYKFRGKAWDWEVDTEFGNYDYLMYADLDMDHPEVINELNRWGVWYANTLNLDGFRLDAVKHIKFSFMRDWAGHVRGQTGKNLFAVAEYWKNDLGALENYLSKTNWTMSAFDVPLHYNLYQASNSSGNYDMRNLLNGTLVQRHPSHAVTFVDNHDTQPGEALESFVQGWFKPLAYATILTREQGYPQVFYGDYYGIPSHGVPSYRQQIDPLLAARQQYAYGTQHDYLDNQDVIGWTREGDSAHAGSGLATVMSDGPGGSKTMYVGTAHAGQVFKDITGNRTDTVTINSAGNGTFPCNKGSVSIWVKQ

SEQ ID NO: 33986 - protein, 482 aa, Bacillus sp.
HDGTNGTIMQYFEWNVPNDGQHWNRLHNNAQNLKNAGITAIWIPPAWKGTSQSDTGYGAYDLYDLGEFNQKGTVRTKYGTKAELERAIRSLKANGIQVYGDVVMNHKAGADFTERVQAVEVNPQNRNQEVSGTYQIEAWTGFNFPGRGNQHSSFKWRWYHFDGTDWDQSRQLSNRIYKFRGKAWDWEVDTEFGNYDYLMYADLDMDHPEVINELNRWGVWYANTLNLDGFRLDAVKHIKFSFMRDWLGHVRGQTGKNLFAVAEYWKNDLGALENYLSKTNWTMSAFDVPLHYNLYQASNSSGNYDMRNLLNGTLVQRHPSHAVTFVDNHDTQPGEALESFVQGWFKPLAYATILTREQGYPQVFYGDYYGIPVDGVPSYRQQIDPLLAARQQYAYGTQHDYLDNQDVIGWTREGDSAHAGSGLATVMSDGPGGSKTMYVGTAHAGQVFKDITGNRTDTVTINSAGNGTFPCNKGSVSIWVKQ

SEQ ID NO: 33987 - protein, 482 aa, Bacillus sp.
HDGTNGTIMQYFEWNVPNDGQHWNRLHNNAQNLKNAGITAIWIPPAWKGTSQSDTGYGAYDLYDLGEFNQKGTVRTKYGTKAELERAIRSLKANGIQVYGDVVMNHKAGADFTERVQAVEVNPQNRNQEVSGTYQIEAWTGFNFPGRGNQHSSFKWRWYHFDGTDWDQSRQLSNRIYKFRGKAWDWEVDTEFGNYDYLMYADLDMDHPEVINELNRWGVWYANTLNLDGFRLDAVKHIKFSFMRDWLGHVRGQTGKNLFAVAEYWKNDLGALENYLSKTNWTMSAFDVPLHYNLYQASNSSGNYDMRNLLNGTLVQRHPSHAVTFVDNHDTQPGEALESFVQGWFKPLAYATILTREQGYPQVFYGDYYGIPSDGVPSYRQQIDPLLAARQQYAYGTQHDYLDNQDVIGWTREGDSAHAGSGLATVMSDGPGGSKTMYVGTAHAGQVFKDITGNRTDTVTINSAGNGTFKCNKGSVSIWVKQ

SEQ ID NO: 33988 - protein, 482 aa, Bacillus sp.
HDGTNGTIMQYFEWNVPNDGQHWNRLHNNAQNLKNAGITAIWIPPAWKGTSQSDTGYGAYDLYDLGEFNQKGTVRTKYGTKAELERAIRSLKANGIQVYGDVVMNHKAGADQTERVQAVEVNPQNRNQEVSGTYQIEAWTGFNFPGRGNQHSSFKWRWYHFDGTDWDQSRGLSNRIYKFRGKAWDWEVDTEFGNYDYLMYADLDMDHPEVINELNRWGVWYANTLNLDGFRLDAVKHIKFSFMRDWLGHVRGQTGKNLFAVAEYWKNDLGALENYLSKTNWTMSAFDVPLHYNLYQASNSSGNYDMRNLLNGTLVQRHPSHAVTFVDNHDTQPGEALESFVQGWFKPLAYATILTREQGYPQVFYGDYYGIPSDGVPSYRQQIDPLLAARQQYAYGTQHDYLDNQDVIGWTREGDSAHAGSGLATVMSDGPGGSKTMYVGQAHAGQVFKDITGNRTDTVTINSAGNGTFPCNKGSVSIWVKQ

SEQ ID NO: 33989 - protein, 482 aa, Bacillus sp.
HDGTNGTIMQYFEWNVPNDGQHWNRLHNNAQNLKNMGITAIWIPPAWKGTSQSDTGYGAYDLYDLGEFNQKGTVRTKYGTKAELERAIRSLKANGIQVYGDVVMNHKAGADFTERVQAVEVNPQNRNQEVSGTYQIEAWTGFNFPGRGNQHSSFKWRWYHFDGTDWDQSRQLSNRIYKFRGKAWDWEVDTEFGNYDYLMYADLDMDHPEVINELNRWGVWYANTLNLDGFRLDAVKHIKFSFMRDWLGHVRGQTGKNLFAVAEYWKNDLGALENYLSKTNWTMSAFDVPLHYNLYQASNSSGNYDMRNLLNGTLVQRHPSHAVTFVDNHDTQPGEALESFVQGWFKPLAYATILTREQGYPQVFYGDYYGIPSDGVPSYRQQIDPLLAARQQYAYGTQHDYLDNQDVIGWTREGDSAHAGSGLATVMSDGPGGSKTMYVGTAHAGQVFKDITGNRTDTVTINSAGNGTFPCNKGSVSIWVKQ

SEQ ID NO: 33990 - protein, 482 aa, Bacillus sp.
HDGTNGTIMQYFEWNVPNDGQHWNRLHNNAQNLKNAGITAIWIPPAWKGTSQSDTGYGAYDLYDLGEFNQKGTVRTKYGTKAELERAIRSLKANGIQVYGDVVMNHKAGADFTERVQAVEVNPQNRNQEVSGTYQIEAWTGFNFPGRGNQHSSFKWRWYHFDGTDWDQSRQHSNRIYKFRGKAWDWEVDTEFGNYDYLMYADLDMDHPEVINELNRWGVWYANTLNLDGFRLDAVKHIKFSFMRDWLGHVRGQTGKNLFAVAEYWKNDLGALENYLSKTNWTMSAFDVPLHYNLYQASNSSGNYDMRNLLNGTLVQRHPSHAVTFVDNHDTQPGEALESFVQGWFKPLAYATILTREQGYPQVFYGDYYGIPSDGVPSYRQQIDPLLAARQQYAYGTQHDYLDNQDVIGWTREGDSAHAGSGLATVMSDGPGGSKTMYVGTAHAGQVFKDITGNRTDTVTINSAGNGTFPCNKGSVSIWVKQ

SEQ ID NO: 33991 - protein, 482 aa, Bacillus sp.
HDGTNGTIMQYFEWNVPNDGQHWNRLHNNAQNLKNAGITAIWIPPAWKGTSQSDTGYGAYDLYDLGEFNQKGTVRTKYGTKAELERAIRSLKANGIQVYGDVVMNHKAGADFTERVQAVEVNPQNRNQEVSGTYQIEAWTGFNFPGRGNQHSSFKWRWYHFDGTDWDQSRQLSNRIYKFRGKAWDWEVDTEFGNYDYLMYADLDMDHPEVINELNRWGVWYANTLNLDGFRLDAGKHIKFSFMRDWLGHVRGQTGKNLFAVAEYWKNDLGALENYLSKTNWTMSAFDVPLHYNLYQASNSSGNYDMRNLLNGTLVQRHPSHAVTFVDNHDTQPGEALESFVQGWFKPLAYATILTREQGYPQVFYGDYYGIPSHGVPSYRQQIDPLLAARQQYAYGTQHDYLDNQDVIGWTREGDSAHAGSGLATVMSDGPGGSKTMYVGTAHAGQVFKDITGNRTDTVTINSAGNGTFPCNKGSVSIWVKQ

SEQ ID NO: 33992 - protein, 482 aa, Bacillus sp.
HDGTNGTIMQYFEWNVPNDGQHWNRLHNNAQNLKNAGITAIWIPPAWKGTSQSDTGYGAYDLYDLGEFNQKGTVRTKYGTKAELERAIRSLKANGIQVYGDVVMNHKAGADFTERVQAVEVNPQNRNQEVSGTYQIEAWTGFNFPGRGNQHSSFKWRWYHFDGTDWDQSRQLSNRIYKFRGKAWDWEVDTEFGNYDYLMYADLDMDHPEVINELNRWGVWYANTLNLDGFRLDAVKHIKFSFMRDWLGHVRGQTGKNLFAVAEYWKNDLGALENYLWKTNWTMSAFDVPLHYNLYQASNSSGNYDMRNLLNGTLVQRHPSHAVTFVDNHDTQPGEALESFVQGWFKPLAYATILTREQGYPQVFYGDYYGIPSDGVPSYRQQIDPLLAARQQYAYGTQHDYLDNQDVIGWTREGDSAHAGSGLATVMSDGPGGSKTMYVGTAHAGQVFKDITGNRTDTVTINSAGNGTFPCNKGSVSIWVKQ

SEQ ID NO: 33993 - protein, 482 aa, Bacillus sp.
HDGTNGTIMQYFEWNVPNDGQHWNRLHNNAQNLKNAGITAIWIPPAWKGTSQSDTGYGAYDLYDLGEFNQKGTVRTKYGTKAELERAIRSLKANGIQVYGDVVMNHKAGADYTERVQAVEVNPQNRNQEVSGTYQIEAWTGFNFPGRGNQHSSFKWRWYHFDGTDWDQSRQLSNRIYKFRGKAWDWEVDTEFGNYDYLMYADLDMDHPEVINELNRWGVWYANTLNLDGFRLDAVKHIKFSFMRDWLGHVRGQTGKNLFAVAEYWKNDLGALENYLSKTNWTMSAFDVPLHYNLYQASNSSGNYDMRNLLNGTLVQRHPSHAVTFVDNHDTQPGEALESFVQGWFKPLAYATILTREQGYPQVFYGDYYGIPSDGVPSYRQQIDPLLAARQQYAYGTQHDYLDNQDVIGWTREGDSAHAGSGLATVMSDGPGGSKTMYVGTAHAGQVFKDITGNRTDTVTINSAGNGTFPCNKGSVSIWVKQ

SEQ ID NO: 33994 - protein, 482 aa, Bacillus sp.
HDGTNGTIMQYFEWNVPNDGQHWNRLHNNAQNLKNAGITAIWIPPAWKGTSQSDTGYGAYDLYDLGEFNQKGTVRTKYGTKAELERAIRSLKANGIQVYGDVVMNHKGGADFTERVQAVEVNPQNRNQEVSGTYQIEAWTGFNFPGRGNQHSSFKWRWYHFDGTDWDQSRQLSNRIYKFRGKAWDWEVDTEFGNYDYLMYADLDMDHPEVINELNRWGVWYANTLNLDGFRLDAVKHIKFSFMRDWLGHVRGQTGKNLFAVAEYWKNDLRALENYLSKTNWTMSAFDVPLHYNLYQASNSSGNYDMRNLLNGTLVQRHPSHAVTFVDNHDTQPGEALESFVQGWFKPLAYATILTREQGYPQVFYGDYYGIPSDGVPSYRQQIDPLLAARQQYAYGTQHDYLDNQDVIGWTREGDSAHAGSGLATVMSDGPGGSKTMYVGTAHAGQVFKDITGNRTDTVTINSAGNGTFPCNKGSVSIWVKQ

SEQ ID NO: 33995 - protein, 482 aa, Bacillus sp.
HDGTNGTIMQYFEWNVPNDGQHWNRLHNNAQNLKNAGITAIWIPPAWKGTSQSDTGYGAYDLYDLGEFNQKGTVRTKYGTKAELERAIRSLKANGIQVYGDVVMNHKAGADFTEQVQAVEVNPQNRNQEVSGTYQIEAWTGFNFPGRGNQHSSFKWRWYHFDGTDWDQSRQLSNRIYKFRGKAWDWEVDTEFGNYDYLMYADLDMDHPEVINELNRWGVWYANTLNLDGFRLDAVKHIKFSFMRDWLGHVRGQTGKNLFAVGEYWKNDLGALENYLSKTNWTMSAFDVPLHYNLYQASNSSGNYDMRNLLNGTLVQRHPSHAVTFVDNHDTQPGEALESFVQGWFKPLAYATILTREQGYPQVFYGDYYGIPSDGVPSYRQQIDPLLAARQQYAYGTQHDYLDNQDVIGWTREGDSAHAGSGLATVMSDGPGGSKTMYVGQAHAGQVFKDITGNRTDTVTINSAGNGTFRCNKGSVSIWVKQ

SEQ ID NO: 33996 - protein, 482 aa, Bacillus sp.
HDGTNGTIMQYFEWNVPNDGQHWNRLHNNAQNLKNAGITAIWIPPAWKGTSQSDTGYGAYDLYDLGEFNQRGTVRTKYGTKAELERAIRSLKANGIQVYGDVVMNHKAGADFTERVQAVEVNPQNRNQEVSGTYQIEAWTGFNFPGRGNQHSSFKWRWYHFDGTDWDQSRQLSNRIYKFRGKAWDWEVDTEFGNYDYLMYADLDMDHPEVINELNRWGVWYANTLNLDGFRLDAVKHIKFSFMRDWLGHVRAQTGKNLFAVAEYWKNDLGALENYLSKTNWTMSAFDVPLHYNLYQASNSSGNYDMRNLLNGTLVQRHPSHAVTFVDNHDTQPGEALESFVQGWFKPLAYATILTREQGYPQVFYGDYYGIPSHGVPSYRQQIDPLLAARQQYAYGTQHDYLDNQDVIGWTREGDSAHAGSGLATVMSDGPGGSKTMYVGTAHAGQVFKDITGNRTDTVTINSAGNGTFPCNKGSVSIWVKQ

SEQ ID NO: 33997 - protein, 482 aa, Bacillus sp.
HDGTNGTIMQYFEWNVPNDGQHWNRLHNNAQNLKNAGITAIWIPPAWKGTSQSDTGYGAYDLYDLGEFNQKGTVRTKYGTKAELERAIRSLKANGIQVYGDVVMNHKSGADFTERVQAVEVNPQNRNQEVSGTYQIEAWTGFNFPGRGNQHSSFKWRWYHFDGTDWDQSRQLSNRIYKFRGKAWDWEVDTEFGNYDYLMYADLDMDHPEVINELNRWGVWYANTLNLDGFRLDAVKHIKFSFMRDWLGHVRGQTGKNLFAVAEYWKNDLGALENYLSKTNWTMSAFDVPLHYNLYQASNSSGNYDMRNLLNGTLVQRHPSHAVTFVDNHDTQPGEALESFVQGWFKPLAYATILTREQGYPQVFYGDYYGIPSDGVPSYRQQIDPLLAARQQYAYGTQHDYLDNQDVIGWTREGDSAHAGSGLATVMSDGPGGSKTMYVGTAHAGQVFKDITGNRTDTVTINSAGNGTFPCNKGSVSIWVKQ

SEQ ID NO: 33998 - protein, 482 aa, Bacillus sp.
HDGTNGTIMQYFEWNVPNDGQHWNRLHNNAQNLKNAGITAIWIPPAWKGTSQSDTGYGAYDLYDLGEFNQKGTVRTKYGTKAELERAIRSLKANGIQVYGDVVMNHKAGADQTEQVQAVEVNPQNRNQEVSGTYQIEAWTGFNFPGRGNQHSSFKWRWYHFDGTDWDQSRQLSNRIYKFRGKAWDWEVDTEFGNYDYLMYADLDMDHPEVINELNRWGVWYANTLNLDGFRLDAVKHIKFSFMRDWLGHVRGQTGKNLFAVAEYWKNDLGALENYLSKTNWTMSAFDVPLHYNLYQASNSSGNYDMRNLLNGTLVQRHPSHAVTFVDNHDTQPGEALESFVQGWFKPLAYATILTREQGYPQVFYGDYYGIPSDGVPSYRQQIDPLLAARQQYAYGTQHDYLDNQDVIGWTREGDSAHAGSGLATVMSDGPGGSKTMYVGTAHAGQVFKDITGNRTDTVTINSAGNGTFRCNKGSVSIWVKQ

SEQ ID NO: 33999 - protein, 482 aa, Bacillus sp.
HDGTNGTIMQYFEWNVPNDGQHWNRLHNNAQNLKNAGITAIWIPPAWKGTSQSDTGYGAYDLYDLGEFNQKGTVRTKYGTKAELERAIRSLKANGIQVYGDVVMNHKAGADFTERVQAVEVNPQNRNQEVSGTYQIEAWTGFNFPGRGNQHSSFKWRWYHFDGTDWDQSRQLSNRIYKFRGKAWDWEVDTEFGNYDYLMYADLDMDHPEVINELNRWGVWYANTLNLDGFRLDAVKHIKFSFMRDWLGHVRGQTGKGLFAVAEYWKNDLGALENYLSKTNWTMSAFDVPLHYNLYQASNSSGNYDMRNLLNGTLVQRHPSHAVTFVDNHDTQPGEALESFVQGWFKPLAYATILTREQGYPQVFYGDYYGIPSDGVPSYRQQIDPLLAARQQYAYGTQHDYLDNQDVIGWTREGDSAHAGSGLATVMSDGPGGSKTMYVGTAHAGQVFKDITGNRTDTVTINSAGNGTFPCNKGSVSIWVKQ

SEQ ID NO: 34000 - protein, 482 aa, Bacillus sp.
HDGTNGTIMQYFEWNVPNDGQHWNRLHNNAQNLKNAGITAIWIPPAWKGTSQSDTGYGAYDLYDLGEFNQKGTVRTKYGTKAELERAIRSLKANGIQVYGDVVMNHKAGADFTEVVQAVEVNPQNRNQEVSGTYQIEAWTGFNFPGRGNQHSSFKWRWYHFDGTDWDQSRQLSNRIYKFRGKAWDWEVDTEFGNYDYLMYADLDMDHPEVINELNRWGVWYANTLNLDGFRLDAVKHIKFSFMRDWLGHVRGQTGKNLFAVAEYWKNDLGALENYLSKTNWTMSAFDVPLHYNLYQASNSSGNYDMRNLLNGTLVQRHPSHAVTFVDNHDTQPGEALESFVQGWFKPLAYATILTREQGYPQVFYGDYYGIPSDGVPSYRQQIDPLLAARQQYAYGTQHDYLDNQDVIGWTREGDSAHAGSGLATVMSDGPGGSKTMYVGTAHAGQVFKDITGNRTDTVTINSAGNGTFPCNKGSVSIWVKQ

SEQ ID NO: 34001 - protein, 482 aa, Bacillus sp.
HDGTNGTIMQYFEWNVPNDGQHWNRLHNNAQNLKNAGITAIWIPPAWKGTSQSDTGYGAYDLYDLGEFNQRGTVRTKYGTKAELERAIRSLKANGIQVYGDVVMNHKAGADFTERVQAVEVNPQNRNQEVSGTYQIEAWTGFNFPGRGNQHSSFKWRWYHFDGTDWDQSRQLSNRIYKFRGKAWDWEVDTEFGNYDYLMYADLDMDHPEVINELNRWGVWYANTLNLDGFRLDAVKHIKFSFMRDWLGHVRGQTGKNLFAVAEYWKNDLGALENYLSKTNWTMSAFDVPLHYNLYQASNSSGNYDMRNLLNGTLVQRHPSHAVTFVDNHDTQPGEALESFVQGWFKPLAYATILTREQGYPQVFYGDYYGIPSDGVPSYRQQIDPLLAARQQYAYGTQHDYLDNQDVIGWTREGDSAHAGSGLATVMSDGPGGSKTMYVGTAHAGQVFKDITGNRTDTVTINSAGNGTFPVNKGSVSIWVKQ

SEQ ID NO: 34002 - protein, 482 aa, Bacillus sp.
HDGTNGTIMQYFEWNVPNDGQHWNRLHNNAQNLKNAGITAIWIPPAWKGTSQSDTGYGAYDLYDLGEFNQKGTVRTKYGTKAELERAIRSLKANGIQVYGDVVMNHKAGADFTERVQAVEVNPQNRNQEVSGTYQIEAWTGFNFPGRGNQHSSFKWRWYHFDGTDWDQSRQLSNRIYKFRGKAWDWEVDTEFGNYDYLMYADLDMDHPEVINELNRWGVWYANTLNLDGFRLDAAKHIKFSFMRDWLGHVRGQTGKNLFAVAEYWKNDLGALENYLSKTNWTMSAFDVPLHYNLYQASNSSGNYDMRNLLNGTLVQRHPSHAVTFVDNHDTQPGEALESFVQGWFKPLAYATILTREQGYPQVFYGDYYGIPSHGVPSYRQQIDPLLAARQQYAYGTQHDYLDNQDVIGWTREGDSAHAGSGLATVMSDGPGGSKTMYVGTAHAGQVFKDITGNRTDTVTINSAGNGTFPCNKGSVSIWVKQ

SEQ ID NO: 34003 - protein, 482 aa, Bacillus sp.
HDGTNGTIMQYFEWNVPNDGQHWNRLHNNAQNLKNAGITAIWIPPAWKGTSQSDTGYGAYDLYDLGEFNQKGTVRTKYGTKAELERAIRSLKANGIQVYGDVVMNHKAGADFTERVQAVEVNPQNRNQEVSGTYQIEAWTGFNFPGRGNQHSSFKWRWYHFDGTDWDQSRQLSNRIYKFRGKAWDWEVDTEFGNYDYLMYADLDMDHPEVINELNRWGVWYANTLNLDGFRLDAVKHIKFSFMRDWLGHVRGQTGKNLFAVAEYWKNDLGALENYLSKTNWTMSAFDVPLHYNLYQASNSSGNYDMRNLLNGTLVQRHPSHAVTFVDNHDTQPGEALESFVQGWFKPLAYATILTREQGYPQVFYGDYYGIPSDGVPGYRQQIDPLLAARQQYAYGTQHDYLDNQDVIGWTREGDSAHAGSGLATVMSDGPGGSKTMYVGTAHAGQVFKDITGNRTDTVTINSAGNGTFPCNKGSVSIWVKQ

SEQ ID NO: 34004 - protein, 482 aa, Bacillus sp.
HDGTNGTIMQYFEWNVPNDGQHWNRLHNNAQNLKNAGITAIWIPPAWKGTSQSDTGYGAYDLYDLGEFNQKGTVRTKYGTKAELERAIRSLKANGIQVYGDVVMNHKAGADFTERVQAVEVNPQNRNQEVSGTYQIEAWTGFNFPGRGNQHSSFKWRWYHFDGTDWDQSRQLSNRIYKFRGKAWDWEVDTEFGNYDYLMYADLDMDHPEVINELNRWGVWYANTLNLDGFRLDAVKHIKFSFMRDWLGHVRGQTGKNLFAVAEYWKNDLGALENYLSKTNWTMSAFDVPLHYNLYQASNSSGNYDMRNLLNGTLVQRHPSHAVTFVDNHDTQPGEALESFVQGWFKPLAYATILTREQGYPQVFYGDYYGIPSDGVPSYRQQIDPLLMARQQYAYGTQHDYLDNQDVIGWTREGDSAHAGSGLATVMSDGPGGSKTMYVGTAHAGQVFKDITGNRTDTVTINSAGNGTFPCNKGSVSIWVKQ

SEQ ID NO: 34005 - protein, 482 aa, Bacillus sp.
HDGTNGTIMQYFEWNVPNDGQHWNRLHNNAQNLKNSGITAIWIPPAWKGTSQSDTGYGAYDLYDLGEFNQKGTVRTKYGTKAELERAIRSLKANGIQVYGDVVMNHKAGADFTERVQAVEVNPQNRNQEVSGTYQIEAWTGFNFPGRGNQHSSFKWRWYHFDGTDWDQSRQLSNRIYKFRGKAWDWEVDTEFGNYDYLMYADLDMDHPEVINELNRWGVWYANTLNLDGFRLDAVKHIKFSFMRDWLGHVRGQTGKNLFAVAEYWKNDLGALENYLSKTNWTMSAFDVPLHYNLYQASNSSGNYDMRNLLNGTLVQRHPSHAVTFVDNHDTQPGEALESFVQGWFKPLAYATILTREQGYPQVFYGDYYGIPSDGVPSYRQQIDPLLAARQQYAYGTQHDYLDNQDVIGWTREGDSAHAGSGLATVMSDGPGGSKTMYVGTAHAGQVFKDITGNRTDTVTINSAGNGTFPCNKGSVSIWVKQ

SEQ ID NO: 34006 - protein, 482 aa, Bacillus sp.
HDGTNGTIMQYFEWNVPNDGQHWNRLHNNAQNLKNAGITAIWIPPAWKGTSQSDTGYGAYDLYDLGEFNQKGTVRTKYGTKAELERAIRSLKANGIQVYGDVVMNHKAGADFTERVGAVEVNPQNRNQEVSGTYQIEAWTGFNFPGRGNQHSSFKWRWYHFDGTDWDQSRQLSNRIYKFRGKAWDWEVDTEFGNYDYLMYADLDMDHPEVINELNRWGVWYANTLNLDGFRLDAVKHIKFSFMRDWLGHVRGQTGKNLFAVAEYWKNDLGALENYLSKTNWTMSAFDVPLHYNLYQASNSSGNYDMRNLLNGTLVQRHPSHAVTFVDNHDTQPGEALESFVQGWFKPLAYATILTREQGYPQVFYGDYYGIPSDGVPSYRQQIDPLLAARQQYAYGTQHDYLDNQDVIGWTREGDSAHAGSGLATVMSDGPGGSKTMYVGTAHAGQVFKDITGNRTDTVTINSAGNGTFPCNKGSVSIWVKQ

SEQ ID NO: 34007 - protein, 482 aa, Bacillus sp.
HDGTNGTIMQYFEWNVPNDGQHWNRLHNNAQNLKNAGITAIWIPPAWKGTSQSDTGYGAYDLYDLGEFNQKGTVRTKYGTKAELERAIRSLKANGIQVYGDVVMNHKAGADFTERVQAVEVNPQNRNQEVSGTYQIEAWTGFNFPGRGNQHSSFKWRWYHFDGTDWDQSRQLSNRIYKFRGKAWDWEVDTEFGNYDYLMYADLDMDHPEVINELNRWGVWYANTLNLDGFRLDAVKHIKFSFMRDWLGHVRGQTGKNLFAVAEYWKNDLGALENYLSKTNWTMSAFDVPLHYNLYQASNSSGNYDMRNLLNGTLVQRHPSHAVTFVDNHDTQPGEALESFVQDWFKPLAYATILTREQGYPQVFYGDYYGIPSDGVPSYRQQIDPLLAARQQYAYGTQHDYLDNQDVIGWTREGDSAHAGSGLATVMSDGPGGSKTMYVGTAHAGQVFKDITGNRTDTVTINSAGNGTFPCNKGSVSIWVKQ

SEQ ID NO: 34008 - protein, 482 aa, Bacillus sp.
HDGTNGTIMQYFEWNVPNDGQHWNRLHNNAQNLKNVGITAIWIPPAWKGTSQSDTGYGAYDLYDLGEFNQKGTVRTKYGTKAELERAIRSLKANGIQVYGDVVMNHKAGADFTEAVQAVEVNPQNRNQEVSGTYQIEAWTGFNFPGRGNQHSSFKWRWYHFDGGDWDQSRQLSNRIYKFRGKAWDWEVDTEFGNYDYLMYADLDMDHPEVINELNRWGVWYANTLNLDGFRLDAVKHIKFSFMRDWLGHVRGQTGKNLFAVAEYWKNDLGALENYLSKTNWTMSAFDVPLHYNLYQASNSSGNYDMRNLLNGTLVQRHPSHAVTFVDNHDTQPGEALESFVQGWFKPLAYATILTREQGYPQVFYGDYYGIPSDGVPSYRQQIDPLLAARQQYAYGTQHDYLDNQDVIGWTREGDSAHAGSGLATVMSDGPGGSKTMYVGTAHAGQVFKDITGNRTDTVTINSAGNGTFPCNKGSVSIWVKQ

SEQ ID NO: 34009 - protein, 482 aa, Bacillus sp.
HDGTNGTIMQYFEWNVPNDGQHWNRLHNNAQNLKNAGITAIWIPPAWKGTSQSDTGYGAYDLYDLGEFNQKGTVRTKYGTKAELERAIRSLKANGIQVYGDVVMNHKAGADFTERVQAVEVNPQNRNQEVSGTYQIEAWTGFNFPGRGNQHSSFKWRWYHFDGTDWDQSRQLSNRIYKFRGKAWDWEVDTEFGNYDYLMYADLDMDHPEVINELNRWGVWYANTLNLDGFRLDAVKHIKFSFMRDWLGHVRGQTGKNLFAVAEYWKNDLGALENYLSKTNWTMSAFDVPLHYNLYQASNSSGNYDMRNLLNGTLVQRHPSHAVTFVDNHDTQPGEALESFVQGWFKPLAYATILTREQGYPQVFYGDYYGIPSDGVPSYRQQIDPLLAARQQYAYGTQHDYLDNQDVIGWTREGDSAHAGSGLATVMSDGPGGSKTMYVGSAHAGQVFKDITGNRTDTVTINSAGNGTFPCNKGSVSIWVKQ

SEQ ID NO: 34010 - protein, 482 aa, Bacillus sp.
HDGTNGTIMQYFEWNVPNDGQHWNRLHNNAQNLKNAGITAIWIPPAWKGTSQSDTGYGAYDLYDLGEFNQKGTVRTKYGTKAELERAIRSLKANGIQVYGDVVMNHKAGADFTERVQAVEVNPQNRNQEVSGTYQIEAWTGFNFPGRGNQHSSFKWRWYHFDGTDWDQSRQLSNRIYKFRGKAWDWEVDTEFGNYDYLMYADLDMDHPEVINELNRWGVWYANTLNLDGFRLDAVKHIKFSFMRDWLGHVRGQTGKNLFAVAEYWKNDLGALENYLSKTNWTMSAFDVPLHYNLYQASNSSGNYDMRNLLNGTLVQRHPSHAVTFVDNHDTQPGEALESFVQGWFKPLAYATILTREQGYPQVFYGDYYGIPSDGVPSYRQQIDPLLVARQQYAYGTQHDYLDNQDVIGWTREGDSAHAGSGLATVMSDGPGGSKTMYVGTAHAGQVFKDITGNRTDTVTINSAGNGTFPCNKGSVSIWVKQ

SEQ ID NO: 34011 - protein, 482 aa, Bacillus sp.
HDGTNGTIMQYFEWNVPNDGQHWNRLHNNAQNLKNAGITAIWIPPAWKGTSQSDTGYGAYDLYDLGEFNQKGTVRTKYGTKAELERAIRSLKANGIQVYGDVVMNHKAGADFTERVRAVEVNPQNRNQEVSGTYQIEAWTGFNFPGRGNQHSSFKWRWYHFDGTDWDQSRQLSNRIYKFRGKAWDWEVDTEFGNYDYLMYADLDMDHPEVINELNRWGVWYANTLNLDGFRLDAVKHIKFSFMRDWLGHVRGQTGKNLFAVAEYWKNDLGALENYLSKTNWTMSAFDVPLHYNLYQASNSSGNYDMRNLLNGTLVQRHPSHAVTFVDNHDTQPGEALESFVQGWFKPLAYATILTREQGYPQVFYGDYYGIPSDGVPSYRQQIDPLLAARQQYAYGTQHDYLDNQDVIGWTREGDSAHAGSGLATVMSDGPGGSKTMYVGTAHAGQVFKDITGNRTDTVTINSAGNGTFPCNKGSVSIWVKQ

SEQ ID NO: 34012 - protein, 482 aa, Bacillus sp.
HDGTNGTIMQYFEWNVPNDGQHWNRLHNNAQNLKNAGITAIWIPPAWKGTSQSDTGYGAYDLYDLGEFNQKGTVRTKYGTKAELERAIRSLKANGIQVYGDVVMNHKAGADFTERVQAVEVNPQNRNQEVSGTYQIEAWTGFNFPGRGNQHSSFKWRWYHFDGTDWDQSRQLSNRIYKFRGKAWDWEVDTEFGNYDYLMYADLDMDHPEVLNELNRWGVWYANTLNLDGFRLDAVKHIKFSFMRDWLGHVRGQTGKNLFAVAEYWKNDLGALENYLSKTNWTMSAFDVPLHYNLYQASNSSGNYDMRNLLNGTLVQRHPSHAVTFVDNHDTQPGEALESFVQGWFKPLAYATILTREQGYPQVFYGDYYGIPSDGVPSYRQQIDPLLAARQQYAYGTQHDYLDNQDVIGWTREGDSAHAGSGLATVMSDGPGGSKTMYVGTAHAGQVFKDITGNRTDTVTINSAGNGTFPCNKGSVSIWVKQ

SEQ ID NO: 34013 - protein, 482 aa, Bacillus sp.
HDGTNGTIMQYFEWNVPNDGQHWNRLHNNAQNLKNAGITAIWIPPAWKGTSQSDTGYGAYDLYDLGEFNQKGTVRTKYGTKAELERAIRSLKANGIQVYGDVVMNHKAGADFTERVQAVEVNPQNRNQEVSGTYQIEAWTGFNFPGRGNQHSSFKWRWYHFDGTDWDQSRQLSNRIYKFRGKAWDWEVDTEFGNYDYLMYADLDMDHPEVINELNRWGVWYANTLNLDGFRLDAVKHIKFSFARDWLGHVRGQTGKNLFAVAEYWKNDLGALENYLSKTNWTMSAFDVPLHYNLYQASNSSGNYDMRNLLNGTLVQRHPSHAVTFVDNHDTQPGEALESFVQGWFKPLAYATILTREQGYPQVFYGDYYGIPSDGVPSYRQQIDPLLAARQQYAYGTQHDYLDNQDVIGWTREGDSAHAGSGLATVMSDGPGGSKTMYVGTAHAGQVFKDITGNRTDTVTINSAGNGTFPCNKGSVSIWVKQ

SEQ ID NO: 34014 - protein, 482 aa, Bacillus sp.
HDGTNGTIMQYFEWNVPNDGQHWNRLHNNAQNLKNAGITAIWIPPAWKGTSQSDTGYGAYDLYDLGEFNQKGTVRTKYGTKAELERAIRSLKANGIQVYGDVVMNHKAGADRTERVQAVEVNPQNRNQEVSGTYQIEAWTGFNFPGRGNQHSSFKWRWYHFDGTDWDQSRQLSNRIYKFRGKAWDWEVDTEFGNYDYLMYADLDMDHPEVINELNRWGVWYANTLNLDGFRLDAVKHIKFSFMRDWLGHVRGQTGKNLFAVAEYWKNDLGALENYLSKTNWTMSAFDVPLHYNLYQASNSSGNYDMRNLLNGTLVQRHPSHAVTFVDNHDTQPGEALESFVQGWFKPLAYATILTREQGYPQVFYGDYYGIPSDGVPSYRQQIDPLLAARQQYAYGTQHDYLDNQDVIGWTREGDSAHAGSGLATVMSDGPGGSKTMYVGTAHAGQVFKDITGNRTDTVTINSAGNGTFPCNKGSVSIWVKQ

SEQ ID NO: 34015 - protein, 482 aa, Bacillus sp.
HDGTNGTIMQYFEWNVPNDGQHWNRLHNNAQNLKNLGITAIWIPPAWKGTSQSDTGYGAYDLYDLGEFNQKGTVRTKYGTKAELERAIRSLKANGIQVYGDVVMNHKAGADFTERVQAVEVNPQNRNQEVSGTYQIEAWTGFNFPGRGNQHSSFKWRWYHFDGTDWDQSRQLSNRIYKFRGKAWDWEVDTEFGNYDYLMYADLDMDHPEVINELNRWGVWYANTLNLDGFRLDAVKHIKFSFMRDWLGHVRGQTGKNLFAVAEYWKNDLGALENYLSKTNWTMSAFDVPLHYNLYQASNSSGNYDMRNLLNGTLVQRHPSHAVTFVDNHDTQPGEALESFVQGWFKPLAYATILTREQGYPQVFYGDYYGIPSDGVPSYRQQIDPLLAARQQYAYGTQHDYLDNQDVIGWTREGDSAHAGSGLATVMSDGPGGSKTMYVGTAHAGQVFKDITGNRTDTVTINSAGNGTFPCNKGSVSIWVKQ

SEQ ID NO: 34016 - protein, 482 aa, Bacillus sp.
HDGTNGTIMQYFEWNVPNDGQHWNRLHNNAQNLKNAGITAIWIPPAWKGTSQSDTGYGAYDLYDLGEFNQKGTVRTKYGTKAELERAIRSLKANGIQVYGDVVMNHKAGADFTERVQAVEVNPQNRNQEVSGTYQIEAWTGFNFPGRGNQHSSFKWRWYHFDGTDWDQSRQLSNRIYKFRGKAWDWEVDTEFGNYDYLMYADLDMDHPEVINELNRWGVWYANTLNLDGFRLDAVKHIKFSFMRDWLGHVRGQTGKNLFAVAEYWKNDLGALENYLSKTNWTMSAFDAPLHYNLYQASNSSGNYDMRNLLNGTLVQRHPSHAVTFVDNHDTQPGEALESFVQGWFKPLAYATILTREQGYPQVFYGDYYGIPSHGVPSYRQQIDPLLAARQQYAYGTQHDYLDNQDVIGWTREGDSAHAGSGLATVMSDGPGGSKTMYVGTAHAGQVFKDITGNRTDTVTINSAGNGTFPCNKGSVSIWVKQ

SEQ ID NO: 34017 - protein, 482 aa, Bacillus sp.
HDGTNGTIMQYFEWNVPNDGQHWNRLHNNAQNLKNAGITAIWIPPAWKGTSQSDTGYGAYDLYDLGEFNQKGTVRTKYGTKAELERAIRSLKANGIQVYGDVVFNHKAGADFTERVQAVEVNPQNRNQEVSGTYQIEAWTGFNFPGRGNQHSSFKWRWYHFDGTDWDQSRQLSNRIYKFRGKAWDWEVDTEFGNYDYLMYADLDMDHPEVINELNRWGVWYANTLNLDGFRLDAVKHIKFSFMRDWLGHVRGQTGKNLFAVAEYWKNDLGALENYLSKTNWTMSAFDVPLHYNLYQASNSSGNYDMRNLLNGTLVQRHPSHAVTFVDNHDTQPGEALESFVQGWFKPLAYATILTREQGYPQVFYGDYYGIPSHGVPSYRQQIDPLLAARQQYAYGTQHDYLDNQDVIGWTREGDSAHAGSGLATVMSDGPGGSKTMYVGTAHAGQVFKDITGNRTDTVTINSAGNGTFPCNKGSVSIWVKQ

SEQ ID NO: 34018 - protein, 482 aa, Bacillus sp.
HDGTNGTIMQYFEWNVPNDGQHWNRLHNNAQNLKNAGITAIWIPPAWKGTSQSDTGYGAYDLYDLGEFNQKGTVRTKYGTKAELERAIRSLKANGIQVYGDVVMNHKAGADFTERVQAVEVNPANRNQEVSGTYQIEAWTGFNFPGRGNQHSSFKWRWYHFDGTDWDQSRQLSNRIYKFRGKAWDWEVDTEFGNYDYLMYADLDMDHPEVINELNRWGVWYANTLNLDGFRLDAVKHIKFSFMRDWLGHVRGQTGKNLFAVAEYWKNDLGALENYLSKTNWTMSAFDVPLHYNLYQASNSSGNYDMRNLLNGTLVQRHPSHAVTFVDNHDTQPGEALESFVQGWFKPLAYATILTREQGYPQVFYGDYYGIPSDGVPSYRQQIDPLLAARQQYAYGTQHDYLDNQDVIGWTREGDSAHAGSGLATVMSDGPGGSKTMYVGTAHAGQVFKDITGNRTDTVTINSAGNGTFPCNKGSVSIWVKQ

SEQ ID NO: 34019 - protein, 482 aa, Bacillus sp.
HDGTNGTIMQYFEWNVPNDGQHWNRLHNNAQNLKNAGITAIWIPPAWKGTSQSDTGYGAYDLYDLGEFNQKGTVRTKYGTKAELERAIRSLKANGIQVYGDVVMNHKAGADFTERVQAVEVNPKNRNQEVSGTYQIEAWTGFNFPGRGNQHSSFKWRWYHFDGTDWDQSRQLSNRIYKFRGKAWDWEVDTEFGNYDYLMYADLDMDHPEVINELNRWGVWYANTLNLDGFRLDAVKHIKFSFMRDWLGHVRGQTGKNLFAVAEYWKNDLGALENYLSKTNWTMSAFDVPLHYNLYQASNSSGNYDMRNLLNGTLVQRHPSHAVTFVDNHDTQPGEALESFVQGWFKPLAYATILTREQGYPQVFYGDYYGIPSDGVPSYRQQIDPLLAARQQYAYGTQHDYLDNQDVIGWTREGDSAHAGSGLATVMSDGPGGSKTMYVGTAHAGQVFKDITGNRTDTVTINSAGNGTFPCNKGSVSIWVKQ

SEQ ID NO: 34020 - protein, 482 aa, Bacillus sp.
HDGTNGTIMQYFEWNVPNDGQHWNRLHNNAQNLKNAGITAIWIPPAWKGTSQSDTGYGAYDLYDLGEFNQKGTVRTKYGTKAELERAIRSLKANGIQVYGDVVMNHKAGADFTERVQAVEVNPQNRNQEVSGTYQIEAWTGFNFPGRGNQHSSFKWRWYHFDGTDWDQSRQLSNRIYKFRGKAWDWEVDTEFGNYDYLMYADLDMDHPEVINELNRWGVWYANTLNLDGFRLDAVKHIKFSFMRDWLGHVRGQTGKNLFAVAEYWKNDLGALENYLSKTNWTMSAFDVPLHYNLYQASNSSGNYDMRNLLNGTLVQRHPSHAVTFVDNHDTQPGEALESFVQGWFKPLAYATILTREQGYPQVFYGDYYGIPSDGVPSYRQQIDPLLAARQQYAYGTQHDYLDNQDVIGWTREGDSAHAGSGLATVMSDGPGGSKTMYVGRAHAGQVFKDITGNRTDTVTINSAGNGTFPCNKGSVSIWVKQ

SEQ ID NO: 34021 - protein, 482 aa, Bacillus sp.
HDGTNGTIMQYFEWNVPNDGQHWNRLHNNAQNLKNAGITAIWIPPAWKGTSQSDTGYGAYDLYDLGEFNQKGTVRTKYGTKAELERAIRSLKANGIQVYGDVVMNHKAGADFTERVQAVEVNPQNRNQEVSGTYQIEAWTGFNFPGRGNQHSSFKWRWYHFDGTDWDQSRQLSNRIYKFRGKAWDWEVDTEFGNYDYLMYADLDMDHPEVINELNRWGVWYANTLNLDGFRLDAVKHIKFSFMRDWLGHVRGQTGKNLFAVAEYWKNDLGALENYLSKTNWTMSAFDVPLHYNLYQASNSSGNYDMRNLLNGTLVQRHPSHAVTFVDNHDTQPGEALESFVQGWFKPLAYATILTREQGYPQVFYGDYYGIPSDGVPSYRQQIDPLLYARQQYAYGTQHDYLDNQDVIGWTREGDSAHAGSGLATVMSDGPGGSKTMYVGTAHAGQVFKDITGNRTDTVTINSAGNGTFPCNKGSVSIWVKQ

SEQ ID NO: 34022 - protein, 482 aa, Bacillus sp.
HDGTNGTIMQYFEWNVPNDGQHWNRLHNNAQNLKNAGITAIWIPPAWKGTSQSDTGYGAYDLYDLGEFNQRGTVRTKYGTKAELERAIRSLKANGIQVYGDVVMNHKAGADFTERVQAVEVNPQNRNQEVSGEYQIEAWTGFNFPGRGNQHSSFKWRWYHFDGTDWDQSRQLSNRIYKFRGKAWDWEVDTEFGNYDYLMYADLDMDHPEVINELNRWGVWYANTLNLDGFRLDAVKHIKFSFMRDWLGHVRGQTGKNLFAVAEYWKNDLGALENYLSKTNWTMSAFDVPLHYNLYQASNSSGNYDMRNLLNGTLVQRHPSHAVTFVDNHDTQPGEALESFVQGWFKPLAYATILTREQGYPQVFYGDYYGIPSHGVPSYRQQIDPLLAARQQYAYGTQHDYLDNQDVIGWTREGDSAHAGSGLATVMSDGPGGSKTMYVGTAHAGQVFKDITGNRTDTVTINSAGNGTFPCNKGSVSIWVKQ

SEQ ID NO: 34023 - protein, 482 aa, Bacillus sp.
HDGTNGTIMQYFEWNVPNDGQHWNRLHNNAQNLKNAGITAIWIPPAWKGTSQSDTGYGAYDLYDLGEFNQKGTVRTKYGTKAELERAIRSLKANGIQVYGDVVMNHKAGADNTERVQAVEVNPQNRNQEVSGTYQIEAWTGFNFPGRGNQHSSFKWRWYHFDGTDWDQSRQLSNRIYKFRGKAWDWEVDTEFGNYDYLMYADLDMDHPEVINELNRWGVWYANTLNLDGFRLDAVKHIKFSFMRDWLGHVRGQTGKNLFAVAEYWKNDLGALENYLSKTNWTMSAFDVPLHYNLYQASNSSGNYDMRNLLNGTLVQRHPSHAVTFVDNHDTQPGEALESFVQGWFKPLAYATILTREQGYPQVFYGDYYGIPSDGVPSYRQQIDPLLAARQQYAYGTQHDYLDNQDVIGWTREGDSAHAGSGLATVMSDGPGGSKTMYVGTAHAGQVFKDITGNRTDTVTINSAGNGTFPCNKGSVSIWVKQ

SEQ ID NO: 34024 - protein, 482 aa, Bacillus sp.
HDGTNGTIMQYFEWNVPNDGQHWNRLHNNAQNLKNAGITAIWIPPAWKGTSQSDTGYGAYDLYDLGEFNQKGTVRTKYGTKAELERAIRSLKANGIQVYGDVVMNHKAGADFTERVQAVEVNPQNRNQEVSGTYQIEAWTGFNFPGRGNQHSSFKWRWYHFDGTDWDQSRQLSNRIYKFRGKAWDWEVDTEFGNYDYLMYADLDMDHPEVINELNRWGVWYANTLNLDGFRLDAVKHIKFSFMRDWLGHVRGQTGKNLFAVAEYWKNDLGALENYLSKTNWTMSAFDVPLHYNLYQASNSSGNYDMRNLLNGTLVQVHPSHAVTFVDNHDTQPGEALESFVQGWFKPLAYATILTREQGYPQVFYGDYYGIPSDGVPSYRQQIDPLLAARQQYAYGTQHDYLDNQDVIGWTREGDSAHAGSGLATVMSDGPGGSKTMYVGTAHAGQVFKDITGNRTDTVTINSAGNGTFPCNYGSVSIWVKQ

SEQ ID NO: 34025 - protein, 482 aa, Bacillus sp.
HDGTNGTIMQYFEWNVPNDGQHWNRLHNNAQNLKNVGITAIWIPPAWKGTSQSDTGYGAYDLYDLGEFNQKGTVRTKYGTKAELERAIRSLKANGIQVYGDVVMNHKAGADFTEHVQAVEVNPQNRNQEVSGTYQIEAWTGFNFPGRGNQHSSFKWRWYHFDGGDWDQSRQLSNRIYKFRGKAWDWEVDTEFGNYDYLMYADLDMDHPEVINELNRWGVWYANTLNLDGFRLDAVKHIKFSFMRDWLGHVRGQTGKNLFAVAEYWKNDLGALENYLSKTNWTMSAFDVPLHYNLYQASNSSGNYDMRNLLNGTLVQRHPSHAVTFVDNHDTQPGEALESFVQGWFKPLAYATILTREQGYPQVFYGDYYGIPSDGVPSYRQQIDPLLAARQQYAYGTQHDYLDNQDVIGWTREGDSAHAGSGLATVMSDGPGGSKTMYVGTAHAGQVFKDITGNRTDTVTINSAGNGTFPCNKGSVSIWVKQ

SEQ ID NO: 34026 - protein, 482 aa, Bacillus sp.
HDGTNGTIMQYFEWNVPNDGQHWNRLHNNAQNLKNAGITAIWIPPAWKGTSQSDTGYGAYDLYDLGEFNQKGTVRTKYGTKAELERAIRSLKANGIQVYGDVVMNHKAGADFTERVQAVEVNPQNRNQEVSGTYQIEAWTGFNFPGRGNQHSSFKWRWYHFDGTDWDQSRQLSNRIYKFRGKAWDWEVDTEFGNYDYLMYADLDMDHPEVINELNRWGVWYANTLNLDGFRLDAVKHIKFSFMRDWLGHVRGQTGKNLFAVAEYWKNDLGALENYLSKTNWTMSAFDVPLHYNLYQASNSSGNYDMRNLLNGTLVQRHPSHAVTFVDNHDTQPGEALESFVQGWFKPLAYATILTREQGYPQVFYGDYYGIPSDGVPSYRQQIDPLLAARQQYAYGTQHDYLDNQDVIGWTREGDSAHAGSGLATVMSDGPGGSKTMYVGHAHAGQVFKDITGNRTDTVTINSAGNGTFPCNKGSVSIWVKQ

SEQ ID NO: 34027 - protein, 482 aa, Bacillus sp.
HDGTNGTIMQYFEWNVPNDGQHWNRLHNNAQNLKNAGITAIWIPPAWKGTSQSDTGYGAYDLYDLGEFNQKGTVRTKYGTKAELERAIRSLKANGIQVYGDVVMNHKAGADFTERVQAVEVNPQNRNQEVSGTYQIEAWTGFNFPGRGNQHSSFKWRWYHFDGTDWDQSRQLSNRIYKFRTKAWDWEVDTEFGNYDYLMYADLDMDHPEVINELNRWGVWYANTLNLDGFRLDAVKHIKFSFMRDWLGHVRGQTGKNLFAVAEYWKNDLGALENYLSKTNWTMSAFDVPLHYNLYQASNSSGNYDMRNLLNGTLVQRHPSHAVTFVDNHDTQPGEALESFVQGWFKPLAYATILTREQGYPQVFYGDYYGIPSHGVPSYRQQIDPLLAARQQYAYGTQHDYLDNQDVIGWTREGDSAHAGSGLATVMSDGPGGSKTMYVGTAHAGQVFKDITGNRTDTVTINSAGNGTFPCNKGSVSIWVKQ

SEQ ID NO: 34028 - protein, 482 aa, Bacillus sp.
HDGTNGTIMQYFEWNVPNDGQHWNRLHNNAQNLKNAGITAIWIPPAWKGTSQSDTGYGAYDLYDLGEFNQKGTVRTKYGTKAELERAIRSLKANGIQVYGDVVMNHKAGADFTERVQAVEVNPQNRNQEVSGTYQIEAWTGFNFPGRGNQHSSFKWRWYHFDGTDWDQSRQLSNRIYKFRGKAWDWEVDTEFGNYDYLMYADLDMDHPEVINELNRWGVWYANTLNLDGFRLDAVKHIKFSFMRDWLGHVRGQTGKNLFAVAEYWKNDLGALENYLSKTNWTMSAFDVPLHYNLYQASNSSGNYDMRNLLNGTLVQRHPSHAVTFVDNHDTQPGEALESFVQGWFKPLAYATILTREQGYPQVFYGDYYGIPSDGVPSYRQQIDPLLAARQQYAYGTQHDYLDNQDVIGWTREGDSAHAGSGLATVMSDGPGGSKTMYVGTAHAGQVFKDITGNRTDTVTINSAGNGTFGCNKGSVSIWVKQ

SEQ ID NO: 34029 - protein, 482 aa, Bacillus sp.
HDGTNGTIMQYFEWNVPNDGQHWNRLHNNAQNLKNAGITAIWIPPAWKGTSQSDTGYGAYDLYDLGEFNQKGTVRTKYGTKAELERAIRSLKANGIQVYGDVVMNHKAGADFTERVQAVEVNPQNRNQEVSGTYQIEAWTGFNFPGRGNQHSSFKWRWYHFDGTDWDQSRQLSNRIYKFRGKAWDWEVDTEFGNYDYLMYADLDMDHPEVINELNRWGVWYVNTLNLDGFRLDAVKHIKFSFMRDWLGHVRGQTGKNLFAVAEYWKNDLGALENYLSKTNWTMSAFDVPLHYNLYQASNSSGNYDMRNLLNGTLVQRHPSHAVTFVDNHDTQPGEALESFVQGWFKPLAYATILTREQGYPQVFYGDYYGIPSDGVPSYRQQIDPLLAARQQYAYGTQHDYLDNQDVIGWTREGDSAHAGSGLATVMSDGPGGSKTMYVGTAHAGQVFKDITGNRTDTVTINSAGNGTFPCNKGSVSIWVKQ

SEQ ID NO: 34030 - protein, 482 aa, Bacillus sp.
HDGTNGTIMQYFEWNVPNDGQHWNRLHNNAQNLKNAGITAIWIPPAWKGTSQSDTGYGAYDLYDLGEFNQKGTVRTKYGTKAELERAIRSLKANGIQVYGDVVMNHKAGADFTEQVQAVEVNPQNRNQEVSGTYQIEAWTGFNFPGRGNQHSSFKWRWYHFDGTDWDQSRQLSNRIYKFRGKAWDWEVDTEFGNYDYLMYADLDMDHPEVINELNRWGVWYANTLNLDGFRLDAVKHIKFSFMRDWLGHVRGQTGKNLFAVAEYWKNDLGALENYLSKTNWTMSAFDVPLHYNLYQASNSSGNYDMRNLLNGTLVQRHPSHAVTFVDNHDTQPGEALESFVQGWFKPLAYATILTREQGYPQVFYGDYYGIPSDGVPSYRQQIDPLLAARQQYAYGTQHDYLDNQDVIGWTREGDSAHAGSGLATVMSDGPGGSKTMYVGTAHAGQVFKDITGNRTDTVTINSAGNGTFPCNKGSVSIWVKQ

SEQ ID NO: 34031 - protein, 482 aa, Bacillus sp.
HDGTNGTIMQYFEWNVPNDGQHWNRLHNNAQNLKNAGITAIWIPPAWKGTSQSDTGYGAYDLYDLGEFNQKGTVRTKYGTKAELERAIRSLKANGIQVYGDVVMNHKAGADFTERVQAVEVNPQNRNQEVSGTYQIEAWTGFNFPGRGNQHSSFKWRWYHFDGTDWDQSRQLSNRIYKFRGKAWDWEVDTEFGNYDYLMYADLDMDHPEVINELNRWGVWYANTLNLDGFRLDAVKHIKFSFMRDWLGHVRGQTGKNLFAVAEYWKNDLGALENYLSKTNWTMSLFDVPLHYNLYQASNSSGNYDMRNLLNGTLVQRHPSHAVTFVDNHDTQPGEALESFVQGWFKPLAYATILTREQGYPQVFYGDYYGIPSDGVPSYRQQIDPLLAARQQYAYGTQHDYLDNQDVIGWTREGDSAHAGSGLATVMSDGPGGSKTMYVGTAHAGQVFKDITGNRTDTVTINSAGNGTFPCNKGSVSIWVKQ

SEQ ID NO: 34032 - protein, 482 aa, Bacillus sp.
HDGTNGTIMQYFEWNVPNDGQHWNRLHNNAQNLKNAGITAIWIPPAWKGTSQSDTGYGAYDLYDLGEFNQKGTVRTKYGTKAELERAIRSLKANGIQVYGDVVMNHKAGADFTERVQAVEVNPQNRNQEVSGTYQIEAWTGFNFPGRGNQHSSFKWRWYHFDGTDWDQSRQLSNRIYKFRGKAWDWEVDTEFGNYDYLMYADLDMDHPEVINELNRWGVWYANTLNLDGFRLDAVKHIKFSFMRDWLGHVRGQTGKNLFAVAEYWKNDLGALENYLSKTNWTMSAFDVPLHYNLYQASNSSGNYDMRNLLNGTLVQRHPSHAVTFVDNHDTQPGEALESFVQGWFKPLAYATILTREQGYPQVFYGDYYGIPSRGVPSYRQQIDPLLAARQQYAYGTQHDYLDNQDVIGWTREGDSAHAGSGLATVMSDGPGGSKTMYVGTAHAGQVFKDITGNRTDTVTINSAGNGTFPCNKGSVSIWVKQ

SEQ ID NO: 34033 - protein, 482 aa, Bacillus sp.
HDGTNGTIMQYFEWNVPNDGQHWNRLHNNAQNLKNAGITAIWIPPAWKGTSQSDTGYGAYDLYDLGEFNQKGTVRTKYGTKAELERAIRSLKANGIQVYGDVVMNHKAGADFTERVQAVEVNPQNRNQEVSGTYQIEAWTGFNFPGRGNQHSSFKWRWYHFDGTDWDQSRQLSNRIYKFRGKAWDWEVDTEFGNYDYLMYADLDMDHPEVINELNRWGVWYANTLNLDGFRLDAVKHIKFSFMRDWLGHVRGQTGKNLFAVAEYWKNDLGALENYLSKTNWTMSAFDVPLHYNLYQASNSSGNYDMRNLLNGTLVQRHPSHAVTFVDNHDTQPGEALESFVQGWFKPLAYATILTREQGYPQVFYGDYYGIPSGGVPSYRQQIDPLLAARQQYAYGTQHDYLDNQDVIGWTREGDSAHAGSGLATVMSDGPGGSKTMYVGTAHAGQVFKDITGNRTDTVTINSAGNGTFPCNKGSVSIWVKQ

SEQ ID NO: 34034 - protein, 482 aa, Bacillus sp.
HDGTNGTIMQYFEWNVPNDGQHWNRLHNNAQNLKNAGITAIWIPPAWKGTSQSDTGYGAYDLYDLGEFNQKGTVRTKYGTKAELERAIRSLKANGIQVYGDVVMNHKAGADFTERVQAVEVNPQNRNQEVSGTYQIEAWTGFNFPGRGNQHSSFKWRWYHFDGTDWDQSRQLLNRIYKFRGKAWDWEVDTEFGNYDYLMYADLDMDHPEVINELNRWGVWYANTLNLDGFRLDAVKHIKFSFMRDWLGHVRGQTGKNLFAVAEYWKNDLGALENYLSKTNWTMSAFDVPLHYNLYQASNSSGNYDMRNLLNGTLVQRHPSHAVTFVDNHDTQPGEALESFVQGWFKPLAYATILTREQGYPQVFYGDYYGIPSDGVPSYRQQIDPLLAARQQYAYGTQHDYLDNQDVIGWTREGDSAHAGSGLATVMSDGPGGSKTMYVGTAHAGQVFKDITGNRTDTVTINSAGNGTFPCNKGSVSIWVKQ

SEQ ID NO: 34035 - protein, 482 aa, Bacillus sp.
HDGTNGTIMQYFEWNVPNDGQHWNRLHNNAQNLKNAGITAIWIPPAWKGTSQSDTGYGAYDLYDLGEFNQKGTVRTKYGTKAELERAIRSLKANGIQVYGDVVMNHKAGADFTERVQAVEVNPQNRNQEVSGTYQIEAWTGFNFPGRGNQHSSFKWRWYHFDGTDWDQSRQLSNRIYKFRGKAWDWEVDTEFGNYDYLMYADLDMDHPEVINELNRWGVWYANTLNLDGFRLDAVKHIKFSFMRDWLGHVRGQTGKNLFAVAEYWKNDLGALENYLKKTNWTMSAFDVPLHYNLYQASNSSGNYDMRNLLNGTLVQRHPSHAVTFVDNHDTQPGEALESFVQGWFKPLAYATILTREQGYPQVFYGDYYGIPSDGVPSYRQQIDPLLAARQQYAYGTQHDYLDNQDVIGWTREGDSAHAGSGLATVMSDGPGGSKTMYVGTAHAGQVFKDITGNRTDTVTINSAGNGTFPCNKGSVSIWVKQ

SEQ ID NO: 34036 - protein, 482 aa, Bacillus sp.
HDGTNGTIMQYFEWYVPNDGQHWNRLHNNAQNLKNAGITAIWIPPAWKGTSQSDTGYGAYDLYDLGEFNQKGTVRTKYGTKAELERAIRSLKANGIQVYGDVVMNHKAGADFTEHVQAVEVNPQNRNQEVSGTYQIEAWTGFNFPGRGNQHSSFKWRWYHFDGTDWDQSRQLSNRIYKFRGKAWDWEVDTEFGNYDYLMYADLDMDHPEVINELNRWGVWYANTLNLDGFRLDAVKHIKFSFMRDWLGHVRGQTGKNLFAVAEYWKNDLGALENYLSKTNWTMSAFDVPLHYNLYQASNSSGNYDMRNLLNGTLVQRHPSHAVTFVDNHDTQPEEALESFVQGWFKPLAYATILTREQGYPQVFYGDYYGIPSHGVPSYRQQIDPLLAARQQYAYGTQHDYLDNQDVIGWTREGDSAHAGSGLATVMSDGPGGSKTMYVGTAHAGQVFKDITGNRTDTVTINSAGNGTFPCNKGSVSIWVKQ

SEQ ID NO: 34037 - protein, 482 aa, Bacillus sp.
HDGTNGTIMQYFEWNVPNDGQHWNRLHNNAQNLKNAGITAIWIPPAWKGTSQSDTGYGAYDLYDLGEFNQKGTVRTKYGTKAELERAIRSLKANGIQVYGDVVMNHKAGADFTERVQAVEVNPQNRNQEVSGTYQIEAWTGFNFPGRGNQHSSFKWRWYHFDGTDWDQSRQLSNRIYKFRGKAWDWEVDTEFGNYDYLMYADLDMDHPEVTNELNRWGVWYANTLNLDGFRLDAVKHIKFSFMRDWLGHVRGQTGKNLFAVAEYWKNDLGALENYLSKTNWTMSAFDVPLHYNLYQASNSSGNYDMRNLLNGTLVQRHPSHAVTFVDNHDTQPGEALESFVQGWFKPLAYATILTREQGYPQVFYGDYYGIPSDGVPSYRQQIDPLLAARQQYAYGTQHDYLDNQDVIGWTREGDSAHAGSGLATVMSDGPGGSKTMYVGTAHAGQVFKDITGNRTDTVTINSAGNGTFPCNKGSVSIWVKQ

SEQ ID NO: 34038 - protein, 482 aa, Bacillus sp.
HDGTNGTIMQYFEWNVPNDGQHWNRLHNNAQNLKNAGITAIWIPPAWKGTSQSDTGYGAYDLYDLGEFNQKGTVRTKYGTKAELERAIRSLKANGIQVYGDVVMNHKAGADFTERVRAVEVNPQNRNQEVSGEYQIEAWTGFNFPGRGNQHSSFKWRWYHFDGTDWDQSRQLSNRIYKFRGKAWDWEVDTEFGNYDYLMYADLDMDHPEVINELNRWGVWYANTLNLDGFRLDAVKHIKFSFMRDWLGHVRAQTGKNLFAVAEYWKNDLGALENYLSKTNWTMSAFDVPLHYNLYQASNSSGNYDMRNLLNGTLVQRHPSHAVTFVDNHDTQPGEALESFVQGWFKPLAYATILTREQGYPQVFYGDYYGIPSDGVPSYRQQIDPLLAARQQYAYGTQHDYLDNQDVIGWTREGDSAHAGSGLATVMSDGPGGSKTMYVGTAHAGQVFKDITGNRTDTVTINSAGNGTFPCNKGSVSIWVKQ

SEQ ID NO: 34039 - protein, 482 aa, Bacillus sp.
HDGTNGTIMQYFEWNVPNDGQHWNRLHNNAQNLKNAGITAIWIPPAWKGTSQSDTGYGAYDLYDLGEFNQKGTVRTKYGTKAELERAIRSLKANGIQVYGDVVMNHKAGADQTEHVQAVEVNPQNRNQEVSGTYQIEAWTGFNFPGRGNQHSSFKWRWYHFDGTDWDQSRGLSNRIYKFRGKAWDWEVDTEFGNYDYLMYADLDMDHPEVINELNRWGVWYANTLNLDGFRLDAVKHIKFSFMRDWLGHVRGQTGKNLFAVAEYWKNDLGALENYLSKTNWTMSAFDVPLHYNLYQASNSSGNYDMRNLLNGTLVQRHPSHAVTFVDNHDTQPGEALESFVQGWFKPLAYATILTREQGYPQVFYGDYYGIPSDGVPSYRQQIDPLLAARQQYAYGTQHDYLDNQDVIGWTREGDSAHAGSGLATVMSDGPGGSKTMYVGQAHAGQVFKDITGNRTDTVTINSAGNGTFRCNKGSVSIWVKQ

SEQ ID NO: 34040 - protein, 482 aa, Bacillus sp.
HDGTNGTIMQYFEWNVPNDGQHWNRLHNNAQNLKNAGITAIWIPPAWKGTSQSDTGYGAYDLYDLGEFNQKGTVRTKYGTKAELERAIRSLKANGIQVYGDVVMNHKAGADFTERVQAVEVNPQNRNQEVSGTYQIEAWTGFNFPGRGNQHSSFKWRWYHFDGTDWDQSRQLSNRIYKFRGKAWDWEVDTEFGNYDYLMYADLDMDHPEVINELNRWGVWYANTLNLDGFRLDAVKHIKFSFMRDWLGHVRGQTGKNLFAVAEYWKNDLGALENYLSKTNWTMSAFDVPLHYNLYQASNSSGNYDMRNLLNGTLVQRHPSHAVTFVDNHDTQPGEALESFVQGWFKPLAYATILTREQGYPQVFYGDYYGIPSSGVPSYRQQIDPLLAARQQYAYGTQHDYLDNQDVIGWTREGDSAHAGSGLATVMSDGPGGSKTMYVGTAHAGQVFKDITGNRTDTVTINSAGNGTFPCNKGSVSIWVKQ

SEQ ID NO: 34041 - protein, 482 aa, Bacillus sp.
HDGTNGTIMQYFEWNVPNDGQHWNRLHNNAQNLKNAGITAIWIPPAWKGTSQSDTGYGAYDLYDLGEFNQKGTVRTKYGTKAELERAIRSLKANGIQVYGDVVMNHKAGADFTERVQAVEVNPQNRNQEVSGTYQIEAWTGFNFPGRGNQHSSFKWRWYHFDGTDWDQSRQLSNRIYKFRGKAWDWEVDTEFGNYDYLMYADLDMDHPEVINELNRWGVWYANTLNLDGFRLDAVKHIKFSFMRDWLGHVRGQTGKNLFAVAEYWKNDLGALENYLSKTNWTMSAFDVPLHYNLYQASNSSGNYDMRNLLNGTLVQRHPSHAVTFVDNHDTQPGEALESFVQGWFKPLAYATILTREQGYPQVFYGDYYGIPSDGVPSYRQQIDPLLDARQQYAYGTQHDYLDNQDVIGWTREGDSAHAGSGLATVMSDGPGGSKTMYVGTAHAGQVFKDITGNRTDTVTINSAGNGTFPCNKGSVSIWVKQ

SEQ ID NO: 34042 - protein, 482 aa, Bacillus sp.
HDGTNGTIMQYFEWNVPNDGQHWNRLHNNAQNLKNAGITAIWIPPAWKGTSQSDTGYGAYDLYDLGEFNQKGTVRTKYGTKAELERAIRSLKANGIQVYGDVVMNHKAGADFTERVQAVEVNPQNRNQEVSGTYQIEAWTGFNFPGRGNQHSSFKWRWYHFDGTDWDQSRQLSNRIYKFRGKAWDWEVDTEFGNYDYLMYADLDMDHPEVINELNRWGVWYANTLNLDGFRLDAVKHIKFSFMRDWLGHVRGQTGKNLFAVAEYWKNDLGALENYLSKTNWTMSAFDVPLHYNLYQASNSSGNYDMRNLLNGTLVQRHPSHAVTFVDNHDTQPGEALESFVQGWFKPLAYATILTREQGYPQVFYGDYYGIPSDGVPSYRQQIDPLLLARQQYAYGTQHDYLDNQDVIGWTREGDSAHAGSGLATVMSDGPGGSKTMYVGTAHAGQVFKDITGNRTDTVTINSAGNGTFPCNKGSVSIWVKQ

SEQ ID NO: 34043 - protein, 482 aa, Bacillus sp.
HDGTNGTIMQYFEWNVPNDGQHWNRLHNNAQNLKNAGITAIWIPPAWKGTSQSDTGYGAYDLYDLGEFNQKGTVRTKYGTKAELERAIRSLKANGIQVYGDVVMNHKAGADFTERVQAVEVNPQNRNQEVSGTYQIEAWTGFNFPGRGNQHSSFKWRWYHFDGTDWDQSRQLSNRIYKFRGKAWDWEVDTEFGNYDYLMYADLDMDHPEVINELNRWGVWYANTLNLDGFRLDAVKHIKFSFMRDWLGHVRGQTGKNLFAVAEYWKNDLGALENYLSKTNWTMSAFDVPLHYNLYQASNSSGNYDMRNLLNGTLVQRHPSHAVTFVDNHDTQPGEALESFVQPWFKPLAYATILTREQGYPQVFYGDYYGIPSDGVPSYRQQIDPLLAARQQYAYGTQHDYLDNQDVIGWTREGDSAHAGSGLATVMSDGPGGSKTMYVGTAHAGQVFKDITGNRTDTVTINSAGNGTFPCNKGSVSIWVKQ

SEQ ID NO: 34044 - protein, 482 aa, Bacillus sp.
HDGTNGTIMQYFEWNVPNDGQHWNRLHNNAQNLKNAGITAIWIPPAWKGTSQSDTGYGAYDLYDLGEFNQKGTVRTKYGTKAELERAIRSLKANGIQVYGDVVMNHKAGADFTERVQAVEVNPQNRNQEVSGTYQIEAWTGFNFPGRGNQHSSFKWRWYHFDGTDWDQSRQLSNRIYKFRGKAWDWEVDTEFGNYDYLMYADLDMDHPEVINELNRWGVWYANTLNLDGFRLDAVKHIKFSFMRDWTGHVRGQTGKNLFAVAEYWKNDLGALENYLSKTNWTMSAFDVPLHYNLYQASNSSGNYDMRNLLNGTLVQRHPSHAVTFVDNHDTQPGEALESFVQGWFKPLAYATILTREQGYPQVFYGDYYGIPSHGVPSYRQQIDPLLAARQQYAYGTQHDYLDNQDVIGWTREGDSAHAGSGLATVMSDGPGGSKTMYVGTAHAGQVFKDITGNRTDTVTINSAGNGTFPCNKGSVSIWVKQ

SEQ ID NO: 34045 - protein, 482 aa, Bacillus sp.
HDGTNGTIMQYFEWNVPNDGQHWNRLHNNAQNLKNAGITAIWIPPAWKGTSQSDTGYGAYDLYDLGEFNQKGTVRTKYGTKAELERAIRSLKANGIQVYGDVVMNHKAGADQTEHVQAVEVNPQNRNQEVSGTYQIEAWTGFNFPGRGNQHSSFKWRWYHFDGTDWDQSRQLSNRIYKFRGKAWDWEVDTEFGNYDYLMYADLDMDHPEVINELNRWGVWYANTLNLDGFRLDAVKHIKFSFMRDWLGHVRGQTGKNLFAVAEYWKNDLGALENYLSKTNWTMSAFDVPLHYNLYQASNSSGNYDMRNLLNGTLVQRHPSHAVTFVDNHDTQPGEALESFVQGWFKPLAYATILTREQGYPQVFYGDYYGIPSDGVPSYRQQIDPLLAARQQYAYGTQHDYLDNQDVIGWTREGDSAHAGSGLATVMSDGPGGSKTMYVGTAHAGQVFKDITGNRTDTVTINSAGNGTFPCNKGSVSIWVKQ

SEQ ID NO: 34046 - protein, 482 aa, Bacillus sp.
HDGTNGTIMQYFEWNVPNDGQHWNRLHNNAQNLKNAGITAIWIPPAWKGTSQSDTGYGVYDLYDLGEFNQKGTVRTKYGTKAELERAIRSLKANGIQVYGDVVMNHKAGADFTEQVQAVEVNPQNRNQEVSGTYQIEAWTGFNFPGRGNQHSSFKWRWYHFDGTDWDQSRQLSNRIYKFRGKAWDWEVDTEFGNYDYLMYADLDMDHPEVINELNRWGVWYANTLNLDGFRLDAVKHIKFSFMRDWLGHVRGQTGKNLFAVAEYWKNDLGALENYLSKTNWTMSAFDVPLHYNLYQASNSSGNYDMRNLLNGTLVQRHPSHAVTFVDNHDTQPGEALESFVQGWFKPLAYATILTREQGYPQVFYGDYYGIPSDGVPSYRQQIDPLLAARQQYAYGTQHDYLDNQDVIGWTREGDSAHAGSGLATVMSDGPGGSKTMYVGQAHAGQVFKDITGNRTDTVTINSAGNGTFRCNKGSVSIWVKQ

SEQ ID NO: 34047 - protein, 482 aa, Bacillus sp.
HDGTNGTIMQYFEWNVPNDGQHWNRLHNNAQNLKNHGITAIWIPPAWKGTSQSDTGYGAYDLYDLGEFNQKGTVRTKYGTKAELERAIRSLKANGIQVYGDVVMNHKAGADQTERVQAVEVNPQNRNQEVSGTYQIEAWTGFNFPGRGNQHSSFKWRWYHFDGTDWDQSRQLSNRIYKFRGKAWDWEVDTEFGNYDYLMYADLDMDHPEVINELNRWGVWYANTLNLDGFRLDAVKHIKFSFMRDWLGHVRGQTGKNLFAVAEYWKNDLGALENYLSKTNWTMSAFDVPLHYNLYQASNSSGNYDMRNLLNGTLVQRHPSHAVTFVDNHDTQPGEALESFVQGWFKPLAYATILTREQGYPQVFYGDYYGIPSDGVPSYRQQIDPLLAARQQYAYGTQHDYLDNQDVIGWTREGDSAHAGSGLATVMSDGPGGSKTMYVGTAHAGQVFKDITGNRTDTVTINSAGNGTFPCNKGSVSIWVKQ

SEQ ID NO: 34048 - protein, 482 aa, Bacillus sp.
HDGTNGTIMQYFEWNVPNDGQHWNRLHNNAQNLKNAGITAIWIPPAWKGTSQSDTGYGAYDLYDLGEFNQKGTVRTKYGTKAELERAIRSLKANGIQVYGDVVMNHKAGADFTERVQAVEVNPQNRNQEVSGTYQIEAWTGFNFPGRGNQHSSFKWRWYHFDGTDWDQSRQLSNRIYKFRGKAWDWEVDTEFGNYDYLMYADLDMDHPEVINELNRWGVWYANTLNLDGFRLDAVKHIKFSFMRDWLGHVRGQTGKNLFAVAEYWKNDLGALENYLSKTNWTMSAFDVPLHYNLYQASNSSGNYDMRNLLNGTLVQRHPSHAVTFVDNHDTQPGEALESFVQGWFKPLAYATILTREQGYPQVFYGDYYGIPSDGVPSYRQQIDPLLIARQQYAYGTQHDYLDNQDVIGWTREGDSAHAGSGLATVMSDGPGGSKTMYVGTAHAGQVFKDITGNRTDTVTINSAGNGTFPCNKGSVSIWVKQ

SEQ ID NO: 34049 - protein, 482 aa, Bacillus sp.
HDGTNGTIMQYFEWNVPNDGQHWNRLHNNAQNLKNAGITAIWIPPAWKGTSQSDTGYGAYDLYDLGEFNQKGTVRTKYGTKAELERAIRSLKANGIQVYGDVVMNHKAGADFTERVQAVEVNPQNRNQEVSGTYQIEAWTGFNFPGRGNQHSSFKWRWYHFDGTDWDQSRNLSNRIYKFRGKAWDWEVDTEFGNYDYLMYADLDMDHPEVINELNRWGVWYANTLNLDGFRLDAVKHIKFSFMRDWLGHVRGQTGKNLFAVAEYWKNDLGALENYLSKTNWTMSAFDVPLHYNLYQASNSSGNYDMRNLLNGTLVQRHPSHAVTFVDNHDTQPGEALESFVQGWFKPLAYATILTREQGYPQVFYGDYYGIPSDGVPSYRQQIDPLLAARQQYAYGTQHDYLDNQDVIGWTREGDSAHAGSGLATVMSDGPGGSKTMYVGTAHAGQVFKDITGNRTDTVTINSAGNGTFPVNKGSVSIWVKQ

SEQ ID NO: 34050 - protein, 482 aa, Bacillus sp.
HDGTNGTIMQYFEWNVPNDGQHWNRLHNNAQNLKNAGITAIWIPPAWKGTSQSDTGYGAYDLYDLGEFNQKGTVRTKYGTKAELERAIRSLKANGIQVYGDVVMNHKAGADFTEKVQAVEVNPQNRNQEVSGTYQIEAWTGFNFPGRGNQHSSFKWRWYHFDGTDWDQSRQLSNRIYKFRGKAWDWEVDTEFGNYDYLMYADLDMDHPEVINELNRWGVWYANTLNLDGFRLDAVKHIKFSFMRDWLGHVRGQTGKNLFAVAEYWKNDLGALENYLSKTNWTMSAFDVPLHYNLYQASNSSGNYDMRNLLNGTLVQRHPSHAVTFVDNHDTQPGEALESFVQGWFKPLAYATILTREQGYPQVFYGDYYGIPSDGVPSYRQQIDPLLAARQQYAYGTQHDYLDNQDVIGWTREGDSAHAGSGLATVMSDGPGGSKTMYVGTAHAGQVFKDITGNRTDTVTINSAGNGTFPCNKGSVSIWVKQ

SEQ ID NO: 34051 - protein, 482 aa, Bacillus sp.
HDGTNGTIMQYFEWNVPNDGQHWNRLHNNAQNLKNAGITAIWIPPAWKGTSQSDTGYGAYDLYDLGEFNQKGTVRTKYGTKAELERAIRSLKANGIQVYGDVVMNHKAGADFTERVQAVEVNAQNRNQEVSGTYQIEAWTGFNFPGRGNQHSSFKWRWYHFDGTDWDQSRQLSNRIYKFRGKAWDWEVDTEFGNYDYLMYADLDMDHPEVINELNRWGVWYANTLNLDGFRLDAVKHIKFSFMRDWLGHVRGQTGKNLFAVAEYWKNDLGALENYLSKTNWTMSAFDVPLHYNLYQASNSSGNYDMRNLLNGTLVQRHPSHAVTFVDNHDTQPGEALESFVQGWFKPLAYATILTREQGYPQVFYGDYYGIPSDGVPSYRQQIDPLLAARQQYAYGTQHDYLDNQDVIGWTREGDSAHAGSGLATVMSDGPGGSKTMYVGTAHAGQVFKDITGNRTDTVTINSAGNGTFPVNKGSVSIWVKQ

SEQ ID NO: 34052 - protein, 482 aa, Bacillus sp.
HDGTNGTIMQYFEWNVPNDGQHWNRLHNNAQNLKNAGITAIWIPPAWKGTSQSDTGYGAYDLYDLGEFNQKGTVRTKYGTKAELERAIRSLKANGIQVYGDVVMNHKAGADFTERVQAVEVNPQNRNQEVSGTYQIEAWTGFNFPGRGNQHSSFKWRWYHFDGTDWDQSRQLSNRIYKFRGKAWDWEVDTEFGNYDYLMYADLDMDHPEVINELNRWGVWYANTLNLDGFRLDAVKHIKFSFMRDWLGHVRGQTGKNLFAVAEYWKNDLGALENYLSKTNWTMSAFDVPLHYNLYQASNSSGNYDMRNLLNGTLVQRHPSHAVTFVDNHDTQPGEALESFVQGWFKPLAYATILTREQGYPQVFYGDYYGIPSDGVPSYRQQIDPLLAARQQYAYGTQHDYLDNQDVIGWTREGDSAHAGSGLATVMSDGPGGSKTMYVGDAHAGQVFKDITGNRTDTVTINSAGNGTFPCNKGSVSIWVKQ

SEQ ID NO: 34053 - protein, 482 aa, Bacillus sp.
HDGTNGTIMQYFEWNVPNDGQHWNRLHNNAQNLKNAGITAIWIPPAWKGTSQSDTGYGAYDLYDLGEFNQKGTVRTKYGTKAELERAIRSLKANGIQVYGDVVINHKAGADFTERVQAVEVNPQNRNQEVSGTYQIEAWTGFNFPGRGNQHSSFKWRWYHFDGTDWDQSRQLSNRIYKFRGKAWDWEVDTEFGNYDYLMYADLDMDHPEVINELNRWGVWYANTLNLDGFRLDAVKHIKFSFMRDWLGHVRGQTGKNLFAVAEYWKNDLGALENYLSKTNWTMSAFDVPLHYNLYQASNSSGNYDMRNLLNGTLVQRHPSHAVTFVDNHDTQPGEALESFVQGWFKPLAYATILTREQGYPQVFYGDYYGIPSHGVPSYRQQIDPLLAARQQYAYGTQHDYLDNQDVIGWTREGDSAHAGSGLATVMSDGPGGSKTMYVGTAHAGQVFKDITGNRTDTVTINSAGNGTFPCNKGSVSIWVKQ

SEQ ID NO: 34054 - protein, 482 aa, Bacillus sp.
HDGTNGTIMQYFEWNVPNDGQHWNRLHNNAQNLKNAGITAIWIPPAWKGTSQSDTGYGAYDLYDLGEFNQKGTVRTKYGTKAELERAIRSLKANGIQVYGDVVMNHKAGADWTERVQAVEVNPQNRNQEVSGTYQIEAWTGFNFPGRGNQHSSFKWRWYHFDGTDWDQSRQLSNRIYKFRGKAWDWEVDTEFGNYDYLMYADLDMDHPEVINELNRWGVWYANTLNLDGFRLDAVKHIKFSFMRDWLGHVRGQTGKNLFAVAEYWKNDLGALENYLSKTNWTMSAFDVPLHYNLYQASNSSGNYDMRNLLNGTLVQRHPSHAVTFVDNHDTQPGEALESFVQGWFKPLAYATILTREQGYPQVFYGDYYGIPSDGVPSYRQQIDPLLAARQQYAYGTQHDYLDNQDVIGWTREGDSAHAGSGLATVMSDGPGGSKTMYVGTAHAGQVFKDITGNRTDTVTINSAGNGTFPCNKGSVSIWVKQ

SEQ ID NO: 34055 - protein, 482 aa, Synthetic construct
HDGTNGTIMQYFEWNVPNDGQHWNRLHNNAQNLKNAGITAIWIPPAWKGTSQSDTGYGAYDLYDLGEFNQKGTVRTKYGTKAELERAIRSLKANGIQVYGDVVMNHKAGADFTERVQAVEVNPQNRNQEVSGEYQIEAWTGFNFPGRGNQHSSFKWRWYHFDGTDWDQSRQLSNRIYKFRGKAWDWEVDTEFGNYDYLMYADLDMDHPEVINELNRWGVWYANTLNLDGFRLDAVKHIKFSFMRDWLGHVRGQTGKNLFAVAEYWKNDLGALENYLSKTNWTMSAFDVPLHYNLYQASNSSGNYDMRNLLNGTLVQRHPSHAVTFVDNHDTQPGEALESFVQGWFKPLAYATILTREQGYPQVFYGDYYGIPSDGVPSYRQQIDPLLAARQQYAYGTQHDYLDNQDVIGWTREGDSAHAGSGLATVMSDGPGGSKTMYVGTAHAGQVFKDITGNRTDTVTINSAGNGTFPCNKGSVSIWVKQ

SEQ ID NO: 34056 - protein, 482 aa, Bacillus sp.
HDGTNGTIMQYFEWNVPNDGQHWNRLHNNAQNLKNAGITAIWIPPAWKGTSQSDTGYGAYDLYDLGEFNQKGTVRTKYGTKAELERAIRSLKANGIQVYGDVVMNHKAGADFTERVQAVEVNPQNRNQEVSGTYQIEAWTGFNFPGRGNQHSSFKWRWYHFDGTDWDQSREFRNRIYKFRGKAWDWEVDTEFGNYDYLMYADLDMDHPEVINELNRWGVWYANTLNLDGFRLDAVKHIKFSFMRDWLGHVRGQTGKNLFAVAEYWKNDLGALENYLSKTNWTMSAFDVPLHYNLYQASNSSGNYDMRNLLNGTLVQRHPSHAVTFVDNHDTQPGEALESFVQGWFKPLAYATILTREQGYPQVFYGDYYGIPSDGVPSYRQQIDPLLAARQQYAYGTQHDYLDNQDVIGWTREGDSAHAGSGLATVMSDGPGGSKTMYVGTAHAGQVFKDITGNRTDTVTINSAGNGTFPCNKGSVSIWVKQ

SEQ ID NO: 34057 - protein, 482 aa, Bacillus sp.
HDGTNGTIMQYFEWNVPNDGQHWNRLHNNAQNLKNAGITAIWIPPAWKGTSQSDTGYGAYDLYDLGEFNQKGTVRTKYGTKAELERAIRSLKANGIQVYGDVVMNHKAGADFTERVQAVEVNPQNRNQEVSGTYQIEAWTGFNFPGRGNQHSSFKWRWYHFDGTDWDQSRQVSNRIYKFRGKAWDWEVDTEFGNYDYLMYADLDMDHPEVINELNRWGVWYANTLNLDGFRLDAVKHIKFSFMRDWLGHVRGQTGKNLFAVAEYWKNDLGALENYLSKTNWTMSAFDVPLHYNLYQASNSSGNYDMRNLLNGTLVQRHPSHAVTFVDNHDTQPGEALESFVQGWFKPLAYATILTREQGYPQVFYGDYYGIPSDGVPSYRQQIDPLLAARQQYAYGTQHDYLDNQDVIGWTREGDSAHAGSGLATVMSDGPGGSKTMYVGTAHAGQVFKDITGNRTDTVTINSAGNGTFPCNKGSVSIWVKQ

SEQ ID NO: 34058 - protein, 482 aa, Bacillus sp.
HDGTNGTIMQYFEWNVPNDGQHWNRLHNNAQNLKNAGITAIWIPPAWKGTSQSDTGYGAYDLYDLGEFNQKGTVRTKYGTKAELERAIRSLKANGIQVYGDVVMNHKAGADFTERVQAVEVNPQNRNQEVSGTYQIEAWTGFNFPGRGNQHSSFKWRWYHFDGTDWDQSRQLGNRIYKFRGKAWDWEVDTEFGNYDYLMYADLDMDHPEVINELNRWGVWYANTLNLDGFRLDAVKHIKFSFMRDWLGHVRGQTGKNLFAVAEYWKNDLGALENYLSKTNWTMSAFDVPLHYNLYQASNSSGNYDMRNLLNGTLVQRHPSHAVTFVDNHDTQPGEALESFVQGWFKPLAYATILTREQGYPQVFYGDYYGIPSDGVPSYRQQIDPLLAARQQYAYGTQHDYLDNQDVIGWTREGDSAHAGSGLATVMSDGPGGSKTMYVGTAHAGQVFKDITGNRTDTVTINSAGNGTFPCNKGSVSIWVKQ

SEQ ID NO: 34059 - protein, 482 aa, Bacillus sp.
HDGTNGTIMQYFEWNVPNDGQHWNRLHNNAQNLKNAGITAIWIPPAWKGTSQSDTGYGAYDLYDLGEFNQKGTVRTKYGTKAELERAIRSLKANGIQVYGDVVMNHKAGADFTERVQAVEVNPQNRNQEVSGTYQIEAWTGFNFPGRGNQHSSFKWRWYHFDGTDWDQSRQLSNRIYKFRGKAWDWEVDTEFGNYDYLMYADLDMDHPEVINELNRWGVWYANTLNLDGFRLDAVKHIKFSFMRDWLGHVRGQTGKNLFAVAEYWKNDLGALENYLSKTNWTMSAFDVPLHYNLYQASNSSGNYDMRNLLNGTLVQRHPSHAVTFVDNHDTQPGEALESFVQGWFKPLAYATILTREQGYPQVFYGDYYGIPSDGVPSYRQQIDPLLSARQQYAYGTQHDYLDNQDVIGWTREGDSAHAGSGLATVMSDGPGGSKTMYVGTAHAGQVFKDITGNRTDTVTINSAGNGTFPCNKGSVSIWVKQ

SEQ ID NO: 34060 - protein, 482 aa, Bacillus sp.
HDGTNGTIMQYFEWNVPNDGQHWNRLHNNAQNLKNAGITAIWIPPAWKGTSQSDTGYGAYDLYDLGEFNQKGTVRTKYGTKAELERAIRSLKANGIQVYGDVVMNHKAGADFTERVQAVEVNPQNRNQEVSGTYQIEAWTGFNFPGRGNQHSSFKWRWYHFDGTDWDQSRQATNRIYKFRGKAWDWEVDTEFGNYDYLMYADLDMDHPEVINELNRWGVWYANTLNLDGFRLDAVKHIKFSFMRDWLGHVRGQTGKNLFAVAEYWKNDLGALENYLSKTNWTMSAFDVPLHYNLYQASNSSGNYDMRNLLNGTLVQRHPSHAVTFVDNHDTQPGEALESFVQGWFKPLAYATILTREQGYPQVFYGDYYGIPSDGVPSYRQQIDPLLAARQQYAYGTQHDYLDNQDVIGWTREGDSAHAGSGLATVMSDGPGGSKTMYVGTAHAGQVFKDITGNRTDTVTINSAGNGTFPCNKGSVSIWVKQ

SEQ ID NO: 34061 - protein, 482 aa, Bacillus sp.
HDGTNGTIMQYFEWNVPNDGQHWNRLHNNAQNLKNAGITAIWIPPAWKGTSQSDTGYGAYDLYDLGEFNQKGTVRTKYGTKAELERAIRSLKANGIQVYGDVVMNHKAGADFTERVQAVEVNPQNRNQEVSGTYQIEAWTGFNFPGRGNQHSSFKWRWYHFDGTDWDQSRQLSNRIYKFRGKAWDWEVDTEFGNYDYLMYADLDMDHPEVINELNRWGVWYANTLNLDGFRLDAVKHIKFSFMRDWLGHVRAQTGKNLFAVAEYWKNDLGALENYLSKTNWTMSAFDVPLHYNLYQASNSSGNYDMRNLLNGTLVQRHPSHAVTFVDNHDTQPGEALESFVQGWFKPLAYATILTREQGYPQVFYGDYYGIPSDGVPSYRQQIDPLLAARQQYAYGTQHDYLDNQDVIGWTREGDSAHAGSGLATVMSDGPGGSKTMYVGTAHAGQVFKDITGNRTDTVTINSAGNGTFPCNKGSVSIWVKQ

SEQ ID NO: 34062 - protein, 482 aa, Bacillus sp.
HDGTNGTIMQYFEWNVPNDGQHWNRLHNNAQNLKNAGITAIWIPPAWKGTSQSDTGYGAYDLYDLGEFNQKGTVRTKYGTKAELERAIRSLKANGIQVYGDVVMNHKAGADFTERVQAVEVNPQNRNQEVSGTYQIEAWTGFNFPGRGNQHSSFKWRWYHFDGTDWDQSRQLDNRIYKFRGKAWDWEVDTEFGNYDYLMYADLDMDHPEVINELNRWGVWYANTLNLDGFRLDAVKHIKFSFMRDWLGHVRGQTGKNLFAVAEYWKNDLGALENYLSKTNWTMSAFDVPLHYNLYQASNSSGNYDMRNLLNGTLVQRHPSHAVTFVDNHDTQPGEALESFVQGWFKPLAYATILTREQGYPQVFYGDYYGIPSDGVPSYRQQIDPLLAARQQYAYGTQHDYLDNQDVIGWTREGDSAHAGSGLATVMSDGPGGSKTMYVGTAHAGQVFKDITGNRTDTVTINSAGNGTFPCNKGSVSIWVKQ

SEQ ID NO: 34063 - protein, 482 aa, Bacillus sp.
HDGTNGTIMQYFEWNVPNDGQHWNRLHNNAQNLKNAGITAIWIPPAWKGTSQSDTGYGAYDLYDLGEFNQKGTVRTKYGTKAELERAIRSLKANGIQVYGDVVMNHKAGADFTERVQAVEVNPQNRNQEVSGEYQIEAWTGFNFPGRGNQHSSFKWRWYHFDGTDWDQSRQLSNRIYKFRTKAWDWEVDTEFGNYDYLMYADLDMDHPEVINELNRWGVWYANTLNLDGFRLDAVKHIKFSFMRDWLGHVRGQTGKNLFAVAEYWKNDLGALENYLSKTNWTMSAFDVPLHYNLYQASNSSGNYDMRNLLNGTLVQRHPSHAVTFVDNHDTQPGEALESFVQGWFKPLAYATILTREQGYPQVFYGDYYGIPSHGVPSYRQQIDPLLAARQQYAYGTQHDYLDNQDVIGWTREGDSAHAGSGLATVMSDGPGGSKTMYVGTAHAGQVFKDITGNRTDTVTINSAGNGTFPCNKGSVSIWVKQ

SEQ ID NO: 34064 - protein, 482 aa, Bacillus sp.
HDGTNGTIMQYFEWSVPNDGQHWNRLHNNAQNLKNAGITAIWIPPAWKGTSQSDTGYGAYDLYDLGEFNQKGTVRTKYGTKAELERAIRSLKANGIQVYGDVVMNHKAGADFTERVQAVEVNPQNRNQEVSGTYQIEAWTGFNFPGRGNQHSSFKWRWYHFDGTDWDQSRQLSNRIYKFRGKAWDWEVDTEFGNYDYLMYADLDMDHPEVINELNRWGVWYANTLNLDGFRLDAVKHIKFSFMRDWLGHVRGQTGKNLFAVAEYWKNDLGALENYLSKTNWTMSAFDVPLHYNLYQASNSSGNYDMRNLLNGTLVQRHPSHAVTFVDNHDTQPGEALESFVQGWFKPLAYATILTREQGYPQVFYGDYYGIPSDGVPSYRQQIDPLLAARQQYAYGTQHDYLDNQDVIGWTREGDSAHAGSGLATVMSDGPGGSKTMYVGTAHAGQVFKDITGNRTDTVTINSAGNGTFPCNKGSVSIWVKQ

SEQ ID NO: 34065 - protein, 482 aa, Bacillus sp.
HDGTNGTIMQYFEWNVPNDGQHWNRLHNNAQNLKNAGITAIWIPPAWKGTSQSDTGYGAYDLYDLGEFNQKGTVRTKYGTKAELERAIRSLKANGIQVYGDVVMNHKAGADFTERVQAVEVNPQNRNQEVSGTYQIEAWTGFNFPGRGNQHSSFKWRWYHFDGTDWDQSRQLSNRIYKFRGKAWDWEVDTEFGNYDYLMYADLDMDHPEVINELNRWGVWYANTLNLDGFRLDAVKHIKFSFMRDWLGHVRGQTGKNLFAVAEYWKNDLGALENYLSKTNWTMSAFDVPLHYNLYQASNSSGNYDMRNLLNGTLVQRHPSHAVTFVDNHDTQPGEALESFVQGWFKPLAYATILTREQGYPQVFYGDYYGIPSDGVPSLRQQIDPLLAARQQYAYGTQHDYLDNQDVIGWTREGDSAHAGSGLATVMSDGPGGSKTMYVGTAHAGQVFKDITGNRTDTVTINSAGNGTFPCNKGSVSIWVKQ

SEQ ID NO: 34066 - protein, 482 aa, Bacillus sp.
HDGTNGTIMQYFEWNVPNDGQHWNRLHNNAQNLKNAGITAIWIPPAWKGTSQSDTGYGAYDLYDLGEFNQKGTVRTKYGTKAELERAIRSLKANGIQVYGDVVMNHKAGADFTERVQAVEVNPQNRNQEVSGTYQIEAWTGFNFPGRGNQHSSFKWRWYHFDGTDWDQSRQLSNRIYKFRGKAWDWEVDTEFGNYDYLMYADLDMDHPEVINELNRWGVWYANTLNLDGFRLDAVKHIKFSFLRDWLGHVRGQTGKNLFAVAEYWKNDLGALENYLSKTNWTMSAFDVPLHYNLYQASNSSGNYDMRNLLNGTLVQRHPSHAVTFVDNHDTQPGEALESFVQGWFKPLAYATILTREQGYPQVFYGDYYGIPSDGVPSYRQQIDPLLAARQQYAYGTQHDYLDNQDVIGWTREGDSAHAGSGLATVMSDGPGGSKTMYVGTAHAGQVFKDITGNRTDTVTINSAGNGTFPCNKGSVSIWVKQ

SEQ ID NO: 34067 - protein, 482 aa, Bacillus sp.
HDGTNGTIMQYFEWNVPNDGQHWNRLHNNAQNLKNAGITAIWIPPAWKGTSQSDTGYGAYDLYDLGEFNQKGTVRTKYGTKAELERAIRSLKANGIQVYGDVVMNHKAGADFTEWVQAVEVNPQNRNQEVSGTYQIEAWTGFNFPGRGNQHSSFKWRWYHFDGTDWDQSRQLSNRIYKFRGKAWDWEVDTEFGNYDYLMYADLDMDHPEVINELNRWGVWYANTLNLDGFRLDAVKHIKFSFMRDWLGHVRGQTGKNLFAVAEYWKNDLGALENYLSKTNWTMSAFDVPLHYNLYQASNSSGNYDMRNLLNGTLVQRHPSHAVTFVDNHDTQPGEALESFVQGWFKPLAYATILTREQGYPQVFYGDYYGIPSDGVPSYRQQIDPLLAARQQYAYGTQHDYLDNQDVIGWTREGDSAHAGSGLATVMSDGPGGSKTMYVGTAHAGQVFKDITGNRTDTVTINSAGNGTFPCNKGSVSIWVKQ

SEQ ID NO: 34068 - protein, 482 aa, Bacillus sp.
HDGTNGTIMQYFEWNVPNDGQHWNRLHNNAQNLKNAGITAIWIPPAWKGTSQSDTGYGAYDLYDLGEFNQKGTVRTKYGTKAELERAIRSLKANGIQVYGDVVMNHKAGADFTERVQAVEVNPQNRNQEVSGTYQIEAWTGFNFPGRGNQHSSFKWRWYHFDGTDWDQSRQLSNRIYKFRGKAWDWEVDTEFGNYDYLMYADLDMDHPEVINELNRWGVWYANTLNLDGFRLDAVKHIKFSFMRDWLGHVRGQTGKNLFAVAEYWKNDLGALENYLSKTNWTMSAFDVPLHYNLYQASNSSGNYDMRNLLNGTLVQRHPSHAVTFVDNHDTQPGEALESFVQGWFKPLAYATILTREQGYPQVFYGDYYGIPSDGVPSYRQQIDPLLAARQQYAYGTQHDYLDNQDVIGWTREGDSAHAGSGLATVMSDGPGGSKTMYVGTAHAGQVFKDITGNRTDTVTINSAGNGTFPCNKGSVSIWVKQ

SEQ ID NO: 34069 - protein, 482 aa, Bacillus sp.
HDGTNGTIMQYFEWNVPNDGQHWNRLHNNAQNLKNAGITAIWIPPAWKGTSQSDTGYGAYDLYDLGEFNQKGTVRTKYGTKAELERAIRSLKANGIQVYGDVVMNHKAGADFTERVQAVEVNPQNRNQEVSGTYQIEAWTGFNFPGRGNQHSSFKWRWYHFDGTDWDQSRQLSNRIYKFRGKAWDWEVDTEFGNYDYLMYADLDMDHPEVINELNRWGVWYANTLNLDGFRLDAVKHIKFSFMRDWLGHVRGQTGKNLFAVAEYWKNDLGALENYLSKTNWTMSAFDVPLHYNLYQASNSSGNYDMRNLLNGTLVQRHPSHAVTIVDNHDTQPGEALESFVQGWFKPLAYATILTREQGYPQVFYGDYYGIPSHGVPSYRQQIDPLLAARQQYAYGTQHDYLDNQDVIGWTREGDSAHAGSGLATVMSDGPGGSKTMYVGTAHAGQVFKDITGNRTDTVTINSAGNGTFPCNKGSVSIWVKQ

SEQ ID NO: 34070 - protein, 482 aa, Bacillus sp.
HDGTNGTIMQYFEWNVPNDGQHWNRLHNNAQNLKNAGITAIWIPPAWKGTSQSDTGYGAYDLYDLGEFNQKGTVRTKYGTKAELERAIRSLKANGIQVYGDVVMNHKAGADFTERVQAVEVNPQNRNQEVSGTYQIEAWTGFNFPGRGNQHSSFKWRWYHFDGTDWDQSRQLSNRIYKFRGKAWDWEVDTEFGNYDYLMYADLDMDHPEVINELNRWGVWYANTLNLDGFRLDAVKHIKFSFMRDWMGHVRGQTGKNLFAVAEYWKNDLGALENYLSKTNWTMSAFDVPLHYNLYQASNSSGNYDMRNLLNGTLVQRHPSHAVTFVDNHDTQPGEALESFVQGWFKPLAYATILTREQGYPQVFYGDYYGIPSHGVPSYRQQIDPLLAARQQYAYGTQHDYLDNQDVIGWTREGDSAHAGSGLATVMSDGPGGSKTMYVGTAHAGQVFKDITGNRTDTVTINSAGNGTFPCNKGSVSIWVKQ

SEQ ID NO: 34071 - protein, 482 aa, Bacillus sp.
HDGTNGTIMQYFEWNVPNDGQHWNRLHNNAQNLKNAGITAIWIPPAWKGTSQLDTGYGAYDLYDLGEFNQKGTVRTKYGTKAELERAIRSLKANGIQVYGDVVMNHKAGADFTERVQAVEVNPQNRNQEVSGTYQIEAWTGFNFPGRGNQHSSFKWRWYHFDGTDWDQSRQLSNRIYKFRGKAWDWEVDTEFGNYDYLMYADLDMDHPEVINELNRWGVWYANTLNLDGFRLDAVKHIKFSFMRDWLGHVRGQTGKNLFAVAEYWKNDLGALENYLSKTNWTMSAFDVPLHYNLYQASNSSGNYDMRNLLNGTLVQRHPSHAVTFVDNHDTQPGEALESFVQGWFKPLAYATILTREQGYPQVFYGDYYGIPSDGVPSYRQQIDPLLAARQQYAYGTQHDYLDNQDVIGWTREGDSAHAGSGLATVMSDGPGGSKTMYVGTAHAGQVFKDITGNRTDTVTINSAGNGTFPCNKGSVSIWVKQ

SEQ ID NO: 34072 - protein, 482 aa, Bacillus sp.
HDGTNGTIMQYFEWNVPNDGQHWNRLHNNAQNLKNAGITAIWIPPAWKGTSQSDTGYGAYDLYDLGEFNQKGTVRTKYGTKAELERAIRSLKANGIQVYGDVVFNHKAGADFTERVQAVEVNPQNRNQEVSGTYQIEAWTGFNFPGRGNQHSSFKWRWYHFDGTDWDQSRQLSNRIYKFRGKAWDWEVDTEFGNYDYLMYADLDMDHPEVINELNRWGVWYANTLNLDGFRLDAVKHIKFSFMRDWLGHVRGQTGKNLFAVAEYWKNDLGALENYLSKTNWTMSAFDVPLHYNLYQASNSSGNYDMRNLLNGTLVQAHPNHAVTFVDNHDTQPGEALESFVQGWFKPLAYATILTREQGYPQVFYGDYYGIPSDGVPSYRQQIDPLLAARQQYAYGTQHDYLDNQDVIGWTREGDSAHAGSGLATVMSDGPGGSKTMYVGTAHAGQVFKDITGNRTDTVTINSAGNGTFPVNKGSVSIWVKQ

SEQ ID NO: 34073 - protein, 482 aa, Bacillus sp.
HDGTNGTIMQYFEWNVPNDGQHWNRLHNNAQNLKNAGITAIWIPPAWKGTSQSDTGYGAYDLYDLGEFNQKGTVRTKYGTKAELERAIRSLKANGIQVYGDVVMNHKAGADFTERVQAVEVNPQNRNQEVSGTYQIEAWTGFNFPGRGNQHSSFKWRWYHFDGTDWDQSRQLSNRIYKFRGKAWDWEVDTEFGNYDYLMYADLDMDHPEVGNELNRWGVWYANTLNLDGFRLDAVKHIKFSFMRDWLGHVRGQTGKNLFAVAEYWKNDLGALENYLSKTNWTMSAFDVPLHYNLYQASNSSGNYDMRNLLNGTLVQRHPSHAVTFVDNHDTQPGEALESFVQGWFKPLAYATILTREQGYPQVFYGDYYGIPSDGVPSYRQQIDPLLAARQQYAYGTQHDYLDNQDVIGWTREGDSAHAGSGLATVMSDGPGGSKTMYVGTAHAGQVFKDITGNRTDTVTINSAGNGTFPCNKGSVSIWVKQ

SEQ ID NO: 34074 - protein, 482 aa, Bacillus sp.
HDGTNGTIMQYFEWNVPNDGQHWNRLHNNAQNLKNYGITAIWIPPAWKGTSQSDTGYGAYDLYDLGEFNQKGTVRTKYGTKAELERAIRSLKANGIQVYGDVVMNHKAGADFTERVQAVEVNPQNRNQEVSGTYQIEAWTGFNFPGRGNQHSSFKWRWYHFDGTDWDQSRQLSNRIYKFRGKAWDWEVDTEFGNYDYLMYADLDMDHPEVINELNRWGVWYANTLNLDGFRLDAVKHIKFSFMRDWLGHVRGQTGKNLFAVAEYWKNDLGALENYLSKTNWTMSAFDVPLHYNLYQASNSSGNYDMRNLLNGTLVQRHPSHAVTFVDNHDTQPGEALESFVQGWFKPLAYATILTREQGYPQVFYGDYYGIPSDGVPSYRQQIDPLLAARQQYAYGTQHDYLDNQDVIGWTREGDSAHAGSGLATVMSDGPGGSKTMYVGTAHAGQVFKDITGNRTDTVTINSAGNGTFPCNKGSVSIWVKQ

SEQ ID NO: 34075 - protein, 482 aa, Bacillus sp.
HDGTNGTIMQYFEWNVPNDGQHWNRLHNNAQNLKNAGITAIWIPPAWKGTSQSDTGYGAYDLYDLGEFNQKGTVRTKYGTKAELERAIRSLKANGIQVYGDVVMNHKAGADSTERVQAVEVNPQNRNQEVSGTYQIEAWTGFNFPGRGNQHSSFKWRWYHFDGTDWDQSRQLSNRIYKFRGKAWDWEVDTEFGNYDYLMYADLDMDHPEVINELNRWGVWYANTLNLDGFRLDAVKHIKFSFMRDWLGHVRGQTGKNLFAVAEYWKNDLGALENYLSKTNWTMSAFDVPLHYNLYQASNSSGNYDMRNLLNGTLVQRHPSHAVTFVDNHDTQPGEALESFVQGWFKPLAYATILTREQGYPQVFYGDYYGIPSDGVPSYRQQIDPLLAARQQYAYGTQHDYLDNQDVIGWTREGDSAHAGSGLATVMSDGPGGSKTMYVGTAHAGQVFKDITGNRTDTVTINSAGNGTFPCNKGSVSIWVKQ

SEQ ID NO: 34076 - protein, 482 aa, Bacillus sp.
HDGTNGTIMQYFEWNVPNDGQHWNRLHNNAQNLKNAGITAIWIPPAWKGTSQSDTGYGAYDLYDLGEFNQKGTVRTKYGTKAELERAIRSLKANGIQVYGDVVMNHKAGADFTERVQAVEVNPQNRNQEVSGTYQIEAWTGFNFPGRGNQHSSFKWRWYHFDGTDWDQSRQLSNRIYKFRGKAWDWEVDTEFGNYDYLMYADLDMDHPEVINELNRWGVWYFNTLNLDGFRLDAVKHIKFSFMRDWLGHVRGQTGKNLFAVAEYWKNDLGALENYLSKTNWTMSAFDVPLHYNLYQASNSSGNYDMRNLLNGTLVQRHPSHAVTFVDNHDTQPGEALESFVQGWFKPLAYATILTREQGYPQVFYGDYYGIPSDGVPSYRQQIDPLLAARQQYAYGTQHDYLDNQDVIGWTREGDSAHAGSGLATVMSDGPGGSKTMYVGTAHAGQVFKDITGNRTDTVTINSAGNGTFPCNKGSVSIWVKQ

SEQ ID NO: 34077 - protein, 482 aa, Bacillus sp.
HDGTNGTIMQYFEWNVPNDGQHWNRLHNNAQNLKNAGITAIWIPPAWKGTSQSDTGYGAYDLYDLGEFNQKGTVRTKYGTKAELERAIRSLKANGIQVYGDVVMNHKAGADFTERVQAVEVNPQNRNQEVSGTYQIEAWTGFNFPGRGNQHSSFKWRWYHFDGTDWDQSRQLSNRIYKFRGKAWDWEVDTEFGNYDYLMYADLDMDHPEVINELNRWGVWYANTLNLDGFRLDAVKHIKFSFMRDWLGHVRGQTGKNLFAVAEYWKNDLGALENYLSKTNWTMSAFDVPLHYNLYQASNSSGNYDMRNLLNGTLVQRHPSHAVTFVDNHDTQPGEALESFVQGWFKPLAYATILTREQGYAQVFYGDYYGIPSDGVPSYRQQIDPLLAARQQYAYGTQHDYLDNQDVIGWTREGDSAHAGSGLATVMSDGPGGSKTMYVGTAHAGQVFKDITGNRTDTVTINSAGNGTFPVNKGSVSIWVKQ

SEQ ID NO: 34078 - protein, 482 aa, Bacillus sp.
HDGTNGTIMQYFEWNVPNDGQHWNRLHNNAQNLKNAGITAIWIPPAWKGTSQSDTGYGAYDLYDLGEFNQKGTVRTKYGTKAELERAIRSLKANGIQVYGDVVMNHKAGADFTERVQAVEVNPQNRNQEVSGTYQIEAWTGFNFPGRGNQHSSFKWRWYHFDGTDWDQSRQLSNRIYKFRGKAWDWEVDTEFGNYDYLMYADLDMDHPEVINELNRWGVWYANTLNLDGFRLDAVKHIKFSFMRDWLGHVRGQTGKNLFAVAEYWKNDLGALENYLSKTNWTMSAFDVPLHYNLYQASNSSGNYDMRNLLNGTLVQRHPSHAVTFVDNHDTQPGEALESFVQGWFKPLAYATILTREQGYPQVFYGDYYGIPSDGVPSYRQQIDPLLAARQQYAYGTQHDYLDNQDVIGWTREGDSAHAGSGLATVMSDGPGGSKTMYVGVAHAGQVFKDITGNRTDTVTINSAGNGTFPCNKGSVSIWVKQ

SEQ ID NO: 34079 - protein, 482 aa, Bacillus sp.
HDGTNGTIMQYFEWNVPNDGQHWNRLHNNAQNLKNAGITAIWIPPAWKGTSQSDTGYGAYDLYDLGEFNQKGTVRTKYGTKAELERAIRSLKANGIQVYGDVVMNHKAGADFTERVQAVEVNPQNRNQEVSGTYQIEAWTGFNFPGRGNQHSSFKWRWYHFDGTDWDQSRQLSNRIYKFRGKAWDWEVDTEFGNYDYLMYADLDMDHPEVINELNRWGVWYANTLNLDGFRLDAVKHIKFSFMRDWLGHVRGQTGKNLFAVAEYWKNDLGALENYLSKTNWTMSAFDVPLHYNLYQASNSSGNYDMRNLLNGTLVQRHPSHAVTMVDNHDTQPGEALESFVQGWFKPLAYATILTREQGYPQVFYGDYYGIPSHGVPSYRQQIDPLLAARQQYAYGTQHDYLDNQDVIGWTREGDSAHAGSGLATVMSDGPGGSKTMYVGTAHAGQVFKDITGNRTDTVTINSAGNGTFPCNKGSVSIWVKQ

SEQ ID NO: 34080 - protein, 482 aa, Bacillus sp.
HDGTNGTIMQYFEWNVPNDGQHWNRLHNNAQNLKNAGITAIWIPPAWKGTSQSDTGYGAYDLYDLGEFNQKGTVRTKYGTKAELERAIRSLKANGIQVYGDVVLNHKAGADFTERVQAVEVNPQNRNQEVSGTYQIEAWTGFNFPGRGNQHSSFKWRWYHFDGTDWDQSRQLSNRIYKFRGKAWDWEVDTEFGNYDYLMYADLDMDHPEVINELNRWGVWYANTLNLDGFRLDAVKHIKFSFMRDWLGHVRGQTGKNLFAVAEYWKNDLGALENYLSKTNWTMSAFDVPLHYNLYQASNSSGNYDMRNLLNGTLVQRHPSHAVTFVDNHDTQPGEALESFVQGWFKPLAYATILTREQGYPQVFYGDYYGIPSHGVPSYRQQIDPLLAARQQYAYGTQHDYLDNQDVIGWTREGDSAHAGSGLATVMSDGPGGSKTMYVGTAHAGQVFKDITGNRTDTVTINSAGNGTFPCNKGSVSIWVKQ

SEQ ID NO: 34081 - protein, 482 aa, Bacillus sp.
HDGTNGTIMQYFEWNVPNDGQHWNRLHNNAQNLKNAGITAIWIPPAWKGTSQSDTGYGAYDLYDLGEFNQKGTVRTKYGTKAELERAIRSLKANGIQVYGDVVMNHKAGADFTERVQAVEVNPQNRNQEVSGTYQIEAWTGFNFPGRGNQHSSFKWRWYHFDGTDWDQSRQLSNRIYKFRGKAWDWEVDTEFGNYDYLMYADYDMDHPEVINELNRWGVWYANTLNLDGFRLDAVKHIKFSFMRDWLGHVRGQTGKNLFAVAEYWKNDLGALENYLSKTNWTMSAFDVPLHYNLYQASNSSGNYDMRNLLNGTLVQRHPSHAVTFVDNHDTQPGEALESFVQGWFKPLAYATILTREQGYPQVFYGDYYGIPSDGVPSYRQQIDPLLAARQQYAYGTQHDYLDNQDVIGWTREGDSAHAGSGLATVMSDGPGGSKTMYVGTAHAGQVFKDITGNRTDTVTINSAGNGTFPCNKGSVSIWVKQ

SEQ ID NO: 34082 - protein, 482 aa, Bacillus sp.
HDGTNGTIMQYFEWNVPNDGQHWNRLHNNAQNLKNAGITAIWIPPAWKGTSQSDTGYGAYDLYDLGEFNQKGTVRTKYGTKAELERAIRSLKANGIQVYGDVVMNHKAGADFTERVQAVEVNPQNRNQEVSGTYQIEAWTGFNFPGRGNQHSSFKWRWYHFDGTDWDQSRQLSNRIYKFRGKAWDWEVDTEFGNYDYLMYADLDMDHPEVINELNRWGVWYANTLNLDGFRLDAVKHIKFSFMRDWLGHVRGQTGKNLFAVAEYWKNDLGALENYLSKTNWTMSAFDVPLHYNLYQASNSSGNYDMRNLLNGTLVQRHPSHAVTFVDNHDTQPGEALESFVQGWFKPLAYATILTREQGYPQVFYGDYYGIPSDGVPSYRQQIDPLLKARQQYAYGTQHDYLDNQDVIGWTREGDSAHAGSGLATVMSDGPGGSKTMYVGTAHAGQVFKDITGNRTDTVTINSAGNGTFPCNKGSVSIWVKQ

SEQ ID NO: 34083 - protein, 482 aa, Bacillus sp.
HDGTNGTIMQYFEWNVPNDGQHWNRLHNNAQNLKNAGITAIWIPPAWKGTSQSDTGYGAYDLYDLGEFNQRGTVRTKYGTKAELERAIRSLKANGIQVYGDVVMNHKAGADFTERVQAVEVNPQNRNQEVSGTYQIEAWTGFNFPGRGNQHSSFKWRWYHFDGTDWDQSRQLSNRIYKFRGKAWDWEVDTEFGNYDYLMYADLDMDHPEVINELNRWGVWYANTLNLDGFRLDAVKHIKFSFMRDWLGHVRAQTGKNLFAVAEYWKNDLGALENYLSKTNWTMSAFDVPLHYNLYQASNSSGNYDMRNLLNGTLVQRHPSHAVTFVDNHDTQPGEALESFVQGWFKPLAYATILTREQGYPQVFYGDYYGIPSDGVPSYRQQIDPLLAARQQYAYGTQHDYLDNQDVIGWTREGDSAHAGSGLATVMSDGPGGSKTMYVGTAHAGQVFKDITGNRTDTVTINSAGNGTFPVNKGSVSIWVKQ

SEQ ID NO: 34084 - protein, 482 aa, Bacillus sp.
HDGTNGTIMQYFEWNVPNDGQHWNRLHNNAQNLKNAGITAIWIPPAWKGTSQSDTGYGAYDLYDLGEFNQKGTVRTKYGTKAELERAIRSLKANGIQVYGDVVMNHKAGADFTERVQAVEVNPQNRNQEVSGTYQIEAWTGFNFPGRGNQHSSFKWRWYHFDGTDWDQSRQLSNRIYKFRGKAWDWEVDTEFGNYDYLMYADLDMDHPEVINELNRWGVWYANTLNLDGFRLDAVKHIKFSFMRDWLGHVRGQTGKNLFAVAEYWKNDLGALENYLSKTNWTMSAFDVPLHYNLYQASNSSGNYDMRNLLNGTLVQRHPSHAVTFVDNHDTQPGEALESFVQGWFKPLAYATILTREQGYPQVFYGDYYGIPSDGVPSYRQQIDPLLWARQQYAYGTQHDYLDNQDVIGWTREGDSAHAGSGLATVMSDGPGGSKTMYVGTAHAGQVFKDITGNRTDTVTINSAGNGTFPCNKGSVSIWVKQ

SEQ ID NO: 34085 - protein, 482 aa, Bacillus sp.
HDGTNGTIMQYFEWNVPNDGQHWNRLHNNAQNLKNAGITAIWIPPAWKGTSQSDTGYGAYDLYDLGEFNQKGTVRTKYGTKAELERAIRSLKANGIQVYGDVVMNHKAGADFTERVQAVEVNPQNRNQEVSGTYQIEAWTGFNFPGRGNQHSSFKWRWYHFDGTDWDQSRQLSNRIYKFRGKAWDWEVDTEFGNYDYLMYADLDMDHPEVINELNRWGVWYANTLNLDGFRLDAVKHIKFSFMRDWLGHVRGQTGKNLFGVAEYWKNDLGALENYLSKTNWTMSAFDVPLHYNLYQASNSSGNYDMRNLLNGTLVQRHPSHAVTFVDNHDTQPGEALESFVQGWFKPLAYATILTREQGYPQVFYGDYYGIPSHGVPSYRQQIDPLLAARQQYAYGTQHDYLDNQDVIGWTREGDSAHAGSGLATVMSDGPGGSKTMYVGTAHAGQVFKDITGNRTDTVTINSAGNGTFPCNKGSVSIWVKQ

SEQ ID NO: 34086 - protein, 482 aa, Bacillus sp.
HDGTNGTIMQYFEWNVPNDGQHWNRLHNNAQNLKNAGITAIWIPPAWKGTSQSDTGYGAYDLYDLGEFNQKGTVRTKYGTKAELERAIRSLKANGIQVYGDVVMNHKAGADFTERVQAVEVNPQNRNQEVSGTYQIEAWTGFNFPGRGNQHSSFKWRWYHFDGTDWDQSRQLSNRIYKFRTKAWDWEVDTEFGNYDYLMYADLDMDHPEVINELNRWGVWYANTLNLDGFRLDAVKHIKFSFMRDWLGHVRAQTGKNLFAVAEYWKNDLGALENYLSKTNWTMSAFDVPLHYNLYQASNSSGNYDMRNLLNGTLVQRHPSHAVTFVDNHDTQPGEALESFVQGWFKPLAYATILTREQGYPQVFYGDYYGIPSHGVPSYRQQIDPLLAARQQYAYGTQHDYLDNQDVIGWTREGDSAHAGSGLATVMSDGPGGSKTMYVGTAHAGQVFKDITGNRTDTVTINSAGNGTFPCNKGSVSIWVKQ

SEQ ID NO: 34087 - protein, 482 aa, Bacillus sp.
HDGTNGTIMQYFEWNVPNDGQHWNRLHNNAQNLKNAGITAIWIPPAWKGTSQSDTGYGAYDLYDLGEFNQKGTVRTKYGTKAELERAIRSLKANGIQVYGDVVMNHKAGADFTERVQAVEVNPQNRNQEVSGTYQIEAWTGFNFPGRGNQHSSFKWRWYHFDGTDWDQSRQLSNRIYKFRGKAWDWEVDTEFGNYDYLMYADLDMDHPEVINELNRWGVWYANTLNLDGFRLDAVKHIKFSFMRDWLGHVRGQTGKNLFAVAEYWKNDLGALENYLSKTNWTMSAFDVPLHYNLYQASNSSGNYDMRNLLNGTLVQRHPSHAVTVVDNHDTQPGEALESFVQGWFKPLAYATILTREQGYPQVFYGDYYGIPSHGVPSYRQQIDPLLAARQQYAYGTQHDYLDNQDVIGWTREGDSAHAGSGLATVMSDGPGGSKTMYVGTAHAGQVFKDITGNRTDTVTINSAGNGTFPCNKGSVSIWVKQ

SEQ ID NO: 34088 - protein, 482 aa, Bacillus sp.
HDGTNGTIMQYFEWNVPNDGQHWNRLHNNAQNLKNAGITAIWIPPAWKGTSQSDTGYGAYDLYDLGEFNQKGTVRTKYGTKAELERAIRSLKANGIQVYGDVVMNHKAGADQTEHVQAVEVNPQNRNQEVSGTYQIEAWTGFNFPGRGNQHSSFKWRWYHFDGTDWDQSRGVSNRIYKFRGKAWDWEVDTEFGNYDYLMYADLDMDHPEVINELNRWGVWYANTLNLDGFRLDAVKHIKFSFMRDWLGHVRGQTGKNLFAVAEYWKNDLGALENYLSKTNWTMSAFDVPLHYNLYQASNSSGNYDMRNLLNGTLVQRHPSHAVTFVDNHDTQPGEALESFVQGWFKPLAYATILTREQGYPQVFYGDYYGIPSDGVPSYRQQIDPLLAARQQYAYGTQHDYLDNQDVIGWTREGDSAHAGSGLATVMSDGPGGSKTMYVGQAHAGQVFKDITGNRTDTVTINSAGNGTFRCNKGSVSIWVKQ

SEQ ID NO: 34089 - protein, 482 aa, Bacillus sp.
HDGTNGTIMQYFEWNVPNDGQHWNRLHNNAQNLKNAGITAIWIPPAWKGTSQSDTGYGAYDLYDLGEFNQKGTVRTKYGTKAELERAIRSLKANGIQVYGDVVMNHKAGADFTERVQAVEVNPQNRNQEVSGTYQIEAWTGFNFPGRGNQHSSFKWRWYHFDGTDWDQSREFPNRIYKFRGKAWDWEVDTEFGNYDYLMYADLDMDHPEVINELNRWGVWYANTLNLDGFRLDAVKHIKFSFMRDWLGHVRGQTGKNLFAVAEYWKNDLGALENYLSKTNWTMSAFDVPLHYNLYQASNSSGNYDMRNLLNGTLVQRHPSHAVTFVDNHDTQPGEALESFVQGWFKPLAYATILTREQGYPQVFYGDYYGIPSDGVPSYRQQIDPLLAARQQYAYGTQHDYLDNQDVIGWTREGDSAHAGSGLATVMSDGPGGSKTMYVGTAHAGQVFKDITGNRTDTVTINSAGNGTFPCNKGSVSIWVKQ

SEQ ID NO: 34090 - protein, 482 aa, Bacillus sp.
HDGTNGTIMQYFEWNVPNDGQHWNRLHNNAQNLKNAGITAIWIPPAWKGTSQRDTGYGAYDLYDLGEFNQKGTVRTKYGTKAELERAIRSLKANGIQVYGDVVMNHKAGADFTERVQAVEVNPQNRNQEVSGTYQIEAWTGFNFPGRGNQHSSFKWRWYHFDGTDWDQSRQLSNRIYKFRGKAWDWEVDTEFGNYDYLMYADLDMDHPEVINELNRWGVWYANTLNLDGFRLDAVKHIKFSFMRDWLGHVRGQTGKNLFAVAEYWKNDLGALENYLSKTNWTMSAFDVPLHYNLYQASNSSGNYDMRNLLNGTLVQRHPSHAVTFVDNHDTQPGEALESFVQGWFKPLAYATILTREQGYPQVFYGDYYGIPSDGVPSYRQQIDPLLAARQQYAYGTQHDYLDNQDVIGWTREGDSAHAGSGLATVMSDGPGGSKTMYVGTAHAGQVFKDITGNRTDTVTINSAGNGTFPCNKGSVSIWVKQ

SEQ ID NO: 34091 - protein, 482 aa, Bacillus sp.
HDGTNGTIMQYFEWNVPNDGQHWNRLHNNAQNLKNAGITAIWIPPAWKGTSQSDTGYGAYDLYDLGEFNQKGTVRTKYGTKAELERAIRSLKANGIQVYGDVVMNHKAGADFTERVQAVEVNPQNRNQEVSGTYQIEAWTGFNFPGRGNQHSSFKWRWYHFDGTDWDQSRQLSNRIYKFRGKAWDWEVDTEFGNYDYLMYADLDMDHPEVINELNRWGVWYANTLNLDGFRLDAVKHIKFSFMRDWLGHVRGQTGKNLFAVAEYWKNDLGALENYLSKTNWTMSAFDVPLHYNLYQASNSSGNYDMRNLLNGTLVQRHPSHAVTFVDNHDTQPGEALESFVQGWFKPLAYATILTREQGYPQVFYGDYYGIPSDGVPSYRQQIDPLLAARQQYAYGTQHDYLDNQDVIGWTREGDSAHAGSGLATVMSDGPGGSKTMYVGTAHAGQVFKDITGNRTDTVTINSAGNGTFACNKGSVSIWVKQ

SEQ ID NO: 34092 - protein, 482 aa, Bacillus sp.
HDGTNGTIMQYFEWNVPNDGQHWNRLHNNAQNLKNVGITAIWIPPAWKGTSQSDTGYGAYDLYDLGEFNQKGTVRTKYGTKAELERAIRSLKANGIQVYGDVVMNHKAGADFTEQVQAVEVNPQNRNQEVSGTYQIEAWTGFNFPGRGNQHSSFKWRWYHFDGGDWDQSRQLSNRIYKFRGKAWDWEVDTEFGNYDYLMYADLDMDHPEVINELNRWGVWYANTLNLDGFRLDAVKHIKFSFMRDWLGHVRGQTGKNLFAVAEYWKNDLGALENYLSKTNWTMSAFDVPLHYNLYQASNSSGNYDMRNLLNGTLVQRHPSHAVTFVDNHDTQPGEALESFVQGWFKPLAYATILTREQGYPQVFYGDYYGIPSDGVPSYRQQIDPLLAARQQYAYGTQHDYLDNQDVIGWTREGDSAHAGSGLATVMSDGPGGSKTMYVGTAHAGQVFKDITGNRTDTVTINSAGNGTFPCNKGSVSIWVKQ

SEQ ID NO: 34093 - protein, 482 aa, Bacillus sp.
HDGTNGTIMQYFEWNVPNDGQHWNRLHNNAQNLKNAGITAIWIPPAWKGTSQSDTGYGAYDLYDLGEFNQKGTVRTKYGTKAELERAIRSLKANGIQVYGDVVMNHKAGADFTERVQAVEVNPQNRNQEVSGTYQIEAWTGFNFPGRGNQHSSFKWRWYHFDGTDWDQSRQLSNRIYKFRGKAWDWEVDTEFGNYDYLMYADLDMDHPEVINELNRWGVWYANTLNLDGFRLDAVKHIKFSFMRDWLGHVRGQTGKNLFAVAEYWKNDLGALENYLSKTNWTMSAFDVPLHYNLYQASNSSGNYDMRNLLNGTLVQRHPSHAVTFVDNHDTQPGEALESFVQGWFKPLAYATILTREQGYPQVFYGDYYGIPSDGVPSYRQQIDPLLAARQQYAYGTQHDYLDNQDVIGWTREGDSAHAGSGLATVMSDGPGGSKTMYVGYAHAGQVFKDITGNRTDTVTINSAGNGTFPCNKGSVSIWVKQ

SEQ ID NO: 34094 - protein, 482 aa, Bacillus sp.
HDGTNGTIMQYFEWNVPNDGQHWNRLHNNAQNLKNAGITAIWIPPAWKGTSQSDTGYGAYDLYDLGEFNQKGTVRTKYGTKAELERAIRSLKANGIQVYGDVVMNHKAGADQTEQVQAVEVNPQNRNQEVSGTYQIEAWTGFNFPGRGNQHSSFKWRWYHFDGTDWDQSRGLSNRIYKFRGKAWDWEVDTEFGNYDYLMYADLDMDHPEVINELNRWGVWYANTLNLDGFRLDAVKHIKFSFMRDWLGHVRGQTGKNLFAVAEYWKNDLGALENYLSKTNWTMSAFDVPLHYNLYQASNSSGNYDMRNLLNGTLVQRHPSHAVTFVDNHDTQPGEALESFVQGWFKPLAYATILTREQGYPQVFYGDYYGIPSDGVPSYRQQIDPLLAARQQYAYGTQHDYLDNQDVIGWTREGDSAHAGSGLATVMSDGPGGSKTMYVGQAHAGQVFKDITGNRTDTVTINSAGNGTFPCNKGSVSIWVKQ

SEQ ID NO: 34095 - protein, 484 aa, Synthetic construct
HDGTNGTIMQYFEWNVPNDGQHWNRLHNNAQNLKNAGITAIWIPPAWKGTSQSDTGYGAYDLYDLGEFNQKGTVRTKYGTKAELERAIRSLKANGIQVYGDVVMNHKAGADFTERVQAVEVNPQNRNQEVSGTYQIEAWTGFNFPGRGNQHSSFKWRWYHFDGTDWDQSRQLSNRIYKFRGDGKAWDWEVDTEFGNYDYLMYADLDMDHPEVINELNRWGVWYANTLNLDGFRLDAVKHIKFSFMRDWLGHVRGQTGKNLFAVAEYWKNDLGALENYLSKTNWTMSAFDVPLHYNLYQASNSSGNYDMRNLLNGTLVQRHPSHAVTFVDNHDTQPGEALESFVQGWFKPLAYATILTREQGYPQVFYGDYYGIPSDGVPSYRQQIDPLLAARQQYAYGTQHDYLDNQDVIGWTREGDSAHAGSGLATVMSDGPGGSKTMYVGTAHAGQVFKDITGNRTDTVTINSAGNGTFPCNKGSVSIWVKQ

SEQ ID NO: 34096 - protein, 483 aa, Bacillus sp.
HDGTNGTIMQYFEWNVPNDGQHWNRLHNNAQNLKNAGITAIWIPPAWKGTSQSDTGYGAYDLYDLGEFNQRGTVRTKYGTKAELERAIRSLKANGIQVYGDVVMNHKAGADFTEHVQAVEVNPQNRNQEVSGEYQIEAWTGFNFPGRGNQHSSFKWRWYHFDGTDFDQSRGVSNRIYKFRDGKAWDWEVDTENGNYDYLMYADVDMDHPEVINELNRWGVWYANTLNLDGFRLDAVKHIKFSFMRDWLGHVRGQTGKNLFAVAEYWKNDLGALENYLSKTNWTMSAFDVPLHYNLYQASNSSGNYDMRNLLNGTLVQRHPSHAVTFVDNHDTQPGEALESFVQGWFKPLAYATILTREQGYPQVFYGDYYGIPSDGVPSYRQQIDPLLKARQQYAYGTQHDYLDNQDVIGWTREGDSAHAGSGLATVMSDGPGGSKTMYVGTAHAGQVFKDITGNRTDTVTINSAGNGTFPCNGGSVSIWVKQ

SEQ ID NO: 34097 - protein, 481 aa, Bacillus sp.
HDGTNGTIMQYFEWNVPNDGQHWNRLHNNAQNLKNAGITAIWIPPAWKGTSQSDTGYGAYDLYDLGEFNQKGTVRTKYGTKAELERAIRSLKANGIQVYGDVVMNHKAGADFTERVQAVEVNPQNRNQEVSGTYQIEAWTGFNFPGRGNQHSSFKWRWYHFDGTDWDESRKLNRIYKFRGKAWDWEVDTEFGNYDYLMYADLDMDHPEVINELNRWGVWYANTLNLDGFRLDAVKHIKFSFMRDWLGHVRGQTGKNLFAVAEYWKNDLGALENYLSKTNWTMSVFDVPLHYNLYQASNSSGNYDMRNLLNGTLVQRHPSHAVTFVDNHDTQPGEALESFVQGWFKPLAYATILTREQGYPQVFYGDYYGIPSDGVPSYRQQIDPLLAARQQYAYGTQHDYLDNQDVIGWTREGDSAHAGSGLATVMSDGPGGSKTMYVGTAHAGQVFKDITGNRTDTVTINSAGNGTFPCNKGSVSIWVKQ

SEQ ID NO: 34098 - protein, 481 aa, Bacillus sp.
HDGTNGTIMQYFEWNVPNDGQHWNRLHNNAQNLKNAGITAIWIPPAWKGTSQSDTGYGAYDLYDLGEFNQKGTVRTKYGTKAELERAIRSLKANGIQVYGDVVMNHKGGADFTERVQAVEVNPQNRNQEVSGTYQIEAWTGFNFPGRGNQHSSFKWRWYHFDGTDWDESRKLNRIYKFRGKAWDWEVDTEFGNYDYLMYADLDMDHPEVINELNRWGVWYANTLNLDGFRLDAVKHIKFSFMRDWLGHVRGQTGKNLFAVAEYWKNDLGALENYLSKTNWTMSAFDVPLHYNLYQASNSSGNYDMRNLLNGTLVQRHPSHAVTFVDNHDTQPGEALESFVQGWFKPLAYATILTREQGYPQVFYGDYYGIPSDGVPSYRQQIDPLLAARQQYAYGTQHDYLDNQDVIGWTREGDSAHAGSGLATVMSDGPGGSKTMYVGTAHAGQVFKDITGNRTDTVTINSAGNGTFPCNKGSVSIWVKQ

SEQ ID NO: 34099 - protein, 481 aa, Bacillus sp.
HDGTNGTIMQYFEWNVPNDGQHWNRLHNNAQNLKNAGITAIWIPPAWKGTSQSDTGYGAYDLYDLGEFNQKGTVRTKYGTKAELERAIRSLKANGIQVYGDVVMNHKAGADFTERVQAVEVNPQNRNQEVSGTYQIEAWTGFNFPGRGNQHSSFKWRWYHFDGTDWDESRKLNRIYKFRGKAWDWEVDTEFGNYDYLMYADLDMDHPEVINELNRWGVWYANTLNLDGFRLDAVKHIKFSFMRDWLGHVRGQTGKNLFAVAEYWKNDLGALENYLSKTNWTMSAFDVPLHYNLYQASNSSGNYDMRNLLNGTLVQRHPSHAVTFVDNHDTQPGEALESFVQGWFKPLAYATILTREQGYPQVFYGDYYGIPSDGVPSYRQQIDPLLAARQQYAYGTQHDYLDNQDVIGWTREGDSAHAGSGLATVMSDGPGGSKTMYVGTAHAGQVFKDITGNRTDTVTINSAGNGTFPCNGGSVSIWVKQ

SEQ ID NO: 34100 - protein, 481 aa, Bacillus sp.
HDGTNGTIMQYFEWNVPNDGQHWNRLHNNAQNLKNAGITAIWIPPAWKGTSQSDTGYGAYDLYDLGEFNQKGTVRTKYGTKAELERAIRSLKANGIQVYGDVVMNHKAGADFTERVQAVEVNPQNRNQEVSGTYQIEAWTGFNFPGRGNQHSSFKWRWYHFDGTDWDQSRKLNRIYKFRGKAWDWEVDTEFGNYDYLMYADLDMDHPEVINELNRWGVWYANTLNLDGFRLDAVKHIKFSFMRDWLGHVRGQTGKNLFAVAEYWKNDLGALENYLSKTNWTMSAFDVPLHYNLYQASNSSGNYDMRNLLNGTLVQRHPSHAVTFVDNHDTQPGEALESFVQGWFKPLAYATILTREQGYPQVFYGDYYGIPSDGVPSYRQQIDPLLAARQQYAYGTQHDYLDNQDVIGWTREGDSAHAGSGLATVMSDGPGGSKTMYVGTAHAGQVFKDITGNRTDTVTINSAGNGTFPCNKGSVSIWVKQ

SEQ ID NO: 34101 - protein, 481 aa, Bacillus sp.
HDGTNGTIMQYFEWNVPNDGQHWNRLHNNAQNLKNAGITAIWIPPAWKGTSQNDTGYGAYDLYDLGEFNQKGTVRTKYGTKAELERAIRSLKANGIQVYGDVVMNHKAGADFTERVQAVEVNPQNRNQEVSGTYQIEAWTGFNFPGRGNQHSSFKWRWYHFDGTDWDESRKLNRIYKFRGKAWDWEVDTEFGNYDYLMYADLDMDHPEVINELNRWGVWYANTLNLDGFRLDAVKHIKFSFMRDWLGHVRGQTGKNLFAVAEYWKNDLGALENYLSKTNWTMSAFDVPLHYNLYQASNSSGNYDMRNLLNGTLVQRHPSHAVTFVDNHDTQPGEALESFVQGWFKPLAYATILTREQGYPQVFYGDYYGIPSDGVPSYRQQIDPLLAARQQYAYGTQHDYLDNQDVIGWTREGDSAHAGSGLATVMSDGPGGSKTMYVGTAHAGQVFKDITGNRTDTVTINSAGNGTFPCNKGSVSIWVKQ

SEQ ID NO: 34102 - protein, 481 aa, Bacillus sp.
HDGTNGTIMQYFEWNVPNDGQHWNRLHNNAQNLKNAGITAIWIPPAWKGTSQSDVGYGAYDLYDLGEFNQKGTVRTKYGTKAELERAIRSLKANGIQVYGDVVMNHKAGADFTERVQAVEVNPQNRNQEVSGTYQIEAWTGFNFPGRGNQHSSFKWRWYHFDGTDWDESRKLNRIYKFRGKAWDWEVDTEFGNYDYLMYADLDMDHPEVINELNRWGVWYANTLNLDGFRLDAVKHIKFSFMRDWLGHVRGQTGKNLFAVAEYWKNDLGALENYLSKTNWTMSAFDVPLHYNLYQASNSSGNYDMRNLLNGTLVQRHPSHAVTFVDNHDTQPGEALESFVQGWFKPLAYATILTREQGYPQVFYGDYYGIPSDGVPSYRQQIDPLLAARQQYAYGTQHDYLDNQDVIGWTREGDSAHAGSGLATVMSDGPGGSKTMYVGTAHAGQVFKDITGNRTDTVTINSAGNGTFPCNKGSVSIWVKQ

SEQ ID NO: 34103 - protein, 479 aa, Synthetic construct
LNGTMMQYFEWYLPNDGNHWNRLNSDASYLAEHGITAVWIPPAWKGASQNDVGYGAYDLYDLGEFNQKGTVRTKYGTRSQLQAAVTSLKNRGIQVYGDVVMNHKAGADATEMVRAVEVNPNNRNQEVTGEYTIEAWTRFDFPGRGNTHSSFKWRWYHFDGVDWDQSRRLNNRIYKFRGKAWDWPVDTENGNYDYLMYADIDMDHPEVVNELRNWGVWYTNTLGLDGFRIDAVKHIKYSFTRDWINHVRSATGKNMFAVAEFWKNDLGAIENYLNKTNFNHSVFDVPLHYQFYNASKSGGNYDMRKLLNGTVVSKHPSKAVTFVDNHDTQPEEALESFVEEWFKPLAYAFILTRESGYPSVFYGDMYGIPTHGVPAMKHKIEPILKARKQYAYGAQHDYLDHPDVIGWTREGDSSHPKSGLATLITDGPGGSKRMYAGLKNAGETWYDITGNRSDTVKIGSDGWGEFHVNDGSVSIYVQK

SEQ ID NO: 34104 - protein, 483 aa, Cytophaga sp.
HHDGTNGTIMQYFEWNVPNDGQHWNRLHNNAQNLKNAGITAIWIPPAWKGTSQNDVGYGAYDLYDLGEFNQKGTVRTKYGTKAELERAIRSLKANGIQVYGDVVMNHKGGADFTERVQAVEVNPQNRNQEVSGTYQIEAWTGFNFPGRGNQHSSFKWRWYHFDGTDWDQSRQLANRIYKFRGKAWDWEVDTENGNYDYLMYADVDMDHPEVINELNRWGVWYANTLNLDGFRLDAVKHIKFSFMRDWLGHVRGQTGKNLFAVAEYWKNDLGALENYLSKTNWTMSAFDVPLHYNLYQASNSSGNYDMRNLLNGTLVQRHPSHAVTFVDNHDTQPGEALESFVQGWFKPLAYATILTREQGYPQVFYGDYYGIPSDGVPSYRQQIDPLLKARQQYAYGTQRDYIDNPDVIGWTREGDSTKAKSGLATVITDGPGGSKRMYVGTSNAGEIWYDLTGNRTDKITIGSDGYATFPVNGGSVSVWVQQ

SEQ ID NO: 34105 - protein, 485 aa, Bacillus sp.
HHDGTNGTIMQYFEWNVPNDGQHWNRLHNNAQNLKNAGITAIWIPPAWKGTSQNDVGYGAYDLYDLGEFNQKGTVRTKYGTKAELERAIRSLKANGIQVYGDVVMNHKGGADFTERVQAVEVNPQNRNQEVSGTYEIEAWTGFNFPGRGNQHSSFKWRWYHFDGTDWDQSRQLSNRIYKFRGDGKAWDWEVDTENGNYDYLMYADVDMNHPEVINELNRWGVWYANTLNLDGFRLDAVKHIQFSFMRNWLGHVRGQTGKNLFAVAEYWKNDLGALENYLSKTNWTMSAFDVPLHYNLYQASNSGGNYDMRNLLNGTLVQRHPSHAVTFVDNHDTQPGEALESFVQGWFKPLAYATILTREQGYPQVFYGDYYGIPSDGVPSYRQQIDPLLKARQKYAYGPQHDYLDHPDVIGWTREGDSSHPKSGLATLITDGPGGSKRMYAGLKNAGETWYDITGNRSDTVKIGSDGWGEFHVNDGSVSIYVQK

SEQ ID NO: 34106 - protein, 483 aa, Bacillus sp.
HHDGTNGTIMQYFEWNVPNDGQHWNRLHNNAQNLKNAGITAIWIPPAWKGTSQNDVGYGAYDLYDLGEFNQKGTVRTKYGTKAELERAIRSLKANGIQVYGDVVMNHKGGADFTERVQAVEVNPQNRNQEVSGTYEIEAWTGFNFPGRGNQHSSFKWRWYHFDGTDWDQSRQLSNRIYKFRGKAWDWEVDTENGNYDYLMYADVDMNHPEVINELNRWGVWYANTLNLDGFRLDAVKHIQFSFMRNWLGHVRGQTGKNLFAVAEYWKNDLGALENYLSKTNWTMSAFDVPLHYNLYQASNSGGNYDMRNLLNGTLVQRHPSHAVTFVDNHDTQPGEALESFVQGWFKPLAYATILTREQGYPQVFYGDYYGIPSDGVPSYRQQIDPLLKARQKYAYGPQHDYLDHPDVIGWTREGDSSHPKSGLATLITDGPGGSKRMYAGLKNAGETWYDITGNRSDTVKIGSDGWGEFHVNDGSVSIYVQK

SEQ ID NO: 34107 - protein, 485 aa, Bacillus sp.
HHDGTNGTIMQYFEWNVPNDGQHWNRLHNNAQNLKNAGITAIWIPPAWKGTSQNDVGYGAYDLYDLGEFNQKGTVRTKYGTKAELERAIRSLKANGIQVYGDVVMNHKGGADFTERVQAVEVNPQNRNQEVSGTYEIEAWTGFNFPGRGNQHSSFKWRWYHFDGTDWDQSRQLSNRIYKFRGDGKAWDWEVDTENGNYDYLMYADVDMNHPEVINELNRWGVWYANTLNLDGFRLDAVKHIQFSFMRNWLGHVRGQTGKNLFAVAEYWKNDLGALENYLSKTNWTMSAFDVPLHYNLYQASNSGGNYDMRNLLNGTLVQRHPSHAVTFVDNHDTQPGEALESFVQGWFKPLAYATILTREQGYPQVFYGDYYGIPSDGVPSYRQQIDPLLKARQKYAYGPQHDYLDHPDVIGWTREGDSSHPKSGLATLITDGPGGSKNMYAGLKNAGETWYDITGNRSDTVKIGSDGWGEFHVNKGSVSIYVQK

SEQ ID NO: 34108 - protein, 485 aa, Bacillus sp.
HHDGTNGTIMQYFEWNVPNDGQHWNRLHNNAQNLKNAGITAIWIPPAWKGTSQNDVGYGAYDLYDLGEFNQKGTVRTKYGTKAELERAIRSLKANGIQVYGDVVMNHKGGADFTERVQAVEVNPQNRNQEVSGTYEIEAWTGFNFPGRGNQHSSFKWRWYHFDGTDWDQSRQLSNRIYKFRGDGKAWDWEVDTENGNYDYLMYADVDMNHPEVINELNRWGVWYANTLNLDGFRLDAVKHIQFSFMRNWLGHVRGQTGKPLFAVAEYWKNDLGALENYLSKTNWTMSAFDVPLHYNLYQASNSGGNYDMRNLLNGTLVQRHPSHAVTFVDNHDTQPGEALESFVQGWFKPLAYATILTREQGYPQVFYGDYYGIPSDGVPSYRQQIDPLLKARQKYAYGPQHDYLDHPDVIGWTREGDSSHPKSGLATLITDGPGGSKKMYAGLKNAGETWYDITGNRSDTVKIGSDGWGEFHVNDGSVSIYVQK

SEQ ID NO: 34109 - protein, 485 aa, Bacillus sp.
HHDGTNGTIMQYFEWNVPNDGQHWNRLHNNAQNLKNAGITAIWIPPAWKGTSQNDVGYGAYDLYDLGEFNQKGTVRTKYGTKAELERAIRSLKANGIQVYGDVVMNHKGGADFTERVQAVEVNPQNRNQEVSGTYEIEAWTGFNFPGRGNQHSSFKWRWYHFDGTDWDQSRQLSNRIYKFRGDGKAWDWEVDTENGNYDYLMYADVDMNHPEVINELNRWGVWYANTLNLDGFRLDAVKHIQFSFMRNWLGHVRGQTGKPLFAVAEYWKNDLGALENYLSKTNWTMSAFDVPLHYNLYQASNSGGNYDMRNLLNGTLVQRHPSHAVTFVDNHDTQPGEALESFVQGWFKPLAYATILTREQGYPQVFYGDYYGIPSDGVPSYRQQIDPLLKARQKYAYGPQHDYLDHPDVIGWTREGDSSHPKSGLATLITDGPGGSKRMYAGLKNAGETWYDITGNRSDTVKIGSDGWGEFHVNKGSVSIYVQK

SEQ ID NO: 34110 - protein, 482 aa, Bacillus sp.
HDGTNGTIMQYFEWNVPNDGQHWNRLHNNAQNLKNAGITAIWIPPAWKGTSQSDTGYGAYDLYDLGEFNQKGTVRTKYGTKAELERAIRSLKANGIQVYGDVVMNHKAGADQTEHVQAVEVNPQNRNQEVSGTYQIEAWTGFNFPGRGNQHSSFKWRWYHFDGTDWDQSRMLSNRIYKFRGKAWDWEVDTEFGNYDYLMYADLDMDHPEVINELNRWGVWYANTLNLDGFRLDAVKHIKFSFMRDWLGHVRGQTGKNLFAVAEYWKNDLGALENYLSKTNWTMSAFDVPLHYNLYQASNSSGNYDMRNLLNGTLVQRHPSHAVTFVDNHDTQPGEALESFVQGWFKPLAYATILTREQGYPQVFYGDYYGIPSDGVPSYRQQIDPLLAARQQYAYGTQHDYLDNQDVIGWTREGDSAHAGSGLATVMSDGPGGSKTMYVGTAHAGQVFKDITGNRTDTVTINSAGNGTFPCNKGSVSIWVKQ

SEQ ID NO: 34111 - protein, 482 aa, Bacillus sp.
HDGTNGTIMQYFEWNVPNDGQHWNRLHNNAQNLKNAGITAIWIPPAWKGTSQSDTGYGAYDLYDLGEFNQKGTVRTKYGTKAELERAIRSLKANGIQVYGDVVMNHKAGADFTERVQAVEVNPQNRNQEVSGTYQIEAWTGFNFPGRGNQHSSFKWRWYHFDGTDFDQSRQLSNRIYKFRGKAWDWEVDTEFGNYDYLMYADLDMDHPEVINELNRWGVWYANTLNLDGFRLDAVKHIKFSFMRDWLGHVRGQTGKNLFAVAEYWKNDLGALENYLSKTNWTMSAFDVPLHYNLYQASNSSGNYDMRNLLNGTLVQRHPSHAVTFVDNHDTQPGEALESFVQGWFKPLAYATILTREQGYPQVFYGDYYGIPSDGVPSYRQQIDPLLAARQQYAYGTQHDYLDNQDVIGWTREGDSAHAGSGLATVMSDGPGGSKTMYVGTAHAGQVFKDITGNRTDTVTINSAGNGTFPCNKGSVSIWVKQ

SEQ ID NO: 34112 - protein, 482 aa, Bacillus sp.
HDGTNGTIMQYFEWNVPNDGQHWNRLHNNAQNLKNVGITAIWIPPAWKGTSQSDTGYGVYDLYDLGEFNQKGTVRTKYGTKAELERAIRSLKANGIQVYGDVVMNHKAGADFTEQVQAVEVNPQNRNQEVSGTYQIEAWTGFNFPGRGNQHSSFKWRWYHFDGGDWDQSRQLSNRIYKFRGKAWDWEVDTEFGNYDYLMYADLDMDHPEVINELNRWGVWYANTLNLDGFRLDAVKHIKFSFMRDWLGHVRGQTGKNLFAVAEYWKNDLGALENYLSKTNWTMSAFDVPLHYNLYQASNSSGNYDMRNLLNGTLVQRHPSHAVTFVDNHDTQPGEALESFVQGWFKPLAYATILTREQGYPQVFYGDYYGIPSDGVPSYRQQIDPLLAARQQYAYGTQHDYLDNQDVIGWTREGDSAHAGSGLATVMSDGPGGSKTMYVGTAHAGQVFKDITGNRTDTVTINSAGNGTFPCNKGSVSIWVKQ

SEQ ID NO: 34113 - protein, 482 aa, Synthetic construct
HDGTNGTIMQYFEWNVPNDGQHWNRLHNNAQNLKNAGITAIWIPPAWKGTSQSDTGYGAYDLYDLGEFNQKGTVRTKYGTKAELERAIRSLKANGIQVYGDVVMNHKAGADFTEQVQALEVNPQNRNQEVSGTYQIEAWTGFNFPGRGNQHSSFKWRWYHFDGTDWDQSRGVSNRIYKFRTKAWDWEVDTEFGNYDYLMYADLDMDHPEVINELNRWGVWYANTLNLDGFRLDAVKHIKFSFMRDWLGHVRGQTGKNLFAVAEYWKNDLGALENYLSKTNWTMSAFDVPLHYNLYQASNSSGNYDMRNLLNGTLVQRHPSHAVTFVDNHDTQPGEALESFVQGWFKPLAYATILTREQGYPQVFYGDYYGIPSDGVPSYRQQIDPLLKARQQYAYGTQHDYLDNQDVIGWTREGDSAHPGSGLATVMSDGPGGSKTMYVGTAHAGQVFKDITGNRTDTVTINSAGNGTFPCNGGSVSIWVKQ

SEQ ID NO: 34114 - protein, 482 aa, Bacillus sp.
HDGTNGTIMQYFEWNVPNDGQHWNRLHNNAQNLKNAGITAIWIPPAWKGTSQSDTGYGAYDLYDLGEFNQSGTVRTKYGTKAELERAIRSLKANGIQVYGDVVMNHKAGADFTERVQAVEVNPQNRNQEVSGTYQIEAWTGFNFPGRGNQHSSFKWRWYHFDGTDWDQSRQLNNRIYKFRGKAWDWEVDTEFGNYDYLMYADLDMDHPEVINELNRWGVWYANTLNLDGFRLDAVKHIKFSFMRDWLGHVRGQTGKNLFAVAEYWKNDLGALENYLSKTNWTMSAFDVPLHYNLYQASNSSGNYDMRNLLNGTLVQRHPSHAVTFVDNHDTQPGEALESFVQGWFKPLAYATILTREQGYPQVFYGDYYGIPSDGVPSYRQQIDPLLAARQQYAYGTQHDYLDNQDVIGWTREGDSAHAGSGLATVMSDGPGGSKTMYVGTAHAGQVFKDITGNRTDTVTINSAGNGTFPCNKGSVSIWVKQ

SEQ ID NO: 34115 - protein, 482 aa, Bacillus sp.
HDGTNGTIMQYFEWNVPNDGQHWNRLHNNAQNLKNAGITAIWIPPAWKGTSQSDTGYGAYDLYDLGEFNQKGTVRTKYGTKAELERAIRSLKANGIQVYGDVVMNHKAGADFTERVQAVEVNPQNRNQEVSGTYQIEAWTGFNFPGRGNQHSSFKWRWYHFDGTDSDQSRQLSNRIYKFRGKAWDWEVDTEFGNYDYLMYADLDMDHPEVINELNRWGVWYANTLNLDGFRLDAVKHIKFSFMRDWLGHVRGQTGKNLFAVAEYWKNDLGALENYLSKTNWTMSAFDVPLHYNLYQASNSSGNYDMRNLLNGTLVQRHPSHAVTFVDNHDTQPGEALESFVQGWFKPLAYATILTREQGYPQVFYGDYYGIPSDGVPSYRQQIDPLLAARQQYAYGTQHDYLDNQDVIGWTREGDSAHAGSGLATVMSDGPGGSKTMYVGTAHAGQVFKDITGNRTDTVTINSAGNGTFPCNKGSVSIWVKQ

SEQ ID NO: 34116 - protein, 482 aa, Bacillus sp.
HDGTNGTIMQYFEWNVPNDGQHWNRLHNNAQNLKNAGIGAIWIPPAWKGTSQSDTGYGAYDLYDLGEFNQKGTVRTKYGTKAELERAIRSLKANGIQVYGDVVMNHKAGADFTERVQAVEVNPQNRNQEVSGTYQIEAWTGFNFPGRGNQHSSFKWRWYHFDGTDWDQSRQLSNRIYKFRGKAWDWEVDTEFGNYDYLMYADLDMDHPEVINELNRWGVWYANTLNLDGFRLDAVKHIKFSFMRDWLGHVRGQTGKNLFAVAEYWKNDLGALENYLSKTNWTMSAFDVPLHYNLYQASNSSGNYDMRNLLNGTLVQRHPSHAVTFVDNHDTQPGEALESFVQGWFKPLAYATILTREQGYPQVFYGDYYGIPSDGVPSYRQQIDPLLAARQQYAYGTQHDYLDNQDVIGWTREGDSAHAGSGLATVMSDGPGGSKTMYVGTAHAGQVFKDITGNRTDTVTINSAGNGTFPCNKGSVSIWVKQ

SEQ ID NO: 34117 - protein, 482 aa, Bacillus sp.
HDGTNGTIMQYFEWNVPNDGQHWNRLHNNAQNLKNAGITAIWIPPAWKGTSQSDTGYGAYDLYDLGEFNQKGTVRTKYGTKAELERAIRSLKANGIQVYGDVVMNHKAGADFTERVQAVEVNPQNRNQEVSGTYQIEAWTGFNFPGRGNQHSSFKWRWYHFDGTDWDESRQLSNRIYKFRGKAWDWEVDTEFGNYDYLMYADLDMDHPEVINELNRWGVWYANTLNLDGFRLDAVKHIKFSFMRDWLGHVRGQTGKNLFAVAEYWKNDLGALENYLSKTNWTMSAFDVPLHYNLYQASNSSGNYDMRNLLNGTLVQRHPSHAVTFVDNHDTQPGEALESFVQGWFKPLAYATILTREQGYPQVFYGDYYGIPSDGVPSYRQQIDPLLAARQQYAYGTQHDYLDNQDVIGWTREGDSAHAGSGLATVMSDGPGGSKTMYVGTAHAGQVFKDITGNRTDTVTINSAGNGTFPCNKGSVSIWVKQ

SEQ ID NO: 34118 - protein, 482 aa, Bacillus sp.
HDGTNGTIMQYFEWNVPNDGQHWNRLHNNAQNLKNAGITAIWIPPAWKGTSQSDTGYGAYDLYDLGEFNQRGTVRTKYGTKAELERAIRSLKANGIQVYGDVVMNHKAGADFTERVQAVEVNPQNRNQEVSGTYQIEAWTGFNFPGRGNQHSSFKWRWYHFDGTDWDQSRQLSNRIYKFRGKAWDWEVDTEFGNYDYLMYADLDMDHPEVINELNRWGVWYANTLNLDGFRLDAVKHIKFSFMRDWLGHVRGQTGKNLFAVAEYWKNDLGALENYLSKTNWTMSAFDVPLHYNLYQASNSSGNYDMRNLLNGTLVQRHPSHAVTFVDNHDTQPGEALESFVQGWFKPLAYATILTREQGYPQVFYGDYYGIPSDGVPSYRQQIDPLLAARQQYAYGTQHDYLDNQDVIGWTREGDSAHAGSGLATVMSDGPGGSKTMYVGTAHAGQVFKDITGNRTDTVTINSAGNGTFPCNKGSVSIWVKQ

SEQ ID NO: 34119 - protein, 482 aa, Bacillus sp.
HDGTNGTIMQYFEWNVPNDGQHWNRLHNNAQNLKNAGITAIWIPPAWKGTSQSDTGYGAYDLYDLGEFNQKGTVRTKYGTKAELERAIRSLKANGIQVYGDVVMNHKAGADFTERVQAVEVNPQNRNQEVSGTYQIEAWTGFNFPGRGNQHSSFKWRWYHFDGTDWDQSREARNRIYKFRGKAWDWEVDTEFGNYDYLMYADLDMDHPEVINELNRWGVWYANTLNLDGFRLDAVKHIKFSFMRDWLGHVRGQTGKNLFAVAEYWKNDLGALENYLSKTNWTMSAFDVPLHYNLYQASNSSGNYDMRNLLNGTLVQRHPSHAVTFVDNHDTQPGEALESFVQGWFKPLAYATILTREQGYPQVFYGDYYGIPSDGVPSYRQQIDPLLAARQQYAYGTQHDYLDNQDVIGWTREGDSAHAGSGLATVMSDGPGGSKTMYVGTAHAGQVFKDITGNRTDTVTINSAGNGTFPCNKGSVSIWVKQ

SEQ ID NO: 34120 - protein, 482 aa, Bacillus sp.
HDGTNGTIMQYFEWNVPNDGQHWNRLHNNAQNLKNAGITAIWIPPAWKGTSQSDTGYGAYDLYDLGEFNQKGTVRTKYGTKAELERAIRSLKANGIQVYGDVVMNHKAGADFTERVQAVEVNPQNRNQEVSGTYQIEAWTGFNFPGRGNQHSSFKWRWYHFDGTDWDQSRQLSNRIYKFRGKAWDWEVDTEFGNYDYLMYADLDMDHPEVINELNRWGVWYANTLNLDGFRLDAVKHIKFSFMRDWVGHVRGQTGKNLFAVAEYWKNDLGALENYLSKTNWTMSAFDVPLHYNLYQASNSSGNYDMRNLLNGTLVQRHPSHAVTFVDNHDTQPGEALESFVQGWFKPLAYATILTREQGYPQVFYGDYYGIPSDGVPSYRQQIDPLLAARQQYAYGTQHDYLDNQDVIGWTREGDSAHAGSGLATVMSDGPGGSKTMYVGTAHAGQVFKDITGNRTDTVTINSAGNGTFPCNKGSVSIWVKQ

SEQ ID NO: 34121 - protein, 482 aa, Bacillus sp.
HDGTNGTIMQYFEWNVPNDGQHWNRLHNNAQNLKNAGITAIWIPPAWKGTSQSDTGYGAYDLYDLGEFNQRGTVRTKYGTKAELERAIRSLKANGIQVYGDVVMNHKAGADFTERVQAVEVNPQNRNQEVSGEYQIEAWTGFNFPGRGNQHSSFKWRWYHFDGGDWDQSRQLSNRIYKFRGKAWDWEVDTEFGNYDYLMYADLDMDHPEVINELNRWGVWYANTLNLDGFRLDAVKHIKFSFMRDWLGHVRAQTGKNLFAVAEYWKNDLGALENYLSKTNWTMSAFDVPLHYNLYQASNSSGNYDMRNLLNGTLVQRHPSHAVTFVDNHDTQPGEALESFVQGWFKPLAYATILTREQGYPQVFYGDYYGIPSDGVPSYRQQIDPLLAARQQYAYGTQHDYLDNQDVIGWTREGDSAHAGSGLATVMSDGPGGSKTMYVGTAHAGQVFKDITGNRTDTVTINSAGNGTFPCNKGSVSIWVKQ

SEQ ID NO: 34122 - protein, 482 aa, Bacillus sp.
HDGTNGTIMQYFEWNVPNDGQHWNRLHNNAQNLKNAGITAIWIPPAWKGTSQSDTGYGAYDLYDLGEFNQKGTVRTKYGTKAELERAIRSLKANGIQVYGDVVMNHKAGADFTERVRAVEVNPQNRNQEVSGEYQIEAWTGFNFPGRGNQHSSFKWRWYHFDGTDWDQSRQLSNRIYKFRTKAWDWEVDTEFGNYDYLMYADLDMDHPEVINELNRWGVWYANTLNLDGFRLDAVKHIKFSFMRDWLGHVRAQTGKNLFAVAEYWKNDLGALENYLSKTNWTMSAFDVPLHYNLYQASNSSGNYDMRNLLNGTLVQRHPSHAVTFVDNHDTQPGEALESFVQGWFKPLAYATILTREQGYPQVFYGDYYGIPSDGVPSYRQQIDPLLAARQQYAYGTQHDYLDNQDVIGWTREGDSAHAGSGLATVMSDGPGGSKTMYVGTAHAGQVFKDITGNRTDTVTINSAGNGTFPCNKGSVSIWVKQ

SEQ ID NO: 34123 - protein, 482 aa, Bacillus sp.
HDGTNGTIMQYFEWNVPNDGQHWNRLHNNAQNLKNAGITAIWIPPAWKGTSQSDTGYGAYDLYDLGEFNQKGTVRTKYGTKAELERAIRSLKANGIQVYGDVVMNHKAGADFTERVQAVEVNPQNRNQEVSGTYQIEAWTGFNFPGRGNQHSSFKWRWYHFDGTDWDQSRQLSNRIYKFRGKAWDWEVDTEFGNYDYLMYADLDMDHPEVINELNRWGVWYANTLNLDGFRLDAVKHIKFSFMRDWLGHVRGQTGKNLFAVAEYWKNDLGALENYLSKTNWTMSAFDVPLHYNLYQASNSSGNYDMRNLLNGTLVQRHPSHAVTFVDNHDTQPGEALESFVQGWFKPLAYATILTREQGYPQVFYGDYYGIPSDGVPSYRQQIDPLLAARQQYAYGTQHDYLDNQDVIGWTREGDSAHAGSGLATVMSDGPGGSKTMYVGTAHAGQVFKDITGNRTDTVTINSAGNGTFPCNKGSVSIWVQQ

SEQ ID NO: 34124 - protein, 482 aa, Bacillus sp.
HDGTNGTIMQYFEWNVPNDGQHWNRLHNNAQNLKNAGITAIWIPPAWKGTSQSDTGYGAYDLYDLGEFNQKGTVRTKYGTKAELERAIRSLKANGIQVYGDVVMNHKAGADFTERVQAVEVNPQNRNQEVSGTYQIEAWTGFNFPGRGNQHSSFKWRWYHFDGTDWDQSRQLSNRIYKFRGKAWDWEVDTEFGNYDYLMYADLDMDHDEVINELNRWGVWYANTLNLDGFRLDAVKHIKFSFMRDWLGHVRGQTGKNLFAVAEYWKNDLGALENYLSKTNWTMSAFDVPLHYNLYQASNSSGNYDMRNLLNGTLVQRHPSHAVTFVDNHDTQPGEALESFVQGWFKPLAYATILTREQGYPQVFYGDYYGIPSDGVPSYRQQIDPLLAARQQYAYGTQHDYLDNQDVIGWTREGDSAHAGSGLATVMSDGPGGSKTMYVGTAHAGQVFKDITGNRTDTVTINSAGNGTFPCNKGSVSIWVKQ

SEQ ID NO: 34125 - protein, 482 aa, Bacillus sp.
HDGTNGTIMQYFEWNVPNDGQHWNRLHNNAQNLKNAGITAIWIPPAWKGTSQSDTGYGAYDLYDLGEFNQKGTVRTKYGTKAELERAIRSLKANGIQVYGDVVMNHKAGADFTERVQAVEVNPQNRNQEVSGTYQIEAWTGFNFPGRGNQHSSFKWRWYHFDGTDWDQSRQVSNRIYKFRGKAWDWEVDTEFGNYDYLMYTDLDMDHPEVINELNRWGVWYANTLNLDGFRLDAVKHIKFSFMRDWLGHVRGQTGKNLFAVAEYWKNDLGALENYLSKTNWTMSAFDVPLHYNLYQASNSSGNYDMRNLLNGTLVQRHPSHAVTFVDNHDTQPGEALESFVQGWFKPLAYATILTREQGYPQVFYGDYYGIPSDGVPSYRQQIDPLLAARQQYAYGTQHDYLDNQDVIGWTREGDSAHAGSGLATVMSDGPGGSKTMYVGTAHAGQVFKDITGNRTDTVTINSAGNGTFPCNKGSVSIWVKQ

SEQ ID NO: 34126 - protein, 482 aa, Bacillus sp.
HDGTNGTIMQYFEWNVPNDGQHWNRLHNNAQNLKNAGITAIWIPPAWKGTSQSDTGYGAYDLYDLGEFNQKGTVRTKYGTKAELERAIRSLKANGIQVYGDVVFNHKAGADFTERVFAVEVNPQNRNQEVSGEYQIEAWTGFNFPGRGNQHSSFKWRWYHFDGTDWDQSRQLSNRIYKFRGKAWDWEVDTEFGNYDYLMYADLDMDHPEVINELNRWGVWYANTLNLDGFRLDAVKHIKFSFMRDWLGHVRGQTGKNLFAVAEYWKNDLGALENYLSKTNWTMSAFDVPLHYNLYQASNSSGNYDMRNLLNGTLVQRHPSHAVTFVDNHDTQPGEALESFVQGWFKPLAYATILTREQGYPQVFYGDYYGIPSDGVPSYRQQIDPLLAARQQYAYGTQHDYLDNQDVIGWTREGDSAHAGSGLATVMSDGPGGSKTMYVGTAHAGQVFKDITGNRTDTVTINSAGNGTFPCNKGSVSIWVKQ

SEQ ID NO: 34127 - protein, 482 aa, Bacillus sp.
HDGTNGTIMQYFEWNVPNDGQHWNRLHNNAQNLKNAGITAIWIPPAWKGTSQSDTGYGAYDLYDLGEFNQKGTVRTKYGTKAELERAIRSLKANGIQVYGDVVMNHKAGADFTERVQAVEVNPQNRNQEVSGTYQIEAWTGFNFPGRGNQHSSFKWRWYHFDGTDWDQSRKVTNRIYKFRGKAWDWEVDTEFGNYDYLMYADLDMDHPEVINELNRWGVWYANTLNLDGFRLDAVKHIKFSFMRDWLGHVRGQTGKNLFAVAEYWKNDLGALENYLSKTNWTMSAFDVPLHYNLYQASNSSGNYDMRNLLNGTLVQRHPSHAVTFVDNHDTQPGEALESFVQGWFKPLAYATILTREQGYPQVFYGDYYGIPSDGVPSYRQQIDPLLAARQQYAYGTQHDYLDNQDVIGWTREGDSAHAGSGLATVMSDGPGGSKTMYVGTAHAGQVFKDITGNRTDTVTINSAGNGTFPCNKGSVSIWVKQ

SEQ ID NO: 34128 - protein, 482 aa, Bacillus sp.
HDGTNGTIMQYFEWNVPNDGQHWNRLHNNAQNLKNAGITAIWIPPAWKGTSQSDTGYGAYDLYDLGEFNQKGTVRTKYGTKAELERAIRSLKANGIQVYGDVVMNHKAGADFTERVQAVEVNPQNRNQEVSGTYQIEAWTGFNFPGRGNQHSSFKWRWYHFDGTDWDQSRQLSNKIYKFRGKAWDWEVDTEFGNYDYLMYADLDMDHPEVINELNRWGVWYANTLNLDGFRLDAVKHIKFSFMRDWLGHVRGQTGKNLFAVAEYWKNDLGALENYLSKTNWTMSAFDVPLHYNLYQASNSSGNYDMRNLLNGTLVQRHPSHAVTFVDNHDTQPGEALESFVQGWFKPLAYATILTREQGYPQVFYGDYYGIPSDGVPSYRQQIDPLLAARQQYAYGTQHDYLDNQDVIGWTREGDSAHAGSGLATVMSDGPGGSKTMYVGTAHAGQVFKDITGNRTDTVTINSAGNGTFPCNKGSVSIWVKQ

SEQ ID NO: 34129 - protein, 482 aa, Bacillus sp.
HDGTNGTIMQYFEWNVPNDGQHWNRLHNNAQNLKNAGITAIWIPPAWKGTSQSDTGYGAYDLYDLGEFNQKGTVRTKYGTKAELERAIRSLKANGIQVYGDVVMNHKAGADFTERVQAVEVNPQNRNQEVSGTYQIEAWTGFNFPGRGNQHSSFKWRWYHFDGTDWDQSRQLSNRIYKFRTKAWDWEVDTEFGNYDYLMYADLDMDHPEVINELNRWGVWYANTLNLDGFRLDAVKHIKFSFMRDWLGHVRGQTGKNLFAVAEYWKNDLGALENYLSKTNWTMSAFDVPLHYNLYQASNSSGNYDMRNLLNGTLVQAHPNHAVTFVDNHDTQPGEALESFVQGWFKPLAYATILTREQGYPQVFYGDYYGIPSDGVPSYRQQIDPLLAARQQYAYGTQHDYLDNQDVIGWTREGDSAHAGSGLATVMSDGPGGSKTMYVGTAHAGQVFKDITGNRTDTVTINSAGNGTFPCNKGSVSIWVKQ

SEQ ID NO: 34130 - protein, 482 aa, Bacillus sp.
HDGTNGTIMQYFEWNVPNDGQHWNRLHNNAQNLKNAGITAIWIPPAWKGTSQSDTGYGAYDLYDLGEFNQKGTVRTKYGTKAELERAIRSLKANGIQVYGDVVFNHKAGADFTERVQAVEVNPQNRNQEVSGEYQIEAWTGFNFPGRGNQHSSFKWRWYHFDGTDWDQSRQLSNRIYKFRGKAWDWEVDTEFGNYDYLMYADLDMDHPEVINELNRWGVWYANTLNLDGFRLDAVKHIKFSFMRDWLGHVRGQTGKNLFAVAEYWKNDLGALENYLSKTNWTMSAFDVPLHYNLYQASNSSGNYDMRNLLNGTLVQRHPSHAVTFVDNHDTQPGEALESFVQGWFKPLAYATILTREQGYPQVFYGDYYGIPSDGVPSYRQQIDPLLAARQQYAYGTQHDYLDNQDVIGWTREGDSAHAGSGLATVMSDGPGGSKTMYVGTAHAGQVFKDITGNRTDTVTINSAGNGTFPCNKGSVSIWVKQ

SEQ ID NO: 34131 - protein, 482 aa, Bacillus sp.
HDGTNGTIMQYFEWNVPNDGQHWNRLHNNAQNLKNAGITAIWIPPAWKGTSQSDTGYGAYDLYDLGEFNQKGTVRTKYGTKAELERAIRSLKANGIQVYGDVVMNHKAGADFTERVQAVEVNPQNRNQEVSGTYQIEAWTGFNFPGRGNQHSSFKWRWYHFDGTDWDQSRQLSNRIYKFRTKAWDWEVDTEFGNYDYLMYADLDMDHPEVINELNRWGVWYANTLNLDGFRLDAVKHIKFSFMRDWLGHVRAQTGKNLFAVAEYWKNDLGALENYLSKTNWTMSAFDVPLHYNLYQASNSSGNYDMRNLLNGTLVQRHPSHAVTFVDNHDTQPGEALESFVQGWFKPLAYATILTREQGYPQVFYGDYYGIPSDGVPSYRQQIDPLLAARQQYAYGTQHDYLDNQDVIGWTREGDSAHAGSGLATVMSDGPGGSKTMYVGTAHAGQVFKDITGNRTDTVTINSAGNGTFPCNKGSVSIWVKQ

SEQ ID NO: 34132 - protein, 482 aa, Bacillus sp.
HDGTNGTIMQYFEWNVPNDGQHWNRLHNNAQNLKNAGITAIWIPPAWKGTSQSDTGYGAYDLYDLGEFNQKGTVRTKYGTKAELERAIRSLKANGIQVYGDVVMNHKAGADFTERVQAVEVNPQNRNQEVSGTYQIEAWTGFNFPGRGNQHSSFKWRWYHFDGTDWDQSRQLSNRIYKFRAKAWDWEVDKEFGNYDYLMYADLDMDHPEVINELNRWGVWYANTLNLDGFRLDAVKHIKFSFMRDWLGHVRGQTGKNLFAVAEYWKNDLGALENYLSKTNWTMSAFDVPLHYNLYQASNSSGNYDMRNLLNGTLVQRHPSHAVTFVDNHDTQPGEALESFVQGWFKPLAYATILTREQGYPQVFYGDYYGIPSDGVPSYRQQIDPLLAARQQYAYGTQHDYLDNQDVIGWTREGDSAHAGSGLATVMSDGPGGSKTMYVGTAHAGQVFKDITGNRTDTVTINSAGNGTFPCNKGSVSIWVKQ

SEQ ID NO: 34133 - protein, 482 aa, Bacillus sp.
HDGTNGTIMQYFEWNVPNDGQHWNRLHNNAQNLKNAGITAIWIPPAWKGTSQSDTGYGAYDLYDLGEFNQKGTVRTKYGTKAELERAIRSLKANGIQVYGDVVMNHKAGADFTERVQAVEVNPQNRNQEVSGTYQIEAWTGFNFPGRGNQHSSFKWRWYHFDGTDWDQSRQLSNRIYKFRGKAWDWEVDTEFGNYDYLMYADLDMDHPEVINEQNRWGVWYANTLNLDGFRLDAVKHIKFSFMRDWLGHVRGQTGKNLFAVAEYWKNDLGALENYLSKTNWTMSAFDVPLHYNLYQASNSSGNYDMRNLLNGTLVQRHPSHAVTFVDNHDTQPGEALESFVQGWFKPLAYATILTREQGYPQVFYGDYYGIPSDGVPSYRQQIDPLLAARQQYAYGTQHDYLDNQDVIGWTREGDSAHAGSGLATVMSDGPGGSKTMYVGTAHAGQVFKDITGNRTDTVTINSAGNGTFPCNKGSVSIWVKQ

SEQ ID NO: 34134 - protein, 482 aa, Bacillus sp.
HDGTNGTIMQYFEWNVPNDGQHWNRLHNNAQNLKNAGITAIWIPPAWKGTSQSDTGYGAYDLYDLGEFNQKGTVRTKYGTKAELERAIRSLKANGIQVYGDVVFNHKAGADFTERVQAVEVNPQNRNQEVSGTYQIEAWTGFNFPGRGNQHSSFKWRWYHFDGTDWDQSRQLSNRIYKFRGKAWDWEVDTEFGNYDYLMYADLDMDHPEVINELNRWGVWYANTLNLDGFRLDAVKHIKFSFFRDWLGHVRGQTGKNLFAVAEYWKNDLGALENYLSKTNWTMSAFDVPLHYNLYQASNSSGNYDMRNLLNGTLVQRHPSHAVTFVDNHDTQPGEALESFVQGWFKPLAYATILTREQGYPQVFYGDYYGIPSDGVPSYRQQIDPLLAARQQYAYGTQHDYLDNQDVIGWTREGDSAHAGSGLATVMSDGPGGSKTMYVGTAHAGQVFKDITGNRTDTVTINSAGNGTFPCNKGSVSIWVKQ

SEQ ID NO: 34135 - protein, 482 aa, Bacillus sp.
HDGTNGTIMQYFEWNVPNDGQHWNRLHNNAQNLKNAGITAIWIPPAWKGTSQSDTGYGAYDLYDLGEFNQKGTVRTKYGTKAELERAIRSLKANGIQVYGDVVMNHKAGADFTERVQAVEVNPQNRNQEVSGTYQIEAWTGFNFPGRGNQHSSFKWRWYHFDGTDWDQSRQLSNRIYKFRGKAWDWEVDTEFGNYDYLMYADLDMDHPEVINELNRWGVWYANTLNLDGFRLDAVKHIKFSFMRDWLGHVRGQTGKNLFAVAEYWKNDLGALENYLSKTNWTMSAFDVPLHYNLYQASNSSGNYDMRNLLNGTLVQSNPSHAVTFVDNHDTQPGEALESFVQGWFKPLAYATILTREQGYPQVFYGDYYGIPSDGVPSYRQQIDPLLAARQQYAYGTQHDYLDNQDVIGWTREGDSAHAGSGLATVMSDGPGGSKTMYVGTAHAGQVFKDITGNRTDTVTINSAGNGTFPCNKGSVSIWVKQ

SEQ ID NO: 34136 - protein, 482 aa, Bacillus sp.
HDGTNGTIMQYFEWNVPNDGQHWNRLHNNAQNLKNAGITAIWIPPAWKGTSQSDTGYGAYDLYDLGEFNQKGTVRTKYGTKAELERAIRSLKANGIQVYGDVVMNHKAGADFTERVQAVEVNPQNRNQEVSGTYQIEAWTGFNFPGRGNQHSSFKWRWYHFDGTDWDQSRQLSNRIYKFRGKAWDWEVDTEFGNYDYLMYADLDMDHPEVINELNRWGVWYANTLNLDGFRLDAVKHIKFSFMRDWLGHVRGQTGKNLFATAEYWKNDLGALENYLSKTNWTMSAFDVPLHYNLYQASNSSGNYDMRNLLNGTLVQRHPSHAVTFVDNHDTQPGEALESFVQGWFKPLAYATILTREQGYPQVFYGDYYGIPSDGVPSYRQQIDPLLAARQQYAYGTQHDYLDNQDVIGWTREGDSAHAGSGLATVMSDGPGGSKTMYVGTAHAGQVFKDITGNRTDTVTINSAGNGTFPCNKGSVSIWVKQ

SEQ ID NO: 34137 - protein, 482 aa, Bacillus sp.
HDGTNGTIMQYFEWNVPNDGQHWNRLHNNAQNLKNAGITAIWIPPAWKGTSQSDTGYGAYDLYDLGEFNQKGTVRTKYGTKAELERAIRSLKANGIQVYGDVVMNHKAGADFTERVQAVEVNPQNRNQEVSGTYQIEAWTGFNFPGRGNQHSSFKWRWYHFDGTDWDQSRMLSNRIYKFRGKAWDWEVDTEFGNYDYLMYADLDMDHPEVINELNRWGVWYANTLNLDGFRLDAVKHIKFSFMRDWLGHVRGQTGKNLFAVAEYWKNDLGALENYLSKTNWTMSAFDVPLHYNLYQASNSSGNYDMRNLLNGTLVQRHPSHAVTFVDNHDTQPGEALESFVQGWFKPLAYATILTREQGYPQVFYGDYYGIPSDGVPSYRQQIDPLLAARQQYAYGTQHDYLDNQDVIGWTREGDSAHAGSGLATVMSDGPGGSKTMYVGTAHAGQVFKDITGNRTDTVTINSAGNGTFPCNKGSVSIWVKQ

SEQ ID NO: 34138 - protein, 482 aa, Bacillus sp.
HDGTNGTIMQYFEWNVPNDGQHWNRLHNNAQNLKNAGIKAIWIPPAWKGTSQSDTGYGAYDLYDLGEFNQKGTVRTKYGTKAELERAIRSLKANGIQVYGDVVMNHKAGADFTERVQAVEVNPQNRNQEVSGTYQIEAWTGFNFPGRGNQHSSFKWRWYHFDGTDWDQSRQLSNRIYKFRGKAWDWEVDTEFGNYDYLMYADLDMDHPEVINELNRWGVWYANTLNLDGFRLDAVKHIKFSFMRDWLGHVRGQTGKNLFAVAEYWKNDLGALENYLSKTNWTMSAFDVPLHYNLYQASNSSGNYDMRNLLNGTLVQRHPSHAVTFVDNHDTQPGEALESFVQTWFKPLAYATILTREQGYPQVFYGDYYGIPSDGVPSYRQQIDPLLAARQQYAYGTQHDYLDNQDVIGWTREGDSAHAGSGLATVMSDGPGGSKTMYVGTAHAGQVFKDITGNRTDTVTINSAGNGTFPCNKGSVSIWVKQ

SEQ ID NO: 34139 - protein, 482 aa, Bacillus sp.
HDGTNGTIMQYFEWNVPNDGQHWNRLHNNAQNLKNAGITAIWIPPAWKGTSQSDTGYGAYDLYDLGEFNQSGTVRTKYGTKAELERAIRSLKANGIQVYGDVVMNHKAGADFTERVQAVEVNPQNRNQEVSGTYQIEAWTGFNFPGRGNQHSSFKWRWYHFDGTDWDQSRQLSNRIYKFRGKAWDWEVDTEFGNYDYLMYADLDMDHPEVINELNRWGVWYANTLNLDGFRLDAVKHIKFSFMRDWLGHVRGQTGKNLFAVAEYWKNDLGALENYLSKTNWTMSAFDVPLHYNLYQASNSSGNYDMRNLLNGTLVQRHPSHAVTFVDNHDTQPGEALESFVQGWFKPLAYATILTREQGYPQVFYGDYYGIPSDGVPSYRQQIDPLLAARQQYAYGTQHDYLDNQDVIGWTREGDSAHAGSGLATVMSDGPGGSKTMYVGTAHAGQVFKDITGNRTDTVTINSAGNGTFPCNKGSVSIWVKQ

SEQ ID NO: 34140 - protein, 482 aa, Bacillus sp.
HDGTNGTIMQYFEWNVPNDGQHWNRLHNNAQNLKNAGITAIWIPPAWKGTSQSDTGYGAYDLYDLGEFNQKGTVRTKYGTKAELERAIRSLKANGIQVYGDVVMNHKAGADFTERVQAVEVNPQNRNQEVSGTYQIEAWTGFNFPGRGNQHSSFKWRWYHFDGTDWDQSRQLSNRIYKFRGKAWDWEVDTEFGNYDYLMYADLDMDHPEVINELNRWGVWYANTLNLDGFRLDAVKHIKFSFMRDWLGHVRGQTGKNLFGVAEYWKNDLGALENYLSKTNWTLSAFDVPLHYNLYQASNSSGNYDMRNLLNGTLVQRHPSHAVTFVDNHDTQPGEALESFVQGWFKPLAYATILTREQGYPQVFYGDYYGIPSDGVPSYRQQIDPLLAARQQYAYGTQHDYLDNQDVIGWTREGDSAHAGSGLATVMSDGPGGSKTMYVGTAHAGQVFKDITGNRTDTVTINSAGNGTFPCNKGSVSIWVKQ

SEQ ID NO: 34141 - protein, 482 aa, Bacillus sp.
HDGTNGTIMQYFEWNVPNDGQHWNRLHNNAQNLKNAGITAIWIPPAWKGTSQSDTGYGAYDLYDLGEFNQKGTVRTKYGTKAELERAIRSLKANGIQVYGDVVMNHKAGADFTERVQAVEVNPQNRNQEVSGTYQIEAWTGFNFPGRGNQHSSFKWRWYHFDGTDWDQSRQLSNRIYKFRTKAWDWEVDTEFGNYDYLMYADLDMDHPEVINELNRWGVWYANTLNLDGFRLDAVKHIKFSFMRDWLGHVRGQTGKNLFAVAEYWKNDLGALENYLSKTNWTMSAFDVPLHYNLYQASNSSGNYDMRNLLNGTLVQRHPSHAVTFVDNHDTQPGEALESFVQGWFKPLAYATILTREQGYPQVFYGDYYGIPSDGVPSYRQQIDPLLAARQQYAYGTQHDYLDNQDVIGWTREGDSAHAGSGLATVMSDGPGGSKTMYVGTAHAGQVFKDITGNRTDTVTINSAGNGTFPCNKGSVSIWVKQ

SEQ ID NO: 34142 - protein, 482 aa, Bacillus sp.
HDGTNGTIMQYFEWNVPNDGQHWNRLHNNAQNLKNAGITAIWIPPAWKGTSQSDTGYGAYDLYDLGEFNQKGTVRTKYGTKAELERAIRSLKANGIQVYGDVVMNHKAGADFTEQVQAVEVNPQNRNQEVSGTYQIEAWTGFNFPGRGNQHSSFKWRWYHFDGTDWDQSRQLSNRIYKFRGKAWDWEVDTEFGNYDYLMYGDLDMDHPEVINELNRWGVWYANTLNLDGFRLDAVKHIKFSFMRDWLGHVRGQTGKNLFAVAEYWKNDLGALENYLSKTNWTMSAFDVPLHYNLYQASNSSGNYDMRNLLNGTLVQRHPSHAVTFVDNHDTQPGEALESFVQGWFKPLAYATILTREQGYPQVFYGDYYGIPSDGVPSYRQQIDPLLAARQQYAYGTQHDYLDNQDVIGWTREGDSAHAGSGLATVMSDGPGGSKTMYVGTAHAGQVFKDITGNRTDTVTINSAGNGTFPCNKGSVSIWVKQ

SEQ ID NO: 34143 - protein, 482 aa, Bacillus sp.
HDGTNGTIMQYFEWNVPNDGQHWNRLHNNAQNLKNAGITAIWIPPAWKGTSQSDTGYGAYDLYDLGEFNQRGTVRTKYGTKAELERAIRSLKANGIQVYGDVVMNHKAGADQTERVQAVEVNPQNRNQEVSGEYQIEAWTGFNFPGRGNQHSSFKWRWYHFDGTDWDQSRQLSNRIYKFRGKAWDWEVDTEFGNYDYLMYADLDMDHPEVINELNRWGVWYANTLNLDGFRLDAVKHIKFSFMRDWLGHVRAQTGKNLFAVAEYWKNDLGALENYLSKTNWTMSAFDVPLHYNLYQASNSSGNYDMRNLLNGTLVQRHPSHAVTFVDNHDTQPGEALESFVQGWFKPLAYATILTREQGYPQVFYGDYYGIPSDGVPSYRQQIDPLLAARQQYAYGTQHDYLDNQDVIGWTREGDSAHAGSGLATVMSDGPGGSKTMYVGTAHAGQVFKDITGNRTDTVTINSAGNGTFPCNKGSVSIWVKQ

SEQ ID NO: 34144 - protein, 482 aa, Synthetic construct
HDGTNGTIMQYFEWNVPNDGQHWNRLHNNAQNLKNAGITAIWIPPAWKGTSQSDTGYGAYDLYDLGEFNQRGTVRTKYGTKAELERAIRSLKANGIQVYGDVVMNHKAGADFTERVQAVEVNPQNRNQEVSGTYQIEAWTGFNFPGRGNQHSSFKWRWYHFDGTDWDQSRQLSNRIYKFRGKAWDWEVDTEFGNYDYLMYADLDMDHPEVINELNRWGVWYANTLNLDGFRLDAVKHIKFSFMRDWLGHVRAQTGKNLFAVAEYWKNDLGALENYLSKTNWTMSAFDVPLHYNLYQASNSSGNYDMRNLLNGTLVQRHPSHAVTFVDNHDTQPGEALESFVQGWFKPLAYATILTREQGYPQVFYGDYYGIPSDGVPSYRQQIDPLLAARQQYAYGTQHDYLDNQDVIGWTREGDSAHAGSGLATVMSDGPGGSKTMYVGTAHAGQVFKDITGNRTDTVTINSAGNGTFPCNKGSVSIWVKQ

SEQ ID NO: 34145 - protein, 482 aa, Bacillus sp.
HDGTNGTIMQYFEWNVPNDGQHWNRLHNNAQNLKNAGITAIWIPPAWKGTSQSDTGYGAYDLYDLGEFNQNGTVRTKYGTKAELERAIRSLKANGIQVYGDVVMNHKAGADFTERVQAVEVNPQNRNQEVSGTYQIEAWTGFNFPGRGNQHSSFKWRWYHFDGTDWDQSRQLSNRIYKFRGKAWDWEVDTEFGNYDYLMYADLDMDHPEVINELNRWGVWYANTLNLDGFRLDAVKHIKFSFMRDWLGHVRGQTGKNLFAVAEYWKNDLGALENYLSKTNWTMSAFDVPLHYNLYQASNSSGNYDMRNLLNGTLVQRHPSHAVTFVDNHDTQPGEALESFVQGWFKPLAYATILTREQGYPQVFYGDYYGIPSDGVPSYRQQIDPLLAARQQYAYGTQHDYLDNQDVIGWTREGDSAHAGSGLATVMSDGPGGSKTMYVGTAHAGQVFKDITGNRTDTVTINSAGNGTFPCNKGSVSIWVKQ

SEQ ID NO: 34146 - protein, 482 aa, Bacillus sp.
HDGTNGTIMQYFEWNVPNDGQHWNRLHNNAQNLKNAGITAIWIPPAWKGTSQSDTGYGAYDLYDLGEFNQKGTVRTKYGTKAELERAIRSLKANGIQVYGDVVMNHKAGADFTERVQAVEVNPQNRNQEVSGTYQIEAWTGFNFPGRGNQHSSFKWRWYHFDGTDWDQSRQLSNRIYKFRGKAWDWEVDTEFGNYDYLMYADLDMDHPEVINELNRWGVWYANTLNLDGFRLDAVKHIKFSFMRDWLGHVRGQTGKNLFAIAEYWKNDLGALENYLSKTNWTMSAFDVPLHYNLYQASNSSGNYDMRNLLNGTLVQRHPSHAVTFVDNHDTQPGEALESFVQGWFKPLAYATILTREQGYPQVFYGDYYGIPSDGVPSYRQQIDPLLAARQQYAYGTQHDYLDNQDVIGWTREGDSAHAGSGLATVMSDGPGGSKTMYVGTAHAGQVFKDITGNRTDTVTINSAGNGTFPCNKGSVSIWVKQ

SEQ ID NO: 34147 - protein, 482 aa, Bacillus sp.
HDGTNKTIMQYFEWNVPNDGQHWNRLHNNAQNLKNAGITAIWIPPAWKGTSQSDTGYGAYDLYDLGEFNQKGTVRTKYGTKAELERAIRSLKANGIQVYGDVVMNHKAGADFTERVQAVEVNPQNRNQEVSGTYQIEAWTGFNFPGRGNQHSSFKWRWYHFDGTDWDQSRQLSNRIYKFRGKAWDWEVDTEFGNYDYLMYADLDMDHPEVINELNRWGVWYANTLNLDGFRLDAVKHIKFSFMRDWLGHVRGQTGKNLFAVAEYWKNDLGALENYLSKTNWTMSAFDVPLHYNLYQASNSSGNYDMRNLLNGTLVQAHPSHAVTFVDNHDTQPGEALESFVQGWFKPLAYATILTREQGYPQVFYGDYYGIPSDGVPSYRQQIDPLLAARQQYAYGTQHDYLDNQDVIGWTREGDSAHAGSGLATVMSDGPGGSKTMYVGTAHAGQVFKDITGNRTDTVTINSAGNGTFPCNKGSVSIWVKQ

SEQ ID NO: 34148 - protein, 482 aa, Bacillus sp.
HDGTNGTIMQYFEWNVPNDGQHWNRLHNNAQNLKNAGITAIWIPPAWKGTSQSDTGYGAYDLYDLGEFNQKGTVRTKYGTKAELERAIRSLKANGIQVYGDVVMNHKAGADFTERVQAVEVNPQNRNQEVSGTYQIEAWTGFNFPGRGNQHSSFKWRWYHFDGTDWDQSRQLSNRIYKFRGKAWDWEVDTEFGNYDYLMYADLDMDHPEVINELNRWGVWYANTLNLDGFRLDAVKHIKFSFMRDWLGHVRGQTGKNLFAVAEYWKNDLGALENYLSKTNWTMSAFDAPLHYNLYQASNSSGNYDMRNLLNGTLVQRHPSHAVTFVDNHDTQPGEALESFVQGWFKPLAYATILTREQGYPQVFYGDYYGIPSDGVPSYRQQIDPLLAARQQYAYGTQHDYLDNQDVIGWTREGDSAHAGSGLATVMSDGPGGSKTMYVGTAHAGQVFKDITGNRTDTVTINSAGNGTFPCNKGSVSIWVKQ

SEQ ID NO: 34149 - protein, 482 aa, Bacillus sp.
HDGTNGTIMQYFEWNVPNDGQHWNRLHNNAQNLKNAGITAIWIPPAWKGTSQSDTGYGAYDLYDLGEFNQKGTVRTKYGTKAELERAIRSLKANGIQVYGDVVMNHKAGADFTEAVQAVEVNPQNRNQEVSGTYQIEAWTGFNFPGRGNQHSSFKWRWYHFDGTDWDQSRQLSNRIYKFRGKAWDWEVDTEFGNYDYLMYGDLDMDHPEVINELNRWGVWYANTLNLDGFRLDAVKHIKFSFMRDWLGHVRGQTGKNLFAVAEYWKNDLGALENYLSKTNWTMSAFDVPLHYNLYQASNSSGNYDMRNLLNGTLVQRHPSHAVTFVDNHDTQPGEALESFVQGWFKPLAYATILTREQGYPQVFYGDYYGIPSDGVPSYRQQIDPLLAARQQYAYGTQHDYLDNQDVIGWTREGDSAHAGSGLATVMSDGPGGSKTMYVGTAHAGQVFKDITGNRTDTVTINSAGNGTFRCNKGSVSIWVKQ

SEQ ID NO: 34150 - protein, 482 aa, Bacillus sp.
HDGTNGTIMQYFEWNVPNDGQHWNRLHNNAQNLKNAGITAIWIPPAWKGTSQSDTGYGAYDLYDLGEFNQKGTVRTKYGTKAELERAIRSLKANGIQVYGDVVMNHKAGADFTERVQAVEVNPQNRNQEVSGTYQIEAWTGFNFPGRQNQHSSFKWRWYHFDGTDWDQSRQLSNRIYKFRGKAWDWEVDTEFGNYDYLMYADLDMDHPEVINELNRWGVWYANTLNLDGFRLDAVKHIKFSFMRDWLGHVRGQTGKNLFAVAEYWKNDLGALENYLSKTNWTMSAFDVPLHYNLYQASNSSGNYDMRNLLNGTLVQRHPSHAVTFVDNHDTQPGEALESFVQGWFKPLAYATILTREQGYPQVFYGDYYGIPSDGVPSYRQQIDPLLAARQQYAYGTQHDYLDNQDVIGWTREGDSAHAGSGLATVMSDGPGGSKTMYVGTAHAGQVFKDITGNRTDTVTINSAGNGTFPCNKGSVSIWVKQ

SEQ ID NO: 34151 - protein, 482 aa, Bacillus sp.
HDGTNGTIMQYFEWNVPNDGQHWNRLHNNAQNLKNAGITAIWIPPAYKGTSQSDTGYGAYDLYDLGEFNQKGTVRTKYGTKAELERAIRSLKANGIQVYGDVVMNHKAGADFTERVQAVEVNPQNRNQEVSGTYQIEAWTGFNFPGRGNQHSSFKWRWYHFDGTDWDQSRQLSNRIYKFRGKAWDWEVDTEFGNYDYLMYADLDMDHPEVINELNRWGVWYANTLNLDGFRLDAVKHIKFSFMRDWLGHVRGQTGKNLFAVAEYWKNDLGALENYLSKTNWTMSAFDVPLHYNLYQASNSSGNYDMRNLLNGTLVQRHPSHAVTFVDNHDTQPGEALESFVQGWFKPLAYATILTREQGYPQVFYGDYYGIPSDGVPSYRQQIDPLLAARQQYAYGTQHDYLDNQDVIGWTREGDSAHAGSGLATVMSDGPGGSKTMYVGTAHAGQVFKDITGNRTDTVTINSAGNGTFPCNKGSVSIWVKQ

SEQ ID NO: 34152 - protein, 482 aa, Bacillus sp.
HDGTNGTIMQYFEWNVPNDGQHWNRLHNNAQNLKNAGITAIWIPPAWKGTSQSDTGYGAYDLYDLGEFNQKGTVRTKYGTKAELERAIRSLKANGIQVYGDVVMNHKAGADFTERVQAVEVNPQNRNQEVSGTYQIEAWTGFNFPGRGNQHSSFKWRWYHFDGTDWDQSRQLSNRIYKFRGKAWDWEVDTEFGNYDYLMYADLDMDHPEVINELNRWGVWYANTLNLDGFRLDAVKHIKFSFMRDWLGHVRGQTGKNLFAVAEYWKNDLGALENYLSKTNWTMSAFDVPLHFNLYQASNSSGNYDMRNLLNGTLVQRHPSHAVTFVDNHDTQPGEALESFVQGWFKPLAYATILTREQGYPQVFYGDYYGIPSDGVPSYRQQIDPLLAARQQYAYGTQHDYLDNQDVIGWTREGDSAHAGSGLATVMSDGPGGSKTMYVGTAHAGQVFKDITGNRTDTVTINSAGNGTFPCNKGSVSIWVKQ

SEQ ID NO: 34153 - protein, 482 aa, Bacillus sp.
HDGTNGTIMQYFEWNVPNDGQHWNRLHNNAQNLKNAGITAIWIPPAWKGTSQSDTGYGAYDLYDLGEFNQKGTVRTKYGTKAELERAIRSLKANGIQVYGDVVMNHKAGADFTERVQAVEVNPQNRNQEVSGTYQIEAWTGFNFPGRGNQHSSFKWRWYHFDGTDWDQSRQLSNRIYKFRGKAWDWEVDTEFGNYDYLMYADLDMDHPEVINELNRWGVWYANTLNLDGFRLDAVKHIKFSFMRDWLGHVRGQTGKNLFAVAEYWKGDLGALENYLSKTNWTMSAFDVPLHYNLYQASNSSGNYDMRNLLNGTLVQRHPSHAVTFVDNHDTQPGEALESFVQGWFKPLAYATILTREQGYPQVFYGDYYGIPSDGVPSYRQQIDPLLAARQQYAYGTQHDYLDNQDVIGWTREGDSAHAGSGLATVMSDGPGGSKTMYVGTAHAGQVFKDITGNRTDTVTINSAGNGTFPCNKGSVSIWVKQ

SEQ ID NO: 34154 - protein, 482 aa, Bacillus sp.
HDGTNGTIMQYFEWNVPNDGQHWNRLHNNAQNLKNAGITAIWIPPAWKGTSQSDTGYGAYDLYDLGEFNQKGTVRTKYGTKAELERAIRSLKANGIQVYGDVVMNHKAGADFTERVQAVEVNPQNRNQEVSGTYQIEAWTGFNFPGRGNQHSSFKWRWYHFDGTDWDQSRQLSNRIYKFRGKAWDWEVDTEFGNYDYLMYADLDMDHPEVINELNRWGVWYANTLNLDGFRLDAVKHIKFSFMRDWLGHVRGQTGKNLFAVAEYWKNDLGALENYLSKTNWTMSAFDVPLHYNLYQASNSSGNYDMRNLLNGTLVQRHPSHAVTFVDNHDTQPHEALESFVQGWFKPLAYATILTREQGYPQVFYGDYYGIPSDGVPSYRQLIDPLLAARQQYAYGTQHDYLDNQDVIGWTREGDSAHAGSGLATVMSDGPGGSKTMYVGTAHAGQVFKDITGNRTDTVTINSAGNGTFPCNKGSVSIWVKQ

SEQ ID NO: 34155 - protein, 482 aa, Bacillus sp.
HDGTNGTIMQYFEWNVPNDGQHWNRLHNNAQNLKNAGITAIWIPPAWKGTSQSDTGYGAYDLYDLGEFNQKGTVRTKYGTKAELERAIRSLKANGIQVYGDVVMNHKAGADFTERVQAVEVNPQNRNQEVSGTYQIEAWTGFNFPGRGNQHSSFKWRWYHFDGTDWDQSRQLSNRIYKFRGKAWDWEVDTEFGNYDYLMYADLDMDHPEVINELNRWGVWYANTLNLDGFRLDAVKHIKFSFMRDWLGHVRGQTGKNLFAVAEYWKNDLGALENYLSKTNWTMSAFDVPLHYNLYQASNSSGNYDMRNLLNGTLVQRHPSLAVTFVDNHDTQPGEALESFVQGWFKPLAYATILTREQGYPQVFYGDYYGIPSDGVPSYRQQIDPLLAARQQYAYGTQHDYLDNQDVIGWTREGDSAHAGSGLATVMSDGPGGSKTMYVGTAHAGQVFKDITGNRTDTVTINSAGNGTFPCNKGSVSIWVKQ

SEQ ID NO: 34156 - protein, 482 aa, Bacillus sp.
HDGTNGTIMQYFEWNVPNDGQHWNRLHNNAQNLKNAGITAIWIPPAWKGTSQSDTGYGAYDLYDLGEFNQKGTVRTKYGTKAELERAIRSLKANGIQVYGDVVMNHKAGADFTERVQAVEVNPQNRNQEVSGTYQIEAWTGFNFPGRGNQHSSFKWRWYHFDGTDHDQSRQLSNRIYKFRGKAWDWEVDTEFGNYDYLMYADLDMDHPEVINELNRWGVWYANTLNLDGFRLDAVKHIKFSFMRDWLGHVRGQTGKNLFAVAEYWKNDLGALENYLSKTNWTMSAFDVPLHYNLYQASNSSGNYDMRNLLNGTLVQRHPSHAVTFVDNHDTQPGEALESFVQGWFKPLAYATILTREQGYPQVFYGDYYGIPSDGVPSYRQQIDPLLAARQQYAYGTQHDYLDNQDVIGWTREGDSAHAGSGLATVMSDGPGGSKTMYVGTAHAGQVFKDITGNRTDTVTINSAGNGTFPCNKGSVSIWVKQ

SEQ ID NO: 34157 - protein, 482 aa, Bacillus sp.
HDGTNGTIMQYFEWNVPNDGQHWNRLHNNAQNLKNAGITAIWIPPAWKGTSQSDTGYGAYDLYDLGEFNQKGTVRTKYGTKAELERAIRSLKANGIQVYGDVVMNHKAGADFTERVQAVEVNPQNRNQEVSGTYQIEAWTGFNFPGRGNQHSSFKWRWYHFDGTDWDQSREINNRIYKFRGKAWDWEVDTEFGNYDYLMYADLDMDHPEVINELNRWGVWYANTLNLDGFRLDAVKHIKFSFMRDWLGHVRGQTGKNLFAVAEYWKNDLGALENYLSKTNWTMSAFDVPLHYNLYQASNSSGNYDMRNLLNGTLVQRHPSHAVTFVDNHDTQPGEALESFVQGWFKPLAYATILTREQGYPQVFYGDYYGIPSDGVPSYRQQIDPLLAARQQYAYGTQHDYLDNQDVIGWTREGDSAHAGSGLATVMSDGPGGSKTMYVGTAHAGQVFKDITGNRTDTVTINSAGNGTFPCNKGSVSIWVKQ

SEQ ID NO: 34158 - protein, 482 aa, Bacillus sp.
HDGTNGTIMQYFEWNVPNDGQHWNRLHNNAQNLKNAGITAIWIPPAWKGTSQSDTGYGAYDLYDLGEFNQKGTVRTKYGTKAELERAIRSLKANGIQVYGDVVMNHKAGADFTERVQAVEVNPQNRNQEVSGTYQIEAWTGFNFPGRGNQHSSFKWRWYHFDGTDWDQSRRLSNRIYKFRGKAWDWEVDTEFGNYDYLMYADLDMDHPEVINELNRWGVWYANTLNLDGFRLDAVKHIKFSFMRDWLGHVRGQTGKNLFAVAEYWKNDLGALENYLSKTNWTMSAFDVPLHYNLYQASNSSGNYDMRNLLNGTLVQRHPSHAVTFVDNHDTQPGEALESFVQGWFKPLAYATILTREQGYPQVFYGDYYGIPSDGVPSYRQQIDPLLAARQQYAYGTQHDYLDNQDVIGWTREGDSAHAGSGLATVMSDGPGGSKTMYVGTAHAGQVFKDITGNRTDTVTINSAGNGTFPCNKGSVSIWVKQ

SEQ ID NO: 34159 - protein, 482 aa, Bacillus sp.
HDGTNGTIMQYFEWNVPNDGQHWNRLHNNAQNLKNAGITAIWIPPAWKGTSQSDTGYGAYDLYDLGEFNQKGTVRTKYGTKAELERAIRSLKANGIQVYGDVVMNHKAGADFTERVQAVEVNPQNRNQEVSGTYQIEAWTGFNFPGRGNQHSSFKWRWYHFDGTDWDQSRQLSNRIYKFRGKAWDWEVDTEFGNYDYLMYADLDMDHPEVINELNRWGVWYANTLNLDGFRLDAVKHIKFSFMRDWLGHVRGQTGKNLFAVAEYWKNDLGALENYLSKTNWTMSAFDVPLHYNLYQASNSSGNYDMRNLLNGTLVQRHPSHAVTFVDNHDTQPGEALESFVQGWFKPLAYATILTREQGYPQVFYGDYYGIPSDGVPSYRQQIDPLLAARQQYAYGTQHDYLDNQDVIGWTREGDSAHAGSGLATVMSDGPGGSKTMYVGTAHAGQVFKDITGNRTDTVTINSAGNGTFPCNKGSVSIWVEQ

SEQ ID NO: 34160 - protein, 482 aa, Bacillus sp.
HDGTNGTIMQYFEWNVPNDGQHWNRLHNNAQNLKNAGITAIWIPPAWKGTSQSDTGYGAYDLYDLGEFNQKGTVRTKYGTKAELERAIRSLKANGISVYGDVVMNHKAGADFTERVQAVEVNPQNRNQEVSGTYQIEAWTGFNFPGRGNQHSSFKWRWYHFDGTDWDQSRQLSNRIYKFRGKAWDWEVDTEFGNYDYLMYADLDMDHPEVINELNRWGVWYANTLNLDGFRLDAVKHIKFSFMRDWLGHVRGQTGKNLFAVAEYWKNDLGALENYLSKTNWTMSAFDVPLHYNLYQASNSSGNYDMRNLLNGTLVQAHPSHAVTFVDNHDTQPGEALESFVQGWFKPLAYATILTREQGYPQVFYGDYYGIPSDGVPSYRQQIDPLLAARQQYAYGTQHDYLDNQDVIGWTREGDSAHAGSGLATVMSDGPGGSKTMYVGTAHAGQVFKDITGNRTDTVTINSAGNGTFPCNKGSVSIWVKQ

SEQ ID NO: 34161 - protein, 482 aa, Bacillus sp.
HDGTNGTIMQYFEWNVPNDGQHWNRLHNNAQNLKNAGITAIWIPPAWKGTSQSDTGYGAYDLYDLGEFNQKGTVRTKYGTKAELERAIRSLKANGIQVYGDVVMNHKAGADFTERVQAVEVNPQNRNQEVSGTYQIEAWTGFNFPGRGNQHSSFKWRWYHFDGTDWDQSRQLSNRIYKFRGKAWDWEVDTEFGNYDYLMYSDLDMDHPEVINELNRWGVWYANTLNLDGFRLDAVKHIKFSFMRDWLGHVRGQTGKNLFAVAEYWKNDLGALENYLSKTNWTMSAFDVPLHYNLYQASNSSGNYDMRNLLNGTLVQRHPSHAVTFVDNHDTQPGEALESFVQGWFKPLAYATILTREQGYPQVFYGDYYGIPSDGVPSYRQQIDPLLAARQQYAYGTQHDYLDNQDVIGWTREGDSAHAGSGLATVMSDGPGGSKTMYVGTAHAGQVFKDITGNRTDTVTINSAGNGTFPCNKGSVSIWVKQ

SEQ ID NO: 34162 - protein, 482 aa, Bacillus sp.
HDGTNGTIMQYFEWNVPNDGQHWNRLHNNAQNLKNAGITAIWIPPAWKGTSQSDTGYGAYDLYDLGEFNQKGTVRTKYGTKAELERAIRSLKANGIQVYGDVVMNHKAGADFTERVQAVEVNPQNRNQEVSGTYQIEAWTGFNFPGRGNQHSSFKWRWYHFDGTDWDQSRQLSNRIYKFRGKAWDWEVDTEFGNYDYLMYADLDMDHPETINELNRWGVWYANTLNLDGFRLDAVKHIKFSFMRDWLGHVRGQTGKNLFAVAEYWKNDLGALENYLSKTNWTMSAFDVPLHYNLYQASNSSGNYDMRNLLNGTLVQRHPSHAVTFVDNHDTQPGEALESFVQGWFKPLAYATILTREQGYPQVFYGDYYGIPSDGVPSYRQQIDPLLAARQQYAYGTQHDYLDNQDVIGWTREGDSAHAGSGLATVMSDGPGGSKTMYVGTAHAGQVFKDITGNRTDTVTINSAGNGTFPCNKGSVSIWVKQ

SEQ ID NO: 34163 - protein, 482 aa, Bacillus sp.
HDGTNGTIMQYFEWNVPNDGQHWNRLHNNAQNLKNAGITAIWIPPAWKGTSQSDTGYGAYDLYDLGEFNQKGTVRTKYGTKAELERAIRSLKANGIQVYGDVVMNHKAGADFTERVQAVEVNPQNRNQEVSGTYQIEAYTGFNFPGRGNQHSSFKWRWYHFDGTDWDQSRQLSNRIYKFRGKAWDWEVDTEFGNYDYLMYADLDMDHPEVINELNRWGVWYANTLNLDGFRLDAVKHIKFSFMRDWLGHVRGQTGKNLFAVAEYWKNDLGALENYLSKTNWTMSAFDVPLHYNLYQASNSSGNYDMRNLLNGTLVQRHPSHAVTFVDNHDTQPGEALESFVQGWFKPLAYATILTREQGYPQVFYGDYYGIPSDGVPSYRQQIDPLLAARQQYAYGTQHDYLDNQDVIGWTREGDSAHAGSGLATVMSDGPGGSKTMYVGTAHAGQVFKDITGNRTDTVTINSAGNGTFPCNKGSVSIWVKQ

SEQ ID NO: 34164 - protein, 482 aa, Bacillus sp.
HDGTNGTIMQYFEWNVPNDGQHWNRLHNNAQNLKNAGITAIWIPPAWKGTSQSDTGYGAYDLYDLGEFNQKGTVRTKYGTKAELERAIRSLKANGIQVYGDVVMNHKAGADQTEHVQAVEVNPQNRNQEVSGTYQIEAWTGFNFPGRGNQHSSFKWRWYHFDGTDWDQSRGLSNRIYKFRGKAWDWEVDTEFGNYDYLMYADLDMDHPEVINELNRWGVWYANTLNLDGFRLDAVKHIKFSFMRDWLGHVRGQTGKNLFAVAEYWKNDLGALENYLSKTNWTMSAFDVPLHYNLYQASNSSGNYDMRNLLNGTLVQRHPSHAVTFVDNHDTQPGEALESFVQGWFKPLAYATILTREQGYPQVFYGDYYGIPSDGVPSYRQQIDPLLAARQQYAYGTQHDYLDNQDVIGWTREGDSAHAGSGLATVMSDGPGGSKTMYVGTAHAGQVFKDITGNRTDTVTINSAGNGTFPCNKGSVSIWVKQ

SEQ ID NO: 34165 - protein, 482 aa, Bacillus sp.
HDGTNGTIMQYFEWNVPNDGQHWNRLHNNAQNLKNAGITAIWIPPAWKGTSQSDTGYGAYDLYDLGEFNQKGTVRTKYGTKAELERAIRSLKANGIQVYGDVVMNHKAGADFTERVQAVEVNPQNRNQEVSGTYQIEAWTGFNFPGRGNQHSSFKWRWYHFDGTDWDQSRQLSNRIYKFRGKAWDWEVDTEFGNYDYLMYADLDMDHPEVINELNRWGVWYANTLNLDGFRLDAVKHIKFSFMRDWLGHVRGQTGKNLFAVAEYWKNDLGALENYLSKTNWTMSAFDVPLHYNLYQASNSSGNYDMRNLLNGTLVQRHPSHAVTFVDNHDTQPGEALESFVQGWFKPLAYATILTREQGYPQVFYGDYYGIPSDGVPSYRQQIDPLLAARQQYAYGTQHDYLDNQDVIGWTREGDSAHAGSGLATVMSDGPGGSKTMYVGTAHAGQVFKDITGNRTDTVTINSAGNGTFPCNKGSVSIWVSQ

SEQ ID NO: 34166 - protein, 482 aa, Bacillus sp.
HDGTNGTIMQYFEWNVPNDGQHWNRLHNNAQNLKNAGITAIWIPPAWKGTSQSDTGYGAYDLYDLGEFNQKGTVRTKYGTKAELERAIRSLKANGIQVYGDVVMNHKAGADFTERVQAVEVNPQNRNQEVSGTYQIEAWTGFNFPGRGNQHSSFKWRWYHFDGTDGDQSRQLSNRIYKFRGKAWDWEVDTEFGNYDYLMYADLDMDHPEVINELNRWGVWYANTLNLDGFRLDAVKHIKFSFMRDWLGHVRGQTGKNLFAVAEYWKNDLGALENYLSKTNWTMSAFDVPLHYNLYQASNSSGNYDMRNLLNGTLVQRHPSHAVTFVDNHDTQPGEALESFVQGWFKPLAYATILTREQGYPQVFYGDYYGIPSDGVPSYRQQIDPLLAARQQYAYGTQHDYLDNQDVIGWTREGDSAHAGSGLATVMSDGPGGSKTMYVGTAHAGQVFKDITGNRTDTVTINSAGNGTFPCNKGSVSIWVKQ

SEQ ID NO: 34167 - protein, 482 aa, Bacillus sp.
HDGTNGTIMQYFEWNVPNDGQHWNRLHNNAQNLKNAGITAIWIPPAWKGTSQSDTGYGAYDLYDLGEFNQKGTVRTKYGTKAELERAIRSLKANGIQVYGDVVMNHKAGADFTERVQAVEVNPQNRNQEVSGTYQIEAWTGFNFPGRGNQHSSFKWRWYHFDGTDWDQSRQLSNRIYKFRGKAWDWEVDTEFGNYDYLMYADLDMDHPEVINELNRWGVWYANTLNLDGFRLDAVKHIKFSFMRDWLGHVRGQTGKNLFAVAEYWKNDLGALENYLSKTNWTMSAFDAPLHYNLYQASNSSGNYDMRNLLNGTLVQRHPSHAVTLVDNHDTQPGEALESFVQGWFKPLAYATILTREQGYPQVFYGDYYGIPSHGVPSYRQQIDPLLAARQQYAYGTQHDYLDNQDVIGWTREGDSAHAGSGLATVMSDGPGGSKTMYVGTAHAGQVFKDITGNRTDTVTINSAGNGTFPCNKGSVSIWVKQ

SEQ ID NO: 34168 - protein, 482 aa, Bacillus sp.
HDGTNGTIMQYFEWNVPNDGQHWNRLHNNAQNLKNAGITAIWIPPAWKGESQSDTGYGAYDLYDLGEFNQKGTVRTKYGTKAELERAIRSLKANGIQVYGDVVMNHKAGADFTERVQAVEVNPQNRNQEVSGTYQIEAWTGFNFPGRGNQHSSFKWRWYHFDGTDWDQSRQLHNRIYKFRGKAWDWEVDTEFGNYDYLMYADLDMDHPEVINELNRWGVWYANTLNLDGFRLDAVKHIKFSFMRDWLGHVRGQTGKNLFAVAEYWKNDLGALENYLSKTNWTMSAFDVPLHYNLYQASNSSGNYDMRNLLNGTLVQRHPSHAVTFVDNHDTQPGEALESFVQGWFKPLAYATILTREQGYPQVFYGDYYGIPSDGVPSYRQQIDPLLAARQQYAYGTQHDYLDNQDVIGWTREGDSAHAGSGLATVMSDGPGGSKTMYVGTAHAGQVFKDITGNRTDTVTINSAGNGTFPCNKGSVSIWVKQ

SEQ ID NO: 34169 - protein, 482 aa, Synthetic construct
HDGTNGTIMQYFEWNVPNDGQHWNRLHNNAQNLKNAGITAIWIPPAWKGTSQSDTGYGAYDLYDLGEFNQKGTVRTKYGTKAELERAIRSLKANGIQVYGDVVMNHKAGADQTEQVQAVEVNPQNRNQEVSGTYQIEAWTGFNFPGRGNQHSSFKWRWYHFDGTDFDQSRGVSNRIYKFRTKAWDWEVDTEFGNYDYLMYADLDMDHPEVINELNRWGVWYANTLNLDGFRLDAVKHIKFSFMRDWLGHVRGQTGKNLFAVAEYWKNDLGALENYLSKTNWTMSAFDVPLHYNLYQASNSSGNYDMRNLLNGTLVQRHPSHAVTFVDNHDTQPGEALESFVQGWFKPLAYATILTREQGYPQVFYGDYYGIPSDGVPSYRQQIDPLLKARQQYAYGTQHDYLDNQDVIGWTREGDSAHPGSGLATVMSDGPGGSKTMYVGTAHAGQVFKDITGNRTDTVTINSAGNGTFPCNGGSVSIWVKQ

SEQ ID NO: 34170 - protein, 482 aa, Bacillus sp.
HDGTNGTIMQYFEWNVPNDGQHWNRLHNNAQNLKNAGITAIWIPPAWKGTSQSDTGYGAYDLYDLGEFNQKGTVRTKYGTKAELERAIRSLKANGIQVYGDVVMNHKAGADFTEHVQAVEVNPQNRNQEVSGTYQIEAWTGFNFPGRGNQHSSFKWRWYHFDGTDWDQSRMLSNRIYKFRGKAWDWEVDTEFGNYDYLMYADLDMDHPEVINELNRWGVWYANTLNLDGFRLDAVKHIKFSFMRDWLGHVRGQTGKNLFAVAEYWKNDLGALENYLSKTNWTMSAFDVPLHYNLYQASNSSGNYDMRNLLNGTLVQRHPSHAVTFVDNHDTQPGEALESFVQGWFKPLAYATILTREQGYPQVFYGDYYGIPSDGVPSYRQQIDPLLAARQQYAYGTQHDYLDNQDVIGWTREGDSAHAGSGLATVMSDGPGGSKTMYVGTAHAGQVFKDITGNRTDTVTINSAGNGTFPCNKGSVSIWVKQ

SEQ ID NO: 34171 - protein, 482 aa, Bacillus sp.
HDGTNGTIMQYFEWNVPNDGQHWNRLHNNAQNLKNAGITAIWIPPAWKGTSQSDTGYGAYDLYDLGEFNQRGTVRTKYGTKAELERAIRSLKANGIQVYGDVVMNHKAGADFTERVQAVEVNPQNRNQEVSGTYQIEAWTGFNFPGRGNQHSSFKWRWYHFDGTDWDQSRQLSNRIYKFRGKAWDWEVDTEFGNYDYLMYADLDMDHPEVINELNRWGVWYANTLNLDGFRLDAVKHIKFSFMRDWLGHVRGQTGKNLFAVAEYWKNDLGALENYLSKTNWTMSAFDVPLHYNLYQASNSSGNYDMRNLLNGTLVQAHPNHAVTFVDNHDTQPGEALESFVQGWFKPLAYATILTREQGYPQVFYGDYYGIPSDGVPSYRQQIDPLLAARQQYAYGTQHDYLDNQDVIGWTREGDSAHAGSGLATVMSDGPGGSKTMYVGTAHAGQVFKDITGNRTDTVTINSAGNGTFPCNKGSVSIWVKQ

SEQ ID NO: 34172 - protein, 482 aa, Bacillus sp.
HDGTNGTIMQYFEWNVPNDGQHWNRLHNNAQNLKNAGITAIWIPPAWKGTSQSDTGYGAYDLYDLGEFNQKGTVRTKYGTKAELERAIRSLKANGIQVYGDVVMNHKAGADFTERVQAVEVNPQNRNQEVSGTYQIEAWTGFNFPGRGNQHSSFKWRWYHFDGTDWDQSRQLSNRIYKFRGKAWDWEVDTEFGNYDYLMYADLDMDHPEVINETNRWGVWYANTLNLDGFRLDAVKHIKFSFMRDWLGHVRGQTGKNLFAVAEYWKNDLGALENYLSKTNWTMSAFDVPLHYNLYQASNSSGNYDMRNLLNGTLVQRHPSHAVTFVDNHDTQPGEALESFVQGWFKPLAYATILTREQGYPQVFYGDYYGIPSDGVPSYRQQIDPLLAARQQYAYGTQHDYLDNQDVIGWTREGDSAHAGSGLATVMSDGPGGSKTMYVGTAHAGQVFKDITGNRTDTVTINSAGNGTFPCNKGSVSIWVKQ

SEQ ID NO: 34173 - protein, 482 aa, Bacillus sp.
HDGTNGTIMQYFEWNVPNDGQHWNRLHNNAQNLKNAGITAIWIPPAWKGTSQSDTGYGAYDLYDLGEFNQKGTVRTKYGTKAELERAIRSLKANGIQVYGDVVMNHKAGADFTERVQAVEVNPQNRNQEVSGTYQIEAWTGFNFPGRGNQHSSFKWRWYHFDGTDYDQSRQLSNRIYKFRGKAWDWEVDTEFGNYDYLMYADLDMDHPEVINELNRWGVWYANTLNLDGFRLDAVKHIKFSFMRDWLGHVRGQTGKNLFAVAEYWKNDLGALENYLSKTNWTMSAFDVPLHYNLYQASNSSGNYDMRNLLNGTLVQRHPSHAVTFVDNHDTQPGEALESFVQGWFKPLAYATILTREQGYPQVFYGDYYGIPSDGVPSYRQQIDPLLAARQQYAYGTQHDYLDNQDVIGWTREGDSAHAGSGLATVMSDGPGGSKTMYVGTAHAGQVFKDITGNRTDTVTINSAGNGTFPCNKGSVSIWVKQ

SEQ ID NO: 34174 - protein, 482 aa, Bacillus sp.
HDGTNGTIMQYFEWNVPNDGQHWNRLHNNAQNLKNAGITAIWIPPAWKGTSQSDTGYGAYDLYDLGEFNQKGTVRTKYGTKAELERAIRSLKANGIQVYGDVVMNHKAGADFTERVRAVEVNPQNRNQEVSGEYQIEAWTGFNFPGRGNQHSSFKWRWYHFDGTDWDQSRQLSNRIYKFRTKAWDWEVDTEFGNYDYLMYADLDMDHPEVINELNRWGVWYANTLNLDGFRLDAVKHIKFSFMRDWLGHVRGQTGKNLFAVAEYWKNDLGALENYLSKTNWTMSAFDVPLHYNLYQASNSSGNYDMRNLLNGTLVQRHPSHAVTFVDNHDTQPGEALESFVQGWFKPLAYATILTREQGYPQVFYGDYYGIPSDGVPSYRQQIDPLLAARQQYAYGTQHDYLDNQDVIGWTREGDSAHAGSGLATVMSDGPGGSKTMYVGTAHAGQVFKDITGNRTDTVTINSAGNGTFPCNKGSVSIWVKQ

SEQ ID NO: 34175 - protein, 482 aa, Bacillus sp.
HDGTNGTIMQYFEWNVPNDGQHWNRLHNNAQNLKNAGITAIWIPPAWKGTSQSDTGYGAYDLYDLGEFNQKGTVRTKYGTKAELERAIRSLKANGIQVYGDVVMNHKAGADFTERVQAVEVNPQNRNQEVSGTYQIEAWTGFNFPGRGNQHSSFKWRWYHFDGTDWDQSRQLSNRIYKFRGKAWDWEVDTEFGNYDYLMYGDLDMDHPEVINELNRWGVWYANTLNLDGFRLDAVKHIKFSFMRDWLGHVRGQTGKNLFAVAEYWKNDLGALENYLSKTNWTMSAFDVPLHYNLYQASNSSGNYDMRNLLNGTLVQRHPSHAVTFVDNHDTQPGEALESFVQGWFKPLAYATILTREQGYPQVFYGDYYGIPSDGVPSYRQQIDPLLAARQQYAYGTQHDYLDNQDVIGWTREGDSAHAGSGLATVMSDGPGGSKTMYVGTAHAGQVFKDITGNRTDTVTINSAGNGTFPCNKGSVSIWVKQ

SEQ ID NO: 34176 - protein, 482 aa, Bacillus sp.
HDGTNGTIMQYFEWNVPNDGQHWNRLHNNAQNLKNAGITAIWIPPAWKGTSQSDTGYGAYDLYDLGEFNQKGTVRTKYGTKAELERAIRSLKANGIQVYGDVVMNHKAGADFTERVQAVEVNPQNRNQEVSGTYQIEAWTGFNFPGRGNQHSSFKWRWYHFDGTDWDQSRQLSNRIYKFRGKAWDWEVDTEFGNYDYLMYADLDMDHPEVINELNRWGVWYANTLNLDGFRLDAVKHIKFSFMRDWLGHVRGQTGKNLFAVAEYWKNDLGALENYLSKTNWTMSALDVPLHYNLYQASNSSGNYDMRNLLNGTLVQRHPSHAVTFVDNHDTQPGEALESFVQGWFKPLAYATILTREQGYPQVFYGDYYGIPSDGVPSYRQQIDPLLAARQQYAYGTQHDYLDNQDVIGWTREGDSAHAGSGLATVMSDGPGGSKTMYVGTAHAGQVFKDITGNRTDTVTINSAGNGTFPCNKGSVSIWVKQ

SEQ ID NO: 34177 - protein, 482 aa, Bacillus sp.
HDGTNGTIMQYFEWNVPNDGQHWNRLHNNAQNLKNAGITAIWIPPAWKGGSQSDTGYGAYDLYDLGEFNQKGTVRTKYGTKAELERAIRSLKANGIQVYGDVVMNHKAGADFTERVQAVEVNPQNRNQEVSGTYQIEAWTGFNFPGRGNQHSSFKWRWYHFDGTDWDQSRQLMNRIYKFRGKAWDWEVDTEFGNYDYLMYADLDMDHPEVINELNRWGVWYANTLNLDGFRLDAVKHIKFSFMRDWLGHVRGQTGKNLFAVAEYWKNDLGALENYLSKTNWTMSAFDVPLHYNLYQASNSSGNYDMRNLLNGTLVQRHPSHAVTFVDNHDTQPGEALESFVQGWFKPLAYATILTREQGYPQVFYGDYYGIPSDGVPSYRQQIDPLLAARQQYAYGTQHDYLDNQDVIGWTREGDSAHAGSGLATVMSDGPGGSKTMYVGTAHAGQVFKDITGNRTDTVTINSAGNGTFPCNKGSVSIWVKQ

SEQ ID NO: 34178 - protein, 482 aa, Bacillus sp.
HDGTNGTIMQYFEWNVPNDGQHWNRLHNNAQNLKNAGITAIWIPPAWKGTSQSDTGYGAYDLYDLGEFNQKGTVRTKYGTKAELERAIRSLKANGIQVYGDVVMNHKAGADFTERVQAVEVNPQNRNQEVSGTYQIEAWTGFNFPGRGNQHSSFKWRWYHFDGTDWDQSRQLSNRIYKFRGKAWDWEVDTEFGNYDYLMYADLDMDHPEVINELNRWGVWYANTLNLDGFRLDAVKHIKFSFMRDWLGHVRGQTGKNLFAVAEYWQNDLGALENYLSKTNWTMSAFDVPLHYNLYQASNSSGNYDMRNLLNGTLVQRHPSHAVTFVDNHDTQPGEALESFVQGWFKPLAYATILTREQGYPQVFYGDYYGIPSDGVPSYRQQIDPLLAARQQYAYGTQHDYLDNQDVIGWTREGDSAHAGSGLATVMSDGPGGSKTMYVGTAHAGQVFKDITGNRTDTVTINSAGNGTFPCNKGSVSIWVKQ

SEQ ID NO: 34179 - protein, 482 aa, Bacillus sp.
HDGTNKTIMQYFEWNVPNDGQHWNRLHNNAQNLKNAGITAIWIPPAWKGTSQSDTGYGAYDLYDLGEFNQKGTVRTKYGTKAELERAIRSLKANGIQVYGDVVMNHKAGADFTERVQAVEVNPQNRNQEVSGTYQIEAWTGFNFPGRGNQHSSFKWRWYHFDGTDWDQSRQLSNRIYKFRGKAWDWEVDTEFGNYDYLMYADLDMDHPEVINELNRWGVWYANTLNLDGFRLDAVKHIKFSFMRDWLGHVRGQTGKNLFAVAEYWKNDLGALENYLSKTNWTMSAFDVPLHYNLYQASNSSGNYDMRNLLNGTLVQRHPSHAVTFVDNHDTQPGEALESFVQGWFKPLAYATILTREQGYPQVFYGDYYGIPSDGVPSYRQQIDPLLAARQQYAYGTQHDYLDNQDVIGWTREGDSAHAGSGLATVMSDGPGGSKTMYVGTAHAGQVFKDITGNRTDTVTINSAGNGTFPCNKGSVSIWVKQ

SEQ ID NO: 34180 - protein, 482 aa, Bacillus sp.
HDGTNGTIMQYFEWNVPNDGQHWNRLHNNAQNLKNAGITAIWIPPAWKGTSQSDTGYGAYDLYDLGEFNQKGTVRTKYGTKAELERAIRSLKANGIQVYGDVVMNHKAGADFTERVQAVEVNPQNRNQEVSGTYQIEAWTGFNFPGRGNQHSSFKWRWYHFDGTDWDQSRYLSNRIYKFRGKAWDWEVDTEFGNYDYLMYADLDMDHPEVINELNRWGVWYANTLNLDGFRLDAVKHIKFSFMRDWLGHVRGQTGKNLFAVAEYWKNDLGALENYLSKTNWTMSAFDVPLHYNLYQASNSSGNYDMRNLLNGTLVQRHPSHAVTFVDNHDTQPGEALESFVQGWFKPLAYATILTREQGYPQVFYGDYYGIPSDGVPSYRQQIDPLLAARQQYAYGTQHDYLDNQDVIGWTREGDSAHAGSGLATVMSDGPGGSKTMYVGTAHAGQVFKDITGNRTDTVTINSAGNGTFPCNKGSVSIWVKQ

SEQ ID NO: 34181 - protein, 482 aa, Bacillus sp.
HDGTNGTIMQYFEWNVPNDGQHWNRLHNNAQNLKNAGITAIWIPPAWKGTSQSDTGYGAYDLYDLGEFNQKGTVRTKYGTKAELERAIRSLKANGIQVYGDVVMNHKAGADFTERVQAVEVNPQNRNQEVSGTYQIEAWTGFNFPGRGNQHSSFKWRWYHFDGTDWDQSRQLSNRIYKFRGKAWDWEVDTEFGNYDYLMYADLDMDHPEVINELNRWGVWYANTLNLDGFRLDAVKHIKFSFMRDWLGHVRGQTGKNLFAVGEYWKNDLGALENYLSKTNWTMSAFDVPLHYNLYQASNSSGNYDMRNLLNGTLVQRHPSHAVTFVDNHDTQPGEALESFVQGWFKPLAYATILTREQGYPQVFYGDYYGIPSDGVPSYRQQIDPLLAARQQYAYGTQHDYLDNQDVIGWTREGDSAHAGSGLATVMSDGPGGSKTMYVGTAHAGQVFKDITGNRTDTVTINSAGNGTFPCNKGSVSIWVKQ

SEQ ID NO: 34182 - protein, 482 aa, Bacillus sp.
HDGTNGTIMQYFEWNVPNDGQHWNRLHNNAQNLKNAGITAIWIPPAWKGTSQSDTGYGAYDLYDLGEFNQKGTVRTKYGTKAELERAIRSLKANGIQVYGDVVMNHKAGADFTERVQAVEVNPQNRNQEVSGTYQIEAWTGFNFPGRGNQHSSFKWRWYHFDGTDWDQSRETRNRIYKFRGKAWDWEVDTEFGNYDYLMYADLDMDHPEVINELNRWGVWYANTLNLDGFRLDAVKHIKFSFMRDWLGHVRGQTGKNLFAVAEYWKNDLGALENYLSKTNWTMSAFDVPLHYNLYQASNSSGNYDMRNLLNGTLVQRHPSHAVTFVDNHDTQPGEALESFVQGWFKPLAYATILTREQGYPQVFYGDYYGIPSDGVPSYRQQIDPLLAARQQYAYGTQHDYLDNQDVIGWTREGDSAHAGSGLATVMSDGPGGSKTMYVGTAHAGQVFKDITGNRTDTVTINSAGNGTFPCNKGSVSIWVKQ

SEQ ID NO: 34183 - protein, 482 aa, Bacillus sp.
HDGTNGTIMQYFEWNVPNDGQHWNRLHNNAQNLKNAGITAIWIPPAWKGTSQSDTGYGAYDLYDLGEFNQKGTVRTKYGTKAELERAIRSLKANGIQVYGDVVMNHKAGADFTERVQAVEVNPQNRNQEVSGTYQIEAWTGFNFPGRGNQHSSFKWRWYHFDGTDWDQSRQLSNRIYKFRGKAWDWEVDTEFGNYDYLMYADLDMDHPEVINELNRWGVWYANTLNLDGFRLDAVKHIKFSFMRDWLGHVRGQTGKNLFAFAEYWKNDLGALENYLSKTNWTMSAFDVPLHYNLYQASNSSGNYDMRNLLNGTLVQRHPSHAVTFVDNHDTQPGEALESFVQGWFKPLAYATILTREQGYPQVFYGDYYGIPSDGVPSYRQQIDPLLAARQQYAYGTQHDYLDNQDVIGWTREGDSAHAGSGLATVMSDGPGGSKTMYVGTAHAGQVFKDITGNRTDTVTINSAGNGTFPCNKGSVSIWVKQ

SEQ ID NO: 34184 - protein, 482 aa, Bacillus sp.
HDGTNGTIMQYFEWNVPNDGQHWNRLHNNAQNLKNAGITAIWIPPAWKGTSQSDTGYGAYDLYDLGEFNQKGTVRTKYGTKAELERAIRSLKANGIQVYGDVVMNHKAGADFTERVQAVEVNPQNRNQEVSGTYQIEAWTGFNFPGRGNQHSSFKWRWYHFDGTDWDQSRQLSNRIYKFRGKAWDWEVDTEFGNYDYLMYADLDMDHPEVINELNRWGVWYANTLNLDGFRLDATKHIKFSFMRDWLGHVRGQTGKNLFAVAEYWKNDLGALENYLSKTNWTMSAFDVPLHYNLYQASNSSGNYDMRNLLNGTLVQRHPSHAVTFVDNHDTQPGEALESFVQGWFKPLAYATILTREQGYPQVFYGDYYGIPSDGVPSYRQQIDPLLAARQQYAYGTQHDYLDNQDVIGWTREGDSAHAGSGLATVMSDGPGGSKTMYVGTAHAGQVFKDITGNRTDTVTINSAGNGTFPCNKGSVSIWVKQ

SEQ ID NO: 34185 - protein, 482 aa, Bacillus sp.
HDGTNGTIMQYFEWNVPNDGQHWNRLHNNAQNLKNAGITAIWIPPAWKGKSQSDTGYGAYDLYDLGEFNQKGTVRTKYGTKAELERAIRSLKANGIQVYGDVVMNHKAGADFTERVQAVEVNPQNRNQEVSGTYQIEAWTGFNFPGRGNQHSSFKWRWYHFDGTDWDQSRQLSNRIYKFRGKAWDWEVDTEFGNYDYLMYADLDMDHPEVINELNRWGVWYANTLNLDGFRLDAVKHIKFSFMRDWLGHVRGQTGKNLFAVAEYWKNDLGALENYLSKTNWTMSAFDVPLHYNLYQASNSSGNYDMRNLLNGTLVQRHPSHAVTFVDNHDTQPGEALESFVQGWFKPLAYATILTREQGYPQVFYGDYYGIPSDGVPSYRQQIDPLLAARQQYAYGTQHDYLDNQDVIGWTREGDSAHAGSGLATVMSDGPGGSKTMYVGTAHAGQVFKDITGNRTDTVTINSAGNGTFPCNKGSVSIWVKQ

SEQ ID NO: 34186 - protein, 482 aa, Bacillus sp.
HDGTNGTIMQYFEWNVPNDGQHWNRLHNNAQNLKNAGITAIWIPPAWKGTSQSDTGYGAYDLYDLGEFNQKGTVRTKYGTKAELERAIRSLKANGIQVYGDVVMNHKAGADFTERVQAVEVNPQNRNQEVSGTYQIEAWTGFNFPGRGNQHSSFKWRWYHFDGTDWDQSRHAPNRIYKFRGKAWDWEVDTEFGNYDYLMYADLDMDHPEVINELNRWGVWYANTLNLDGFRLDAVKHIKFSFMRDWLGHVRGQTGKNLFAVAEYWKNDLGALENYLSKTNWTMSAFDVPLHYNLYQASNSSGNYDMRNLLNGTLVQRHPSHAVTFVDNHDTQPGEALESFVQGWFKPLAYATILTREQGYPQVFYGDYYGIPSDGVPSYRQQIDPLLAARQQYAYGTQHDYLDNQDVIGWTREGDSAHAGSGLATVMSDGPGGSKTMYVGTAHAGQVFKDITGNRTDTVTINSAGNGTFPCNKGSVSIWVKQ

SEQ ID NO: 34187 - protein, 482 aa, Bacillus sp.
HDGTNGTIMQYFEWNVPNDGQHWNRLHNNAQNLKNAGITAIWIPPAWKGTSQSDTGYGAYDLYDLGEFNQRGTVRTKYGTKAELERAIRSLKANGIQVYGDVVMNHKAGADFTERVRAVEVNPQNRNQEVSGEYQIEAWTGFNFPGRGNQHSSFKWRWYHFDGTDWDQSRQLSNRIYKFRGKAWDWEVDTEFGNYDYLMYADLDMDHPEVINELNRWGVWYANTLNLDGFRLDAVKHIKFSFMRDWLGHVRGQTGKNLFAVAEYWKNDLGALENYLSKTNWTMSAFDVPLHYNLYQASNSSGNYDMRNLLNGTLVQRHPSHAVTFVDNHDTQPGEALESFVQGWFKPLAYATILTREQGYPQVFYGDYYGIPSDGVPSYRQQIDPLLAARQQYAYGTQHDYLDNQDVIGWTREGDSAHAGSGLATVMSDGPGGSKTMYVGTAHAGQVFKDITGNRTDTVTINSAGNGTFPCNKGSVSIWVKQ

SEQ ID NO: 34188 - protein, 482 aa, Bacillus sp.
HDGTNGTIMQYFEWNVPNDGQHWNRLHNNAQNLKNAGITAIWIPPAWKGTSQSDTGYGAYDLYDLGEFNQKGTVRTKYGTKAELERAIRSLKANGIQVYGDVVMNHKAGADFTERVQAVEVNPQNRNQEVSGTYQIEAWTGFNFPGRGNQHSSFKWRWYHFDGTDWDQSRQLSNRIYKFRGKAWDWEVDTEFGNYDYLMYADLDMDHPEVINELNRWGVWYANTLNLDGFRLDAAKHIKFSFMRDWLGHVRGQTGKNLFAVAEYWKNDLGALENYLSKTNWTMSAFDVPLHYNLYQASNSSGNYDMRNLLNGTLVQRHPSHAVTFVDNHDTQPGEALESFVQGWFKPLAYATILTREQGYPQVFYGDYYGIPSDGVPSYRQQIDPLLAARQQYAYGTQHDYLDNQDVIGWTREGDSAHAGSGLATVMSDGPGGSKTMYVGTAHAGQVFKDITGNRTDTVTINSAGNGTFPCNKGSVSIWVKQ

SEQ ID NO: 34189 - protein, 482 aa, Bacillus sp.
HDGTNGTIMQYFEWNVPNDGQHWNRLHNNAQNLKNAGITAIWIPPAWKGTSQSDTGYGAYDLYDLGEFNQKGTVRTKYGTKAELERAIRSLKANGIQVYGDVVMNHKAGADFTERVQAVEVNPQNRNQEVSGTYQIEAWTGFNFPGRGNQHSSFKWRWYHFDGTDWDQSRQLSNRIYKFRGKAWDWEVDTEFGNYDYLMYADLDMDHPEVINEVNRWGVWYANTLNLDGFRLDAVKHIKFSFMRDWLGHVRGQTGKNLFAVAEYWKNDLGALENYLSKTNWTMSAFDVPLHYNLYQASNSSGNYDMRNLLNGTLVQRHPSHAVTFVDNHDTQPGEALESFVQGWFKPLAYATILTREQGYPQVFYGDYYGIPSDGVPSYRQQIDPLLAARQQYAYGTQHDYLDNQDVIGWTREGDSAHAGSGLATVMSDGPGGSKTMYVGTAHAGQVFKDITGNRTDTVTINSAGNGTFPCNKGSVSIWVKQ

SEQ ID NO: 34190 - protein, 482 aa, Bacillus sp.
HDGTNGTIMQYFEWNVPNDGQHWNRLHNNAQNLKNAGITAIWIPPAWKGSSQSDTGYGAYDLYDLGEFNQKGTVRTKYGTKAELERAIRSLKANGIQVYGDVVMNHKAGADFTERVQAVEVNPQNRNQEVSGTYQIEAWTGFNFPGRGNQHSSFKWRWYHFDGTDWDQSRQLPNRIYKFRGKAWDWEVDTEFGNYDYLMYADLDMDHPEVINELNRWGVWYANTLNLDGFRLDAVKHIKFSFMRDWLGHVRGQTGKNLFAVAEYWKNDLGALENYLSKTNWTMSAFDVPLHYNLYQASNSSGNYDMRNLLNGTLVQRHPSHAVTFVDNHDTQPGEALESFVQGWFKPLAYATILTREQGYPQVFYGDYYGIPSDGVPSYRQQIDPLLAARQQYAYGTQHDYLDNQDVIGWTREGDSAHAGSGLATVMSDGPGGSKTMYVGTAHAGQVFKDITGNRTDTVTINSAGNGTFPCNKGSVSIWVKQ

SEQ ID NO: 34191 - protein, 482 aa, Bacillus sp.
HDGTNGTIMQYFEWNVPNDGQHWNRLHNNAQNLKNAGITAIWIPPAWKATSQSDTGYGAYDLYDLGEFNQKGTVRTKYGTKAELERAIRSLKANGIQVYGDVVMNHKAGADLTELVQAVEVNPQNRNQEVSGTYQIEAWTGFNFPGRGNQHSSFKWRWYHFDGTDWDQSRQLSNRIYKFRGKAWDWEVDTEFGNYDYLMYADLDMDHPEVINELNRWGVWYANTLNLDGFRLDAVKHIKFSFMRDWLGHVRGQTGKNLFAVAEYWKNDLGALENYLSKTNWTMSAFDVPLHYNLYQASNSSGNYDMRNLLNGTLVQRHPSHAVTFVDNHDTQPGEALESFVQGWFKPLAYATILTREQGYPQVFYGDYYGIPSDGVPSYRQQIDPLLAARQQYAYGTQHDYLDNQDVIGWTREGDSAHAGSGLATVMSDGPGGSKTMYVGTAHAGQVFKDITGNRTDTVTINSAGNGTFPCNKGSVSIWVKQ

SEQ ID NO: 34192 - protein, 482 aa, Bacillus sp.
HDGKNGTIMQYFEWNVPNDGQHWNRLHNNAQNLKNAGITAIWIPPAWKGTSQSDTGYGAYDLYDLGEFNQKGTVRTKYGTKAELERAIRSLKANGIQVYGDVVMNHKAGADFTERVQAVEVNPQNRNQEVSGTYQIEAWTGFNFPGRGNQHSSFKWRWYHFDGTDWDQSRQLSNRIYKFRGKAWDWEVDTEFGNYDYLMYADLDMDHPEVINELNRWGVWYANTLNLDGFRLDAVKHIKFSFMRDWLGHVRGQTGKNLFAVAEYWKNDLGALENYLSKTNWTMSAFDVPLHYNLYQASNSSGNYDMRNLLNGTLVQRHPSHAVTFVDNHDTQPGEALESFVQGWFKPLAYATILTREQGYPQVFYGDYYGIPSDGVPSYRQQIDPLLAARQQYAYGTQHDYLDNQDVIGWTREGDSAHAGSGLATVMSDGPGGSKTMYVGTAHAGQVFKDITGNRTDTVTINSAGNGTFPCNKGSVSIWVKQ

SEQ ID NO: 34193 - protein, 482 aa, Bacillus sp.
HDGTNGTIMQYFEWNVPNDGQHWNRLHNNAQNLKNAGITAIWIPPAWKGTSQSDTGYGAYDLYDLGEFNQKGTVRTKYGTKAELERAIRSLKANGIQVYGDVVMNHKAGADFTERVQAVEVNPQNRNQEVSGTYQIEAWTGFNFPGRGNQHSSFKWRWYHFDGTDWDQSRQLSNRIYKFRGKAWDWEVDTEFGNYDYLMYADLDMDHPEVINELNRWGVWYANTLNLDGFRLDAVKHIKFSFMRDWLGHVRGQTGKNLFAVAEYWKTDLGALENYLSKTNWTMSAFDVPLHYNLYQASNSSGNYDMRNLLNGTLVQRHPSHAVTFVDNHDTQPGEALESFVQGWFKPLAYATILTREQGYPQVFYGDYYGIPSDGVPSYRQQIDPLLAARQQYAYGTQHDYLDNQDVIGWTREGDSAHAGSGLATVMSDGPGGSKTMYVGTAHAGQVFKDITGNRTDTVTINSAGNGTFPCNKGSVSIWVKQ

SEQ ID NO: 34194 - protein, 482 aa, Bacillus sp.
HDGTNGTIMQYFEWNVPNDGQHWNRLHNNAQNLKNAGITAIWIPPAWKGASQSDTGYGAYDLYDLGEFNQKGTVRTKYGTKAELERAIRSLKANGIQVYGDVVMNHKAGADFTERVQAVEVNPQNRNQEVSGTYQIEAWTGFNFPGRGNQHSSFKWRWYHFDGTDWDQSRQLGNRIYKFRGKAWDWEVDTEFGNYDYLMYADLDMDHPEVINELNRWGVWYANTLNLDGFRLDAVKHIKFSFMRDWLGHVRGQTGKNLFAVAEYWKNDLGALENYLSKTNWTMSAFDVPLHYNLYQASNSSGNYDMRNLLNGTLVQRHPSHAVTFVDNHDTQPGEALESFVQGWFKPLAYATILTREQGYPQVFYGDYYGIPSDGVPSYRQQIDPLLAARQQYAYGTQHDYLDNQDVIGWTREGDSAHAGSGLATVMSDGPGGSKTMYVGTAHAGQVFKDITGNRTDTVTINSAGNGTFPCNKGSVSIWVKQ

SEQ ID NO: 34195 - protein, 482 aa, Bacillus sp.
HDGTNGTIMQYFEWNVPNDGQHWNRLHNNAQNLKNAGITAIWIPPAWKGTSQSDTGYGAYDLYDLGEFNQKGTVRTKYGTKAELERAIRSLKANGIQVYGDVVMNHKAGADFTERVQAVEVNPQNRNQEVSGTYQIEAWTGFNFPGRGNQHSSFKWRWYHFDGTDWDQSRQLSNRIYKFRGKAWDWEVDTEFGNYDYLMYADLDMDHPEVINELNRWGVWYANTLNLDGFRVDAAKHIKFSFMRDWLGHVRGQTGKNLFAVAEYWKNDLGALENYLSKTNWTMSAFDVPLHYNLYQASNSSGNYDMRNLLNGTLVQRHPSHAVTFVDNHDTQPGEALESFVQGWFKPLAYATILTREQGYPQVFYGDYYGIPSDGVPSYRQQIDPLLAARQQYAYGTQHDYLDNQDVIGWTREGDSAHAGSGLATVMSDGPGGSKTMYVGTAHAGQVFKDITGNRTDTVTINSAGNGTFPCNKGSVSIWVKQ

SEQ ID NO: 34196 - protein, 482 aa, Bacillus sp.
HDGTNGTIMQYFEWNVPNDGQHWNRLHNNAQNLKNAGITAIWIPPAWKGTSQSDTGYGAYDLYDLGEFNQKGTVRTKYGTKAELERAIRSLKANGIQVYGDVVMNHKAGADQTERVQAVEVNPQNRNQEVSGTYQIEAWTGFNFPGRGNQHSSFKWRWYHFDGTDWDQSRMLSNRIYKFRGKAWDWEVDTEFGNYDYLMYADLDMDHPEVINELNRWGVWYANTLNLDGFRLDAVKHIKFSFMRDWLGHVRGQTGKNLFAVAEYWKNDLGALENYLSKTNWTMSAFDVPLHYNLYQASNSSGNYDMRNLLNGTLVQRHPSHAVTFVDNHDTQPGEALESFVQGWFKPLAYATILTREQGYPQVFYGDYYGIPSDGVPSYRQQIDPLLAARQQYAYGTQHDYLDNQDVIGWTREGDSAHAGSGLATVMSDGPGGSKTMYVGTAHAGQVFKDITGNRTDTVTINSAGNGTFPCNKGSVSIWVKQ

SEQ ID NO: 34197 - protein, 482 aa, Bacillus sp.
HDGTNGTIMQYFEWNVPNDGQHWNRLHNNAQNLKNAGITAIWIPPAWKGTSQSDTGYGAYDLYDLGEFNQKGTVRTKYGTKAELERAIRSLKANGIQVYGDVVMNHKAGADFTERVQAVEVNPQNRNQEVSGTYQIEAWTGFNFPGRGNQHSSFKWRWYHFDGTDWDQSRQLSNRIYKFRGKAWDWEVDTEFGNYDYLVYADLDMDHPEVINELNRWGVWYANTLNLDGFRLDAVKHIKFSFMRDWLGHVRGQTGKNLFAVAEYWKNDLGALENYLSKTNWTMSAFDVPLHYNLYQASNSSGNYDMRNLLNGTLVQRHPSHAVTFVDNHDTQPGEALESFVQGWFKPLAYATILTREQGYPQVFYGDYYGIPSDGVPSYRQQIDPLLAARQQYAYGTQHDYLDNQDVIGWTREGDSAHAGSGLATVMSDGPGGSKTMYVGTAHAGQVFKDITGNRTDTVTINSAGNGTFPCNKGSVSIWVKQ

SEQ ID NO: 34198 - protein, 482 aa, Bacillus sp.
HDGTNGTIMQYFEWNVPNDGQHWNRLHNNAQNLKNAGITAIWIPPAWKGTSQSDTGYGAYDLYDLGEFNQRGTVRTKYGTKAELERAIRSLKANGIQVYGDVVMNHKAGADQTEHVQAVEVNPQNRNQEVSGTYQIEAWTGFNFPGRGNQHSSFKWRWYHFDGTDWDQSRQLSNRIYKFRTKAWDWEVDTEFGNYDYLMYADLDMDHPEVINELNRWGVWYANTLNLDGFRLDAVKHIKFSFMRDWLGHVRGQTGKNLFAVAEYWKNDLGALENYLSKTNWTMSAFDVPLHYNLYQASNSSGNYDMRNLLNGTLVQRHPSHAVTFVDNHDTQPGEALESFVQGWFKPLAYATILTREQGYPQVFYGDYYGIPSDGVPSYRQQIDPLLAARQQYAYGTQHDYLDNQDVIGWTREGDSAHAGSGLATVMSDGPGGSKTMYVGQAHAGQVFKDITGNRTDTVTINSAGNGTFPCNKGSVSIWVKQ

SEQ ID NO: 34199 - protein, 482 aa, Bacillus sp.
HDGTNGTIMQYFEWNVPNDGQHWNRLHNNAQNLKNAGITAIWIPPAFKGTSQSDTGYGAYDLYDLGEFNQKGTVRTKYGTKAELERAIRSLKANGIQVYGDVVMNHKAGADFTERVQAVEVNPQNRNQEVSGTYQIEAWTGFNFPGRGNQHSSFKWRWYHFDGTDWDQSRQLSNRIYKFRGKAWDWEVDTEFGNYDYLMYADLDMDHPEVINELNRWGVWYANTLNLDGFRLDAVKHIKFSFMRDWLGHVRGQTGKNLFAVAEYWKNDLGALENYLSKTNWTMSAFDVPLHYNLYQASNSSGNYDMRNLLNGTLVQRHPSHAVTFVDNHDTQPGEALESFVQGWFKPLAYATILTREQGYPQVFYGDYYGIPSDGVPSYRQQIDPLLAARQQYAYGTQHDYLDNQDVIGWTREGDSAHAGSGLATVMSDGPGGSKTMYVGTAHAGQVFKDITGNRTDTVTINSAGNGTFPCNKGSVSIWVKQ

SEQ ID NO: 34200 - protein, 482 aa, Bacillus sp.
HDGTNGTIMQYFEWNVPNDGQHWNRLHNNAQNLKNAGITAIWIPPAWKGTSQSDTGYGAYDLYDLGEFNQKGTVRTKYGTKAELERAIRSLKANGIQVYGDVVMNHKAGADQTERVQAVEVNPQNRNQEVSGTYQIEAWTGFNFPGRGNQHSSFKWRWYHFDGTDWDQSRGLSNRIYKFRGKAWDWEVDTEFGNYDYLMYADLDMDHPEVINELNRWGVWYANTLNLDGFRLDAVKHIKFSFMRDWLGHVRGQTGKNLFAVAEYWKNDLGALENYLSKTNWTMSAFDVPLHYNLYQASNSSGNYDMRNLLNGTLVQRHPSHAVTFVDNHDTQPGEALESFVQGWFKPLAYATILTREQGYPQVFYGDYYGIPSDGVPSYRQQIDPLLAARQQYAYGTQHDYLDNQDVIGWTREGDSAHAGSGLATVMSDGPGGSKTMYVGTAHAGQVFKDITGNRTDTVTINSAGNGTFPCNKGSVSIWVKQ

SEQ ID NO: 34201 - protein, 482 aa, Bacillus sp.
HDGTNGTIMQYFEWNVPNDGQHWNRLHNNAQNLKNAGITAIWIPPAWKGTSQSDTGYGAYDLYDLGEFNQKGTVRTKYGTKAELERAIRSLKANGIQVYGDVVMNHKAGADFTERVQAVEVNPQNRNQEVSGTYQIEAWTGFNFPGRGNQHSSFKWRWYHFDGTDWDQSRQLSNRIYKFRGKNWDWEVDTEFGNYDYLMYADLDMDHPEVINELNRWGVWYANTLNLDGFRLDAVKHIKFSFMRDWLGHVRGQTGKNLFAVAEYWKNDLGALENYLSKTNWTMSAFDVPLHYNLYQASNSSGNYDMRNLLNGTLVQRHPSHAVTFVDNHDTQPGEALESFVQGWFKPLAYATILTREQGYPQVFYGDYYGIPSDGVPSYRQQIDPLLAARQQYAYGTQHDYLDNQDVIGWTREGDSAHAGSGLATVMSDGPGGSKTMYVGTAHAGQVFKDITGNRTDTVTINSAGNGTFPCNKGSVSIWVKQ

SEQ ID NO: 34202 - protein, 482 aa, Bacillus sp.
HDGTNGTIMQYFEWNVPNDGQHWNRLHNNAQNLKNAGITAIWIPPAWKGTSQSDTGYGAYDLYDLGEFNQKGTVRTKYGTKAELERAIRSLKANGIQVYGDVVMNHKAGADFTERVQAVEVNPQNRNQEVSGTYQIEAWTGFNFPGRGNQHSSFKWRWYHFDGTDWDQSRNTSNRIYKFRGKAWDWEVDTEFGNYDYLMYADLDMDHPEVINELNRWGVWYANTLNLDGFRLDAVKHIKFSFMRDWLGHVRGQTGKNLFAVAEYWKNDLGALENYLSKTNWTMSAFDVPLHYNLYQASNSSGNYDMRNLLNGTLVQRHPSHAVTFVDNHDTQPGEALESFVQGWFKPLAYATILTREQGYPQVFYGDYYGIPSDGVPSYRQQIDPLLAARQQYAYGTQHDYLDNQDVIGWTREGDSAHAGSGLATVMSDGPGGSKTMYVGTAHAGQVFKDITGNRTDTVTINSAGNGTFPCNKGSVSIWVKQ

SEQ ID NO: 34203 - protein, 482 aa, Bacillus sp.
HDGTNGTIMQYFEWNVPNDGQHWNRLHNNAQNLKNAGITAIWIPPAWKGTSQSDTGYGAYDLYDLGEFNQRGTVRTKYGTKAELERAIRSLKANGIQVYGDVVMNHKAGADFTERVQAVEVNPQNRNQEVSGTYQIEAWTGFNFPGRGNQHSSFKWRWYHFDGTDWDQSRQLHNRIYKFRGKAWDWEVDTEFGNYDYLMYADLDMDHPEVINELNRWGVWYANTLNLDGFRLDAVKHIKFSFMRDWLGHVRGQTGKNLFAVAEYWKNDLGALENYLSKTNWTMSAFDVPLHYNLYQASNSSGNYDMRNLLNGTLVQRHPSHAVTFVDNHDTQPGEALESFVQGWFKPLAYATILTREQGYPQVFYGDYYGIPSDGVPSYRQQIDPLLAARQQYAYGTQHDYLDNQDVIGWTREGDSAHAGSGLATVMSDGPGGSKTMYVGTAHAGQVFKDITGNRTDTVTINSAGNGTFPCNKGSVSIWVKQ

SEQ ID NO: 34204 - protein, 482 aa, Bacillus sp.
HDGTNGTIMQYFEWNVPNDGQHWNRLHNNAQNLKNAGITAIWIPPAWKGTSQSDTGYGAYDLYDLGEFNQKGTVRTKYGTKAELERAIRSLKANGIQVYGDVVMNHKAGADFTERVQAVEVNPQNRNQEVSGTYQIEAWTGFNFPGRGNQHSSFKWRWYHFDGTDWDQSRNVRNRIYKFRGKAWDWEVDTEFGNYDYLMYADLDMDHPEVINELNRWGVWYANTLNLDGFRLDAVKHIKFSFMRDWLGHVRGQTGKNLFAVAEYWKNDLGALENYLSKTNWTMSAFDVPLHYNLYQASNSSGNYDMRNLLNGTLVQRHPSHAVTFVDNHDTQPGEALESFVQGWFKPLAYATILTREQGYPQVFYGDYYGIPSDGVPSYRQQIDPLLAARQQYAYGTQHDYLDNQDVIGWTREGDSAHAGSGLATVMSDGPGGSKTMYVGTAHAGQVFKDITGNRTDTVTINSAGNGTFPCNKGSVSIWVKQ

SEQ ID NO: 34205 - protein, 482 aa, Bacillus sp.
HDGTNGTIMQYFEWNVPNDGQHWNRLHNNAQNLKNAGITAIWIPPAWKGTSQSDTGYGAYDLYDLGEFNQKGTVRTKYGTKAELERAIRSLKANGIAVYGDVVMNHKAGADFTERVQAVEVNPQNRNQEVSGTYQIEAWTGFNFPGRGNQHSSFKWRWYHFDGTDWDQSRQLSNRIYKFRGKAWDWEVDTEFGNYDYLMYADLDMDHPEVINELNRWGVWYANTLNLDGFRLDAVKHIKFSFMRDWLGHVRGQTGKNLFAVAEYWKNDLGALENYLSKTNWTMSAFDVPLHYNLYQASNSSGNYDMRNLLNGTLVQRHPSHAVTFVDNHDTQPGEALESFVQGWFKPLAYATILTREQGYPQVFYGDYYGIPSDGVPSYRQQIDPLLAARQQYAYGTQHDYLDNQDVIGWTREGDSAHAGSGLATVMSDGPGGSKTMYVGTAHAGQVFKDITGNRTDTVTINSAGNGTFPCNKGSVSIWVKQ

SEQ ID NO: 34206 - protein, 482 aa, Bacillus sp.
HDGTNGTIMQYFEWNVPNDGQHWNRLHNNAQNLKNAGITAIWIPPAWKGTSQSDTGYGAYDLYDLGEFNQRGTVRTKYGTKAELERAIRSLKANGIQVYGDVVMNHKAGADFTERVQAVEVNPQNRNQEVSGTYQIEAWTGFNFPGRGNQHSSFKWRWYHFDGTDWDQSRQLDNRIYKFRGKAWDWEVDTEFGNYDYLMYADLDMDHPEVINELNRWGVWYANTLNLDGFRLDAVKHIKFSFMRDWLGHVRGQTGKNLFAVAEYWKNDLGALENYLSKTNWTMSAFDVPLHYNLYQASNSSGNYDMRNLLNGTLVQRHPSHAVTFVDNHDTQPGEALESFVQGWFKPLAYATILTREQGYPQVFYGDYYGIPSDGVPSYRQQIDPLLAARQQYAYGTQHDYLDNQDVIGWTREGDSAHAGSGLATVMSDGPGGSKTMYVGTAHAGQVFKDITGNRTDTVTINSAGNGTFPCNKGSVSIWVKQ

SEQ ID NO: 34207 - protein, 482 aa, Bacillus sp.
HDGTNGTIMQYFEWNVPNDGQHWNRLHNNAQNLKNAGITAIWIPPAWKGTSQSDTGYGAYDLYDLGEFNQKGTVRTKYGTKAELERAIRSLKANGIQVYGDVVMNHKAGADFTEAVQAVEVNPQNRNQEVSGTYQIEAWTGFNFPGRGNQHSSFKWRWYHFDGTDWDQSRNVSNRIYKFRGKAWDWEVDTEFGNYDYLMYADLDMDHPEVINELNRWGVWYANTLNLDGFRLDAVKHIKFSFMRDWLGHVRGQTGKNLFAVAEYWKNDLGALENYLSKTNWTMSAFDVPLHYNLYQASNSSGNYDMRNLLNGTLVQRHPSHAVTFVDNHDTQPGEALESFVQGWFKPLAYATILTREQGYPQVFYGDYYGIPSDGVPSYRQQIDPLLAARQQYAYGTQHDYLDNQDVIGWTREGDSAHAGSGLATVMSDGPGGSKTMYVGTAHAGQVFKDITGNRTDTVTINSAGNGTFPCNKGSVSIWVKQ

SEQ ID NO: 34208 - protein, 482 aa, Bacillus sp.
HDGTNGTIMQYFEWNVPNDGQHWNRLHNNAQNLKNAGITAIWIPPAWKGTSQSDTGYGAYDLYDLGEFNQKGTVRTKYGTKAELERAIRSLKANGIQVYGDVVMNHKAGADFTEQVQAVEVNPQNRNQEVSGTYQIEAWTGFNFPGRGNQHSSFKWRWYHFDGTDFDQSRNVSNRIYKFRGKAWDWEVDTEFGNYDYLMYADLDMDHPEVINELNRWGVWYANTLNLDGFRLDAVKHIKFSFMRDWLGHVRGQTGKNLFAVAEYWKNDLGALENYLSKTNWTMSAFDVPLHYNLYQASNSSGNYDMRNLLNGTLVQRHPSHAVTFVDNHDTQPGEALESFVQGWFKPLAYATILTREQGYPQVFYGDYYGIPSDGVPSYRQQIDPLLAARQQYAYGTQHDYLDNQDVIGWTREGDSAHAGSGLATVMSDGPGGSKTMYVGQAHAGQVFKDITGNRTDTVTINSAGNGTFPCNKGSVSIWVKQ

SEQ ID NO: 34209 - protein, 482 aa, Bacillus sp.
HDGTNGTIMQYFEWNVPNDGQHWNRLHNNAQNLKNAGITAIWIPPAWKGTSQSDTGYGAYDLYDLGEFNQKGTVRTKYGTKAELERAIRSLKANGIQVYGDVVMNHKAGADFTERVQAVEVNPQNRNQEVSGTYQIEAWTGFNFPGRGNQHSSFKWRWYHFDGTDWDQSRQLSNRIYKFRGKAWDWEVDTEFGNYDYLMYADLDMDHPEVINELNRWGVWYANTLNLDGFRLDAVKHIKFSFMRDWLGHVRGQTGKNLFAVAEYWKNDLGALENYLSKTNWTMSAFDVPLHYNLYQASNSSGNYDMRNLLNGTLVQRHPSHAVTFVDNHDTQPGEALESFVQTWFKPLAYATILTREQGYPQVFYGDYYGIPSDGVPSYRQQIDPLLAARQQYAYGTQHDYLDNQDVIGWTREGDSAHAGSGLATVMSDGPGGSKTMYVGTAHAGQVFKDITGNRTDTVTINSAGNGTFPCNKASVSIWVKQ

SEQ ID NO: 34210 - protein, 482 aa, Bacillus sp.
HDGTNGTIMQYFEWNVPNDGQHWNRLHNNAQNLKNAGITAIWIPPAWKGTSQSDTGYGAYDLYDLGEFNQKGTVRTKYGTKAELERAIRSLKANGIQVYGDVVMNHKAGADFTERVQAVEVNPSNRNQEVSGTYQIEAWTGFNFPGRGNQHSSFKWRWYHFDGTDWDQSRQLSGRIYKFRGKAWDWEVDTEFGNYDYLMYADLDMDHPEVINELNRWGVWYANTLNLDGFRLDAVKHIKFSFMRDWLGHVRGQTGKNLFAVAEYWKNDLGALENYLSKTNWTMSAFDVPLHYNLYQASNSSGNYDMRNLLNGTLVQRHPSHAVTFVDNHDTQPGEALESFVQGWFKPLAYATILTREQGYPQVFYGDYYGIPSDGVPSYRQQIDPLLAARQQYAYGTQHDYLDNQDVIGWTREGDSAHAGSGLATVMSDGPGGSKTMYVGTAHAGQVFKDITGNRTDTVTINSAGNGTFPCNKGSVSIWVKQ

SEQ ID NO: 34211 - protein, 482 aa, Bacillus sp.
HDGTNGTIMQYFEWNVPNDGQHWNRLHNNAQNLKNAGITAIWIPPAWKGTSQSDTGYGAYDLYDLGEFNQKGTVRTKYGTKAELERAIRSLKANGIQVYGDVVMNHKAGADFTERVQAVEVNPQNRNQEVSGEYQIEAWTGFNFPGRGNQHSSFKWRWYHFDGTDWDQSRQLSNRIYKFRTKAWDWEVDTEFGNYDYLMYADLDMDHPEVINELNRWGVWYANTLNLDGFRLDAVKHIKFSFMRDWLGHVRGQTGKNLFAVAEYWKNDLGALENYLSKTNWTMSAFDVPLHYNLYQASNSSGNYDMRNLLNGTLVQRHPSHAVTFVDNHDTQPGEALESFVQGWFKPLAYATILTREQGYPQVFYGDYYGIPSDGVPSYRQQIDPLLAARQQYAYGTQHDYLDNQDVIGWTREGDSAHAGSGLATVMSDGPGGSKTMYVGTAHAGQVFKDITGNRTDTVTINSAGNGTFPCNKGSVSIWVKQ

SEQ ID NO: 34212 - protein, 482 aa, Bacillus sp.
HDGTNGTIMQYFEWNVPNDGQHWNRLHNNAQNLKNAGITAIWIPPAWKGTSQSDTGYGAYDLYDLGEFNQKGTVRTKYGTKAELERAIRSLKANGIQVYGDVVMNHKAGADFTERVQAVEVNPQNRNQEVSGTYQIEAWTGFNFPGRGNQHSSFKWRWYHFDGTDWDQSRDLQNRIYKFRGKAWDWEVDTEFGNYDYLMYADLDMDHPEVINELNRWGVWYANTLNLDGFRLDAVKHIKFSFMRDWLGHVRGQTGKNLFAVAEYWKNDLGALENYLSKTNWTMSAFDVPLHYNLYQASNSSGNYDMRNLLNGTLVQRHPSHAVTFVDNHDTQPGEALESFVQGWFKPLAYATILTREQGYPQVFYGDYYGIPSDGVPSYRQQIDPLLAARQQYAYGTQHDYLDNQDVIGWTREGDSAHAGSGLATVMSDGPGGSKTMYVGTAHAGQVFKDITGNRTDTVTINSAGNGTFPCNKASVSIWVKQ

SEQ ID NO: 34213 - protein, 482 aa, Bacillus sp.
HDGTNGTIMQYFEWNVPNDGQHWNRLHNNAQNLKNAGITAIWIPPAWKGTSQSDTGYGAYDLYDLGEFNQQGTVRTKYGTKAELERAIRSLKANGIQVYGDVVMNHKAGADFTERVQAVEVNPQNRNQEVSGTYQIEAWTGFNFPGRGNQHSSFKWRWYHFDGTDWDQSRQLDNRIYKFRGKAWDWEVDTEFGNYDYLMYADLDMDHPEVINELNRWGVWYANTLNLDGFRLDAVKHIKFSFMRDWLGHVRGQTGKNLFAVAEYWKNDLGALENYLSKTNWTMSAFDVPLHYNLYQASNSSGNYDMRNLLNGTLVQRHPSHAVTFVDNHDTQPGEALESFVQGWFKPLAYATILTREQGYPQVFYGDYYGIPSDGVPSYRQQIDPLLAARQQYAYGTQHDYLDNQDVIGWTREGDSAHAGSGLATVMSDGPGGSKTMYVGTAHAGQVFKDITGNRTDTVTINSAGNGTFPCNKGSVSIWVKQ

SEQ ID NO: 34214 - protein, 482 aa, Bacillus sp.
HDGTNGTIMQYFEWNVPNDGQHWNRLHNNAQNLKNAGITAIWIPPAWKGTSQSDTGYGAYDLYDLGEFNQKGTVRTKYGTKAELERAIRSLKANGIQVYGDVVMNHKAGADFTEQVQAVEVNPQNRNQEVSGTYQIEAWTGFNFPGRGNQHSSFKWRWYHFDGTDWDQSRDLSNRIYKFRGKAWDWEVDTEFGNYDYLMYADLDMDHPEVINELNRWGVWYANTLNLDGFRLDAVKHIKFSFMRDWLGHVRGQTGKNLFAVAEYWKNDLGALENYLSKTNWTMSAFDVPLHYNLYQASNSSGNYDMRNLLNGTLVQRHPSHAVTFVDNHDTQPGEALESFVQTWFKPLAYATILTREQGYPQVFYGDYYGIPSDGVPSYRQQIDPLLAARQQYAYGTQHDYLDNQDVIGWTREGDSAHAGSGLATVMSDGPGGSKTMYVGQAHAGQVFKDITGNRTDTVTINSAGNGTFPCNKASVSIWVKQ

SEQ ID NO: 34215 - protein, 482 aa, Bacillus sp.
HDGTNGTIMQYFEWNVPNDGQHWNRLHNNAQNLKNAGITAIWIPPAWKGTSQSDTGYGAYDLYDLGEFNQKGTVRTKYGTKAELERAIRSLKANGIQVYGDVVMNHKAGADFTERVQAVEVNPQNRNQEVSGTYQIEAWTGFNFPGRGNQHSSFKWRWYHFDGTDIDQSRQLSNRIYKFRGKAWDWEVDTEFGNYDYLMYADLDMDHPEVINELNRWGVWYANTLNLDGFRLDAVKHIKFSFMRDWLGHVRGQTGKNLFAVAEYWKNDLGALENYLSKTNWTMSAFDVPLHYNLYQASNSSGNYDMRNLLNGTLVQRHPSHAVTFVDNHDTQPGEALESFVQGWFKPLAYATILTREQGYPQVFYGDYYGIPSDGVPSYRQQIDPLLAARQQYAYGTQHDYLDNQDVIGWTREGDSAHAGSGLATVMSDGPGGSKTMYVGTAHAGQVFKDITGNRTDTVTINSAGNGTFPCNKGSVSIWVKQ

SEQ ID NO: 34216 - protein, 482 aa, Bacillus sp.
HDGTNGTIMQYFEWNVPNDGQHWNRLHNNAQNLKNAGITAIWIPPAWKGTSQSDTGYGAYDLYDLGEFNQKGTVRTKYGTKAELERAIRSLKANGIQVYGDVVMNHKAGADFTERVQAVEVNPQNRNQEVSGTYQIEAWTGFNFPGRGNQHSSFKWRWYHFDGTDWDQSRQLSNRIYKFRGKDWDWEVDTEFGNYDYLMYADLDMDHPEVINELNRWGVWYANTLNLDGFRLDAVKHIKFSFMRDWLGHVRGQTGKNLFAVAEYWKNDLGALENYLSKTNWTMSAFDVPLHYNLYQASNSSGNYDMRNLLNGTLVQRHPSHAVTFVDNHDTQPGEALESFVQGWFKPLAYATILTREQGYPQVFYGDYYGIPSDGVPSYRQQIDPLLAARQQYAYGTQHDYLDNQDVIGWTREGDSAHAGSGLATVMSDGPGGSKTMYVGTAHAGQVFKDITGNRTDTVTINSAGNGTFPCNKGSVSIWVKQ

SEQ ID NO: 34217 - protein, 482 aa, Bacillus sp.
HDGTNGTIMQYFEWNVPNDGQHWNRLHNNAQNLKNAGITAIWIPPAWKGTSQSDTGYGAYDLYDLGEFNQKGTVRTKYGTKAELERAIRSLKANGIQVYGDVVMNHKAGADFTERVQAVEVNPQNRNQEVSGTYQIEAWTGFNFPGRGNQHSSFKWRWYHFDGTDWDQSRQLSNRIYKFRGKAWDWEVDTEFGNYDYLMYADLDMDHPEVINELNRWGVWYANTLNLDGFRLDAVKHIKFSFMRDWMGHVRGQTGKNLFAVAEYWKNDLGALENYLSKTNWTMSAFDVPLHYNLYQASNSSGNYDMRNLLNGTLVQRHPSHAVTFVDNHDTQPGEALESFVQGWFKPLAYATILTREQGYPQVFYGDYYGIPSDGVPSYRQQIDPLLAARQQYAYGTQHDYLDNQDVIGWTREGDSAHAGSGLATVMSDGPGGSKTMYVGTAHAGQVFKDITGNRTDTVTINSAGNGTFPCNKGSVSIWVKQ

SEQ ID NO: 34218 - protein, 482 aa, Bacillus sp.
HDGTNGTIMQYFEWNVPNDGQHWNRLHNNAQNLKNAGITAIWIPPAWKGTSQSDTGYGAYDLYDLGEFNQKGTVRTKYGTKAELERAIRSLKANGIQVYGDVVVNHKAGADFTERVQAVEVNPQNRNQEVSGTYQIEAWTGFNFPGRGNQHSSFKWRWYHFDGTDWDQSRQLSNRIYKFRGKAWDWEVDTEFGNYDYLMYADLDMDHPEVINELNRWGVWYANTLNLDGFRLDAVKHIKFSFMRDWLGHVRGQTGKNLFAVAEYWKNDLGALENYLSKTNWTMSAFDVPLHYNLYQASNSSGNYDMRNLLNGTLVQRHPSHAVTFVDNHDTQPGEALESFVQGWFKPLAYATILTREQGYPQVFYGDYYGIPSDGVPSYRQQIDPLLAARQQYAYGTQHDYLDNQDVIGWTREGDSAHAGSGLATVMSDGPGGSKTMYVGTAHAGQVFKDITGNRTDTVTINSAGNGTFPCNKGSVSIWVKQ

SEQ ID NO: 34219 - protein, 482 aa, Bacillus sp.
HDGTNGTIMQYFEWNVPNDGQHWNRLHNNAQNLKNAGITAIWIPPAWKGTSQSDTGYGAYDLYDLGEFNQKGTVRTKYGTKAELERAIRSLKANGIQVYGDVVMNHKAGADQTEHVQAVEVNPQNRNQEVSGTYQIEAWTGFNFPGRGNQHSSFKWRWYHFDGTDWDQSRNLSNRIYKFRGKAWDWEVDTEFGNYDYLMYADLDMDHPEVINELNRWGVWYANTLNLDGFRLDAVKHIKFSFMRDWLGHVRGQTGKNLFAVAEYWKNDLGALENYLSKTNWTMSAFDVPLHYNLYQASNSSGNYDMRNLLNGTLVQRHPSHAVTFVDNHDTQPGEALESFVQGWFKPLAYATILTREQGYPQVFYGDYYGIPSDGVPSYRQQIDPLLAARQQYAYGTQHDYLDNQDVIGWTREGDSAHAGSGLATVMSDGPGGSKTMYVGTAHAGQVFKDITGNRTDTVTINSAGNGTFPCNKGSVSIWVKQ

SEQ ID NO: 34220 - protein, 482 aa, Bacillus sp.
HDGTNGTIMQYFEWNVPNDGQHWNRLHNNAQNLKNAGITAIWIPPAWKGTSQSDTGYGAYDLYDLGEFNQQGTVRTKYGTKAELERAIRSLKANGIQVYGDVVMNHKAGADFTERVQAVEVNPQNRNQEVSGTYQIEAWTGFNFPGRGNQHSSFKWRWYHFDGTDWDQSRQLKNRIYKFRGKAWDWEVDTEFGNYDYLMYADLDMDHPEVINELNRWGVWYANTLNLDGFRLDAVKHIKFSFMRDWLGHVRGQTGKNLFAVAEYWKNDLGALENYLSKTNWTMSAFDVPLHYNLYQASNSSGNYDMRNLLNGTLVQRHPSHAVTFVDNHDTQPGEALESFVQGWFKPLAYATILTREQGYPQVFYGDYYGIPSDGVPSYRQQIDPLLAARQQYAYGTQHDYLDNQDVIGWTREGDSAHAGSGLATVMSDGPGGSKTMYVGTAHAGQVFKDITGNRTDTVTINSAGNGTFPCNKGSVSIWVKQ

SEQ ID NO: 34221 - protein, 482 aa, Bacillus sp.
HDGTNGTIMQYFEWNVPNDGQHWNRLHNNAQNLKNAGITAIWIPPAWKGTSQSDTGYGAYDLYDLGEFNQRGTVRTKYGTKAELERAIRSLKANGIQVYGDVVMNHKAGADFTERVQAVEVNPQNRNQEVSGEYQIEAWTGFNFPGRGNQHSSFKWRWYHFDGTDWDQSRQLSNRIYKFRGKAWDWEVDTEFGNYDYLMYADLDMDHPEVINELNRWGVWYANTLNLDGFRLDAVKHIKFSFMRDWLGHVRGQTGKNLFAVAEYWKNDLGALENYLSKTNWTMSAFDVPLHYNLYQASNSSGNYDMRNLLNGTLVQRHPSHAVTFVDNHDTQPGEALESFVQGWFKPLAYATILTREQGYPQVFYGDYYGIPSDGVPSYRQQIDPLLAARQQYAYGTQHDYLDNQDVIGWTREGDSAHAGSGLATVMSDGPGGSKTMYVGTAHAGQVFKDITGNRTDTVTINSAGNGTFPCNKGSVSIWVKQ

SEQ ID NO: 34222 - protein, 482 aa, Bacillus sp.
HDGTNGTIMQYFEWNVPNDGQHWNRLHNNAQNLKNAGITAIWIPPAWKGTSQSDTGYGAYDLYDLGEFNQSGTVRTKYGTKAELERAIRSLKANGIQVYGDVVMNHKAGADFTERVQAVEVNPQNRNQEVSGTYQIEAWTGFNFPGRGNQHSSFKWRWYHFDGTDWDQSRQLHNRIYKFRGKAWDWEVDTEFGNYDYLMYADLDMDHPEVINELNRWGVWYANTLNLDGFRLDAVKHIKFSFMRDWLGHVRGQTGKNLFAVAEYWKNDLGALENYLSKTNWTMSAFDVPLHYNLYQASNSSGNYDMRNLLNGTLVQRHPSHAVTFVDNHDTQPGEALESFVQGWFKPLAYATILTREQGYPQVFYGDYYGIPSDGVPSYRQQIDPLLAARQQYAYGTQHDYLDNQDVIGWTREGDSAHAGSGLATVMSDGPGGSKTMYVGTAHAGQVFKDITGNRTDTVTINSAGNGTFPCNKGSVSIWVKQ

SEQ ID NO: 34223 - protein, 482 aa, Bacillus sp.
HDGTNGTIMQYFEWNVPNDGQHWNRLHNNAQNLKNAGITAIWIPPAWKGTSQSDTGYGAYDLYDLGEFNQKGTVRTKYGTKAELERAIRSLKANGIQVYGDVVMNHKAGADFTERVQAVEVNPQNRNQEVSGTYQIEAWTGFNFPGRGNQHSSFKWRWYHFDGTDWDQSRQLSNRIYKFRGKAWDWEVDTEFGNYDYLMYADLDMDHPEVINELNRWGVWYANTLNLDGFRLDAVKHIKFSFMRDWFGHVRGQTGKNLFAVAEYWKNDLGALENYLSKTNWTMSAFDVPLHYNLYQASNSSGNYDMRNLLNGTLVQRHPSHAVTFVDNHDTQPGEALESFVQGWFKPLAYATILTREQGYPQVFYGDYYGIPSDGVPSYRQQIDPLLAARQQYAYGTQHDYLDNQDVIGWTREGDSAHAGSGLATVMSDGPGGSKTMYVGTAHAGQVFKDITGNRTDTVTINSAGNGTFPCNKGSVSIWVKQ

SEQ ID NO: 34224 - protein, 482 aa, Bacillus sp.
HDGTNGTIMQYFEWNVPNDGQHWNRLHNNAQNLKNAGITAIWIPPAWKGTSQSDTGYGAYDLYDLGEFNQKGTVRTKYGTKAELERAIRSLKANGIQVYGDVVMNHKAGADFTERVQAVEVNPQNRNQEVSGTYQIEAWTGFNFPGRGNQHSSFKWRWYHFDGTDWDQSRQLSGRIYKFRGKAWDWEVDTEFGNYDYLMYADLDMDHPEVINELNRWGVWYANTLNLDGFRLDAVKHIKFSFMRDWLGHVRGQTGKNLFAVAEYWKNDLGALENYLSKTNWTMSAFDVPLHYNLYQASNSSGNYDMRNLLNGTLVQRHPSHAVTFVDNHDTQPGEALESFVQGWFKPLAYATILTREQGYPQVFYGDYYGIPSDGVPSYRQQIDPLLAARQQYAYGTQHDYLDNQDVIGWTREGDSAHAGSGLATVMSDGPGGSKTMYVGTAHAGQVFKDITGNRTDTVTINSAGNGTFPCNKGSVSIWVKQ

SEQ ID NO: 34225 - protein, 482 aa, Bacillus sp.
HDGTNGTIMQYFEWNVPNDGQHWNRLHNNAQNLKNAGITAIWIPPAWKGTSQSDTGYGAYDLYDLGEFNQKGTVRTKYGTKAELERAIRSLKANGIQVYGDVVMNHKAGADFTERVQAVEVNPQNRNQEVSGTYQIEAWTGFNFPGRGNQHSSFKWRWYHFDGTDWDQSRQLSNRIYKFRGKAWDWEVDTEFGNYDYLMYADLDMDHPEVINEHNRWGVWYANTLNLDGFRLDAVKHIKFSFMRDWLGHVRGQTGKNLFAVAEYWKNDLGALENYLSKTNWTMSAFDVPLHYNLYQASNSSGNYDMRNLLNGTLVQRHPSHAVTFVDNHDTQPGEALESFVQGWFKPLAYATILTREQGYPQVFYGDYYGIPSDGVPSYRQQIDPLLAARQQYAYGTQHDYLDNQDVIGWTREGDSAHAGSGLATVMSDGPGGSKTMYVGTAHAGQVFKDITGNRTDTVTINSAGNGTFPCNKGSVSIWVKQ

SEQ ID NO: 34226 - protein, 482 aa, Bacillus sp.
HDGTNGTIMQYFEWNVPNDGQHWNRLHNNAQNLKNAGITAIWIPPAWKGTSQSDTGYGAYDLYDLGEFNQKGTVRTKYGTKAELERAIRSLKANGIQVYGDVVMNHKAGADFTERVQAVEVNPQNRNQEVSGTYQIEAWTGFNFPGRGNQHSSFKWRWYHFDGTDWDQSRQLSNRIYKFRGKAWDWEVDTEFGNYDYLMYADLDMDHPEVINELNRWGVWYANTLNLDGFRLDAVKHIKFQFMRDWLGHVRGQTGKNLFAVAEYWKNDLGALENYLSKTNWTMSAFDVPLHYNLYQASNSSGNYDMRNLLNGTLVQRHPSHAVTFVDNHDTQPGEALESFVQGWFKPLAYATILTREQGYPQVFYGDYYGIPSDGVPSYRQQIDPLLAARQQYAYGTQHDYLDNQDVIGWTREGDSAHAGSGLATVMSDGPGGSKTMYVGTAHAGQVFKDITGNRTDTVTINSAGNGTFPCNKGSVSIWVKQ

SEQ ID NO: 34227 - protein, 482 aa, Bacillus sp.
HDGTNGTIMQYFEWNVPNDGQHWNRLHNNAQNLKNAGITAIWIPPAWKGTSQSDTGYGAYDLYDLGEFNQKGTVRTKYGTKAELERAIRSLKANGIQVYGDVVMNHKAGADFTERVQAVEVNPQNRNQEVSGTYQIEAWTGFNFPGRGNQHSSFKWRWYHFDGTDWDQSRQLSNRIYKFRGKAWDWEVDTEFGNYDYLMYADLDMDHPEVINELNRWGVWYANTLNLDGFRLDAVKHIKFSFMRDWLGHVRGQTGKNLFAVAEYWKNDLGALENYLSKTNWTMSAFDVPLHYNLYQASNSSGNYDMRNLLNGTLVQRHPSHAVTFVDNHDTQPGEALESFVQGWFKPLAYATILTREQGYPQVFYGDYYGIPSDGVPSYRQQIDPLLAARQQYAYGTQHDYLDNQDVIGWTREGDSAHAGSGLATVMSDGPGGSKTMYVGTAHAGQVFKDITGNRTDTVTINSAGNGTFPCNKQSVSIWVKQ

SEQ ID NO: 34228 - protein, 482 aa, Bacillus sp.
HDGTNGTIMQYFEWNVPNDGQHWNRLHNNAQNLKNAGITAIWIPPAWKGTSQSDTGYGAYDLYDLGEFNQRGTVRTKYGTKAELERAIRSLKANGIQVYGDVVMNHKAGADFTERVQAVEVNPQNRNQEVSGEYQIEAWTGFNFPGRGNQHSSFKWRWYHFDGTDWDQSRQLSNRIYKFRGKAWDWEVDTEFGNYDYLMYADLDMDHPEVINELNRWGVWYANTLNLDGFRLDAVKHIKFSFMRDWLGHVRAQTGKNLFAVAEYWKNDLGALENYLSKTNWTMSAFDVPLHYNLYQASNSSGNYDMRNLLNGTLVQRHPSHAVTFVDNHDTQPGEALESFVQGWFKPLAYATILTREQGYPQVFYGDYYGIPSDGVPSYRQQIDPLLAARQQYAYGTQHDYLDNQDVIGWTREGDSAHAGSGLATVMSDGPGGSKTMYVGTAHAGQVFKDITGNRTDTVTINSAGNGTFPCNKGSVSIWVKQ

SEQ ID NO: 34229 - protein, 482 aa, Bacillus sp.
HDGTNGTIMQYFEWNVPNDGQHWNRLHNNAQNLKNAGITAIWIPPAWKGTSQSDTGYGAYDLYDLGEFNQKGTVRTKYGTKAELERAIRSLKANGIQVYGDVVMNHKAGADFTERVQAVEVNPQNRNQEVSGTYQIEAWTGFNFPGRGNQHSSFKWRWYHFDGTDWDQSRQLSNRIYKFRGKAWDWEVDTEFGNYDYLMYADLDMDHPEVINELNRWGVWYANTLNLDGFRLDAVKHIKFSFMRDWLGHVRGQTGKNLFAVAEYWKNDLGALENYLSKTNWTMSAFDVPLHYNLYQASNSSGNYDMRNLLNGTLVQRHPSHAVTFVDNHDTQPGEALESFVQGWFKPLAYATILTREQGYPQVFYGDYYGIPSDGVPSYRQQIDPLLAARQQYAYGTQHDYLDNQDVIGWTREGDSAHAGSGLATVMSDGPGGSKTMYVGTAHAGTVFKDITGNRTDTVTINSAGNGTFPCNKGSVSIWVKQ

SEQ ID NO: 34230 - protein, 482 aa, Bacillus sp.
HDGTNGTIMQYFEWNVPNDGQHWNRLHNNAQNLKNAGITAIWIPPAWKGTSQSDTGYGAYDLYDLGEFNQRGTVRTKYGTKAELERAIRSLKANGIQVYGDVVMNHKAGADFTERVRAVEVNPQNRNQEVSGTYQIEAWTGFNFPGRGNQHSSFKWRWYHFDGTDWDQSRQLSNRIYKFRTKAWDWEVDTEFGNYDYLMYADLDMDHPEVINELNRWGVWYANTLNLDGFRLDAVKHIKFSFMRDWLGHVRGQTGKNLFAVAEYWKNDLGALENYLSKTNWTMSAFDVPLHYNLYQASNSSGNYDMRNLLNGTLVQRHPSHAVTFVDNHDTQPGEALESFVQGWFKPLAYATILTREQGYPQVFYGDYYGIPSHGVPSYRQQIDPLLAARQQYAYGTQHDYLDNQDVIGWTREGDSAHAGSGLATVMSDGPGGSKTMYVGTAHAGQVFKDITGNRTDTVTINSAGNGTFPCNKGSVSIWVKQ

SEQ ID NO: 34231 - protein, 482 aa, Bacillus sp.
HDGTNGTIMQYFEWNVPNDGQHWNRLHNNAQNLKNAGITAIWIPPAWKGTSQSDTGYGAYDLYDLGEFNQKGTVRTKYGTKAELERAIRSLKANGIQVYGDVVMNHKAGADFTERVQAVEVNPQNRNQEVSGTYQIEAWTGFNFPGRGNQHSSFKWRWYHFDGTDWDQSRDATNRIYKFRGKAWDWEVDTEFGNYDYLMYADLDMDHPEVINELNRWGVWYANTLNLDGFRLDAVKHIKFSFMRDWLGHVRGQTGKNLFAVAEYWKNDLGALENYLSKTNWTMSAFDVPLHYNLYQASNSSGNYDMRNLLNGTLVQRHPSHAVTFVDNHDTQPGEALESFVQGWFKPLAYATILTREQGYPQVFYGDYYGIPSDGVPSYRQQIDPLLAARQQYAYGTQHDYLDNQDVIGWTREGDSAHAGSGLATVMSDGPGGSKTMYVGTAHAGQVFKDITGNRTDTVTINSAGNGTFPCNKGSVSIWVKQ

SEQ ID NO: 34232 - protein, 482 aa, Bacillus sp.
HDGTNGTIMHYFEWNVPNDGQHWNRLHNNAQNLKNAGITAIWIPPAWKGTSQSDTGYGAYDLYDLGEFNQKGTVRTKYGTKAELERAIRSLKANGIQVYGDVVMNHKAGADFTERVRAVEVNPQNRNQEVSGEYQIEAWTGFNFPGRGNQHSSFKWRWYHFDGTDWDQSRQLSNRIYKFRTKAWDWEVDTEFGNYDYLMYADLDMDHPEVINELNRWGVWYANTLNLDGFRLDAVKHIKFSFMRDWLGHVRGQTGKNLFAVAEYWKNDLGALENYLSKTNWTMSAFDVPLHYNLYQASNSSGNYDMRNLLNGTLVQRHPSHAVTFVDNHDTQPGEALESFVQGWFKPLAYATILTREQGYPQVFYGDYYGIPSHGVPSYRQQIDPLLAARQQYAYGTQHDYLDNQDVIGWTREGDSAHAGSGLATVMSDGPGGSKTMYVGTAHAGQVFKDITGNRTDTVTINSAGNGTFPCNKGSVSIWVKQ

SEQ ID NO: 34233 - protein, 482 aa, Bacillus sp.
HDGTNGTIMQYFEWNVPNDGQHWNRLHNNAQNLKNAGITAIWIPPAWKGTSQSDTGYGAYDLYDLGEFNQKGTVRTKYGTKAELERAIRSLKANGIQVYGDVVMNHKAGADQTEHVQAVEVNPQNRNQEVSGTYQIEAWTGFNFPGRGNQHSSFKWRWYHFDGGDWDQSRMLSNRIYKFRGKAWDWEVDTEFGNYDYLMYADLDMDHPEVINELNRWGVWYANTLNLDGFRLDAVKHIKFSFMRDWLGHVRGQTGKNLFAVAEYWKNDLGALENYLSKTNWTMSAFDVPLHYNLYQASNSSGNYDMRNLLNGTLVQRHPSHAVTFVDNHDTQPGEALESFVQGWFKPLAYATILTREQGYPQVFYGDYYGIPSDGVPSYRQQIDPLLAARQPYAYGTQHDYLDNQDVIGWTREGDSAHAGSGLATVMSDGPGGSKTMYVGTAHAGQVFKDITGNRTDTVTINSAGNGTFPCNKGSVSIWVKQ

SEQ ID NO: 34234 - protein, 482 aa, Bacillus sp.
HDGTNGTIMQYFEWNVPNDGQHWNRLHNNAQNLKNAGITAIWIPPAWKGTSQSDTGYGAYDLYDLGEFNQQGTVRTKYGTKAELERAIRSLKANGIQVYGDVVMNHKAGADFTERVQAVEVNPQNRNQEVSGTYQIEAWTGFNFPGRGNQHSSFKWRWYHFDGTDWDQSRQLGNRIYKFRGKAWDWEVDTEFGNYDYLMYADLDMDHPEVINELNRWGVWYANTLNLDGFRLDAVKHIKFSFMRDWLGHVRGQTGKNLFAVAEYWKNDLGALENYLSKTNWTMSAFDVPLHYNLYQASNSSGNYDMRNLLNGTLVQRHPSHAVTFVDNHDTQPGEALESFVQGWFKPLAYATILTREQGYPQVFYGDYYGIPSDGVPSYRQQIDPLLAARQQYAYGTQHDYLDNQDVIGWTREGDSAHAGSGLATVMSDGPGGSKTMYVGTAHAGQVFKDITGNRTDTVTINSAGNGTFPCNKGSVSIWVKQ

SEQ ID NO: 34235 - protein, 482 aa, Bacillus sp.
HDGTNGTIMQYFEWNVPNDGQHWNRLHNNAQNLKNAGITAIWIPPAWKGTSQSDTGYGAYDLYDLGEFNQKGTVRTKYGTKAELERAIRSLKANGIQVYGDVVMNHKAGADFTERVQAVEVNPQNRNQEVSGTYQIEAWTGFNFPGRGNQHSSFKWRWYHFDGTDWDQSRQLSNRIYKFRGKAWDWEVDTEFGNYDYLMYADLDMDHPEVINELNRWGVWYANTLNLDGFRLDAVKHIKFSFMRDWLGHVRGQTGKNLFGVAEYWKNDLGALENYLSKTNWTFSAFDVPLHYNLYQASNSSGNYDMRNLLNGTLVQRHPSHAVTFVDNHDTQPGEALESFVQGWFKPLAYATILTREQGYPQVFYGDYYGIPSDGVPSYRQQIDPLLAARQQYAYGTQHDYLDNQDVIGWTREGDSAHAGSGLATVMSDGPGGSKTMYVGTAHAGQVFKDITGNRTDTVTINSAGNGTFPCNKGSVSIWVKQ

SEQ ID NO: 34236 - protein, 482 aa, Bacillus sp.
HDGTNGTIMQYFEWNVPNDGQHWNRLHNNAQNLKNAGITAIWIPPAWKGTSQSDTGYGAYDLYDLGEFNQKGTVRTKYGTKAELERAIRSLKANGIQVYGDVVFNHKAGADFTERVQAVEVNPQNRNQEVSGTYQIEAWTGFNFPGRGNQHSSFKWRWYHFDGTDWDQSRQLSNRIYKFRGKAWDWEVDTEFGNYDYLMYADLDMDHPEVINELNRWGVWYANTLNLDGFRLDAVKHIKFSFMRDWLGHVRGQTGKNLFAVAEYWKNDLGALENYLSKTNWTMSAFDVPLHYNLYQASNSSGNYDMRNLLNGTLVQAHPNHAVTFVDNHDTQPGEALESFVQGWFKPLAYATILTREQGYPQVFYGDYYGIPSDGVPSYRQQIDPLLAARQQYAYGTQHDYLDNQDVIGWTREGDSAHAGSGLATVMSDGPGGSKTMYVGTAHAGQVFKDITGNRTDTVTINSAGNGTFPCNKGSVSIWVKQ

SEQ ID NO: 34237 - protein, 482 aa, Bacillus sp.
HDGTNGTIMQYFEWNVPNDGQHWNRLHNNAQNLKNAGITAIWIPPAWKGTSQSDTGYGAYDLYDLGEFNQRGTVRTKYGTKAELERAIRSLKANGIQVYGDVVMNHKAGADFTERVQAVEVNPQNRNQEVSGTYQIEAWTGFNFPGRGNQHSSFKWRWYHFDGTDWDQSRQLSNRIYKFRTKAWDWEVDTEFGNYDYLMYADLDMDHPEVINELNRWGVWYANTLNLDGFRLDAVKHIKFSFMRDWLGHVRGQTGKNLFAVAEYWKNDLGALENYLSKTNWTMSAFDVPLHYNLYQASNSSGNYDMRNLLNGTLVQRHPSHAVTFVDNHDTQPGEALESFVQGWFKPLAYATILTREQGYPQVFYGDYYGIPSHGVPSYRQQIDPLLAARQQYAYGTQHDYLDNQDVIGWTREGDSAHAGSGLATVMSDGPGGSKTMYVGTAHAGQVFKDITGNRTDTVTINSAGNGTFPCNKGSVSIWVKQ

SEQ ID NO: 34238 - protein, 482 aa, Bacillus sp.
HDGTNGTIMQYFEWNVPNDGQHWNRLHNNAQNLKNAGITAIWIPPAWKGTSQSDTGYGAYDLYDLGEFNQRGTVRTKYGTKAELERAIRSLKANGIQVYGDVVMNHKAGADQTERVQAVEVNPQNRNQEVSGEYQIEAWTGFNFPGRGNQHSSFKWRWYHFDGTDWDQSRQLSNRIYKFRGKAWDWEVDTEFGNYDYLMYADLDMDHPEVINELNRWGVWYANTLNLDGFRLDAVKHIKFSFMRDWLGHVRAQTGKNLFAVAEYWKNDLGALENYLSKTNWTMSAFDVPLHYNLYQASNSSGNYDMRNLLNGTLVQRHPSHAVTFVDNHDTQPGEALESFVQGWFKPLAYATILTREQGYPQVFYGDYYGIPSDGVPSYRQQIDPLLAARQQYAYGTQHDYLDNQDVIGWTREGDSAHAGSGLATVMSDGPGGSKTMYVGTAHAGQVFKDITGNRTDTVTINSAGNGTFRCNKGSVSIWVKQ

SEQ ID NO: 34239 - protein, 482 aa, Bacillus sp.
HDGTNGTIMQYFEWNVPNDGQHWNRLHNNAQNLKNHGITAIWIPPAWKGTSQSDTGYGVYDLYDLGEFNQKGTVRTKYGTKAELERAIRSLKANGIQVYGDVVMNHKAGADFTEQVQAVEVNPQNRNQEVSGTYQIEAWTGFNFPGRGNQHSSFKWRWYHFDGGDWDQSRQLSNRIYKFRGKAWDWEVDTEFGNYDYLMYADLDMDHPEVINELNRWGVWYANTLNLDGFRLDAVKHIKFSFMRDWLGHVRGQTGKNLFAVAEYWKNDLGALENYLSKTNWTMSAFDVPLHYNLYQASNSSGNYDMRNLLNGTLVQRHPSHAVTFVDNHDTQPGEALESFVQGWFKPLAYATILTREQGYPQVFYGDYYGIPSDGVPSYRQQIDPLLAARQQYAYGTQHDYLDNQDVIGWTREGDSAHAGSGLATVMSDGPGGSKTMYVGTAHAGQVFKDITGNRTDTVTINSAGNGTFPCNKGSVSIWVKQ

SEQ ID NO: 34240 - protein, 482 aa, Bacillus sp.
HDGTNGTIMQYFEWNVPNDGQHWNRLHNNAQNLKNAGITAIWIPPAWKGTSQSDTGYGAYDLYDLGEFNQKGTVRTKYGTKAELERAIRSLKANGIQVYGDVVMNHKAGADFTERVQAVEVNPQNRNQEVSGTYQIEAWTGFNFPGRGNQHSSFKWRWYHFDGTDWDQSRKLSNRIYKFRGKAWDWEVDTEFGNYDYLMYADLDMDHPEVINELNRWGVWYANTLNLDGFRLDAVKHIKFSFMRDWLGHVRGQTGKNLFAVAEYWKNDLGALENYLSKTNWTMSAFDVPLHYNLYQASNSSGNYDMRNLLNGTLVQRHPSHAVTFVDNHDTQPGEALESFVQGWFKPLAYATILTREQGYPQVFYGDYYGIPSDGVPSYRQQIDPLLAARQQYAYGTQHDYLDNQDVIGWTREGDSAHAGSGLATVMSDGPGGSKTMYVGTAHAGQVFKDITGNRTDTVTINSAGNGTFPCNKGSVSIWVKQ

SEQ ID NO: 34241 - protein, 482 aa, Bacillus sp.
HDGTNGTIMQYFEWNVPNDGQHWNRLHNNAQNLKNAGITAIWIPPAWKGTSQSDTGYGAYDLYDLGEFNQKGTVRTKYGTKAELERAIRSLKANGIQVYGDVVMNHKAGADFTERVQAVEVNPQNRNQEVSGTYQIEAWTGFNFPGRGNQHSSFKWRWYHFDGTDWDQSRNLSNRIYKFRGKAWDWEVDTEFGNYDYLMYADLDMDHPEVINELNRWGVWYANTLNLDGFRLDAVKHIKFSFMRDWLGHVRGQTGKNLFAIAEYWKNDLGALENYLSKTNWTMSAFDVPLHYNLYQASNSSGNYDMRNLLNGTLVQRHPSHAVTFVDNHDTQPGEALESFVQGWFKPLAYATILTREQGYPQVFYGDYYGIPSDGVPSYRQQIDPLLAARQQYAYGTQHDYLDNQDVIGWTREGDSAHAGSGLATVMSDGPGGSKTMYVGTAHAGQVFKDITGNRTDTVTINSAGNGTFPVNKGSVSIWVKQ

SEQ ID NO: 34242 - protein, 482 aa, Bacillus sp.
HDGTNGTIMQYFEWNVPNDGQHWNRLHNNAQNLKNAGITAIWIPPAWKGTSQSDTGYGAYDLYDLGEFNQKGTVRTKYGTKAELERAIRSLKANGIQVYGDVVINHKAGADFTERVQAVEVNPQNRNQEVSGTYQIEAWTGFNFPGRGNQHSSFKWRWYHFDGTDWDQSRQLSNRIYKFRGKAWDWEVDTEFGNYDYLMYADLDMDHPEVINELNRWGVWYANTLNLDGFRLDAVKHIKFSFMRDWLGHVRGQTGKNLFAVAEYWKNDLGALENYLSKTNWTMSAFDVPLHYNLYQASNSSGNYDMRNLLNGTLVQRHPSHAVTFVDNHDTQPGEALESFVQGWFKPLAYATILTREQGYPQVFYGDYYGIPSDGVPSYRQQIDPLLAARQQYAYGTQHDYLDNQDVIGWTREGDSAHAGSGLATVMSDGPGGSKTMYVGTAHAGQVFKDITGNRTDTVTINSAGNGTFPCNKGSVSIWVKQ

SEQ ID NO: 34243 - protein, 482 aa, Bacillus sp.
HDGTNGTIMQYFEWNVPNDGQHWNRLHNNAQNLKNAGITAIWIPPAWKGTSQSDTGYGAYDLYDLGEFNQKGTVRTKYGTKAELERAIRSLKANGIQVYGDVVMNHKAGADFTERVQAVEVNPQNRNQEVSGTYQIEAWTGFNFPGRGNQHSSFKWRWYHFDGTDWDQSRQLSNRIYKFRGKAWDWEVDTEFGNYDYLMYADLDMDHPEVINELNRWGVWYANTLNLDGFRLDAVKHIKFSFMRDWLGHVRGQTGKNLFAIAEYWKNDLGALENYLSKTNWTMSAFDVPLHYNLYQASNSSGNYDMRNLLNGTLVQRHPSHAVTFVDNHDTQPGEALESFVQGWFKPLAYATILTREQGYPQVFYGDYYGIPSDGVPSYRQQIDPLLAARQQYAYGTQHDYLDNQDVIGWTREGDSAHAHSGLATVMSDGPGGSKTMYVGTAHAGQVFKDITGNRTDTVTINSAGNGTFPCNKGSVSIWVKQ

SEQ ID NO: 34244 - protein, 482 aa, Bacillus sp.
HDGTNGTIMQYFEWNVPNDGQHWNRLHNNAQNLKNAGITAIWIPPAWKGTSQSDTGYGAYDLYDLGEFNQHGTVRTKYGTKAELERAIRSLKANGIQVYGDVVMNHKAGADFTERVQAVEVNPQNRNQEVSGTYQIEAWTGFNFPGRGNQHSSFKWRWYHFDGTDWDQSRQLSNRIYKFRGKAWDWEVDTEFGNYDYLMYADLDMDHPEVINELNRWGVWYANTLNLDGFRLDAVKHIKFSFMRDWLGHVRGQTGKNLFAVAEYWKNDLGALENYLSKTNWTMSAFDVPLHYNLYQASNSSGNYDMRNLLNGTLVQRHPSHAVTFVDNHDTQPGEALESFVQGWFKPLAYATILTREQGYPQVFYGDYYGIPSDGVPSYRQQIDPLLAARQQYAYGTQHDYLDNQDVIGWTREGDSAHAGSGLATVMSDGPGGSKTMYVGTAHAGQVFKDITGNRTDTVTINSAGNGTFPCNKGSVSIWVKQ

SEQ ID NO: 34245 - protein, 482 aa, Bacillus sp.
HDGTNGTIMQYFEWNVPNDGQHWNRLHNNAQNLKNAGITAIWIPPAWKGTSQSDTGYGAYDLYDLGEFNQKGTVRTKYGTKAELERAIRSLKANGIQVYGDVVMNHKAGADFTERVQAVEVNPQNRNQEVSGTYQIEAWTGFNFPGRGNQHSSFKWRWYHFDGTDWDQSREMHNRIYKFRGKAWDWEVDTEFGNYDYLMYADLDMDHPEVINELNRWGVWYANTLNLDGFRLDAVKHIKFSFMRDWLGHVRGQTGKNLFAVAEYWKNDLGALENYLSKTNWTMSAFDVPLHYNLYQASNSSGNYDMRNLLNGTLVQRHPSHAVTFVDNHDTQPGEALESFVQGWFKPLAYATILTREQGYPQVFYGDYYGIPSDGVPSYRQQIDPLLAARQQYAYGTQHDYLDNQDVIGWTREGDSAHAGSGLATVMSDGPGGSKTMYVGTAHAGQVFKDITGNRTDTVTINSAGNGTFPCNKGSVSIWVKQ

SEQ ID NO: 34246 - protein, 482 aa, Bacillus sp.
HDGTNGTIMQYFEWNVPNDGQHWNRLHNNAQNLKNAGITAIWIPPAWKGTSQSDTGYGVYDLYDLGEFNQKGTVRTKYGTKAELERAIRSLKANGIQVYGDVVMNHKAGADFTEQVQAVEVNPQNRNQEVSGTYQIEAWTGFNFPGRGNQHSSFKWRWYHFDGTDWDQSRQLSNRIYKFRGKAWDWEVDTEFGNYDYLMYADLDMDHPEVINELNRWGVWYANTLNLDGFRLDAVKHIKFSFMRDWLGHVRGQTGKNLFAVAEYWKNDLGALENYLSKTNWTMSAFDVPLHYNLYQASNSSGNYDMRNLLNGTLVQRHPSHAVTFVDNHDTQPGEALESFVQGWFKPLAYATILTREQGYPQVFYGDYYGIPSDGVPSYRQQIDPLLAARQQYAYGTQHDYLDNQDVIGWTREGDSAHAGSGLATVMSDGPGGSKTMYVGTAHAGQVFKDITGNRTDTVTINSAGNGTFPCNKGSVSIWVKQ

SEQ ID NO: 34247 - protein, 482 aa, Bacillus sp.
HDGTNGTIMQYFEWNVPNDGQHWNRLHNNAQNLKNAGITAIWIPPAWKGTSQSDTGYGAYDLYDLGEFNQRGTVRTKYGTKAELERAIRSLKANGIQVYGDVVMNHKAGADFTERVRAVEVNPQNRNQEVSGEYQIEAWTGFNFPGRGNQHSSFKWRWYHFDGTDWDQSRQLSNRIYKFRGKAWDWEVDTEFGNYDYLMYADLDMDHPEVINELNRWGVWYANTLNLDGFRLDAVKHIKFSFMRDWLGHVRAQTGKNLFAVAEYWKNDLGALENYLSKTNWTMSAFDVPLHYNLYQASNSSGNYDMRNLLNGTLVQRHPSHAVTFVDNHDTQPGEALESFVQGWFKPLAYATILTREQGYPQVFYGDYYGIPSDGVPSYRQQIDPLLAARQQYAYGTQHDYLDNQDVIGWTREGDSAHAGSGLATVMSDGPGGSKTMYVGTAHAGQVFKDITGNRTDTVTINSAGNGTFPCNKGSVSIWVKQ

SEQ ID NO: 34248 - protein, 482 aa, Bacillus sp.
HDGTNGTIMQYFEWNVPNDGQHWNRLHNNAQNLKNAGITAIWIPPAWKGTSQSDTGYGAYDLYDLGEFNQKGTVRTKYGTKAELERAIRSLKANGIQVYGDVVMNHKAGADFTERVQAVEVNPQNRNQEVSGTYQIEAWTGFNFPGRGNQHSSFKWRWYHFDGTDWDQSRQLSNRIYKFRGKAWDWEVDTEFGNYDYLMYADLDMDHPEVINELNRWGVWYANTLNLDGFRLDAVKHIKFSFMRDWLGHVRGQTGKNLFAVGEYWKNDLGALENYLSKTNWTMSAFDVPLHYNLYQASNSSGNYDMRNLLNGTLVQRHPSHAVTFVDNHDTQPGEALESFVQGWFKPLAYATILTREQGYPQVFYGDYYGIPSDGVPSYRQQIDPLLAARQQYAYGTQHDYLDNQDVIGWTREGDSAHAGSGLATVMSDGPGGSKTMYVGQAHAGQVFKDITGNRTDTVTINSAGNGTFPCNKASVSIWVKQ

SEQ ID NO: 34249 - protein, 482 aa, Bacillus sp.
HDGTNGTIMQYFEWNVPNDGQHWNRLHNNAQNLKNAGITAIWIPPAWKGTSQSDTGYGAYDLYDLGEFNQEGTVRTKYGTKAELERAIRSLKANGIQVYGDVVMNHKAGADFTERVQAVEVNPQNRNQEVSGTYQIEAWTGFNFPGRGNQHSSFKWRWYHFDGTDWDQSRQLSNRIYKFRGKAWDWEVDTEFGNYDYLMYADLDMDHPEVINELNRWGVWYANTLNLDGFRLDAVKHIKFSFMRDWLGHVRGQTGKNLFAVAEYWKNDLGALENYLSKTNWTMSAFDVPLHYNLYQASNSSGNYDMRNLLNGTLVQRHPSHAVTFVDNHDTQPGEALESFVQGWFKPLAYATILTREQGYPQVFYGDYYGIPSDGVPSYRQQIDPLLAARQQYAYGTQHDYLDNQDVIGWTREGDSAHAGSGLATVMSDGPGGSKTMYVGTAHAGQVFKDITGNRTDTVTINSAGNGTFPCNKGSVSIWVKQ

SEQ ID NO: 34250 - protein, 482 aa, Bacillus sp.
HDGTNGTIMQYFEWNVPNDGQHWNRLHNNAQNLKNAGITAIWIPPAWKGTSQSDTGYGAYDLYDLGEFNQKGTVRTKYGTKAELERAIRSLKANGIQVYGDVVMNHKAGADFTERVQAVEVNPQNRNQEVSGTYQIEAWTGFNFPGRGNQHSSFKWRWYHFDGTDWDQSRQLSNRIYKFRGKAWDWEVDTEFGNYDYLMYADLDMDHPEVINELNRWGVWYANTLNLDGFRLDAVKHIKFSFMRDWLGHVRGQTGKNLFAVAEYWKNDLGALENYLSKTNWTMSAFDVPLHYNLYQASNSSGNYDMRNLLNGTLVQRHPSHAVTFVDNHDTQPGEALESFVQGWFKPLAYATILTREQGYPQVFYGDYYGIPSDGVPSYRQQIDPLLAARQQYAYGTQRDYLDNQDVIGWTREGDSAHAGSGLATVMSDGPGGSKTMYVGTAHAGQVFKDITGNRTDTVTINSAGNGTFPCNKGSVSIWVKQ

SEQ ID NO: 34251 - protein, 482 aa, Bacillus sp.
HDGTNGTIMQYFEWNVPNDGQHWNRLHNNAQNLKNAGITAIWIPPAWKGTSQSDTGYGAYDLYDLGEFNQKGTVRTKYGTKAELERAIRSLKANGIQVYGDVVMNHKAGADFTERVQAVEVNPQNRNQEVSGTYQIEAWTGFNFPGRGNQHSSFKWRWYHFDGTDWDQSRGLSNRIYKFRGKAWDWEVDTEFGNYDYLMYADLDMDHPEVINELNRWGVWYANTLNLDGFRLDAVKHIKFSFMRDWLGHVRGQTGKNLFAVAEYWKNDLGALENYLSKTNWTMSAFDVPLHYNLYQASNSSGNYDMRNLLNGTLVQRHPSHAVTFVDNHDTQPGEALESFVQGWFKPLAYATILTREQGYPQVFYGDYYGIPSDGVPSYRQQIDPLLAARQQYAYGTQHDYLDNQDVIGWTREGDSAHAGSGLATVMSDGPGGSKTMYVGTAHAGQVFKDITGNRTDTVTINSAGNGTFPCNKGSVSIWVKQ

SEQ ID NO: 34252 - protein, 482 aa, Bacillus sp.
HDGTNGTIMQYFEWNVPNDGQHWNRLHNNAQNLKNAGITAIWIPPAWKGGSQSDTGYGAYDLYDLGEFNQKGTVRTKYGTKAELERAIRSLKANGIQVYGDVVMNHKAGADFTERVQAVEVNPQNRNQEVSGTYQIEAWTGFNFPGRGNQHSSFKWRWYHFDGTDWDQSRQLNNRIYKFRGKAWDWEVDTEFGNYDYLMYADLDMDHPEVINELNRWGVWYANTLNLDGFRLDAVKHIKFSFMRDWLGHVRGQTGKNLFAVAEYWKNDLGALENYLSKTNWTMSAFDVPLHYNLYQASNSSGNYDMRNLLNGTLVQRHPSHAVTFVDNHDTQPGEALESFVQGWFKPLAYATILTREQGYPQVFYGDYYGIPSDGVPSYRQQIDPLLAARQQYAYGTQHDYLDNQDVIGWTREGDSAHAGSGLATVMSDGPGGSKTMYVGTAHAGQVFKDITGNRTDTVTINSAGNGTFPCNKGSVSIWVKQ

SEQ ID NO: 34253 - protein, 482 aa, Bacillus sp.
HDGTNGTIMQYFEWNVPNDGQHWNRLHNNAQNLKNAGITAIWIPPAWKGTSQSDTGYGAYDLYDLGEFNQKGTVRTKYGTKAELERAIRSLKANGIQVYGDVVMNHKAGADFTERVQAVEVNPQNRNQEVSGTYQIEAWTGFNFPGRGNQHSSFKWRWYHFDGTDWDQSRQLSNRIYKFRGKAWDWEVDTEFGNYDYLMYADLDMDHPEVINELNRWGVWYANTLNLDGFRLDAGKHIKFSFMRDWLGHVRGQTGKNLFAVAEYWKNDLGALENYLSKTNWTMSAFDVPLHYNLYQASNSSGNYDMRNLLNGTLVQRHPSHAVTFVDNHDTQPGEALESFVQGWFKPLAYATILTREQGYPQVFYGDYYGIPSDGVPSYRQQIDPLLAARQQYAYGTQHDYLDNQDVIGWTREGDSAHAGSGLATVMSDGPGGSKTMYVGTAHAGQVFKDITGNRTDTVTINSAGNGTFPCNKGSVSIWVKQ

SEQ ID NO: 34254 - protein, 482 aa, Bacillus sp.
HDGTNGTIMQYFEWNVPNDGQHWNRLHNNAQNLKNAGITAIWIPPAWKAASQNDTGYGAYDLYDLGEFNQKGTVRTKYGTKAELERAIRSLKANGIQVYGDVVMNHKAGADFTERVQAVEVNPQNRNQEVSGTYQIEAWTGFNFPGRGNQHSSFKWRWYHFDGTDWDQSRQLSNRIYKFRGKAWDWEVDTEFGNYDYLMYADLDMDHPEVINELNRWGVWYANTLNLDGFRLDAVKHIKFSFMRDWLGHVRGQTGKNLFAVAEYWKNDLGALENYLSKTNWTMSAFDVPLHYNLYQASNSSGNYDMRNLLNGTLVQRHPSHAVTFVDNHDTQPGEALESFVQGWFKPLAYATILTREQGYPQVFYGDYYGIPSDGVPSYRQQIDPLLKARQQYAYGTQHDYLDNQDVIGWTREGDSAHAGSGLATVMSDGPGGSKTMYVGTAHAGQVFKDITGNRTDTVTINSAGNGTFPCNKGSVSIWVKQ

SEQ ID NO: 34255 - protein, 482 aa, Bacillus sp.
HDGTNGTIMQYFEWNVPNDGQHWNRLHNNAQNLKNAGITAIWIPPAWKGTSQSDTGYGAYDLYDLGEFNQKGTVRTKYGTKAELERAIRSLKANGIQVYGDVVMNHKAGADLTERVQAVEVNPQNRNQEVSGTYQIEAWTGFNFPGRGNQHSSFKWRWYHFDGTDFDQSRQLSNRIYKFRGKAWDWEVDTEFGNYDYLMYADLDMDHPEVINELNRWGVWYANTLNLDGFRLDAVKHIKFSFMRDWLGHVRGQTGKNLFAVAEYWKNDLGALENYLSKTNWTMSAFDVPLHYNLYQASNSSGNYDMRNLLNGTLVQRHPSHAVTFVDNHDTQPGEALESFVQGWFKPLAYATILTREQGYPQVFYGDYYGIPSDGVPSYRQQIDPLLAARQQYAYGTQHDYLDNQDVIGWTREGDSAHAGSGLATVMSDGPGGSKTMYVGTAHAGQVFKDITGNRTDTVTINSAGNGTFPCNKGSVSIWVKQ

SEQ ID NO: 34256 - protein, 482 aa, Bacillus sp.
HDGTNGTIMQYFEWNVPNDGQHWNRLHNNAQNLKNAGITAIWIPPAWKGTSQSDTGYGAYDLYDLGEFNQKGTVRTKYGTKAELERAIRSLKANGIQVYGDVVMNHKAGADFTERVQAVEVNPQNRNQEVSGTYQIEAWTGFNFPGRGNQHSSFKWRWYHFDGTDWDQSRQLSNRIYKFRGKAWDWEVDTEFGNYDYLMYADLDMDHPEVINELNRWGVWYANTLNLDGFRLDAVKHIKFSFMRDWLGHVRGQTGKNLFAVAEYWKNDLGALENYLQKTNWTMSAFDVPLHYNLYQASNSSGNYDMRNLLNGTLVQRYPSHAVTFVDNHDTQPGEALESFVQGWFKPLAYATILTREQGYPQVFYGDYYGIPSDGVPSYRQQIDPLLAARQQYAYGTQHDYLDNQDVIGWTREGDSAHAGSGLATVMSDGPGGSKTMYVGTAHAGQVFKDITGNRTDTVTINSAGNGTFPCNKGSVSIWVKQ

SEQ ID NO: 34257 - protein, 482 aa, Bacillus sp.
HDGTNGTIMQYFEWNVPNDGQHWNRLHNNAQNLKNAGITAIWIPPAWKGTSQSDTGYGAYDLYDLGEFNQKGTVRTKYGTKAELERAIRSLKANGIQVYGDVVMNHKAGADFTERVQAVEVNPQNRNQEVSGTYQIEAWTGFNFPGRGNQHSSFKWRWYHFDGTDWDQSRNLSNRIYKFRGKAWDWEVDTEFGNYDYLMYADLDMDHPEVINELNRWGVWYANTLNLDGFRLDAVKHIKFSFMRDWLGHVRGQTGKNLFAVAEYWKNDLGALENYLSKTNWTMSAFDVPLHYNLYQASNSSGNYDMRNLLNGTLVQRHPSHAVTFVDNHDTQPGEALESFVQGWFKPLAYATILTREQGYPQVFYGDYYGIPSDGVPSYRQQIDPLLAARQQYAYGTQHDYLDNQDVIGWTREGDSAHAGSGLATVMSDGPGGSKTMYVGTAHAGQVFKDITGNRTDTVTINSAGNGTFPCNKGSVSIWVKQ

SEQ ID NO: 34258 - protein, 474 aa, Synthetic construct
NGTLMQYFEWYLPNDGNHWNRLNSDASNLASKGITAVWIPPAYKGTSQSDVGYGAYDLYDLGEFNQKGTVRTKYGTKSQLQAAITSLKNNGIQVYGDVVNHKAGADATEMVNAVEVNPNNRNQEVTGEYTIEAYTRFDFPGRGNTYSSFKWRWYHFDGTDWDQSRSLNNRIYKFQGHGKAWDWPVDTENGNYDYLMYADYDYDHPDVNERNWGVWYTNELGLDGFRLDAVKHIKFSFLRDWINHVRSATGKGMFAVAEYWKNDLGALENYLTYTNWNHSVFDVPLHYNLYAASTSGGNYDMRNIFNGTVVQKHPSHSVTFVDNHDTQPEESLESTVQPWFKPLAYALLTREQGYPSVFYGDYYGIPTHGPALKSKIDPILEARQKYAYGPQHDYLDHPDIGWTREGDSSHPKSGLATLMTDGPGGSKRMYAGLKNAGETWYDITGNRSDTVKIGSDGWGEFHVNKGSVSIYVQK

SEQ ID NO: 34259 - protein, 477 aa, Bacillus licheniformis
NGTLMQYFEWYTPNDGQHWNRLRNDSAYLKEHGITAVWIPPAYKGASQNDVGYGAYDLYDLGEFNQKGTVRTKYGTKGQLQSAINSLKSNGINVYGDVVINHKGGADATELVRAVEVNPANRNQEISGEYLIEAYTYFDFPGRGSTHSNFKWRWYHFDGVDWDQSRRLNRIYKFRGKAWDWEVDTEFGNYDYLTYADIDYDHPDVAAEIRNWGTWYANTLQLDGFRLDAVKHIKYSFLRDWVNHVRSATGKNMFTVAEFWKNDLGALENYLNKTNFNHSVFDVPLHYQFYAASKQGGGYDMQNLLNGTVVSKHPLHSVTFVDNHDTQPEEALESTVEEWFKPLAYAFILTRESGYPQVFYGDMYGIPTHGVPALKHKIEPILEARQKYAYGAQHDYFDHHDIVGWTREGDSSVANSGLAALITDGPGGAKWMYVGRQNAGQTWHDITGNRSEPVVINSEGWGEFHVNGGSVSIYVQR

SEQ ID NO: 34260 - protein, 481 aa, Synthetic construct
HDGTNGTIMQYFEWNVPNDGQHWNRLHNNAQNLKNAGITAIWIPPAWKGTSQSDTGYGAYDLYDLGEFNQKGTVRTKYGTKAELERAIRSLKANGIQVYGDVVMNHKAGADFTERVQAVEVNPQNRNQEVSGTYQIEAWTGFNFPGRGNQHSSFKWRWYHFDGTDWDESRKLNRIYKFRGKAWDWEVDTEFGNYDYLMYADLDMDHPEVINELNRWGVWYANTLNLDGFRLDAVKHIKFSFMRDWLGHVRGQTGKNLFAVAEYWKNDLGALENYLSKTNWTMSAFDVPLHYNLYQASNSSGNYDMRNLLNGTLVQRHPSHAVTFVDNHDTQPGEALESFVQGWFKPLAYATILTREQGYPQVFYGDYYGIPSDGVPSYRQQIDPLLAARQQYAYGTQHDYLDNQDVIGWTREGDSAHAGSGLATVMSDGPGGSKTMYVGTAHAGQVFKDITGNRTDTVTINSAGNGTFPCNKGSVSIWVKQ

SEQ ID NO: 34261 - protein, 481 aa, Bacillus sp.
HDGTNGTIMQYFEWNVPNDGQHWNRLHNNAQNLKNAGITAIWIPPAWKGTSQSDTGYGAYDLYDLGEFNQKGTVRTKYGTKAELERAIRSLKANGIQVYGDVVMNHKAGADFTERVQAVEVNPQNRNQEVSGTYQIEAWTGFNFPGRGNQHSSFKWRWYHFDGTDWDESRKLNRIYKFRGKAWDWEVDTEFGNYDYLMYADLDMDHPEVINELNRWGVWYVNTLNLDGFRLDAVKHIKFSFMRDWLGHVRGQTGKNLFAVAEYWKNDLGALENYLSKTNWTMSAFDVPLHYNLYQASNSSGNYDMRNLLNGTLVQRHPSHAVTFVDNHDTQPGEALESFVQGWFKPLAYATILTREQGYPQVFYGDYYGIPSDGVPSYRQQIDPLLAARQQYAYGTQHDYLDNQDVIGWTREGDSAHAGSGLATVMSDGPGGSKTMYVGTAHAGQVFKDITGNRTDTVTINSAGNGTFPCNKGSVSIWVKQ

SEQ ID NO: 34262 - protein, 481 aa, Bacillus sp.
HDGTNGTIMQYFEWNVPNDGQHWNRLHNNAQNLKNAGITAIWIPPAWKGTSQSDTGYGAYDLYDLGEFNQKGTVRTKYGTKAELERAIRSLKANGIQVYGDVVMNHKAGADFTEHVQAVEVNPQNRNQEVSGTYQIEAWTGFNFPGRGNQHSSFKWRWYHFDGTDWDESRKLNRIYKFRGKAWDWEVDTEFGNYDYLMYADLDMDHPEVINELNRWGVWYANTLNLDGFRLDAVKHIKFSFMRDWLGHVRGQTGKNLFAVAEYWKNDLGALENYLSKTNWTMSAFDVPLHYNLYQASNSSGNYDMRNLLNGTLVQRHPSHAVTFVDNHDTQPGEALESFVQGWFKPLAYATILTREQGYPQVFYGDYYGIPSDGVPSYRQQIDPLLAARQQYAYGTQHDYLDNQDVIGWTREGDSAHAGSGLATVMSDGPGGSKTMYVGTAHAGQVFKDITGNRTDTVTINSAGNGTFPCNKGSVSIWVKQ

SEQ ID NO: 34263 - protein, 481 aa, Bacillus sp.
HDGTNGTIMQYFEWNVPNDGQHWNRLHNNAQNLKNAGITAIWIPPAWKGTSQSDTGYGAYDLYDLGEFNQKGTVRTKYGTKAELERAIRSLKANGIQVYGDVVMNHKAGADFTERVQAVEVNPQNRNQEVSGTYQIEAWTGFNFPGRGNQHSSFKWRWYHFDGTDWDESRKLNRIYKFRGKAWDWEVDTEFGNYDYLMYADLDMDHPEVINELNRWGVWYANTLNLDGFRLDAVKHIKFSFMRDWLGHVRSQTGKNLFAVAEYWKNDLGALENYLSKTNWTMSAFDVPLHYNLYQASNSSGNYDMRNLLNGTLVQRHPSHAVTFVDNHDTQPGEALESFVQGWFKPLAYATILTREQGYPQVFYGDYYGIPSDGVPSYRQQIDPLLAARQQYAYGTQHDYLDNQDVIGWTREGDSAHAGSGLATVMSDGPGGSKTMYVGTAHAGQVFKDITGNRTDTVTINSAGNGTFPCNKGSVSIWVKQ

SEQ ID NO: 34264 - protein, 481 aa, Bacillus sp.
HDGTNGTIMQYFEWNVPNDGQHWNRLHNNAQNLKNAGITAIWIPPAWKGTSQSDTGYGAYDLYDLGEFNQKGTVRTKYGTKAELERAIRSLKANGIQVYGDVVMNHKAGADFTERVQAVEVNPQNRNQEVSGTYQIEAWTGFNFPGRGNQHSSFKWRWYHFDGTDWDESRKLNRIYKFRGKAWDWEVDTEFGNYDYLMYADLDMDHPEVINELNRWGVWYANTLNLDGFRLDAVKHIKFSFMRDWLGHVRGQTGKNLFAVAEYWKNDLGALENYLSKTNWTMSAFDVPLHYNLYQASNSSGNYDMRNLLNGTLVQRHPSHAVTFVDNHDTQPGEALESFVQGWFKPLAYATILTREQGYPQVFYGDYYGIPSDGVPSYRQQIDPLLKARQQYAYGTQHDYLDNQDVIGWTREGDSAHAGSGLATVMSDGPGGSKTMYVGTAHAGQVFKDITGNRTDTVTINSAGNGTFPCNKGSVSIWVKQ

SEQ ID NO: 34265 - protein, 481 aa, Bacillus sp.
HDGTNGTIMQYFEWNVPNDGQHWNRLHNNAQNLKNAGITAIWIPPAWKGTSQSDTGYGAYDLYDLGEFNQKGTVRTKYGTKAELERAIRSLKANGIQVYGDVVMNHKAGADFTERVQAVEVNPQNRNQEVSGTYQIEAWTGFNFPGRGNQHSSFKWRWYHFDGTDWDESRKLNRIYKFRGKAWDWEVDTEFGNYDYLMYADLDMDHPEVINELNRWGVWYANTLNLDGFRLDAVKHIKFSFMRDWLGHVRGQTGKGLFAVAEYWKNDLGALENYLSKTNWTMSAFDVPLHYNLYQASNSSGNYDMRNLLNGTLVQRHPSHAVTFVDNHDTQPGEALESFVQGWFKPLAYATILTREQGYPQVFYGDYYGIPSDGVPSYRQQIDPLLAARQQYAYGTQHDYLDNQDVIGWTREGDSAHAGSGLATVMSDGPGGSKTMYVGTAHAGQVFKDITGNRTDTVTINSAGNGTFPCNKGSVSIWVKQ

SEQ ID NO: 34266 - protein, 481 aa, Bacillus sp.
HDGTNGTIMQYFEWNVPNDGQHWNRLHNNAQNLKNAGITAIWIPPAWKGTSQSDTGYGAYDLYDLGEFNQKGTVRTKYGTKAELERAIRSLKANGIQVYGDVVMNHKAGADFTEWVQAVEVNPQNRNQEVSGTYQIEAWTGFNFPGRGNQHSSFKWRWYHFDGTDWDESRKLNRIYKFRGKAWDWEVDTEFGNYDYLMYADLDMDHPEVINELNRWGVWYANTLNLDGFRLDAVKHIKFSFMRDWLGHVRGQTGKNLFAVAEYWKNDLGALENYLSKTNWTMSAFDVPLHYNLYQASNSSGNYDMRNLLNGTLVQRHPSHAVTFVDNHDTQPGEALESFVQGWFKPLAYATILTREQGYPQVFYGDYYGIPSDGVPSYRQQIDPLLAARQQYAYGTQHDYLDNQDVIGWTREGDSAHAGSGLATVMSDGPGGSKTMYVGTAHAGQVFKDITGNRTDTVTINSAGNGTFPCNKGSVSIWVKQ

SEQ ID NO: 34267 - protein, 481 aa, Bacillus sp.
HDGTNGTIMQYFEWNVPNDGQHWNRLHNNAQNLKNAGITAIWIPPAWKGTSQSDTGYGAYDLYDLGEFNQKGTVRTKYGTKAELERAIRSLKANGIQVYGDVVMNHKAGADFTERVQAVEVNPQNRNQEVSGTYQIEAWTGFNFPGRGNQHSSFKWRWYHFDGTDWDESRKLQRIYKFRGKAWDWEVDTEFGNYDYLMYADLDMDHPEVINELNRWGVWYANTLNLDGFRLDAVKHIKFSFMRDWLGHVRGQTGKNLFAVAEYWKNDLGALENYLSKTNWTMSAFDVPLHYNLYQASNSSGNYDMRNLLNGTLVQRHPSHAVTFVDNHDTQPGEALESFVQGWFKPLAYATILTREQGYPQVFYGDYYGIPSDGVPSYRQQIDPLLAARQQYAYGTQHDYLDNQDVIGWTREGDSAHAGSGLATVMSDGPGGSKTMYVGTAHAGQVFKDITGNRTDTVTINSAGNGTFPCNKGSVSIWVKQ

SEQ ID NO: 34268 - protein, 481 aa, Bacillus sp.
HDGTNGTIMQYFEWNVPNDGQHWNRLHNNAQNLKNAGITAIWIPPAWKGTSQSDTGYGAYDLYDLGEFNQKGTVRTKYGTKAELERAIRSLKANGIQVYGDVVMNHKAGADFTERVQAVEVNPQNRNQEVSGTYQIEAWTGFNFPGRGNQHSSFKWRWYHFDGTDWDESRKLNRIYKFRGKAWDWEVDTEFGNYDYLMYADLDMDHPEVINELNRWGVWYANTLNLDGFRLDAVKHIKFSFMRDWLGHVRGQTGKNLFAVAEYWKNDLGALENYLSKTNWTMSAFDVPLHYNLYQASNSSGNYDMRNLLNGTLVQAHPNHAVTFVDNHDTQPGEALESFVQGWFKPLAYATILTREQGYPQVFYGDYYGIPSDGVPSYRQQIDPLLAARQQYAYGTQHDYLDNQDVIGWTREGDSAHAGSGLATVMSDGPGGSKTMYVGTAHAGQVFKDITGNRTDTVTINSAGNGTFPCNKGSVSIWVKQ

SEQ ID NO: 34269 - protein, 481 aa, Bacillus sp.
HDGTNGTIMQYFEWNVPNDGQHWNRLHNNAQNLKNAGITAIWIPPAWKGTSQSDTGYGAYDLYDLGEFNQKGTVRTKYGTKAELERAIRSLKANGIQVYGDVVMNHKAGADFTERVQAVEVNPQNRNQEVSGTYQIEAWTGFNFPGRGNQHSSFKWRWYHFDGTDWDESRKLNRIYKFRGKAWDWEVDTEFGNYDYLMYADLDMDHPEVINELNRWGVWYANTLNLDGFRLDAVKHIKFSFMRDWLGHVRAQTGKNLFAVAEYWKNDLGALENYLSKTNWTMSAFDVPLHYNLYQASNSSGNYDMRNLLNGTLVQRHPSHAVTFVDNHDTQPGEALESFVQGWFKPLAYATILTREQGYPQVFYGDYYGIPSDGVPSYRQQIDPLLAARQQYAYGTQHDYLDNQDVIGWTREGDSAHAGSGLATVMSDGPGGSKTMYVGTAHAGQVFKDITGNRTDTVTINSAGNGTFPCNKGSVSIWVKQ

SEQ ID NO: 34270 - protein, 481 aa, Bacillus sp.
HDGTNGTIMQYFEWNVPNDGQHWNRLHNNAQNLKNAGITAIWIPPAWKGTSQSDTGYGAYDLYDLGEFNQKGTVRTKYGTKAELERAIRSLKANGIQVYGDVVMNHKAGADFTERVQAVEVNPQNRNQEVSGTYQIEAWTGFNFPGRGNQHSSFKWRWYHFDGTDWDESRKLNRIYKFRGKAWDWEVDTEFGNYDYLMYADLDMDHPEVINELNRWGVWYANTLNLDGFRLDAVKHIKFSFMRDWLGHVRGQTGKNLFAVAEYWKNDLGALENYLSKTNWTMSAFDVPLHYNLYQASNSRGNYDMRNLLNGTLVQRHPSHAVTFVDNHDTQPGEALESFVQGWFKPLAYATILTREQGYPQVFYGDYYGIPSDGVPSYRQQIDPLLAARQQYAYGTQHDYLDNQDVIGWTREGDSAHAGSGLATVMSDGPGGSKTMYVGTAHAGQVFKDITGNRTDTVTINSAGNGTFPCNKGSVSIWVKQ

SEQ ID NO: 34271 - protein, 481 aa, Bacillus sp.
HDGTNGTIMQYFEWNVPNDGQHWNRLHNNAQNLKNAGITAIWIPPAWKGTSQSDTGYGAYDLYDLGEFNQKGTVRTKYGTKAELERAIRSLKANGIQVYGDVVMNHKAGADFTERVQAVEVNPQNRNQEVSGTYQIEAWTGFNFPGRGNQHSSFKWRWYHFDGTDWDESRKLNRIYKFRGKAWDWEVDTEFGNYDYLMYADFDMDHPEVINELNRWGVWYANTLNLDGFRLDAVKHIKFSFMRDWLGHVRGQTGKNLFAVAEYWKNDLGALENYLSKTNWTMSAFDVPLHYNLYQASNSSGNYDMRNLLNGTLVQRHPSHAVTFVDNHDTQPGEALESFVQGWFKPLAYATILTREQGYPQVFYGDYYGIPSDGVPSYRQQIDPLLAARQQYAYGTQHDYLDNQDVIGWTREGDSAHAGSGLATVMSDGPGGSKTMYVGTAHAGQVFKDITGNRTDTVTINSAGNGTFPCNKGSVSIWVKQ

SEQ ID NO: 34272 - protein, 481 aa, Bacillus sp.
HDGTNGTIMQYFEWNVPNDGQHWNRLHNNAQNLKNAGITAIWIPPAWKGTSQSDTGYGAYDLYDLGEFNQKGTVRTKYGTKAELERAIRSLKANGIQVYGDVVMNHKAGADFTERVQAVEVNPQNRNQEVSGTYQIEAWTGFNFPGRGNQHSSFKWRWYHFDGTDWDESRGLNRIYKFRGKAWDWEVDTEFGNYDYLMYADLDMDHPEVINELNRWGVWYANTLNLDGFRLDAVKHIKFSFMRDWLGHVRGQTGKNLFAVAEYWKNDLGALENYLSKTNWTMSAFDVPLHYNLYQASNSSGNYDMRNLLNGTLVQRHPSHAVTFVDNHDTQPGEALESFVQGWFKPLAYATILTREQGYPQVFYGDYYGIPSDGVPSYRQQIDPLLAARQQYAYGTQHDYLDNQDVIGWTREGDSAHAGSGLATVMSDGPGGSKTMYVGTAHAGQVFKDITGNRTDTVTINSAGNGTFPCNKGSVSIWVKQ

SEQ ID NO: 34273 - protein, 477 aa, Synthetic construct
NGTMMQYFEWYLPNDGQHWRRLQNDASNLKSKGITAVWIPPAWKGTSQADVGYGAYDLYDLGEFHQKGTVRTKYGTKGELQAAIKSLHNNGINVYGDVVMNHKAGADATEDVTAVEVNPNNRNQVVTGEYLIKAYTHFHFPGRGSTYSDFKWYWYHFDGVDWDQSRSLNRIYKFQGKAWDWPVDTENGNYDYLMYADLDMDHPEVVNELRNWGVWYTNTLGLDGFRIDAVKHIKFSFTRDWINHVRSATGKNMFAVAEYWKNDLGAIENYLNFTNWNHSVFDVPLHYNLYAASNSGGNYDMRNIFNGTVVQKHPSHAVTFVDNHDTQPEESLESFVQPWFKPLAYALILTRESGYPSVFYGDYYGIPTHGVPAMRSKIDPILEARQKYAYGPQHDYLDHPDIIGWTREGDSSHPKSGLATLITDGPGGSKRMYAGLKNAGETWYDITGNRSDTVKIGSDGWGTFHVNKGSVSIYVQK

SEQ ID NO: 34274 - protein, 478 aa, Synthetic construct
NGTMMQYFEWYLPNDGNHWNRLNSDASNLKSKGITAVWIPPAWKGASQNDVGYGAYDLYDLGEFNQKGTVRTKYGTRSQLQAAVTSLKNNGIQVYGDVVMNHKGGADATEMVRAVEVNPNNRNQEVTGEYTIEAWTRFDFPGRGNTHSSFKWRWYHFDGVDWDQSRRLSNRIYKFRGKAWDWEVDTENGNYDYLMYADIDMDHPEVVNELRNWGVWYTNTLGLDGFRIDAVKHIKYSFTRDWINHVRSATGKNMFAVAEFWKNDLGAIENYLQKTNWNHSVFDVPLHYNLYNASKSGGNYDMRKLLNGTVVSKHPSKAVTFVDNHDTQPEEALESFVQPWFKPLAYAFILTRESGYPSVFYGDMYGIPTHGVPAMKHKIEPILKARKQYAYGAQHDYLDHPDIIGWTREGDSSHPKSGLATLITDGPGGSKRMYAGLKNAGETWYDITGNRSDTVKIGSDGWGTFHVNKGSVSIYVQK

SEQ ID NO: 34275 - protein, 478 aa, Synthetic construct
NGTMMQYFEWYLPNDGQHWRRLQNDASNLKSKGITAVWIPPAWKGTSQADVGYGAYDLYDLGEFHQKGTVRTKYGTKGELQAAIKSLHNNGINVYGDVVMNHKGGADATEDVTAVEVNPNNRNQVVTGEYLIKAWTHFHFPGRGSTYSDFKWYWYHFDGVDWDQSRRLNNRIYKFQGKAWDWPVDTENGNYDYLMYADIDMDHPEVVNELRNWGVWYANELQLDGFRIDAVKHIKYSFTRDWINHVRSATGKNMFAVAEFWKNDLGAIENYLQKTNWNHSVFDVPLHYNLYNASKSGGNYDMRNIFNGTVVQRHPSHAVTFVDNHDSQPEEALESFVEEWFKPLAYALILTRESGYPSVFYGDYYGIPTHGVPAMRSKIDPILEARQKYAYGPQHDYLDHPDVIGWTREGDSSHPKSGLATLITDGPGGSKRMYAGLKNAGETWYDITGNRSDTVKIGSDGWGEFHVNDGSVSIYVQK

SEQ ID NO: 34276 - protein, 478 aa, Synthetic construct
NGTMMQYFEWYLPNDGNHWNRLNSDASNLKSKGITAVWIPPAWKGASQNDVGYGAYDLYDLGEFNQKGTVRTKYGTRSQLQAAVTSLKNNGIQVYGDVVMNHKGGADATEMVNAVEVNPNNRNQEVTGEYTIEAWTRFDFPGRGNTHSSFKWRWYHFDGVDWDQSRRLSNRIYKFRGKAWDWPVDTENGNYDYLMYADLDMDHPEVVNELRNWGVWYTNTLGLDGFRIDAVKHIKFSFTRDWINHVRSATGKNMFAVAEYWKNDLGAIENYLQFTNWNHSVFDVPLHYNLYNASKSGGNYDMRKLLNGTVVSKHPSKAVTFVDNHDTQPEEALESFVQPWFKPLAYAFILTRESGYPSVFYGDMYGIPTHGVPAMKHKIEPILKARKQYAYGAQHDYLDHPDIIGWTREGDSSHPKSGLATLITDGPGGSKRMYAGLKNAGETWYDITGNRSDTVKIGSDGWGTFHVNKGSVSIYVQK

SEQ ID NO: 34277 - protein, 485 aa, Bacillus sp.
HHDGTNGTIMQYFEWNVPNDGQHWNRLHNNAQNLKNAGITAIWIPPAWKGTSQNDVGYGAYDLYDLGEFNQKGTVRTKYGTKAELERAIRSLKANGIQVYGDVVMNHKGGADFTERVQAVEVNPQNRNQEVSGTYEIEAYTGFNFPGRGNQHSSFKWRWYHFDGTDWDQSRQLSNRIYKFRGDGKAWDWEVDTENGNYDYLMYADVDMNHPEVINELNRWGVWYANTLNLDGFRLDAVKHIQFSFMRNWLGHVRGQTGKPLFAVAEYWKNDLGALENYLSKTNWTMSAFDVPLHYNLYQASNSGGNYDMRNLLNGTLVQRHPSHAVTFVDNHDTQPGEALESFVQGWFKPLAYATILTREQGYPQVFYGDYYGIPSDGVPSYRQQIDPLLKARQKYAYGPQHDYLDHPDVIGWTREGDSSHPKSGLATLITDGPGGSKRMYAGLKNAGETWYDITGNRSDTVKIGSDGWGEFHVNDGSVSIYVQK

SEQ ID NO: 34278 - protein, 485 aa, Bacillus sp.
HHDGTNGTIMQYFEWNVPNDGQHWNRLHNNAQNLKNAGITAIWIPPAWKGTSQNDVGYGAYDLYDLGEFNQKGTVRTKYGTKAELERAIRSLKANGIQVYGDVVMNHKGGADFTERVQAVEVNPQNRNQEVSGTYQIEAWTGFNFPGRGNQHSSFKWRWYHFDGTDWDQSRQLANRIYKFRGDGKAWDWEVDTENGNYDYLMYADVDMDHPEVINELNRWGVWYANTLNLDGFRLDAVKHIKFSFMRDWLGHVRGQTGKNLFAVAEYWKNDLGALENYLSKTNWTMSAFDVPLHYNLYQASNSSGNYDMRNLLNGTLVQRHPSHAVTFVDNHDTQPGEALESFVQGWFKPLAYATILTREQGYPQVFYGDYYGIPSDGVPSYRQQIDPLLKARQQYAYGPQHDYIDHPDVIGWTREGDSSAAKSGLAALITDGPGGSKRMYAGLKNAGETWYDITGNRSDTVKIGSDGWGEFHVNDGSVSIYVQK

SEQ ID NO: 34279 - protein, 485 aa, Bacillus sp.
HHDGTNGTIMQYFEWNVPNDGQHWNRLHNNAQNLKNAGITAIWIPPAWKGTSQNDVGYGAYDLYDLGEFNQKGTVRTKYGTKAELERAIRSLKANGIQVYGDVVMNHKGGADFTERVQAVEVNPQNRNQEVSGTYEIEAWTGFNFPGRGNQHSSFKWRWYHFDGTDWDQSRQLSNRIYKFRGDGKAWDWEVDTENGNYDYLMYADVDMNHPEVINELNRWGVWYANTLNLDGFRLDAVKHIQFSFMRNWLGHVRGQTGKNLFAVAEYWKNDLGALENYLSKTNGTMSAFDVPLHYNLYQASNSGGNYDMRNLLNGTLVQRHPSHAVTFVDNHDTQPGEALESFVQGWFKPLAYATILTREQGYPQVFYGDYYGIPSDGVPSYRQQIDPLLKARQKYAYGPQHDYLDHPDVIGWTREGDSSHPKSGLATLITDGPGGSKRMYAGLKNAGETWYDITGNRSDTVKIGSDGWGEFHVNKGSVSIYVQK

SEQ ID NO: 34280 - protein, 485 aa, Bacillus sp.
HHDGTNGTIMQYFEWNVPNDGQHWNRLHNNAQNLKNAGITAIWIPPAWKGTSQNDVGYGAYDLYDLGEFNQKGTVRTKYGTKAELERAIRSLKANGIQVYGDVVMNHKGGADFTERVQAVEVNPQNRNQEVSGTYEIEAWTGFNFPGRGNQHSSFKWRWYHFDGTDWDQSRQLSNRIYKFRGDGKAWDWEVDTENGNYDYLMYADVDMNHPEVINELNRWGVWYANTLNLDGFRLDAVKHIQFSFMRNWLGHVRGQTGKNLFAVAEYWKNDLGALENYLSKTNWTMSAFDVPLHYNLYQASNSGKNYDMRNLLNGTLVQRHPSHAVTFVDNHDTQPGEALESFVQGWFKPLAYATILTREQGYPQVFYGDYYGIPSDGVPSYRQQIDPLLKARQKYAYGPQHDYLDHPDVIGWTREGDSSHPKSGLATLITDGPGGSKRMYAGLKNAGETWYDITGNRSDTVKIGSDGWGEFHVNKGSVSIYVQK

SEQ ID NO: 34281 - protein, 485 aa, Bacillus sp.
HHDGTNGTIMQYFEWNVPNDGQHWNRLHNNAQNLKNAGITAIWIPPAWKGTSQNDVGYGAYDLYDLGEFNQKGTVRTKYGTKAELERAIRSLKANGIQVYGDVVMNHKGGADFTERVQAVEVNPQNRNQEVSGTYEIEAYTGFNFPGRGNQHSSFKWRWYHFDGTDWDQSRQLSNRIYKFRGDGKAWDWEVDTENGNYDYLMYADVDMNHPEVINELNRWGVWYANTLNLDGFRLDAVKHIQFSFMRNWLGHVRGQTGKNLFAVAEYWKNDLGALENYLSKTNWTMSAFDVPLHYNLYQASNSGGNYDMRNLLNGTLVQRHPSHAVTFVDNHDTQPGEALESFVQGWFKPLAYATILTREQGYPQVFYGDYYGIPSDGVPSYRQQIDPLLKARQKYAYGPQHDYLDHPDVIGWTREGDSSHPKSGLATLITDGPGGSKTMYAGLKNAGETWYDITGNRSDTVKIGSDGWGEFHVNDGSVSIYVQK

SEQ ID NO: 34282 - protein, 485 aa, Bacillus sp.
HHDGTNGTIMQYFEWNVPNDGQHWNRLHNNAQNLKNAGITAIWIPPAWKGTSQNDVGYGAYDLYDLGEFNQKGTVRTKYGTKAELERAIRSLKANGIQVYGDVVMNHKGGADFTERVQAVEVNPQNRNQEVSGTYEIEAWTGFNFPGRGNQHSSFKWRWYHFDGTDWDQSRQLSNRIYKFRGDGKAWDWEVDTENGNYDYLMYADVDMNHPEVINELNRWGVWYANTLNLDGFRLDAVKHIQFDFMRNWLGHVRGQTGKNLFAVAEYWKNDLGALENYLSKTNWTMSAFDVPLHYNLYQASNSGGNYDMRNLLNGTLVQRHPSHAVTFVDNHDTQPGEALESFVQGWFKPLAYATILTREQGYPQVFYGDYYGIPSDGVPSYRQQIDPLLKARQKYAYGPQHDYLDHPDVIGWTREGDSSHPKSGLATLITDGPGGSKRMYAGLKNAGETWYDITGNRSDTVKIGSDGWGEFHVNDGSVSIYVQK

SEQ ID NO: 34283 - protein, 485 aa, Bacillus sp.
HHDGTNGTIMQYFEWNVPNDGQHWNRLHNNAQNLKNAGITAIWIPPAWKGTSQNDVGYGAYDLYDLGEFNQKGTVRTKYGTKAELERAIRSLKANGIQVYGDVVMNHKGGADFTERVQAVEVNPQNRNQEVSGTYEIEAWTGFNFPGRGNQHSSFKWRWYHFDGTDWDQSRQLSNRIYKFRGDGKAWDWEVDTENGNYDYLMYADVDMNHPEVINELNRWGVWYANTLNLDGFRLDAVKHIQFSFMRNWLGHVRGQTGKPLFAVAEYWKNDLGALENYLSKTNWTMSAFDVPLHYNLYQASNSGRNYDMRNLLNGTLVQRHPSHAVTFVDNHDTQPGEALESFVQGWFKPLAYATILTREQGYPQVFYGDYYGIPSDGVPSYRQQIDPLLKARQKYAYGPQHDYLDHPDVIGWTREGDSSHPKSGLATLITDGPGGSKRMYAGLKNAGETWYDITGNRSDTVKIGSDGWGEFHVNDGSVSIYVQK

SEQ ID NO: 34284 - protein, 485 aa, Bacillus sp.
HHDGTNGTIMQYFEWNVPNDGQHWNRLHNNAQNLKNAGITAIWIPPAWKGTSQNDVGYGAYDLYDLGEFNQKGTVRTKYGTKAELERAIRSLKANGIQVYGDVVMNHKGGADFTERVQAVEVNPQNRNQEVSGTYEIEAWTGFNFPGRGNQHSSFKWRWYHFDGTDWDQSRQLSNRIYKFRGDGKAWDWEVDTENGNYDYLMYADVDMNHPEVINELNRWGVWYANTLNLDGFRLDAVKHIQFSFMRNWLGHVRGQTGKNLFAVAEYWKNDLGALENYLSKTNGTMSAFDVPLHYNLYQASNSGGNYDMRNLLNGTLVQRHPSHAVTFVDNHDTQPGEALESFVQGWFKPLAYATILTREQGYPQVFYGDYYGIPSDGVPSYRQQIDPLLKARQKYAYGPQHDYLDHPDVIGWTREGDSSHPKSGLATLITDGPGGSKNMYAGLKNAGETWYDITGNRSDTVKIGSDGWGEFHVNDGSVSIYVQK

SEQ ID NO: 34285 - protein, 485 aa, Bacillus sp.
HHDGTNGTIMQYFEWNVPNDGQHWNRLHNNAQNLKNAGITAIWIPPAWKGTSQNDVGYGAYDLYDLGEFNQKGTVRTKYGTKAELERAIRSLKANGIQVYGDVVMNHKGGADFTERVQAVEVNPQNRNQEVSGTYEIEAWTGFNFPGRGNQHSSFKWRWYHFDGTDWDQSRQLSNRIYKFRGDGKAWDWEVDTENGNYDYLMYADVDMNHPEVINELNRWGVWYANTLNLDGFRLDAVKHIQFSFMRNWLGHVRGQTGKNLFAVAEYWKNDLGALENYLSKTNWTMSAFDVPLHYNLYQASNSGKNYDMRNLLNGTLVQRHPSHAVTFVDNHDTQPGEALESFVQGWFKPLAYATILTREQGYPQVFYGDYYGIPSDGVPSYRQQIDPLLKARQKYAYGPQHDYLDHPDVIGWTREGDSSHPKSGLATLITDGPGGSKKMYAGLKNAGETWYDITGNRSDTVKIGSDGWGEFHVNDGSVSIYVQK

SEQ ID NO: 34286 - protein, 485 aa, Bacillus sp.
HHDGTNGTIMQYFEWNVPNDGQHWNRLHNNAQNLKNAGITAIWIPPAWKGTSQNDVGYGAYDLYDLGEFNQKGTVRTKYGTKAELERAIRSLKANGIQVYGDVVMNHKGGADFTERVQAVEVNPQNRNQEVSGTYEIEAWTGFNFPGRGNQHSSFKWRWSHFDGTDWDQSRQLSNRIYKFRGDGKAWDWEVDTENGNYDYLMYADVDMNHPEVINELNRWGVWYANTLNLDGFRLDAVKHIQFSFMRNWLGHVRGQTGKNLFAVAEYWKNDLGALENYLSKTNWTMSAFDVPLHYNLYQASNSGGNYDMRNLLNGTLVQRHPSHAVTFVDNHDTQPGEALESFVQGWFKPLAYATILTREQGYPQVFYGDYYGIPSDGVPSYRQQIDPLLKARQKYAYGPQHDYLDHPDVIGWTREGDSSHPKSGLATLITDGPGGSKRMYAGLKNAGETWYDITGNRSDTVKIGSDGWGEFHVNKGSVSIYVQK

SEQ ID NO: 34287 - protein, 485 aa, Bacillus sp.
HHDGTNGTIMQYFEWNVPNDGQHWNRLHNNAQNLKNAGITAIWIPPAWKGTSQNDVGYGAYDLYDLGEFNQKGTVRTKYGTKAELERAIRSLKANGIQVYGDVVMNHKGGADFTERVQAVEVNPQNRNQEVSGTYEIEAWTGFNFPGRGNQHSSFKWRWYHFDGTDWDQSRQLSNRIYKFRGDGKAWDWEVDTENGNYDYLMYADVDMNHPEVINELNRWGVWYANTLNLDGFRLDAVKHIQFSFMRNWLGHVRGQTGKPLFAVAEYWKNDLGALENYLSKTNWTMSAFDVPLHYNLYQASNSGGNYDMRNLLNGTLVQRHPSHAVTFVDNHDTQPGEALESFVQGWFKPLAYATILTREQGYPQVFYGDYYGIPSDGVPSYRQQIDPLLKARQKYAYGPQHDYLDHPDVIGWTREGDSSHPKSGLATLITDGPGGSKRMYAGLKNAGETWYDITGNRSDTVKIGSDGRGEFHVNDGSVSIYVQK

SEQ ID NO: 34288 - protein, 485 aa, Bacillus sp.
HHDGTNGTIMQYFEWNVPNDGQHWNRLHNNAQNLKNAGITAIWIPPAWKGTSQNDVGYGAYDLYDLGEFNQKGTVRTKYGTKAELERAIRSLKANGIQVYGDVVMNHKGGADFTERVQAVEVNPQNRNQEVSGTYEIEAWTGFNFPGRGNQHSSFKWRWSHFDGTDWDQSRQLSNRIYKFRGDGKAWDWEVDTENGNYDYLMYADVDMNHPEVINELNRWGVWYANTLNLDGFRLDAVKHIQFSFMRNWLGHVRGQTGKPLFAVAEYWKNDLGALENYLSKTNWTMSAFDVPLHYNLYQASNSGGNYDMRNLLNGTLVQRHPSHAVTFVDNHDTQPGEALESFVQGWFKPLAYATILTREQGYPQVFYGDYYGIPSDGVPSYRQQIDPLLKARQKYAYGPQHDYLDHPDVIGWTREGDSSHPKSGLATLITDGPGGSKRMYAGLKNAGETWYDITGNRSDTVKIGSDGWGEFHVNDGSVSIYVQK

SEQ ID NO: 34289 - protein, 485 aa, Bacillus sp.
HHDGTNGTIMQYFEWNVPNDGQHWNRLHNNAQNLKNAGITAIWIPPAWKGTSQNDVGYGAYDLYDLGEFNQKGTVRTKYGTKAELERAIRSLKANGIQVYGDVVMNHKGGADFTERVQAVEVNPQNRNQEVSGTYEIEAWTGFNFPGRGNQHSSFKWRWSHFDGTDWDQSRQLSNRIYKFRGDGKAWDWEVDTENGNYDYLMYADVDMNHPEVINELNRWGVWYANTLNLDGFRLDAVKHIQFSFMRNWLGHVRGQTGKNLFAVAEYWKNDLGALENYLSKTNWTMSAFDVPLHYNLYQASNSGGNYDMRNLLNGTLVQRHPSHAVTFVDNHDTQPGEALESFVQGWFKPLAYATILTREQGYPQVFYGDYYGIPSDGVPSYRQQIDPLLKARQKYAYGPQHDYLDHPDVIGWTREGDSSHPKSGLATLITDGPGGSKTMYAGLKNAGETWYDITGNRSDTVKIGSDGWGEFHVNDGSVSIYVQK

SEQ ID NO: 34290 - protein, 485 aa, Bacillus sp.
HHDGTNGTIMQYFEWNVPNDGQHWNRLHNNAQNLKNAGITAIWIPPAWKGTSQNDVGYGAYDLYDLGEFNQKGTVRTKYGTKAELERAIRSLKANGIQVYGDVVMNHKGGADFTERVQAVEVNPQNRNQEVSGTYEIEAWTGFNFPGRGNQHSSFKWRWYHFDGTDWDQSRQLSNRIYKFRGDGKAWDWEVDTENGNYDYLIYADVDMNHPEVINELNRWGVWYANTLNLDGFRLDAVKHIQFSFMRNWLGHVRGQTGKNLFAVAEYWKNDLGALENYLSKTNWTMSAFDVPLHYNLYQASNSGGNYDMRNLLNGTLVQRHPSHAVTFVDNHDTQPGEALESFVQGWFKPLAYATILTREQGYPQVFYGDYYGIPSDGVPSYRQQIDPLLKARQKYAYGPQHDYLDHPDVIGWTREGDSSHPKSGLATLITDGPGGSKRMYAGLKNAGETWYDITGNRSDTVKIGSDGWGEFHVNDGSVSIYVQK

SEQ ID NO: 34291 - protein, 485 aa, Bacillus sp.
HHDGTNGTIMQYFEWNVPNDGQHWNRLHNNAQNLKNAGITAIWIPPAWKGTSQNDVGYGAYDLYDLGEFNQKGTVRTKYGTKAELERAIRSLKANGIQVYGDVVMNHKGGADFTERVQAVEVNPQNRNQEVSGTYEIEAWTGFNFPGRGNQHSSFKWRWYHFDGTDWDQSRQLSNRIYKFRGDGKAWDWPVDTENGNYDYLMYADVDMNHPEVINELNRWGVWYANTLNLDGFRLDAVKHIQFSFMRNWLGHVRGQTGKNLFAVAEYWKNDLGALENYLSKTNWTMSAFDVPLHYNLYQASNSGGNYDMRNLLNGTLVQRHPSHAVTFVDNHDTQPGEALESFVQGWFKPLAYATILTREQGYPQVFYGDYYGIPSDGVPSYRQQIDPLLKARQKYAYGPQHDYLDHPDVIGWTREGDSSHPKSGLATLITDGPGGSKRMYAGLKNAGETWYDITGNRSDTVKIGSDGWGEFHVNDGSVSIYVQK

SEQ ID NO: 34292 - protein, 485 aa, Bacillus sp.
HHDGTNGTIMQYFEWNVPNDGQHWNRLHNNAQNLKNAGITAIWIPPAWKGTSQNDVGYGAYDLYDLGEFNQKGTVRTKYGTKAELERAIRSLKANGIQVYGDVVMNHKGGADFTERVQAVEVNPQNRNQEVSGTYEIEAWTGFNFPGRGNQHSSFKWRWYHFDGTDWDQSRQLSNRIYKFRGDGKAWDWEVDTENGNYDYLMYADVDMNHPEVINELNRWGVWYANTLNLDGFRLDAVKHIQFSFMRNWLGHVRGQTGKNLFAVAEYWKNDLGALENYLSKTNWTMSAFDVPLHYNLYQASNSGGNYDMRNLLNGTLVQRHPSHAVTFVDNHDTQPGEALESFVQGWFKPLAYATILTREQGYPQVFYGDYYGIPSDGVPSYRQQIDPLLKARQKYAYGPQHDYLDHPDVIGWTREGDSSHPKSGLATLITDGPGGSKNMYAGLKNAGETWYDITGNRSDTVKIGSDGWGEFHVNDRSVSIYVQK

SEQ ID NO: 34293 - protein, 485 aa, Bacillus sp.
HHDGTNGTIMQYFEWNVPNDGQHWNRLHNNAQNLKNAGITAIWIPPAWKGTSQNDVGYGAYDLYDLGEFNQKGTVRTKYGTKAELERAIRSLKANGIQVYGDVVMNHKGGADFTERVQAVEVNPQNRNQEVSGTYEIEAWTGFNFPGRGNQHSSFKWRWYHFDGTDWDQSRQLSNRIYKFRGDGKAWDWEVDTENGNYDYLMYADFDMNHPEVINELNRWGVWYANTLNLDGFRLDAVKHIQFSFMRNWLGHVRGQTGKNLFAVAEYWKNDLGALENYLSKTNWTMSAFDVPLHYNLYQASNSGGNYDMRNLLNGTLVQRHPSHAVTFVDNHDTQPGEALESFVQGWFKPLAYATILTREQGYPQVFYGDYYGIPSDGVPSYRQQIDPLLKARQKYAYGPQHDYLDHPDVIGWTREGDSSHPKSGLATLITDGPGGSKRMYAGLKNAGETWYDITGNRSDTVKIGSDGWGEFHVNDGSVSIYVQK

SEQ ID NO: 34294 - protein, 485 aa, Bacillus sp.
HHDGTNGTIMQYFEWNVPNDGQHWNRLHNNAQNLKNAGITAIWIPPAWKGTSQNDVGYGAYDLYDLGEFNQKGTVRTKYGTKAELERAIRSLKANGIQVYGDVVMNHKGGADFTERVQAVEVNPQNRNQEVSGTYEIEAWTGFNFPGRGNQHSSFKWRWYHFDGTDWDQSRQLSNRIYKFRGDGKAWDWEVDTEFGNYDYLMYADVDMNHPEVINELNRWGVWYANTLNLDGFRLDAVKHIQFSFMRNWLGHVRGQTGKNLFAVAEYWKNDLGALENYLSKTNWTMSAFDVPLHYNLYQASNSGGNYDMRNLLNGTLVQRHPSHAVTFVDNHDTQPGEALESFVQGWFKPLAYATILTREQGYPQVFYGDYYGIPSDGVPSYRQQIDPLLKARQKYAYGPQHDYLDHPDVIGWTREGDSSHPKSGLATLITDGPGGSKRMYAGLKNAGETWYDITGNRSDTVKIGSDGWGEFHVNDGSVSIYVQK

SEQ ID NO: 34295 - protein, 485 aa, Bacillus sp.
HHDGTNGTIMQYFEWNVPNDGQHWNRLHNNAQNLKNAGITAIWIPPAWKGTSQNDVGYGAYDLYDLGEFNQKGTVRTKYGTKAELERAIRSLKANGIQVYGDVVMNHKGGADFTERVQAVEVNPQNRNQEVSGTYEIEAWTGFNFPGRGNQHSSFKWRWYHFDGTDWDQSRQLSNRIYKFRGDGKAWDWEVDTENGNYDYLMYADVDMNHPEVINELNRWGVWYANTLNLDGFRLDAVKHIQFNFMRNWLGHVRGQTGKNLFAVAEYWKNDLGALENYLSKTNWTMSAFDVPLHYNLYQASNSGGNYDMRNLLNGTLVQRHPSHAVTFVDNHDTQPGEALESFVQGWFKPLAYATILTREQGYPQVFYGDYYGIPSDGVPSYRQQIDPLLKARQKYAYGPQHDYLDHPDVIGWTREGDSSHPKSGLATLITDGPGGSKRMYAGLKNAGETWYDITGNRSDTVKIGSDGWGEFHVNDGSVSIYVQK

SEQ ID NO: 34296 - protein, 483 aa, Bacillus sp.
HHDGTNGTIMQYFEWNVPNDGQHWNRLHNNAQNLKNAGITAIWIPPAWKGTSQNDVGYGAYDLYDLGEFNQKGTVRTKYGTKAELERAIRSLKANGIQVYGDVVMNHKGGADFTERVQAVEVNPQNRNQEVSGTYEIEAWTGFNFPGRGNQHSSFKWRWYHFDGTDWDQSRQLSNRIYKFRDKAWDWEVDTENGNYDYLMYADVDMNHPEVINELNRWGVWYANTLNLDGFRLDAVKHIQFSFMRNWLGHVRGQTGKNLFAVAEYWKNDLGALENYLSKTNWTMSAFDVPLHYNLYQASNSGGNYDMRNLLNGTLVQRHPSHAVTFVDNHDTQPGEALESFVQGWFKPLAYATILTREQGYPQVFYGDYYGIPSDGVPSYRQQIDPLLKARQKYAYGPQHDYLDHPDVIGWTREGDSSHPKSGLATLITDGPGGSKRMYAGLKNAGETWYDITGNRSDTVKIGSDGWGEFHVNDGSVSIYVQK

SEQ ID NO: 34297 - protein, 485 aa, Bacillus sp.
HHDGTNGTIMQYFEWNVPNDGQHWNRLHNNAQNLKNAGITAIWIPPAWKGTSQNDVGYGAYDLYDLGEFNQKGTVRTKYGTKAELERAIRSLKANGIQVYGDVVMNHKGGADFTERVQAVEVNPQNRNQEVSGTYQIEAWTGFNFPGRGNQHSSFKWRWYHFDGTDWDQSRQLANRIYKFRGTGKAWDWEVDTENGNYDYLMYADVDMDHPEVINELNRWGVWYANTLNLDGFRLDAVKHIKFSFMRDWLGHVRGQTGKNLFAVAEYWKNDLGALENYLSKTNWTMSAFDVPLHYNLYQASNSSGNYDMRNLLNGTLVQRHPSHAVTFVDNHDTQPGEALESFVQGWFKPLAYATILTREQGYPQVFYGDYYGIPSDGVPSYRQQIDPLLKARQQYAYGPQHDYIDHPDVIGWTREGDSSAAKSGLAALITDGPGGSKRMYAGLKNAGETWYDITGNRSDTVKIGSDGWGEFHVNDGSVSIYVQK

SEQ ID NO: 34298 - protein, 485 aa, Bacillus sp.
HHDGTNGTIMQYFEWNVPNDGQHWNRLHNNAQNLKNAGITAIWIPPAWKGTSQNDVGYGAYDLYDLGEFNQKGTVRTKYGTKAELERAIRSLKANGIQVYGDVVMNHKGGADFTERVQAVEVNPQNRNQEVSGTYEIEAWTGFNFPGRGNQHSSFKWRWYHFDGTDWDQSRQLSNRIYKFRGDGKAWDWEVDTENGNYDYLTYADVDMNHPEVINELNRWGVWYANTLNLDGFRLDAVKHIQFSFMRNWLGHVRGQTGKNLFAVAEYWKNDLGALENYLSKTNWTMSAFDVPLHYNLYQASNSGGNYDMRNLLNGTLVQRHPSHAVTFVDNHDTQPGEALESFVQGWFKPLAYATILTREQGYPQVFYGDYYGIPSDGVPSYRQQIDPLLKARQKYAYGPQHDYLDHPDVIGWTREGDSSHPKSGLATLITDGPGGSKRMYAGLKNAGETWYDITGNRSDTVKIGSDGWGEFHVNDGSVSIYVQK

SEQ ID NO: 34299 - protein, 485 aa, Bacillus sp.
HHDGTNGTIMQYFEWNVPNDGQHWNRLHNNAQNLKNAGITAIWIPPAWKGTSQNDVGYGAYDLYDLGEFNQKGTVRTKYGTKAELERAIRSLKANGIQVYGDVVMNHKGGADFTERVQAVEVNPQNRNQEVSGTYEIEAWTGFNFPGRGNQHSSFKWRWYHFDGTDWDQSRQLSNRIYKFRGDGKAWDWEVDTENGNYDYLMYADVDMNHPEVINELNRWGVWYANTLNLDGFRLDAVKHIQFSFMRNWLGHVRGQTGKNLFAVAEYWKNDLGALENYLSKTNWTMSAFDVPLHYNLYQASNSGGNYDMRNLLNGTLVQRHPSHAVTFVDNHDTQPGEALESFVQGWFKPLAYATILTREQGYPQVFYGDYYGIPSDGVPSYRQQIDPLLKARQKYAYGPQHDYLDHPDVIGWTREGDSSHPKSGLATLITDGPGGSKNMYAGLKNAGETWYDITGNRSDTVKIGSDGRGEFHVNDGSVSIYVQK

SEQ ID NO: 34300 - protein, 485 aa, Bacillus sp.
HHDGTNGTIMQYFEWNVPNDGQHWNRLHNNAQNLKNAGITAIWIPPAWKGTSQNDVGYGAYDLYDLGEFNQKGTVRTKYGTKAELERAIRSLKANGIQVYGDVVMNHKGGADFTERVQAVEVNPQNRNQEVSGTYEIEAWTGFNFPGRGNQHSSFKWRWYHFDGTDWDQSRQLSNRIYKFRGDGKAWDWEVDTENGNYDYLMYADVDMNHPEVINELNRWGVWYANTLNLDGFRLDAVKHIQFSFMRNWLGHVRGQTGKPLFAVAEYWKNDLGALENYLSKTNWTMSAFDVPLHYNLYQASNSGGNYDMRNLLNGTLVQRHPSHAVTFVDNHDTQPGEALESFVQGWFKPLAYATILTREQGYPQVFYGDYYGIPSDGVPSYRQQIDPLLKARQKYAYGPQHDYLDHPDVIGWTREGDSSHPKSGLATLITDGPGGSKRMYAGLKNAGETWYDITGNRSDTVKIGSDGWGEFHVNDRSVSIYVQK

SEQ ID NO: 34301 - protein, 485 aa, Bacillus sp.
HHDGTNGTIMQYFEWNVPNDGQHWNRLHNNAQNLKNAGITAIWIPPAWKGTSQNDVGYGAYDLYDLGEFNQKGTVRTKYGTKAELERAIRSLKANGIQVYGDVVMNHKGGADFTERVQAVEVNPQNRNQEVSGTYEIEAWTGFNFPGRGNQHSSFKWRWYHFDGTDWDQSRQLSNRIYKFRGDGKAWDWEVDTENGNYDYLMYADYDMNHPEVINELNRWGVWYANTLNLDGFRLDAVKHIQFSFMRNWLGHVRGQTGKNLFAVAEYWKNDLGALENYLSKTNWTMSAFDVPLHYNLYQASNSGGNYDMRNLLNGTLVQRHPSHAVTFVDNHDTQPGEALESFVQGWFKPLAYATILTREQGYPQVFYGDYYGIPSDGVPSYRQQIDPLLKARQKYAYGPQHDYLDHPDVIGWTREGDSSHPKSGLATLITDGPGGSKRMYAGLKNAGETWYDITGNRSDTVKIGSDGWGEFHVNDGSVSIYVQK

SEQ ID NO: 34302 - protein, 485 aa, Bacillus sp.
HHDGTNGTIMQYFEWNVPNDGQHWNRLHNNAQNLKNAGITAIWIPPAWKGTSQNDVGYGAYDLYDLGEFNQKGTVRTKYGTKAELERAIRSLKANGIQVYGDVVMNHKGGADFTERVQAVEVNPQNRNQEVSGTYEIEAWTGFNFPGRANQHSSFKWRWYHFDGTDWDQSRQLSNRIYKFRGDGKAWDWEVDTENGNYDYLMYADVDMNHPEVINELNRWGVWYANTLNLDGFRLDAVKHIQFSFMRNWLGHVRGQTGKNLFAVAEYWKNDLGALENYLSKTNWTMSAFDVPLHYNLYQASNSGGNYDMRNLLNGTLVQRHPSHAVTFVDNHDTQPGEALESFVQGWFKPLAYATILTREQGYPQVFYGDYYGIPSDGVPSYRQQIDPLLKARQKYAYGPQHDYLDHPDVIGWTREGDSSHPKSGLATLITDGPGGSKRMYAGLKNAGETWYDITGNRSDTVKIGSDGWGEFHVNDGSVSIYVQK

SEQ ID NO: 34303 - protein, 483 aa, Bacillus sp.
HHDGTNGTIMQYFEWNVPNDGQHWNRLHNNAQNLKNAGITAIWIPPAWKGTSQNDVGYGAYDLYDLGEFNQKGTVRTKYGTKAELERAIRSLKANGIQVYGDVVMNHKGGADFTERVQAVEVNPQNRNQEVSGTYEIEAWTGFNFPGRGNQHSSFKWRWYHFDGTDWDQSRQLSNRIYKFGGKAWDWEVDTENGNYDYLMYADVDMNHPEVINELNRWGVWYANTLNLDGFRLDAVKHIQFSFMRNWLGHVRGQTGKNLFAVAEYWKNDLGALENYLSKTNWTMSAFDVPLHYNLYQASNSGGNYDMRNLLNGTLVQRHPSHAVTFVDNHDTQPGEALESFVQGWFKPLAYATILTREQGYPQVFYGDYYGIPSDGVPSYRQQIDPLLKARQKYAYGPQHDYLDHPDVIGWTREGDSSHPKSGLATLITDGPGGSKRMYAGLKNAGETWYDITGNRSDTVKIGSDGWGEFHVNDGSVSIYVQK

SEQ ID NO: 34304 - protein, 485 aa, Bacillus sp.
HHDGTNGTIMQYFEWNVPNDGQHWNRLHNNAQNLKNAGITAIWIPPAWKGTSQNDVGYGAYDLYDLGEFNQKGTVRTKYGTKAELERAIRSLKANGIQVYGDVVMNHKGGADFTERVQAVEVNPQNRNQEVSGTYEIEAWTGFNFPGRGNQHSSFKWRWYHFDGTDWDQSRQLSNRIYKFRGDGKAWDWEVDTENGNYDYLMYADVDMNHPEVINELNRWGVWYANTLNLDGFRLDAVKHIQFSFMRNWLGHVRGQTGKNLFAVAEYWKNDLGALENYLSKTNWTMSAFDVPLHYNLYQASNSKGNYDMRNLLNGTLVQRHPSHAVTFVDNHDTQPGEALESFVQGWFKPLAYATILTREQGYPQVFYGDYYGIPSDGVPSYRQQIDPLLKARQKYAYGPQHDYLDHPDVIGWTREGDSSHPKSGLATLITDGPGGSKRMYAGLKNAGETWYDITGNRSDTVKIGSDGWGEFHVNKGSVSIYVQK

SEQ ID NO: 34305 - protein, 485 aa, Bacillus sp.
HHDGTNGTIMQYFEWNVPNDGQHWNRLHNNAQNLKNAGITAIWIPPAWKGTSQNDVGYGAYDLYDLGEFNQKGTVRTKYGTKAELERAIRSLKANGIQVYGDVVMNHKGGADFTERVQAVEVNPQNRNQEVSGTYEIEAWTGFNFPGRGNQHSSFKWRWYHFDGTDWDQSRQLSNRIYKFRGDGKAWDWEVDTENGNYDYLMYADVDMNHPEVINELNRWGVWYANTLNLDGFRLDAVKHIQFQFMRNWLGHVRGQTGKNLFAVAEYWKNDLGALENYLSKTNWTMSAFDVPLHYNLYQASNSGGNYDMRNLLNGTLVQRHPSHAVTFVDNHDTQPGEALESFVQGWFKPLAYATILTREQGYPQVFYGDYYGIPSDGVPSYRQQIDPLLKARQKYAYGPQHDYLDHPDVIGWTREGDSSHPKSGLATLITDGPGGSKRMYAGLKNAGETWYDITGNRSDTVKIGSDGWGEFHVNDGSVSIYVQK

SEQ ID NO: 34306 - protein, 485 aa, Bacillus sp.
HHDGTNGTIMQYFEWNVPNDGQHWNRLHNNAQNLKNAGITAIWIPPAWKGTSQNDVGYGAYDLYDLGEFNQKGTVRTKYGTKAELERAIRSLKANGIQVYGDVVMNHKGGADFTERVQAVEVNPQNRNQEVSGTYEIEAWTGFNFPGRGNQHSSFKWRWYHFDGTDWDQSRQLSNRIYKFRGDGKAWDWEVDTENGNYDYLMYADVDMNHPEVINELNRWGVWYANTLNLDGFRLDAVKHIQFEFMRNWLGHVRGQTGKNLFAVAEYWKNDLGALENYLSKTNWTMSAFDVPLHYNLYQASNSGGNYDMRNLLNGTLVQRHPSHAVTFVDNHDTQPGEALESFVQGWFKPLAYATILTREQGYPQVFYGDYYGIPSDGVPSYRQQIDPLLKARQKYAYGPQHDYLDHPDVIGWTREGDSSHPKSGLATLITDGPGGSKRMYAGLKNAGETWYDITGNRSDTVKIGSDGWGEFHVNDGSVSIYVQK

SEQ ID NO: 34307 - protein, 483 aa, Bacillus sp.
HHDGTNGTIMQYFEWNVPNDGQHWNRLHNNAQNLKNAGITAIWIPPAWKGTSQNDVGYGAYDLYDLGEFNQKGTVRTKYGTKAELERAIRSLKANGIQVYGDVVMNHKGGADFTERVQAVEVNPQNRNQEVSGTYEIEAWTGFNFPGRGNQHSSFKWRWYHFDGTDWDQSRQLSNRIYKFDGKAWDWEVDTENGNYDYLMYADVDMNHPEVINELNRWGVWYANTLNLDGFRLDAVKHIQFSFMRNWLGHVRGQTGKNLFAVAEYWKNDLGALENYLSKTNWTMSAFDVPLHYNLYQASNSGGNYDMRNLLNGTLVQRHPSHAVTFVDNHDTQPGEALESFVQGWFKPLAYATILTREQGYPQVFYGDYYGIPSDGVPSYRQQIDPLLKARQKYAYGPQHDYLDHPDVIGWTREGDSSHPKSGLATLITDGPGGSKRMYAGLKNAGETWYDITGNRSDTVKIGSDGWGEFHVNDGSVSIYVQK

SEQ ID NO: 34308 - protein, 485 aa, Bacillus sp.
HHDGTNGTIMQYFEWNVPNDGQHWNRLHNNAQNLKNAGITAIWIPPAWKGTSQNDVGYGAYDLYDLGEFNQKGTVRTKYGTKAELERAIRSLKANGIQVYGDVVMNHKGGADFTERVQAVEVNPQNRNQEVSGTYEIEAYTGFNFPGRGNQHSSFKWRWYHFDGTDWDQSRQLSNRIYKFRGDGKAWDWEVDTENGNYDYLMYADVDMNHPEVINELNRWGVWYANTLNLDGFRLDAVKHIQFSFMRNWLGHVRGQTGKNLFAVAEYWKNDLGALENYLSKTNWTMSAFDVPLHYNLYQASNSGGNYDMRNLLNGTLVQRHPSHAVTFVDNHDTQPGEALESFVQGWFKPLAYATILTREQGYPQVFYGDYYGIPSDGVPSYRQQIDPLLKARQKYAYGPQHDYLDHPDVIGWTREGDSSHPKSGLATLITDGPGGSKRMYAGLKNAGETWYDITGNRSDTVKIGSDGWGEFHVNKGSVSIYVQK

SEQ ID NO: 34309 - protein, 485 aa, Bacillus sp.
HHDGTNGTIMQYFEWNVPNDGQHWNRLHNNAQNLKNAGITAIWIPPAWKGTSQNDVGYGAYDLYDLGEFNQKGTVRTKYGTKAELERAIRSLKANGIQVYGDVVMNHKGGADFTERVQAVEVNPQNRNQEVSGTYEIEAWTGFNFPGRGNQHSSFKWRWYHFDGTDWDQSRQLSNRIYKFRGDGKAWDWEVDTENGNYDYLMYADVDMNHPEVINELNRWGVWYANTLNLDGFRLDAVKHIQFAFMRNWLGHVRGQTGKNLFAVAEYWKNDLGALENYLSKTNWTMSAFDVPLHYNLYQASNSGGNYDMRNLLNGTLVQRHPSHAVTFVDNHDTQPGEALESFVQGWFKPLAYATILTREQGYPQVFYGDYYGIPSDGVPSYRQQIDPLLKARQKYAYGPQHDYLDHPDVIGWTREGDSSHPKSGLATLITDGPGGSKRMYAGLKNAGETWYDITGNRSDTVKIGSDGWGEFHVNDGSVSIYVQK

SEQ ID NO: 34310 - protein, 485 aa, Bacillus sp.
HHDGTNGTIMQYFEWNVPNDGQHWNRLHNNAQNLKNAGITAIWIPPAWKGTSQNDVGYGAYDLYDLGEFNQKGTVRTKYGTKAELERAIRSLKANGIQVYGDVVMNHKGGADFTERVQAVEVNPQNRNQEVSGTYEIEAWTGFNFPGRGNQHSSFKWRWYHFDGTDWDQSRQLSNRIYLFRGDGKAWDWEVDTENGNYDYLMYADVDMNHPEVINELNRWGVWYANTLNLDGFRLDAVKHIQFSFMRNWLGHVRGQTGKNLFAVAEYWKNDLGALENYLSKTNWTMSAFDVPLHYNLYQASNSGGNYDMRNLLNGTLVQRHPSHAVTFVDNHDTQPGEALESFVQGWFKPLAYATILTREQGYPQVFYGDYYGIPSDGVPSYRQQIDPLLKARQKYAYGPQHDYLDHPDVIGWTREGDSSHPKSGLATLITDGPGGSKRMYAGLKNAGETWYDITGNRSDTVKIGSDGWGEFHVNDGSVSIYVQK

SEQ ID NO: 34311 - protein, 485 aa, Bacillus sp.
HHDGTNGTIMQYFEWNVPNDGQHWNRLHNNAQNLKNAGITAIWIPPAWKGTSQNDVGYGAYDLYDLGEFNQKGTVRTKYGTKAELERAIRSLKANGIQVYGDVVMNHKGGADFTERVQAVEVNPQNRNQEVSGTYEIEAWTGFNFPGRGNQHSSFKWRWYHFDGTDWDQSRQLSNRIYKFRGDGKAWDWEVDTENGNYDYLMYADVDMNHPEVINELNRWGVWYANTLNLDGFRLDAVKHIQFSFMRNWLGHVRGQTGKNLFAVAEYWKNDLGALENYLSKTNWTMSAFDVPLHYNLYQASNSGGNYDMRNLLNGTLVQRHPSHAVTFVDNHDTQPGEALESFVQGWFKPLAYATILTREQGYPQVFYGDYYGIPSDGVPSYRQQIDPLLKARQKYAYGPQHDYLDHPDVIGWTREGDSSHPKSGLATLITDGPGGSKRMYAGLKNAGETWYDITGNRSDTVKIGSDGTGEFHVNKGSVSIYVQK

SEQ ID NO: 34312 - protein, 483 aa, unidentified
HHDGTNGTIMQYFEWNVPNDGQHWNRLHNNAQNLKNAGITAIWIPPAWKGTSQNDVGYGAYDLYDLGEFNQKGTVRTKYGTKAELERAIRSLKANGIQVYGDVVMNHKGGADFTERVQAVEVNPQNRNQEVSGTYQIEAWTGFNFPGRGNQHSSFKWRWYHFDGTDWDQSRQLANRIYKFRGKAWDWEVDTENGNYDYLMYADVDMDHPEVINELNRWGVWYANTLNLDGFRLDAVKHIKFSFMRDWLGHVRGQTGKNLFAVAEYWKNDLGALENYLSKTNWTMSAFDVPLHYNLYQASNSSGNYDMRNLLNGTLVQRHPSHAVTFVDNHDTQPGEALESFVQGWFKPLAYATILTREQGYPQVFYGDYYGIPSDGVPSYRQQIDPLLKARQQYAYGPQHDYIDHPDVIGWTREGDSSAAKSGLAALITDGPGGSKRMYAGLKNAGETWYDITGNRSDTVKIGSDGWGEFHVNDGSVSIYVQK

SEQ ID NO: 34313 - protein, 485 aa, Bacillus sp.
HHDGTNGTIMQYFEWNVPNDGQHWNRLHNNAQNLKNAGITAIWIPPAWKGTSQNDVGYGAYDLYDLGEFNQKGTVRTKYGTKAELERAIRSLKANGIQVYGDVVMNHKAGADFTERVQAVEVNPQNRNQEVSGTYEIEAWTGFNFPGRGNQHSSFKWRWYHFDGTDWDQSRQLSNRIYKFRGDGKAWDWEVDTENGNYDYLMYADVDMNHPEVINELNRWGVWYANTLNLDGFRLDAVKHIQFSFMRNWLGHVRGQTGKNLFAVAEYWKNDLGALENYLSKTNWTMSAFDVPLHYNLYQASNSGGNYDMRNLLNGTLVQRHPSHAVTFVDNHDTQPGEALESFVQGWFKPLAYATILTREQGYPQVFYGDYYGIPSDGVPSYRQQIDPLLKARQKYAYGPQHDYLDHPDVIGWTREGDSSHPKSGLATLITDGPGGSKRMYAGLKNAGETWYDITGNRSDTVKIGSDGWGEFHVNDGSVSIYVQK

SEQ ID NO: 34314 - protein, 485 aa, Bacillus sp.
HHDGTNGTIMQYFEWNVPNDGQHWNRLHNNAQNLKNAGITAIWIPPAWKGTSQNDVGYGAYDLYDLGEFNQKGTVRTKYGTKAELERAIRSLKANGIQVYGDVVMNHKGGADFTERVQAVEVNPQNRNQEVSGTYEIEAWTGFNFPGRGNQHSSFKWRWYHFDGTDWDQSRQLSNRIYKFRGDGKAWDWEVDTENGNYDYLMYADVDMNHPEVINELNRWGVWYANTLNLDGFRLDAVKHIQFSFMRNWLGHVRGQTGKNLFAVAEYWKNDLGALENYLSKTNWTMSAFDVPLHYNLYQASNSKGNYDMRNLLNGTLVQRHPSHAVTFVDNHDTQPGEALESFVQGWFKPLAYATILTREQGYPQVFYGDYYGIPSDGVPSYRQQIDPLLKARQKYAYGPQHDYLDHPDVIGWTREGDSSHPKSGLATLITDGPGGSKKMYAGLKNAGETWYDITGNRSDTVKIGSDGWGEFHVNDGSVSIYVQK

SEQ ID NO: 34315 - protein, 485 aa, Bacillus sp.
HHDGTNGTIMQYFEWNVPNDGQHWNRLHNNAQNLKNAGITAIWIPPAWKGTSQNDVGYGAYDLYDLGEFNQKGTVRTKYGTKAELERAIRSLKANGIQVYGDVVMNHKGGADFTERVQAVEVNPQNRNQEVSGTYEIEAWTGFNFPGRGNQHSSFKWRWYHFDGTDWDQSRQLSNRIYKFRGDGKAWDWEVDTENGNYDYLMYADVDMNHPEVINELNRWGVWYANTLNLDGFRLDAVKHIQFSFMRNWLGHVRGQTGKPLFAVAEYWKNDLGALENYLSKTNWTMSAFDVPLHYNLYQASNSKGNYDMRNLLNGTLVQRHPSHAVTFVDNHDTQPGEALESFVQGWFKPLAYATILTREQGYPQVFYGDYYGIPSDGVPSYRQQIDPLLKARQKYAYGPQHDYLDHPDVIGWTREGDSSHPKSGLATLITDGPGGSKRMYAGLKNAGETWYDITGNRSDTVKIGSDGWGEFHVNDGSVSIYVQK

SEQ ID NO: 34316 - protein, 485 aa, Bacillus sp.
HHDGTNGTIMQYFEWNVPNDGQHWNRLHNNAQNLKNAGITAIWIPPAWKGTSQNDVGYGAYDLYDLGEFNQKGTVRTKYGTKAELERAIRSLKANGIQVYGDVVMNHKGGADFTERVQAVEVNPQNRNQEVSGTYEIEAWTGFNFPGRGNQHSSFKWRWYHFDGTDWDQSRQLSNRIYKFRGDGKAWDWEVDTENGNYDYLLYADVDMNHPEVINELNRWGVWYANTLNLDGFRLDAVKHIQFSFMRNWLGHVRGQTGKNLFAVAEYWKNDLGALENYLSKTNWTMSAFDVPLHYNLYQASNSGGNYDMRNLLNGTLVQRHPSHAVTFVDNHDTQPGEALESFVQGWFKPLAYATILTREQGYPQVFYGDYYGIPSDGVPSYRQQIDPLLKARQKYAYGPQHDYLDHPDVIGWTREGDSSHPKSGLATLITDGPGGSKRMYAGLKNAGETWYDITGNRSDTVKIGSDGWGEFHVNDGSVSIYVQK

SEQ ID NO: 34317 - protein, 482 aa, Bacillus sp.
HDGTNGTIMQYFEWNVPNDGQHWNRLHNNAQNLKNAGITAIWIPPAWKGSSQSDTGYGAYDLYDLGEFNQKGTVRTKYGTKAELERAIRSLKANGIQVYGDVVMNHKAGADFTERVQAVEVNPQNRNQEVSGTYQIEAWTGFNFPGRGNQHSSFKWRWYHFDGTDWDQSRMLSNRIYKFRGKAWDWEVDTEFGNYDYLMYADLDMDHPEVINELNRWGVWYANTLNLDGFRLDAVKHIKFSFMRDWLGHVRGQTGKNLFAVAEYWKNDLGALENYLSKTNWTMSAFDVPLHYNLYQASNSSGNYDMRNLLNGTLVQRHPSHAVTFVDNHDTQPGEALESFVQGWFKPLAYATILTREQGYPQVFYGDYYGIPSDGVPSYRQQIDPLLAARQQYAYGTQHDYLDNQDVIGWTREGDSAHAGSGLATVMSDGPGGSKTMYVGTAHAGQVFKDITGNRTDTVTINSAGNGTFPCNKGSVSIWVKQ

SEQ ID NO: 34318 - protein, 482 aa, Bacillus sp.
HDGTNGTIMQYFEWNVPNDGQHWNRLHNNAQNLKNAGITAIWIPPAWKGTSQSDTGYGAYDLYDLGEFNQRGTVRTKYGTKAELERAIRSLKANGIQVYGDVVMNHKAGADFTERVQAVEVNPQNRNQEVSGTYQIEAWTGFNFPGRGNQHSSFKWRWYHFDGTDFDQSRQLSNRIYKFRGKAWDWEVDTEFGNYDYLMYADLDMDHPEVINELNRWGVWYANTLNLDGFRLDAVKHIKFSFMRDWLGHVRGQTGKNLFAVAEYWKNDLGALENYLSKTNWTMSAFDVPLHYNLYQASNSSGNYDMRNLLNGTLVQRHPSHAVTFVDNHDTQPGEALESFVQGWFKPLAYATILTREQGYPQVFYGDYYGIPSDGVPSYRQQIDPLLAARQQYAYGTQHDYLDNQDVIGWTREGDSAHAGSGLATVMSDGPGGSKTMYVGTAHAGQVFKDITGNRTDTVTINSAGNGTFPCNKGSVSIWVKQ

SEQ ID NO: 34319 - protein, 482 aa, Bacillus sp.
HDGTNGTIMQYFEWNVPNDGQHWNRLHNNAQNLKNAGITAIWIPPAWKGTSQSDTGYGAYDLYDLGEFNQNGTVRTKYGTKAELERAIRSLKANGIQVYGDVVMNHKAGADFTERVQAVEVNPQNRNQEVSGTYQIEAWTGFNFPGRGNQHSSFKWRWYHFDGTDLDQSRQLSNRIYKFRGKAWDWEVDTEFGNYDYLMYADLDMDHPEVINELNRWGVWYANTLNLDGFRLDAVKHIKFSFMRDWLGHVRGQTGKNLFAVAEYWKNDLGALENYLSKTNWTMSAFDVPLHYNLYQASNSSGNYDMRNLLNGTLVQRHPSHAVTFVDNHDTQPGEALESFVQGWFKPLAYATILTREQGYPQVFYGDYYGIPSDGVPSYRQQIDPLLAARQQYAYGTQHDYLDNQDVIGWTREGDSAHAGSGLATVMSDGPGGSKTMYVGTAHAGQVFKDITGNRTDTVTINSAGNGTFPCNKGSVSIWVKQ

SEQ ID NO: 34320 - protein, 482 aa, Bacillus sp.
HDGTNGTIMQYFEWNVPNDGQHWNRLHNNAQNLKNAGITAIWIPPAWKGTSQSDTGYGAYDLYDLGEFNQRGTVRTKYGTKAELERAIRSLKANGIQVYGDVVMNHKAGADFTERVQAVEVNPQNRNQEVSGTYQIEAWTGFNFPGRGNQHSSFKWRWYHFDGTDRDQSRQLSNRIYKFRGKAWDWEVDTEFGNYDYLMYADLDMDHPEVINELNRWGVWYANTLNLDGFRLDAVKHIKFSFMRDWLGHVRGQTGKNLFAVAEYWKNDLGALENYLSKTNWTMSAFDVPLHYNLYQASNSSGNYDMRNLLNGTLVQRHPSHAVTFVDNHDTQPGEALESFVQGWFKPLAYATILTREQGYPQVFYGDYYGIPSDGVPSYRQQIDPLLAARQQYAYGTQHDYLDNQDVIGWTREGDSAHAGSGLATVMSDGPGGSKTMYVGTAHAGQVFKDITGNRTDTVTINSAGNGTFPCNKGSVSIWVKQ

SEQ ID NO: 34321 - protein, 482 aa, Bacillus sp.
HDGTNGTIMQYFEWNVPNDGQHWNRLHNNAQNLKNAGITAIWIPPAWKGTSQSDTGYGAYDLYDLGEFNQKGTVRTKYGTKAELERAIRSLKANGIQVYGDVVMNHKSGADQTERVQAVEVNPQNRNQEVSGTYQIEAWTGFNFPGRGNQHSSFKWRWYHFDGTDFDQSRNLSNRIYKFRGKAWDWEVDTEFGNYDYLMYADLDMDHPEVINELNRWGVWYANTLNLDGFRLDAVKHIKFSFMRDWLGHVRGQTGKNLFAVAEYWKNDLGALENYLSKTNWTMSAFDVPLHYNLYQASNSSGNYDMRNLLNGTLVQRHPSHAVTFVDNHDTQPGEALESFVQGWFKPLAYATILTREQGYPQVFYGDYYGIPSDGVPSYRQQIDPLLAARQQYAYGTQHDYLDNQDVIGWTREGDSAHAGSGLATVMSDGPGGSKTMYVGTAHAGQVFKDITGNRTDTVTINSAGNGTFPCNKGSVSIWVKQ

SEQ ID NO: 34322 - protein, 482 aa, Synthetic construct
HDGTNGTIMQYFEWNVPNDGQHWNRLHNNAQNLKNAGITAIWIPPAWKGTSQSDTGYGAYDLYDLGEFNQKGTVRTKYGTKAELERAIRSLKANGIQVYGDVVMNHKAGADFTERVQAVEVNPQNRNQEVSGTYQIEAWTGFNFPGRGNQHSSFKWRWYHFDGTDFDQSREPKNRIYKFRGKAWDWEVDTEFGNYDYLMYADLDMDHPEVINELNRWGVWYANTLNLDGFRLDAVKHIKFSFMRDWLGHVRGQTGKNLFAVAEYWKNDLGALENYLSKTNWTMSAFDVPLHYNLYQASNSSGNYDMRNLLNGTLVQRHPSHAVTFVDNHDTQPGEALESFVQGWFKPLAYATILTREQGYPQVFYGDYYGIPSDGVPSYRQQIDPLLAARQQYAYGTQHDYLDNQDVIGWTREGDSAHAGSGLATVMSDGPGGSKTMYVGTAHAGQVFKDITGNRTDTVTINSAGNGTFPCNKGSVSIWVKQ

SEQ ID NO: 34323 - protein, 482 aa, Bacillus sp.
HDGTNGTIMQYFEWNVPNDGQHWNRLHNNAQNLKNAGITAIWIPPAWKGTSQSDTGYGAYDLYDLGEFNQKGTVRTKYGTKAELERAIRSLKANGIQVYGDVVMNHKAGADFTERVQAVEVNPQNRNQEVSGTYQIEAWTGFNFPGRGNQHSSFKWRWYHFDGTDWDESRKLANRIYKFRGKAWDWEVDTEFGNYDYLMYADLDMDHPEVINELNRWGVWYANTLNLDGFRLDAVKHIKFSFMRDWLGHVRGQTGKNLFAVAEYWKNDLGALENYLSKTNWTMSAFDVPLHYNLYQASNSSGNYDMRNLLNGTLVQRHPSHAVTFVDNHDTQPGEALESFVQGWFKPLAYATILTREQGYPQVFYGDYYGIPSDGVPSYRQQIDPLLAARQQYAYGTQHDYLDNQDVIGWTREGDSAHAGSGLATVMSDGPGGSKTMYVGTAHAGQVFKDITGNRTDTVTINSAGNGTFPCNKGSVSIWVKQ

SEQ ID NO: 34324 - protein, 482 aa, Bacillus sp.
HDGTNGTIMQYFEWNVPNDGQHWNRLHNNAQNLKNAGITAIWIPPAWKGTSQSDTGYGAYDLYDLGEFNQKGTVRTKYGTKAELERAIRSLKANGIQVYGDVVMNHKAGADQTEHVQAVEVNPQNRNQEVSGTYQIEAWTGFNFPGRGNQHSSFKWRWYHFDGTDFDQSRNVSNRIYKFRGKAWDWEVDTEFGNYDYLMYADLDMDHPEVINELNRWGVWYANTLNLDGFRLDAVKHIKFSFMRDWLGHVRGQTGKNLFAVAEYWKNDLGALENYLSKTNWTMSAFDVPLHYNLYQASNSSGNYDMRNLLNGTLVQRHPSHAVTFVDNHDTQPGEALESFVQGWFKPLAYATILTREQGYPQVFYGDYYGIPSDGVPSYRQQIDPLLAARQQYAYGTQHDYLDNQDVIGWTREGDSAHAGSGLATVMSDGPGGSKTMYVGTAHAGQVFKDITGNRTDTVTINSAGNGTFPCNKGSVSIWVKQ

SEQ ID NO: 34325 - protein, 482 aa, Synthetic construct
HDGTNGTIMQYFEWNVPNDGQHWNRLHNNAQNLKNAGITAIWIPPAWKGTSQSDTGYGAYDLYDLGEFNQKGTVRTKYGTKAELERAIRSLKANGIQVYGDVVMNHKAGADQTEQVQAVEVNPQNRNQEVSGTYQIEAWTGFNFPGRGNQHSSFKWRWYHFDGTDWDQSRNLSNRIYKFRGKAWDWEVDTEFGNYDYLMYADLDMDHPEVINELNRWGVWYANTLNLDGFRLDAVKHIKFSFMRDWLGHVRGQTGKNLFAVGEYWKNDLGALENYLSKTNWTMSAFDVPLHYNLYQASNSSGNYDMRNLLNGTLVQRHPSHAVTFVDNHDTQPGEALESFVQGWFKPLAYATILTREQGYPQVFYGDYYGIPSDGVPSYRQQIDPLLAARQQYAYGTQHDYLDNQDVIGWTREGDSAHAGSGLATVMSDGPGGSKTMYVGTAHAGQVFKDITGNRTDTVTINSAGNGTFRCNKGSVSIWVKQ

SEQ ID NO: 34326 - protein, 482 aa, Bacillus sp.
HDGTNGTIMQYFEWNVPNDGQHWNRLHNNAQNLKNAGITAIWIPPAWKGTSQSDTGYGAYDLYDLGEFNQKGTVRTKYGTKAELERAIRSLKANGIQVYGDVVMNHKAGADFTERVQAVEVNPQNRNQEVSGTYQIEAWTGFNFPGRGNQHSSFKWRWYHFDGTDWDESRKLSNRIYKFRGKAWDWEVDTEFGNYDYLMYADLDMDHPEVINELNRWGVWYANTLNLDGFRLDAVKHIKFSFMRDWLGHVRGQTGKNLFAVAEYWKNDLGALENYLSKTNWTMSAFDVPLHYNLYQASNSSGNYDMRNLLNGTLVQRHPSHAVTFVDNHDTQPGEALESFVQGWFKPLAYATILTREQGYPQVFYGDYYGIPSDGVPSYRQQIDPLLAARQQYAYGTQHDYLDNQDVIGWTREGDSAHAGSGLATVMSDGPGGSKTMYVGTAHAGQVFKDITGNRTDTVTINSAGNGTFPCNKGSVSIWVKQ

SEQ ID NO: 34327 - protein, 482 aa, Bacillus sp.
HDGTNGTIMQYFEWNVPNDGQHWNRLHNNAQNLKNAGITAIWIPPAWKGTSQSDTGYGAYDLYDLGEFNQKGTVRTKYGTKAELERAIRSLKANGIQVYGDVVMNHKAGADFTERVQAVEVNPQNRNQEVSGTYQIEAWTGFNFPGRGNQHSSFKWRWYHFDGTDWDQSRQLSNRIYKFRGKAWDWEVDTEFGNYDYLMYADLDMDHPEVINELNRWGVWYANTLNLDGFRLDAVKHIKFSFMRDWLGHVRGQTGKNLFAVAEYWKNDLGALENYLSKTNWTMSAFDVPLHYNLYQASNSSGNYDMRNLLNGTLVQRHPSHAVTFVDNHDTQPGEALESFVDGWFKPLAYATILTREQGYPQVFYGDYYGIPSDGVPSYRQQIDPLLAARQQYAYGTQHDYLDNQDVIGWTREGDSAHAGSGLATVMSDGPGGSKTMYVGTAHAGQVFKDITGNRTDTVTINSAGNGTFPCNKQSVSIWVKQ

SEQ ID NO: 34328 - protein, 482 aa, Bacillus sp.
HDGTNGTIMQYFEWNVPNDGQHWNRLHNNAQNLKNAGITAIWIPPAWKGTSQSDTGYGAYDLYDLGEFNQHGTVRTKYGTKAELERAIRSLKANGIQVYGDVVMNHKAGADFTERVQAVEVNPQNRNQEVSGTYQIEAWTGFNFPGRGNQHSSFKWRWYHFDGTDWDQSRTLSNRIYKFRGKAWDWEVDTEFGNYDYLMYADLDMDHPEVINELNRWGVWYANTLNLDGFRLDAVKHIKFSFMRDWLGHVRGQTGKNLFAVAEYWKNDLGALENYLSKTNWTMSAFDVPLHYNLYQASNSSGNYDMRNLLNGTLVQRHPSHAVTFVDNHDTQPGEALESFVQGWFKPLAYATILTREQGYPQVFYGDYYGIPSDGVPSYRQQIDPLLAARQQYAYGTQHDYLDNQDVIGWTREGDSAHAGSGLATVMSDGPGGSKTMYVGTAHAGQVFKDITGNRTDTVTINSAGNGTFPCNKGSVSIWVKQ

SEQ ID NO: 34329 - protein, 482 aa, Synthetic construct
HDGTNGTIMQYFEWNVPNDGQHWNRLHNNAQNLKNAGITAIWIPPAWKGTSQSDTGYGVYDLYDLGEFNQKGTVRTKYGTKAELERAIRSLKANGIQVYGDVVMNHKAGADFTEQVQAVEVNPQNRNQEVSGTYQIEAWTGFNFPGRGNQHSSFKWRWYHFDGTDFDQSRNSSNRIYKFRGKAWDWEVDTEFGNYDYLMYADLDMDHPEVINELNRWGVWYANTLNLDGFRLDAVKHIKFSFMRDWLGHVRGQTGKNLFAVAEYWKNDLGALENYLSKTNWTMSAFDVPLHYNLYQASNSSGNYDMRNLLNGTLVQRHPSHAVTFVDNHDTQPGEALESFVQGWFKPLAYATILTREQGYPQVFYGDYYGIPSDGVPSYRQQIDPLLAARQQYAYGTQHDYLDNQDVIGWTREGDSAHPGSGLTTVMSDGPGGSKTMYVGTAHAGQVFKDITGNRTDTVTINSAGNGTFPCNGGSVSIWVKQ

SEQ ID NO: 34330 - protein, 482 aa, Bacillus sp.
HDGTNGTIMQYFEWNVPNDGQHWNRLHNNAQNLKNAGITAIWIPPAWKGTSQSDTGYGAYDLYDLGEFNQAGTVRTKYGTKAELERAIRSLKANGIQVYGDVVMNHKAGADFTERVQAVEVNPQNRNQEVSGTYQIEAWTGFNFPGRGNQHSSFKWRWYHFDGTDSDQSRQLSNRIYKFRGKAWDWEVDTEFGNYDYLMYADLDMDHPEVINELNRWGVWYANTLNLDGFRLDAVKHIKFSFMRDWLGHVRGQTGKNLFAVAEYWKNDLGALENYLSKTNWTMSAFDVPLHYNLYQASNSSGNYDMRNLLNGTLVQRHPSHAVTFVDNHDTQPGEALESFVQGWFKPLAYATILTREQGYPQVFYGDYYGIPSDGVPSYRQQIDPLLAARQQYAYGTQHDYLDNQDVIGWTREGDSAHAGSGLATVMSDGPGGSKTMYVGTAHAGQVFKDITGNRTDTVTINSAGNGTFPCNKGSVSIWVKQ

SEQ ID NO: 34331 - protein, 482 aa, Bacillus sp.
HDGTNGTIMQYFEWNVPNDGQHWNRLHNNAQNLKNAGITAIWIPPAWKGTSQSDTGYGAYDLYDLGEFNQRGTVRTKYGTKAELERAIRSLKANGIQVYGDVVMNHKAGADFTERVQAVEVNPQNRNQEVSGEYQIEAWTGFNFPGRGNQHSSFKWRWYHFDGTDWDQSRQLSNRIYKFRTKAWDWEVDTEFGNYDYLMYADLDMDHPEVINELNRWGVWYANTLNLDGFRLDAVKHIKFSFMRDWLGHVRAQTGKNLFAVAEYWKNDLGALENYLSKTNWTMSAFDVPLHYNLYQASNSSGNYDMRNLLNGTLVQRHPSHAVTFVDNHDTQPGEALESFVQGWFKPLAYATILTREQGYPQVFYGDYYGIPSDGVPSYRQQIDPLLAARQQYAYGTQHDYLDNQDVIGWTREGDSAHAGSGLATVMSDGPGGSKTMYVGTAHAGQVFKDITGNRTDTVTINSAGNGTFPCNKGSVSIWVKQ

SEQ ID NO: 34332 - protein, 482 aa, Bacillus sp.
HDGTNGTIMQYFEWNVPNDGQHWNRLHNNAQNLKNAGITAIWIPPAWKGTSQSDTGYGAYDLYDLGEFNQKGTVRTKYGTKAELERAIRSLKANGIQVYGDVVMNHKAGADFTEHVQAVEVNPQNRNQEVSGTYQIEAWTGFNFPGRGNQHSSFKWRWYHFDGTDWDQSRRLSNRIYKFRGKAWDWEVDTEFGNYDYLMYGDLDMDHPEVINELNRWGVWYANTLNLDGFRLDAVKHIKFSFMRDWLGHVRGQTGKNLFAVAEYWKNDLGALENYLSKTNWTMSAFDVPLHYNLYQASNSSGNYDMRNLLNGTLVQRHPSHAVTFVDNHDTQPGEALESFVQGWFKPLAYATILTREQGYPQVFYGDYYGIPSDGVPSYRQQIDPLLAARQQYAYGTQHDYLDNQDVIGWTREGDSAHAGSGLATVMSDGPGGSKTMYVGTAHAGQVFKDITGNRTDTVTINSAGNGTFRCNKGSVSIWVKQ

SEQ ID NO: 34333 - protein, 482 aa, Bacillus sp.
HDGTNGTIMQYFEWNVPNDGQHWNRLHNNAQNLKNAGITAIWIPPAWKGASQSDTGYGAYDLYDLGEFNQKGTVRTKYGTKAELERAIRSLKANGIQVYGDVVMNHKAGADFTERVQAVEVNPQNRNQEVSGTYQIEAWTGFNFPGRGNQHSSFKWRWYHFDGTDWDQSRGLSNRIYKFRGKAWDWEVDTEFGNYDYLMYADLDMDHPEVINELNRWGVWYANTLNLDGFRLDAVKHIKFSFMRDWLGHVRGQTGKNLFAVAEYWKNDLGALENYLSKTNWTMSAFDVPLHYNLYQASNSSGNYDMRNLLNGTLVQRHPSHAVTFVDNHDTQPGEALESFVQGWFKPLAYATILTREQGYPQVFYGDYYGIPSDGVPSYRQQIDPLLAARQQYAYGTQHDYLDNQDVIGWTREGDSAHAGSGLATVMSDGPGGSKTMYVGTAHAGQVFKDITGNRTDTVTINSAGNGTFPCNKGSVSIWVKQ

SEQ ID NO: 34334 - protein, 482 aa, Bacillus sp.
HDGTNGTIMQYFEWNVPNDGQHWNRLHNNAQNLKNAGITAIWIPPAWKGSSQSDTGYGAYDLYDLGEFNQKGTVRTKYGTKAELERAIRSLKANGIQVYGDVVMNHKAGADFTERVQAVEVNPQNRNQEVSGTYQIEAWTGFNFPGRGNQHSSFKWRWYHFDGTDWDQSRNLSNRIYKFRGKAWDWEVDTEFGNYDYLMYADLDMDHPEVINELNRWGVWYANTLNLDGFRLDAVKHIKFSFMRDWLGHVRGQTGKNLFAVAEYWKNDLGALENYLSKTNWTMSAFDVPLHYNLYQASNSSGNYDMRNLLNGTLVQRHPSHAVTFVDNHDTQPGEALESFVQGWFKPLAYATILTREQGYPQVFYGDYYGIPSDGVPSYRQQIDPLLAARQQYAYGTQHDYLDNQDVIGWTREGDSAHAGSGLATVMSDGPGGSKTMYVGTAHAGQVFKDITGNRTDTVTINSAGNGTFPCNKGSVSIWVKQ

SEQ ID NO: 34335 - protein, 482 aa, Bacillus sp.
HDGTNGTIMQYFEWNVPNDGQHWNRLHNNAQNLKNAGITAIWIPPAWKGTSQSDTGYGAYDLYDLGEFNQKGTVRTKYGTKAELERAIRSLKANGIQVYGDVVMNHKAGADQTEHVQAVEVNPQNRNQEVSGTYQIEAWTGFNFPGRGNQHSSFKWRWYHFDGTDFDQSRRLSNRIYKFRGKAWDWEVDTEFGNYDYLMYADLDMDHPEVINELNRWGVWYANTLNLDGFRLDAVKHIKFSFMRDWLGHVRGQTGKNLFAVAEYWKNDLGALENYLSKTNWTMSAFDVPLHYNLYQASNSSGNYDMRNLLNGTLVQRHPSHAVTFVDNHDTQPGEALESFVQGWFKPLAYATILTREQGYPQVFYGDYYGIPSDGVPSYRQQIDPLLAARQQYAYGTQHDYLDNQDVIGWTREGDSAHAGSGLATVMSDGPGGSKTMYVGTAHAGQVFKDITGNRTDTVTINSAGNGTFPCNKGSVSIWVKQ

SEQ ID NO: 34336 - protein, 482 aa, Bacillus sp.
HDGTNGTIMQYFEWNVPNDGQHWNRLHNNAQNLKNAGITAIWIPPAWKGTSQSDTGYGAYDLYDLGEFNQKGTVRTKYGTKAELERAIRSLKANGIQVYGDVVMNHKAGADQTEHVQAVEVNPQNRNQEVSGTYQIEAWTGFNFPGRGNQHSSFKWRWYHFDGTDFDQSRGVSNRIYKFRGKAWDWEVDTEFGNYDYLMYADLDMDHPEVINELNRWGVWYANTLNLDGFRLDAVKHIKFSFMRDWLGHVRGQTGKNLFAVAEYWKNDLGALENYLSKTNWTMSAFDVPLHYNLYQASNSSGNYDMRNLLNGTLVQRHPSHAVTFVDNHDTQPGEALESFVQGWFKPLAYATILTREQGYPQVFYGDYYGIPSDGVPSYRQQIDPLLAARQQYAYGTQHDYLDNQDVIGWTREGDSAHAGSGLATVMSDGPGGSKTMYVGTAHAGQVFKDITGNRTDTVTINSAGNGTFRCNKGSVSIWVKQ

SEQ ID NO: 34337 - protein, 482 aa, Bacillus sp.
HDGTNGTIMQYFEWNVPNDGQHWNRLHNNAQNLKNAGITAIWIPPAWKGTSQSDTGYGAYDLYDLGEFNQKGTVRTKYGTKAELERAIRSLKANGIQVYGDVVMNHKAGADFTEQVQAVEVNPQNRNQEVSGTYQIEAWTGFNFPGRGNQHSSFKWRWYHFDGTDFDQSRQLSNRIYKFRTKAWDWEVDTEFGNYDYLMYADLDMDHPEVINELNRWGVWYANTLNLDGFRLDAVKHIKFSFMRDWLGHVRGQTGKNLFAVAEYWKNDLGALENYLSKTNWTMSAFDVPLHYNLYQASNSSGNYDMRNLLNGTLVQRHPSHAVTFVDNHDTQPGEALESFVQGWFKPLAYATILTREQGYPQVFYGDYYGIPSDGVPSYRQQIDPLLAARQQYAYGTQHDYLDNQDVIGWTREGDSAHAGSGLATVMSDGPGGSKTMYVGTAHAGQVFKDITGNRTDTVTINSAGNGTFPCNKGSVSIWVKQ

SEQ ID NO: 34338 - protein, 482 aa, Bacillus sp.
HDGTNGTIMQYFEWNVPNDGQHWNRLHNNAQNLKNAGITAIWIPPAWKGTSQSDTGYGAYDLYDLGEFNQAGTVRTKYGTKAELERAIRSLKANGIQVYGDVVMNHKAGADFTERVQAVEVNPQNRNQEVSGTYQIEAWTGFNFPGRGNQHSSFKWRWYHFDGTDYDQSRQLSNRIYKFRGKAWDWEVDTEFGNYDYLMYADLDMDHPEVINELNRWGVWYANTLNLDGFRLDAVKHIKFSFMRDWLGHVRGQTGKNLFAVAEYWKNDLGALENYLSKTNWTMSAFDVPLHYNLYQASNSSGNYDMRNLLNGTLVQRHPSHAVTFVDNHDTQPGEALESFVQGWFKPLAYATILTREQGYPQVFYGDYYGIPSDGVPSYRQQIDPLLAARQQYAYGTQHDYLDNQDVIGWTREGDSAHAGSGLATVMSDGPGGSKTMYVGTAHAGQVFKDITGNRTDTVTINSAGNGTFPCNKGSVSIWVKQ

SEQ ID NO: 34339 - protein, 482 aa, Bacillus sp.
HDGTNGTIMQYFEWNVPNDGQHWNRLHNNAQNLKNAGITAIWIPPAWKAASQSDTGYGAYDLYDLGEFNQKGTVRTKYGTKAELERAIRSLKANGIQVYGDVVMNHKAGADFTERVQAVEVNPQNRNQEVSGTYQIEAWTGFNFPGRGNQHSSFKWRWYHFDGTDWDQSRQLSNRIYKFRGKAWDWEVDTEFGNYDYLMYADLDMDHPEVINELNRWGVWYANTLNLDGFRLDAVKHIKFSFMRDWLGHVRGQTGKNLFAVAEYWKNDLGALENYLSKTNWTMSAFDVPLHYNLYQASNSSGNYDMRNLLNGTLVQRHPSHAVTFVDNHDTQPGEALESFVQGWFKPLAYATILTREQGYPQVFYGDYYGIPSDGVPSYRQQIDPLLAARQQYAYGTQHDYLDNQDVIGWTREGDSAHAGSGLATVMSDGPGGSKTMYVGTAHAGQVFKDITGNRTDTVTINSAGNGTFPCNKGSVSIWVKQ

SEQ ID NO: 34340 - protein, 482 aa, Bacillus sp.
HDGTNGTIMQYFEWNVPNDGQHWNRLHNNAQNLKNAGITAIWIPPAWKATSQSDTGYGAYDLYDLGEFNQKGTVRTKYGTKAELERAIRSLKANGIQVYGDVVMNHKAGADFTERVQAVEVNPQNRNQEVSGTYQIEAWTGFNFPGRGNQHSSFKWRWYHFDGTDWDQSRQLENRIYKFRGKAWDWEVDTEFGNYDYLMYTDLDMDHPEVINELNRWGVWYANTLNLDGFRLDAVKHIKFSFMRDWLGHVRGQTGKNLFAVAEYWKNDLGALENYLSKTNWTMSAFDVPLHYNLYQASNSSGNYDMRNLLNGTLVQRHPNHAVTFVDNHDTQPGEALESFVQGWFKPLAYATILTREQGYPQVFYGDYYGIPSDGVPSYRQQIDPLLAARQQYAYGTQHDYLDNQDVIGWTREGDSAHAGSGLATVMSDGPGGSKTMYVGTAHAGQVFKDITGNRTDTVTINSAGNGTFPCNKGSVSIWVKQ

SEQ ID NO: 34341 - protein, 482 aa, Bacillus sp.
HDGTNGTIMQYFEWNVPNDGQHWNRLHNNAQNLKNAGITAIWIPPAWKGTSQSDTGYGAYDLYDLGEFNQKGTVRTKYGTKAELERAIRSLKANGIQVYGDVVMNHKSGADFTEQVQAVEVNPQNRNQEVSGTYQIEAWTGFNFPGRGNQHSSFKWRWYHFDGTDFDQSRRLSNRIYKFRGKAWDWEVDTEFGNYDYLMYADLDMDHPEVINELNRWGVWYANTLNLDGFRLDAVKHIKFSFMRDWLGHVRGQTGKNLFAVAEYWKNDLGALENYLSKTNWTMSAFDVPLHYNLYQASNSSGNYDMRNLLNGTLVQRHPSHAVTFVDNHDTQPGEALESFVQGWFKPLAYATILTREQGYPQVFYGDYYGIPSDGVPSYRQQIDPLLAARQQYAYGTQHDYLDNQDVIGWTREGDSAHAGSGLATVMSDGPGGSKTMYVGTAHAGQVFKDITGNRTDTVTINSAGNGTFPCNKGSVSIWVKQ

SEQ ID NO: 34342 - protein, 482 aa, Bacillus sp.
HDGTNGTIMQYFEWNVPNDGQHWNRLHNNAQNLKNAGITAIWIPPAWKGTSQSDTGYGAYDLYDLGEFNQKGTVRTKYGTKAELERAIRSLKANGIQVYGDVVMNHKAGADFTERVQAVEVNPQNRNQEVSGTYQIEAWTGFNFPGRGNQHSSFKWRWYHFDGTDFDQSRNLSNRIYKFRGKAWDWEVDTEFGNYDYLMYADLDMDHPEVINELNRWGVWYANTLNLDGFRLDAVKHIKFSFMRDWLGHVRGQTGKNLFAVAEYWKNDLGALENYLSKTNWTMSAFDVPLHYNLYQASNSSGNYDMRNLLNGTLVQRHPSHAVTFVDNHDTQPGEALESFVQGWFKPLAYATILTREQGYPQVFYGDYYGIPSDGVPSYRQQIDPLLAARQQYAYGTQHDYLDNQDVIGWTREGDSAHAGSGLATVMSDGPGGSKTMYVGTAHAGQVFKDITGNRTDTVTINSAGNGTFRCNKGSVSIWVKQ

SEQ ID NO: 34343 - protein, 482 aa, Bacillus sp.
HDGTNGTIMQYFEWNVPNDGQHWNRLHNNAQNLKNAGITAIWIPPAWKGTSQSDTGYGAYDLYDLGEFNQHGTVRTKYGTKAELERAIRSLKANGIQVYGDVVMNHKAGADFTERVQAVEVNPQNRNQEVSGTYQIEAWTGFNFPGRGNQHSSFKWRWYHFDGTDSDQSRQLSNRIYKFRGKAWDWEVDTEFGNYDYLMYADLDMDHPEVINELNRWGVWYANTLNLDGFRLDAVKHIKFSFMRDWLGHVRGQTGKNLFAVAEYWKNDLGALENYLSKTNWTMSAFDVPLHYNLYQASNSSGNYDMRNLLNGTLVQRHPSHAVTFVDNHDTQPGEALESFVQGWFKPLAYATILTREQGYPQVFYGDYYGIPSDGVPSYRQQIDPLLAARQQYAYGTQHDYLDNQDVIGWTREGDSAHAGSGLATVMSDGPGGSKTMYVGTAHAGQVFKDITGNRTDTVTINSAGNGTFPCNKGSVSIWVKQ

SEQ ID NO: 34344 - protein, 482 aa, Bacillus sp.
HDGTNGTIMQYFEWNVPNDGQHWNRLHNNAQNLKNAGITAIWIPPAWKGTSQSDTGYGAYDLYDLGEFNQRGTVRTKYGTKAELERAIRSLKANGIQVYGDVVMNHKAGADFTERVQAVEVNPQNRNQEVSGTYQIEAWTGFNFPGRGNQHSSFKWRWYHFDGTDWDQSRKLSNRIYKFRGKAWDWEVDTEFGNYDYLMYADLDMDHPEVINELNRWGVWYANTLNLDGFRLDAVKHIKFSFMRDWLGHVRGQTGKNLFAVAEYWKNDLGALENYLSKTNWTMSAFDVPLHYNLYQASNSSGNYDMRNLLNGTLVQRHPSHAVTFVDNHDTQPGEALESFVQGWFKPLAYATILTREQGYPQVFYGDYYGIPSDGVPSYRQQIDPLLAARQQYAYGTQHDYLDNQDVIGWTREGDSAHAGSGLATVMSDGPGGSKTMYVGTAHAGQVFKDITGNRTDTVTINSAGNGTFPCNKGSVSIWVKQ

SEQ ID NO: 34345 - protein, 482 aa, Bacillus sp.
HDGTNGTIMQYFEWNVPNDGQHWNRLHNNAQNLKNAGITAIWIPPAWKGTSQSDTGYGAYDLYDLGEFNQKGTVRTKYGTKAELERAIRSLKANGIQVYGDVVMNHKAGADFTERVQAVEVNPQNRNQEVSGTYQIEAWTGFNFPGRGNQHSSFKWRWYHFDGTDWDQSRDLSNRIYKFRGKAWDWEVDTEFGNYDYLMYGDLDMDHPEVINELNRWGVWYANTLNLDGFRLDAVKHIKFSFMRDWLGHVRGQTGKNLFAVAEYWKNDLGALENYLSKTNWTMSAFDVPLHYNLYQASNSSGNYDMRNLLNGTLVQRHPSHAVTFVDNHDTQPGEALESFVQGWFKPLAYATILTREQGYPQVFYGDYYGIPSDGVPSYRQQIDPLLAARQQYAYGTQHDYLDNQDVIGWTREGDSAHAGSGLATVMSDGPGGSKTMYVGTAHAGQVFKDITGNRTDTVTINSAGNGTFRCNKGSVSIWVKQ

SEQ ID NO: 34346 - protein, 482 aa, Bacillus sp.
HDGTNGTIMQYFEWNVPNDGQHWNRLHNNAQNLKNAGITAIWIPPAWKGASQSDTGYGAYDLYDLGEFNQKGTVRTKYGTKAELERAIRSLKANGIQVYGDVVMNHKAGADFTERVQAVEVNPQNRNQEVSGTYQIEAWTGFNFPGRGNQHSSFKWRWYHFDGTDWDQSRRLSNRIYKFRGKAWDWEVDTEFGNYDYLMYADLDMDHPEVINELNRWGVWYANTLNLDGFRLDAVKHIKFSFMRDWLGHVRGQTGKNLFAVAEYWKNDLGALENYLSKTNWTMSAFDVPLHYNLYQASNSSGNYDMRNLLNGTLVQRHPSHAVTFVDNHDTQPGEALESFVQGWFKPLAYATILTREQGYPQVFYGDYYGIPSDGVPSYRQQIDPLLAARQQYAYGTQHDYLDNQDVIGWTREGDSAHAGSGLATVMSDGPGGSKTMYVGTAHAGQVFKDITGNRTDTVTINSAGNGTFPCNKGSVSIWVKQ

SEQ ID NO: 34347 - protein, 482 aa, Bacillus sp.
HDGTNGTIMQYFEWNVPNDGQHWNRLHNNAQNLKNAGITAIWIPPAWKGTSQSDTGYGAYDLYDLGEFNQKGTVRTKYGTKAELERAIRSLKANGIQVYGDVVMNHKSGADFTEQVQAVEVNPQNRNQEVSGTYQIEAWTGFNFPGRGNQHSSFKWRWYHFDGTDFDQSRGLSNRIYKFRGKAWDWEVDTEFGNYDYLMYADLDMDHPEVINELNRWGVWYANTLNLDGFRLDAVKHIKFSFMRDWLGHVRGQTGKNLFAVAEYWKNDLGALENYLSKTNWTMSAFDVPLHYNLYQASNSSGNYDMRNLLNGTLVQRHPSHAVTFVDNHDTQPGEALESFVQGWFKPLAYATILTREQGYPQVFYGDYYGIPSDGVPSYRQQIDPLLAARQQYAYGTQHDYLDNQDVIGWTREGDSAHAGSGLATVMSDGPGGSKTMYVGTAHAGQVFKDITGNRTDTVTINSAGNGTFRCNKGSVSIWVKQ

SEQ ID NO: 34348 - protein, 482 aa, Bacillus sp.
HDGTNGTIMQYFEWNVPNDGQHWNRLHNNAQNLKNAGITAIWIPPAWKGTSQSDTGYGAYDLYDLGEFNQMGTVRTKYGTKAELERAIRSLKANGIQVYGDVVMNHKAGADFTERVQAVEVNPQNRNQEVSGTYQIEAWTGFNFPGRGNQHSSFKWRWYHFDGTDWDQSRSLSNRIYKFRGKAWDWEVDTEFGNYDYLMYADLDMDHPEVINELNRWGVWYANTLNLDGFRLDAVKHIKFSFMRDWLGHVRGQTGKNLFAVAEYWKNDLGALENYLSKTNWTMSAFDVPLHYNLYQASNSSGNYDMRNLLNGTLVQRHPSHAVTFVDNHDTQPGEALESFVQGWFKPLAYATILTREQGYPQVFYGDYYGIPSDGVPSYRQQIDPLLAARQQYAYGTQHDYLDNQDVIGWTREGDSAHAGSGLATVMSDGPGGSKTMYVGTAHAGQVFKDITGNRTDTVTINSAGNGTFPCNKGSVSIWVKQ

SEQ ID NO: 34349 - protein, 482 aa, Bacillus sp.
HDGTNGTIMQYFEWNVPNDGQHWNRLHNNAQNLKNAGITAIWIPPAWKGTSQSDTGYGAYDLYDLGEFNQRGTVRTKYGTKAELERAIRSLKANGIQVYGDVVMNHKAGADFTERVQAVEVNPQNRNQEVSGTYQIEAWTGFNFPGRGNQHSSFKWRWYHFDGTDWDQSRQLSNRIYKFRTKAWDWEVDTEFGNYDYLMYADLDMDHPEVINELNRWGVWYANTLNLDGFRLDAVKHIKFSFMRDWLGHVRAQTGKNLFAVAEYWKNDLGALENYLSKTNWTMSAFDVPLHYNLYQASNSSGNYDMRNLLNGTLVQRHPSHAVTFVDNHDTQPGEALESFVQGWFKPLAYATILTREQGYPQVFYGDYYGIPSDGVPSYRQQIDPLLAARQQYAYGTQHDYLDNQDVIGWTREGDSAHAGSGLATVMSDGPGGSKTMYVGTAHAGQVFKDITGNRTDTVTINSAGNGTFPCNKGSVSIWVKQ

SEQ ID NO: 34350 - protein, 482 aa, Bacillus sp.
HDGTNGTIMQYFEWNVPNDGQHWNRLHNNAQNLKNAGITAIWIPPAWKGTSQSDTGYGVYDLYDLGEFNQKGTVRTKYGTKAELERAIRSLKANGIQVYGDVVMNHKAGADFTEHVQAVEVNPQNRNQEVSGTYQIEAWTGFNFPGRGNQHSSFKWRWYHFDGTDWDQSRRVSNRIYKFRGKAWDWEVDTEFGNYDYLMYADLDMDHPEVINELNRWGVWYANTLNLDGFRLDAVKHIKFSFMRDWLGHVRGQTGKNLFAVAEYWKNDLGALENYLSKTNWTMSAFDVPLHYNLYQASNSSGNYDMRNLLNGTLVQRHPSHAVTFVDNHDTQPGEALESFVQGWFKPLAYATILTREQGYPQVFYGDYYGIPSDGVPSYRQQIDPLLAARQQYAYGTQHDYLDNQDVIGWTREGDSAHAGSGLATVMSDGPGGSKTMYVGTAHAGQVFKDITGNRTDTVTINSAGNGTFPCNKGSVSIWVKQ

SEQ ID NO: 34351 - protein, 482 aa, Bacillus sp.
HDGTNGTIMQYFEWNVPNDGQHWNRLHNNAQNLKNAGITAIWIPPAWKGTSQSDTGYGAYDLYDLGEFNQRGTVRTKYGTKAELERAIRSLKANGIQVYGDVVMNHKAGADFTERVRAVEVNPQNRNQEVSGTYQIEAWTGFNFPGRGNQHSSFKWRWYHFDGTDWDQSRQLSNRIYKFRTKAWDWEVDTEFGNYDYLMYADLDMDHPEVINELNRWGVWYANTLNLDGFRLDAVKHIKFSFMRDWLGHVRAQTGKNLFAVAEYWKNDLGALENYLSKTNWTMSAFDVPLHYNLYQASNSSGNYDMRNLLNGTLVQRHPSHAVTFVDNHDTQPGEALESFVQGWFKPLAYATILTREQGYPQVFYGDYYGIPSDGVPSYRQQIDPLLAARQQYAYGTQHDYLDNQDVIGWTREGDSAHAGSGLATVMSDGPGGSKTMYVGTAHAGQVFKDITGNRTDTVTINSAGNGTFPCNKGSVSIWVKQ

SEQ ID NO: 34352 - protein, 482 aa, Bacillus sp.
HDGTNGTIMQYFEWNVPNDGQHWNRLHNNAQNLKNAGITAIWIPPAWKGESQSDTGYGAYDLYDLGEFNQKGTVRTKYGTKAELERAIRSLKANGIQVYGDVVMNHKAGADFTERVQAVEVNPQNRNQEVSGTYQIEAWTGFNFPGRGNQHSSFKWRWYHFDGTDWDQSRRLSNRIYKFRGKAWDWEVDTEFGNYDYLMYADLDMDHPEVINELNRWGVWYANTLNLDGFRLDAVKHIKFSFMRDWLGHVRGQTGKNLFAVAEYWKNDLGALENYLSKTNWTMSAFDVPLHYNLYQASNSSGNYDMRNLLNGTLVQRHPSHAVTFVDNHDTQPGEALESFVQGWFKPLAYATILTREQGYPQVFYGDYYGIPSDGVPSYRQQIDPLLAARQQYAYGTQHDYLDNQDVIGWTREGDSAHAGSGLATVMSDGPGGSKTMYVGTAHAGQVFKDITGNRTDTVTINSAGNGTFPCNKGSVSIWVKQ

SEQ ID NO: 34353 - protein, 482 aa, Bacillus sp.
HDGTNGTIMQYFEWNVPNDGQHWNRLHNNAQNLKNAGITAIWIPPAWKGTSQSDTGYGAYDLYDLGEFNQKGTVRTKYGTKAELERAIRSLKANGIQVYGDVVMNHKAGADFTERVQAVEVNPQNRNQEVSGTYQIEAWTGFNFPGRGNQHSSFKWRWYHFDGTDHDQSRNASNRIYKFRGKAWDWEVDTEFGNYDYLMYADLDMDHPEVINELNRWGVWYANTLNLDGFRLDAVKHIKFSFMRDWLGHVRGQTGKNLFAVAEYWKNDLGALENYLSKTNWTMSAFDVPLHYNLYQASNSSGNYDMRNLLNGTLVQRHPSHAVTFVDNHDTQPGEALESFVQGWFKPLAYATILTREQGYPQVFYGDYYGIPSDGVPSYRQQIDPLLAARQQYAYGTQHDYLDNQDVIGWTREGDSAHAGSGLATVMSDGPGGSKTMYVGTAHAGQVFKDITGNRTDTVTINSAGNGTFPCNKGSVSIWVKQ

SEQ ID NO: 34354 - protein, 482 aa, Bacillus sp.
HDGTNGTIMQYFEWNVPNDGQHWNRLHNNAQNLKNAGITAIWIPPAWKGASQSDTGYGAYDLYDLGEFNQKGTVRTKYGTKAELERAIRSLKANGIQVYGDVVMNHKAGADFTERVQAVEVNPQNRNQEVSGTYQIEAWTGFNFPGRGNQHSSFKWRWYHFDGTDWDQSRDLSNRIYKFRGKAWDWEVDTEFGNYDYLMYADLDMDHPEVINELNRWGVWYANTLNLDGFRLDAVKHIKFSFMRDWLGHVRGQTGKNLFAVAEYWKNDLGALENYLSKTNWTMSAFDVPLHYNLYQASNSSGNYDMRNLLNGTLVQRHPSHAVTFVDNHDTQPGEALESFVQGWFKPLAYATILTREQGYPQVFYGDYYGIPSDGVPSYRQQIDPLLAARQQYAYGTQHDYLDNQDVIGWTREGDSAHAGSGLATVMSDGPGGSKTMYVGTAHAGQVFKDITGNRTDTVTINSAGNGTFPCNKGSVSIWVKQ

SEQ ID NO: 34355 - protein, 482 aa, Bacillus sp.
HDGTNGTIMQYFEWNVPNDGQHWNRLHNNAQNLKNAGITAIWIPPAWKGTSQSDTGYGAYDLYDLGEFNQKGTVRTKYGTKAELERAIRSLKANGIQVYGDVVMNHKAGADFTEQVQAVEVNPQNRNQEVSGTYQIEAWTGFNFPGRGNQHSSFKWRWYHFDGTDFDQSRNLSNRIYKFRGKAWDWEVDTEFGNYDYLMYADLDMDHPEVINELNRWGVWYANTLNLDGFRLDAVKHIKFSFMRDWLGHVRGQTGKNLFAVAEYWKNDLGALENYLSKTNWTMSAFDVPLHYNLYQASNSSGNYDMRNLLNGTLVQRHPSHAVTFVDNHDTQPGEALESFVQTWFKPLAYATILTREQGYPQVFYGDYYGIPSDGVPSYRQQIDPLLAARQQYAYGTQHDYLDNQDVIGWTREGDSAHAGSGLATVMSDGPGGSKTMYVGQAHAGQVFKDITGNRTDTVTINSAGNGTFPCNKASVSIWVKQ

SEQ ID NO: 34356 - protein, 482 aa, Bacillus sp.
HDGTNGTIMQYFEWNVPNDGQHWNRLHNNAQNLKNAGITAIWIPPAWKGTSQSDTGYGAYDLYDLGEFNQRGTVRTKYGTKAELERAIRSLKANGIQVYGDVVMNHKAGADFTERVQAVEVNPQNRNQEVSGTYQIEAWTGFNFPGRGNQHSSFKWRWYHFDGTDWDQSRQLSNRIYKFRTKAWDWEVDTEFGNYDYLMYADLDMDHPEVINELNRWGVWYANTLNLDGFRLDAVKHIKFSFMRDWLGHVRGQTGKNLFAVAEYWKNDLGALENYLSKTNWTMSAFDVPLHYNLYQASNSSGNYDMRNLLNGTLVQRHPSHAVTFVDNHDTQPGEALESFVQGWFKPLAYATILTREQGYPQVFYGDYYGIPSDGVPSYRQQIDPLLAARQQYAYGTQHDYLDNQDVIGWTREGDSAHAGSGLATVMSDGPGGSKTMYVGTAHAGQVFKDITGNRTDTVTINSAGNGTFPCNKGSVSIWVKQ

SEQ ID NO: 34357 - protein, 482 aa, Bacillus sp.
HDGTNGTIMQYFEWNVPNDGQHWNRLHNNAQNLKNAGITAIWIPPAWKGTSQSDTGYGAYDLYDLGEFNQRGTVRTKYGTKAELERAIRSLKANGIQVYGDVVMNHKAGADFTERVQAVEVNPQNRNQEVSGEYQIEAWTGFNFPGRGNQHSSFKWRWYHFDGTDWDQSRQLSNRIYKFRTKAWDWEVDTEFGNYDYLMYADLDMDHPEVINELNRWGVWYANTLNLDGFRLDAVKHIKFSFMRDWLGHVRGQTGKNLFAVAEYWKNDLGALENYLSKTNWTMSAFDVPLHYNLYQASNSSGNYDMRNLLNGTLVQRHPSHAVTFVDNHDTQPGEALESFVQGWFKPLAYATILTREQGYPQVFYGDYYGIPSDGVPSYRQQIDPLLAARQQYAYGTQHDYLDNQDVIGWTREGDSAHAGSGLATVMSDGPGGSKTMYVGTAHAGQVFKDITGNRTDTVTINSAGNGTFPCNKGSVSIWVKQ

SEQ ID NO: 34358 - protein, 482 aa, Bacillus sp.
HDGTNGTIMQYFEWNVPNDGQHWNRLHNNAQNLKNAGITAIWIPPAWKGTSQSDTGYGAYDLYDLGEFNQRGTVRTKYGTKAELERAIRSLKANGIQVYGDVVMNHKAGADFTERVQAVEVNPQNRNQEVSGTYQIEAWTGFNFPGRGNQHSSFKWRWYHFDGTDWDQSRSLSNRIYKFRGKAWDWEVDTEFGNYDYLMYADLDMDHPEVINELNRWGVWYANTLNLDGFRLDAVKHIKFSFMRDWLGHVRGQTGKNLFAVAEYWKNDLGALENYLSKTNWTMSAFDVPLHYNLYQASNSSGNYDMRNLLNGTLVQRHPSHAVTFVDNHDTQPGEALESFVQGWFKPLAYATILTREQGYPQVFYGDYYGIPSDGVPSYRQQIDPLLAARQQYAYGTQHDYLDNQDVIGWTREGDSAHAGSGLATVMSDGPGGSKTMYVGTAHAGQVFKDITGNRTDTVTINSAGNGTFPCNKGSVSIWVKQ

SEQ ID NO: 34359 - protein, 482 aa, Bacillus sp.
HDGTNGTIMQYFEWNVPNDGQHWNRLHNNAQNLKNAGITAIWIPPAWKGTSQSDTGYGAYDLYDLGEFNQKGTVRTKYGTKAELERAIRSLKANGIQVYGDVVMNHKAGADFTEHVQAVEVNPQNRNQEVSGTYQIEAWTGFNFPGRGNQHSSFKWRWYHFDGTDFDQSRNLSNRIYKFRGKAWDWEVDTEFGNYDYLMYADLDMDHPEVINELNRWGVWYANTLNLDGFRLDAVKHIKFSFMRDWLGHVRGQTGKNLFAVAEYWKNDLGALENYLSKTNWTMSAFDVPLHYNLYQASNSSGNYDMRNLLNGTLVQRHPSHAVTFVDNHDTQPGEALESFVQGWFKPLAYATILTREQGYPQVFYGDYYGIPSDGVPSYRQQIDPLLAARQQYAYGTQHDYLDNQDVIGWTREGDSAHAGSGLATVMSDGPGGSKTMYVGTAHAGQVFKDITGNRTDTVTINSAGNGTFPCNKGSVSIWVKQ

SEQ ID NO: 34360 - protein, 482 aa, Bacillus sp.
HDGTNGTIMQYFEWNVPNDGQHWNRLHNNAQNLKNAGITAIWIPPAWKGTSQSDTGYGAYDLYDLGEFNQRGTVRTKYGTKAELERAIRSLKANGIQVYGDVVMNHKAGADFTERVQAVEVNPQNRNQEVSGTYQIEAWTGFNFPGRGNQHSSFKWRWYHFDGTDMDQSRQLSNRIYKFRGKAWDWEVDTEFGNYDYLMYADLDMDHPEVINELNRWGVWYANTLNLDGFRLDAVKHIKFSFMRDWLGHVRGQTGKNLFAVAEYWKNDLGALENYLSKTNWTMSAFDVPLHYNLYQASNSSGNYDMRNLLNGTLVQRHPSHAVTFVDNHDTQPGEALESFVQGWFKPLAYATILTREQGYPQVFYGDYYGIPSDGVPSYRQQIDPLLAARQQYAYGTQHDYLDNQDVIGWTREGDSAHAGSGLATVMSDGPGGSKTMYVGTAHAGQVFKDITGNRTDTVTINSAGNGTFPCNKGSVSIWVKQ

SEQ ID NO: 34361 - protein, 482 aa, Bacillus sp.
HDGTNGTIMQYFEWNVPNDGQHWNRLHNNAQNLKNAGITAIWIPPAWKATSQSDTGYGAYDLYDLGEFNQKGTVRTKYGTKAELERAIRSLKANGIQVYGDVVMNHKAGADLTERVQAVEVNPQNRNQEVSGTYQIEAWTGFNFPGRGNQHSSFKWRWYHFDGTDFDQSRQLSNRIYKFRGKAWDWEVDTEFGNYDYLMYADLDMDHPEVINELNRWGVWYANTLNLDGFRLDAVKHIKFSFMRDWLGHVRGQTGKNLFAVAEYWKNDLGALENYLSKTNWTMSAFDVPLHYNLYQASNSSGNYDMRNLLNGTLVQRHPSHAVTFVDNHDTQPGEALESFVQGWFKPLAYATILTREQGYPQVFYGDYYGIPSDGVPSYRQQIDPLLAARQQYAYGTQHDYLDNQDVIGWTREGDSAHAGSGLATVMSDGPGGSKTMYVGTAHAGQVFKDITGNRTDTVTINSAGNGTFPCNKGSVSIWVKQ

SEQ ID NO: 34362 - protein, 482 aa, Bacillus sp.
HDGTNGTIMQYFEWNVPNDGQHWNRLHNNAQNLKNAGITAIWIPPAWKGTSQNDVGYGAYDLYDLGEFNQRGTVRTKYGTKAELERAIRSLKANGIQVYGDVVMNHKAGADQTEQVQAVEVNPQNRNQEVSGTYQIEAWTGFNFPGRGNQHSSFKWRWYHFDGTDFDQSRGLSNRIYKFRTKAWDWEVDTEFGNYDYLMYADLDMDHPEVINELNRWGVWYANTLNLDGFRLDAVKHIKFSFMRDWLGHVRGQTGKNLFAVAEYWKNDLGALENYLSKTNWTMSAFDVPLHYNLYQASNSSGNYDMRNLLNGTLVQRHPSHAVTFVDNHDTQPGEALESFVQGWFKPLAYATILTREQGYPQVFYGDYYGIPSDGVPSYRQQIDPLLAARQQYAYGTQHDYLDNQDVIGWTREGDSAHAGSGLATVMSDGPGGSKTMYVGTAHAGQVFKDITGNRTDTVTINSAGNGTFRCNKGSVSIWVKQ

SEQ ID NO: 34363 - protein, 482 aa, Bacillus sp.
HDGTNGTIMQYFEWNVPNDGQHWNRLHNNAQNLKNAGIKAIWIPPAWKGTSQSDTGYGAYDLYDLGEFNQKGTVRTKYGTKAELERAIRSLKANGIQVYGDVVMNHKAGADFTERVQAVEVNPQNRNQEVSGTYQIEAWTGFNFPGRHNQHSSFKWRWYHFDGTDWDQSRQLSNRIYKFRGKAWDWEVDTEFGNYDYLMYADLDMDHPEVINELNRWGVWYANTLNLDGFRLDAVKHIKFSFMRDWLGHVRGQTGKNLFAVAEYWKNDLGALENYLSKTNWTMSAFDVPLHYNLYQASNSSGNYDMRNLLNGTLVQRHPSHAVTFVDNHDTQPGEALESFVQGWFKPLAYATILTREQGYPQVFYGDYYGIPSDGVPSYRQQIDPLLAARQQYAYGTQHDYLDNQDVIGWTREGDSAHAGSGLATVMSDGPGGSKTMYVGTAHAGQVFKDITGNRTDTVTINSAGNGTFPCNKGSVSIWVKQ

SEQ ID NO: 34364 - protein, 482 aa, Bacillus sp.
HDGTNGTIMQYFEWNVPNDGQHWNRLHNNAQNLKNHGITAIWIPPAWKGTSQSDTGYGAYDLYDLGEFNQKGTVRTKYGTKAELERAIRSLKANGIQVYGDVVMNHKAGADQTERVQAVEVNPQNRNQEVSGTYQIEAWTGFNFPGRGNQHSSFKWRWYHFDGTDFDQSRNLSNRIYKFRGKAWDWEVDTEFGNYDYLMYADLDMDHPEVINELNRWGVWYANTLNLDGFRLDAVKHIKFSFMRDWLGHVRGQTGKNLFAVAEYWKNDLGALENYLSKTNWTMSAFDVPLHYNLYQASNSSGNYDMRNLLNGTLVQRHPSHAVTFVDNHDTQPGEALESFVQGWFKPLAYATILTREQGYPQVFYGDYYGIPSDGVPSYRQQIDPLLAARQQYAYGTQHDYLDNQDVIGWTREGDSAHAGSGLATVMSDGPGGSKTMYVGTAHAGQVFKDITGNRTDTVTINSAGNGTFPCNKGSVSIWVKQ

SEQ ID NO: 34365 - protein, 482 aa, Bacillus sp.
HDGTNGTIMQYFEWNVPNDGQHWNRLHNNAQNLKNAGITAIWIPPAWKGTSQSDTGYGAYDLYDLGEFNQRGTVRTKYGTKAELERAIRSLKANGIQVYGDVVMNHKAGADFTERVQAVEVNPQNRNQEVSGTYQIEAWTGFNFPGRGNQHSSFKWRWYHFDGTDWDQSRRLSNRIYKFRGKAWDWEVDTEFGNYDYLMYADLDMDHPEVINELNRWGVWYANTLNLDGFRLDAVKHIKFSFMRDWLGHVRGQTGKNLFAVAEYWKNDLGALENYLSKTNWTMSAFDVPLHYNLYQASNSSGNYDMRNLLNGTLVQRHPSHAVTFVDNHDTQPGEALESFVQGWFKPLAYATILTREQGYPQVFYGDYYGIPSDGVPSYRQQIDPLLAARQQYAYGTQHDYLDNQDVIGWTREGDSAHAGSGLATVMSDGPGGSKTMYVGTAHAGQVFKDITGNRTDTVTINSAGNGTFPCNKGSVSIWVKQ

SEQ ID NO: 34366 - protein, 482 aa, Bacillus sp.
HDGTNGTIMQYFEWNVPNDGQHWNRLHNNAQNLKNAGITAIWIPPAWKATSQSDTGYGAYDLYDLGEFNQKGTVRTKYGTKAELERAIRSLKANGIQVYGDVVMNHKAGADFTERVQAVEVNPQNRNQEVSGTYQIEAWTGFNFPGRGNQHSSFKWRWYHFDGTDWDQSRQVSNRIYKFRGKAWDWEVDTEFGNYDYLMYVDLDMDHPEVINELNRWGVWYANTLNLDGFRLDAVKHIKFSFMRDWLGHVRGQTGKNLFAVAEYWKNDLGALENYLSKTNWTMSAFDVPLHYNLYQASNSSGNYDMRNLLNGTLVQRHPSHAVTFVDNHDTQPGEALESFVQGWFKPLAYATILTREQGYPQVFYGDYYGIPSDGVPSYRQQIDPLLAARQQYAYGTQHDYLDNQDVIGWTREGDSAHAGSGLATVMSDGPGGSKTMYVGTAHAGQVFKDITGNRTDTVTINSAGNGTFPCNKGSVSIWVKQ

SEQ ID NO: 34367 - protein, 482 aa, Bacillus sp.
HDGTNGTIMQYFEWNVPNDGQHWNRLHNNAQNLKNAGITAIWIPPAWKGTSQSDTGYGAYDLYDLGEFNQAGTVRTKYGTKAELERAIRSLKANGIQVYGDVVMNHKAGADFTERVQAVEVNPQNRNQEVSGTYQIEAWTGFNFPGRGNQHSSFKWRWYHFDGTDFDQSRQLSNRIYKFRGKAWDWEVDTEFGNYDYLMYADLDMDHPEVINELNRWGVWYANTLNLDGFRLDAVKHIKFSFMRDWLGHVRGQTGKNLFAVAEYWKNDLGALENYLSKTNWTMSAFDVPLHYNLYQASNSSGNYDMRNLLNGTLVQRHPSHAVTFVDNHDTQPGEALESFVQGWFKPLAYATILTREQGYPQVFYGDYYGIPSDGVPSYRQQIDPLLAARQQYAYGTQHDYLDNQDVIGWTREGDSAHAGSGLATVMSDGPGGSKTMYVGTAHAGQVFKDITGNRTDTVTINSAGNGTFPCNKGSVSIWVKQ

SEQ ID NO: 34368 - protein, 482 aa, Bacillus sp.
HDGTNGTIMQYFEWNVPNDGQHWNRLHNNAQNLKNAGITAIWIPPAWKGASQSDTGYGAYDLYDLGEFNQKGTVRTKYGTKAELERAIRSLKANGIQVYGDVVMNHKAGADFTERVQAVEVNPQNRNQEVSGTYQIEAWTGFNFPGRGNQHSSFKWRWYHFDGTDWDQSRKLSNRIYKFRGKAWDWEVDTEFGNYDYLMYADLDMDHPEVINELNRWGVWYANTLNLDGFRLDAVKHIKFSFMRDWLGHVRGQTGKNLFAVAEYWKNDLGALENYLSKTNWTMSAFDVPLHYNLYQASNSSGNYDMRNLLNGTLVQRHPSHAVTFVDNHDTQPGEALESFVQGWFKPLAYATILTREQGYPQVFYGDYYGIPSDGVPSYRQQIDPLLAARQQYAYGTQHDYLDNQDVIGWTREGDSAHAGSGLATVMSDGPGGSKTMYVGTAHAGQVFKDITGNRTDTVTINSAGNGTFPCNKGSVSIWVKQ

SEQ ID NO: 34369 - protein, 482 aa, Bacillus sp.
HDGTNGTIMQYFEWNVPNDGQHWNRLHNNAQNLKNAGITAIWIPPAWKATSQSDTGYGAYDLYDLGEFNQKGTVRTKYGTKAELERAIRSLKANGIQVYGDVVMNHKAGADFTERVQAVEVNPQNRNQEVSGTYQIEAWTGFNFPGRGNQHSSFKWRWYHFDGTDWDQSRQLENRIYKFRGKAWDWEVDTEFGNYDYLMYTDLDMDHPEVINELNRWGVWYANTLNLDGFRLDAVKHIKFSFMRDWLGHVRGQTGKNLFAVAEYWKNDLGALENYLSKTNWTMSAFDVPLHYNLYQASNSSGNYDMRNLLNGTLVQRHPSHAVTFVDNHDTQPGEALESFVQGWFKPLAYATILTREQGYPQVFYGDYYGIPSDGVPSYRQQIDPLLAARQQYAYGTQHDYLDNQDVIGWTREGDSAHAGSGLATVMSDGPGGSKTMYVGTAHAGQVFKDITGNRTDTVTINSAGNGTFPCNKGSVSIWVKQ

SEQ ID NO: 34370 - protein, 482 aa, Bacillus sp.
HDGTNGTIMQYFEWNVPNDGQHWNRLHNNAQNLKNAGITAIWIPPAWKGTSQSDTGYGAYDLYDLGEFNQQGTVRTKYGTKAELERAIRSLKANGIQVYGDVVMNHKAGADFTERVQAVEVNPQNRNQEVSGTYQIEAWTGFNFPGRGNQHSSFKWRWYHFDGTDHDQSRQLSNRIYKFRGKAWDWEVDTEFGNYDYLMYADLDMDHPEVINELNRWGVWYANTLNLDGFRLDAVKHIKFSFMRDWLGHVRGQTGKNLFAVAEYWKNDLGALENYLSKTNWTMSAFDVPLHYNLYQASNSSGNYDMRNLLNGTLVQRHPSHAVTFVDNHDTQPGEALESFVQGWFKPLAYATILTREQGYPQVFYGDYYGIPSDGVPSYRQQIDPLLAARQQYAYGTQHDYLDNQDVIGWTREGDSAHAGSGLATVMSDGPGGSKTMYVGTAHAGQVFKDITGNRTDTVTINSAGNGTFPCNKGSVSIWVKQ

SEQ ID NO: 34371 - protein, 482 aa, Bacillus sp.
HDGTNGTIMQYFEWNVPNDGQHWNRLHNNAQNLKNAGITAIWIPPAWKGTSQSDTGYGAYDLYDLGEFNQKGTVRTKYGTKAELERAIRSLKANGIQVYGDVVMNHKAGADFTERVQAVEVNPQNRNQEVSGTYQIEAWTGFNFPGRGNQHSSFKWRWYHFDGTDYDQSREVHNRIYKFRGKAWDWEVDTEFGNYDYLMYADLDMDHPEVINELNRWGVWYANTLNLDGFRLDAVKHIKFSFMRDWLGHVRGQTGKNLFAVAEYWKNDLGALENYLSKTNWTMSAFDVPLHYNLYQASNSSGNYDMRNLLNGTLVQRHPSHAVTFVDNHDTQPGEALESFVQGWFKPLAYATILTREQGYPQVFYGDYYGIPSDGVPSYRQQIDPLLAARQQYAYGTQHDYLDNQDVIGWTREGDSAHAGSGLATVMSDGPGGSKTMYVGTAHAGQVFKDITGNRTDTVTINSAGNGTFPCNKGSVSIWVKQ

SEQ ID NO: 34372 - protein, 482 aa, Bacillus sp.
HDGTNGTIMQYFEWNVPNDGQHWNRLHNNAQNLKNAGITAIWIPPAWKATSQSDTGYGAYDLYDLGEFNQKGTVRTKYGTKAELERAIRSLKANGIQVYGDVVMNHKAGADFTERVQAVEVNPQNRNQEVSGTYQIEAWTGFNFPGRGNQHSSFKWRWYHFDGTDWDQSRDLSNRIYKFRGKAWDWEVDTEFGNYDYLMYADLDMDHPEVINELNRWGVWYANTLNLDGFRLDAVKHIKFSFMRDWLGHVRGQTGKNLFAVAEYWKNDLGALENYLSKTNWTMSAFDVPLHYNLYQASNSSGNYDMRNLLNGTLVQRHPSHAVTFVDNHDTQPGEALESFVQGWFKPLAYATILTREQGYPQVFYGDYYGIPSDGVPSYRQQIDPLLAARQQYAYGTQHDYLDNQDVIGWTREGDSAHAGSGLATVMSDGPGGSKTMYVGTAHAGQVFKDITGNRTDTVTINSAGNGTFPCNKGSVSIWVKQ

SEQ ID NO: 34373 - protein, 482 aa, Bacillus sp.
HDGTNGTIMQYFEWNVPNDGQHWNRLHNNAQNLKNAGITAIWIPPAWKGTSQSDTGYGAYDLYDLGEFNQRGTVRTKYGTKAELERAIRSLKANGIQVYGDVVMNHKAGADFTERVQAVEVNPQNRNQEVSGEYQIEAWTGFNFPGRGNQHSSFKWRWYHFDGTDWDQSRQLSNRIYKFRGKAWDWEVDTEFGNYDYLMYGDLDMDHPEVINELNRWGVWYANTLNLDGFRLDAVKHIKFSFMRDWLGHVRAQTGKNLFAVAEYWKNDLGALENYLSKTNWTMSAFDVPLHYNLYQASNSSGNYDMRNLLNGTLVQRHPSHAVTFVDNHDTQPGEALESFVQGWFKPLAYATILTREQGYPQVFYGDYYGIPSDGVPSYRQQIDPLLAARQQYAYGTQHDYLDNQDVIGWTREGDSAHAGSGLATVMSDGPGGSKTMYVGTAHAGQVFKDITGNRTDTVTINSAGNGTFRCNKGSVSIWVKQ

SEQ ID NO: 34374 - protein, 482 aa, Bacillus sp.
HDGTNGTIMQYFEWNVPNDGQHWNRLHNNAQNLKNAGITAIWIPPAWKGGSQSDTGYGAYDLYDLGEFNQKGTVRTKYGTKAELERAIRSLKANGIQVYGDVVMNHKAGADFTERVQAVEVNPQNRNQEVSGTYQIEAWTGFNFPGRGNQHSSFKWRWYHFDGTDWDQSRQLSNRIYKFRGKAWDWEVDTEFGNYDYLMGADLDMDHPEVINELNRWGVWYANTLNLDGFRLDAVKHIKFSFMRDWLGHVRGQTGKNLFAVAEYWKNDLGALENYLSKTNWTMSAFDVPLHYNLYQASNSSGNYDMRNLLNGTLVQRHPSHAVTFVDNHDTQPGEALESFVQGWFKPLAYATILTREQGYPQVFYGDYYGIPSDGVPSYRQQIDPLLAARQQYAYGTQHDYLDNQDVIGWTREGDSAHAGSGLATVMSDGPGGSKTMYVGTAHAGQVFKDITGNRTDTVTINSAGNGTFPCNKGSVSIWVKQ

SEQ ID NO: 34375 - protein, 482 aa, Bacillus sp.
HDGTNGTIMQYFEWNVPNDGQHWNRLHNNAQNLKNAGITAIWIPPAWKGTSQSDTGYGAYDLYDLGEFNQKGTVRTKYGTKAELERAIRSLKANGIQVYGDVVMNHKAGADFTERVQAVEVNPQNRNQEVSGTYQIEAWTGFNFPGRGNQHSSFKWRWYHFDGTDWDQSRQLSNRIYKFRGKAWDWEVDTEFGNYDYLMYADLDMDHPEVINELNRWGVWYANTLNLDGFRLDAVKHIKFSFMRDWLGHVRGQTGKNLFAVAEYWKNDLGALENYLSKTNWTMSAFDAPLHNNLYTASNSSGNYDMRNLLNGTLVQRHPSHAVTFVDNHDTQPGEALESFVQGWFKPLAYATILTREQGYPQVFYGDYYGIPSDGVPSYRQQIDPLLAARQQYAYGTQHDYLDNQDVIGWTREGDSAHAGSGLATVMSDGPGGSKTMYVGTAHAGQVFKDITGNRTDTVTINSAGNGTFPCNKGSVSIWVKQ

SEQ ID NO: 34376 - protein, 482 aa, Bacillus sp.
HDGTNGTIMQYFEWNVPNDGQHWNRLHNNAQNLKNAGITAIWIPPAWKGTSQSDTGYGAYDLYDLGEFNQKGTVRTKYGTKAELERAIRSLKANGIQVYGDVVMNHKAGADFTERVQAVEVNPQNRNQEVSGTYQIEAWTGFNFPGRGNQHSSFKWRWYHFDGTDFDQSRGLSNRIYKFRGKAWDWEVDTEFGNYDYLMYADLDMDHPEVINELNRWGVWYANTLNLDGFRLDAVKHIKFSFMRDWLGHVRGQTGKNLFAVAEYWKNDLGALENYLSKTNWTMSAFDVPLHYNLYQASNSSGNYDMRNLLNGTLVQRHPSHAVTFVDNHDTQPGEALESFVQGWFKPLAYATILTREQGYPQVFYGDYYGIPSDGVPSYRQQIDPLLAARQQYAYGTQHDYLDNQDVIGWTREGDSAHAGSGLATVMSDGPGGSKTMYVGTAHAGQVFKDITGNRTDTVTINSAGNGTFRCNKGSVSIWVKQ

SEQ ID NO: 34377 - protein, 482 aa, Bacillus sp.
HDGTNGTIMQYFEWNVPNDGQHWNRLHNNAQNLKNAGITAIWIPPAWKGTSQSDTGYGAYDLYDLGEFNQRGTVRTKYGTKAELERAIRSLKANGIQVYGDVVMNHKAGADFTERVQAVEVNPQNRNQEVSGTYQIEAWTGFNFPGRGNQHSSFKWRWYHFDGTDLDQSRQLSNRIYKFRGKAWDWEVDTEFGNYDYLMYADLDMDHPEVINELNRWGVWYANTLNLDGFRLDAVKHIKFSFMRDWLGHVRGQTGKNLFAVAEYWKNDLGALENYLSKTNWTMSAFDVPLHYNLYQASNSSGNYDMRNLLNGTLVQRHPSHAVTFVDNHDTQPGEALESFVQGWFKPLAYATILTREQGYPQVFYGDYYGIPSDGVPSYRQQIDPLLAARQQYAYGTQHDYLDNQDVIGWTREGDSAHAGSGLATVMSDGPGGSKTMYVGTAHAGQVFKDITGNRTDTVTINSAGNGTFPCNKGSVSIWVKQ

SEQ ID NO: 34378 - protein, 482 aa, Bacillus sp.
HDGTNGTIMQYFEWNVPNDGQHWNRLHNNAQNLKNAGITAIWIPPAWKGESQSDTGYGAYDLYDLGEFNQKGTVRTKYGTKAELERAIRSLKANGIQVYGDVVMNHKAGADFTERVQAVEVNPQNRNQEVSGTYQIEAWTGFNFPGRGNQHSSFKWRWYHFDGTDWDQSRLLSNRIYKFRGKAWDWEVDTEFGNYDYLMYADLDMDHPEVINELNRWGVWYANTLNLDGFRLDAVKHIKFSFMRDWLGHVRGQTGKNLFAVAEYWKNDLGALENYLSKTNWTMSAFDVPLHYNLYQASNSSGNYDMRNLLNGTLVQRHPSHAVTFVDNHDTQPGEALESFVQGWFKPLAYATILTREQGYPQVFYGDYYGIPSDGVPSYRQQIDPLLAARQQYAYGTQHDYLDNQDVIGWTREGDSAHAGSGLATVMSDGPGGSKTMYVGTAHAGQVFKDITGNRTDTVTINSAGNGTFPCNKGSVSIWVKQ

SEQ ID NO: 34379 - protein, 482 aa, Bacillus sp.
HDGTNGTIMQYFEWNVPNDGQHWNRLHNNAQNLKNAGITAIWIPPAWKGTSQSDTGYGAYDLYDLGEFNQKGTVRTKYGTKAELERAIRSLKANGIQVYGDVVMNHKAGADFTERVQAVEVNPQNRNQEVSGTYQIEAWTGFNFPGRGNQHSSFKWRWYHFDGTDWDQSRQLSNRIYKFRGKAWDWEVDTEFGNYDYLMYADLDMDHPEVINELNRWGVWYANTLNLDGFRLDAVKHIKFSFMRDWLGHVRGQTGKNLFAVAEYWSNDLGKLENYLSKTNWTMSAFDVPLHYNLYQASNSSGNYDMRNLLNGTLVQRHPSHAVTFVDNHDTQPGEALESFVQGWFKPLAYATILTREQGYPQVFYGDYYGIPSDGVPSYRQQIDPLLAARQQYAYGTQHDYLDNQDVIGWTREGDSAHAGSGLATVMSDGPGGSKTMYVGTAHAGQVFKDITGNRTDTVTINSAGNGTFPCNKGSVSIWVKQ

SEQ ID NO: 34380 - protein, 482 aa, Bacillus sp.
HDGTNGTIMQYFEWNVPNDGQHWNRLHNNAQNLKNVGITAIWIPPAWKGTSQSDTGYGAYDLYDLGEFNQKGTVRTKYGTKAELERAIRSLKANGIQVYGDVVMNHKSGADQTERVQAVEVNPQNRNQEVSGTYQIEAWTGFNFPGRGNQHSSFKWRWYHFDGTDFDQSRRLSNRIYKFRGKAWDWEVDTEFGNYDYLMYADLDMDHPEVINELNRWGVWYANTLNLDGFRLDAVKHIKFSFMRDWLGHVRGQTGKNLFAVAEYWKNDLGALENYLSKTNWTMSAFDVPLHYNLYQASNSSGNYDMRNLLNGTLVQRHPSHAVTFVDNHDTQPGEALESFVQGWFKPLAYATILTREQGYPQVFYGDYYGIPSDGVPSYRQQIDPLLAARQQYAYGTQHDYLDNQDVIGWTREGDSAHAGSGLATVMSDGPGGSKTMYVGTAHAGQVFKDITGNRTDTVTINSAGNGTFPCNKGSVSIWVKQ

SEQ ID NO: 34381 - protein, 482 aa, Bacillus sp.
HDGTNGTIMQYFEWNVPNDGQHWNRLHNNAQNLKNAGITAIWIPPAWKGTSQSDTGYGAYDLYDLGEFNQRGTVRTKYGTKAELERAIRSLKANGIQVYGDVVMNHKAGADFTERVQAVEVNPQNRNQEVSGTYQIEAWTGFNFPGRGNQHSSFKWRWYHFDGTDWDQSRTLSNRIYKFRGKAWDWEVDTEFGNYDYLMYADLDMDHPEVINELNRWGVWYANTLNLDGFRLDAVKHIKFSFMRDWLGHVRGQTGKNLFAVAEYWKNDLGALENYLSKTNWTMSAFDVPLHYNLYQASNSSGNYDMRNLLNGTLVQRHPSHAVTFVDNHDTQPGEALESFVQGWFKPLAYATILTREQGYPQVFYGDYYGIPSDGVPSYRQQIDPLLAARQQYAYGTQHDYLDNQDVIGWTREGDSAHAGSGLATVMSDGPGGSKTMYVGTAHAGQVFKDITGNRTDTVTINSAGNGTFPCNKGSVSIWVKQ

SEQ ID NO: 34382 - protein, 482 aa, Bacillus sp.
HDGTNGTIMQYFEWNVPNDGQHWNRLHNNAQNLKNAGITAIWIPPAWKGDSQSDTGYGAYDLYDLGEFNQKGTVRTKYGTKAELERAIRSLKANGIQVYGDVVMNHKAGADFTERVQAVEVNPQNRNQEVSGTYQIEAWTGFNFPGRGNQHSSFKWRWYHFDGTDWDQSRNLSNRIYKFRGKAWDWEVDTEFGNYDYLMYADLDMDHPEVINELNRWGVWYANTLNLDGFRLDAVKHIKFSFMRDWLGHVRGQTGKNLFAVAEYWKNDLGALENYLSKTNWTMSAFDVPLHYNLYQASNSSGNYDMRNLLNGTLVQRHPSHAVTFVDNHDTQPGEALESFVQGWFKPLAYATILTREQGYPQVFYGDYYGIPSDGVPSYRQQIDPLLAARQQYAYGTQHDYLDNQDVIGWTREGDSAHAGSGLATVMSDGPGGSKTMYVGTAHAGQVFKDITGNRTDTVTINSAGNGTFPCNKGSVSIWVKQ

SEQ ID NO: 34383 - protein, 482 aa, Bacillus sp.
HDGTNGTIMQYFEWNVPNDGQHWNRLHNNAQNLKNAGITAIWIPPAWKGTSQSDTGYGAYDLYDLGEFNQQGTVRTKYGTKAELERAIRSLKANGIQVYGDVVMNHKAGADFTERVQAVEVNPQNRNQEVSGTYQIEAWTGFNFPGRGNQHSSFKWRWYHFDGTDWDQSRRLSNRIYKFRGKAWDWEVDTEFGNYDYLMYADLDMDHPEVINELNRWGVWYANTLNLDGFRLDAVKHIKFSFMRDWLGHVRGQTGKNLFAVAEYWKNDLGALENYLSKTNWTMSAFDVPLHYNLYQASNSSGNYDMRNLLNGTLVQRHPSHAVTFVDNHDTQPGEALESFVQGWFKPLAYATILTREQGYPQVFYGDYYGIPSDGVPSYRQQIDPLLAARQQYAYGTQHDYLDNQDVIGWTREGDSAHAGSGLATVMSDGPGGSKTMYVGTAHAGQVFKDITGNRTDTVTINSAGNGTFPCNKGSVSIWVKQ

SEQ ID NO: 34384 - protein, 482 aa, Bacillus sp.
HDGTNGTIMQYFEWNVPNDGQHWNRLHNNAQNLKNAGITAIWIPPAWKGTSQSDTGYGAYDLYDLGEFNQKGTVRTKYGTKAELERAIRSLKANGIQVYGDVVMNHKAGADFTERVQAVEVNPQNRNQEVSGTYQIEAWTGFNFPGRGNQHSSFKWRWYHFDGTDWDQSRQLSNRIYKFRGKAWDWEVDTEFGNYDYLMYADLDMDHPEVINELNRWGVWYANTLNLDGFRLDAVKHIKFSFMRDWLGHVRGQTGKNLFAVAEYWKNDLGALENYLSKTNWTMSAFDAPLHYNLYQASNSSGNYDMRNLLNGTLVQRHPSHAVTLVDNHDTQPGEALESFVQGWFKPLAYATILTREQGYPQVFYGDYYGIPSDGVPSYRQQIDPLLAARQQYAYGTQHDYLDNQDVIGWTREGDSAHAGSGLATVMSDGPGGSKTMYVGTAHAGQVFKDITGNRTDTVTINSAGNGTFPCNKGSVSIWVKQ

SEQ ID NO: 34385 - protein, 482 aa, Bacillus sp.
HDGTNGTIMQYFEWNVPNDGQHWNRLHNNAQNLKNAGITAIWIPPAWKGGSQSDTGYGAYDLYDLGEFNQKGTVRTKYGTKAELERAIRSLKANGIQVYGDVVMNHKANADFTERVQAVEVNPQNRNQEVSGTYQIEAWTGFNFPGRGNQHSSFKWRWYHFDGTDWDQSRQLSNRIYKFRGKAWDWEVDTEFGNYDYLMYADLDMDHPEVINELNRWGVWYANTLNLDGFRLDAVKHIKFSFMRDWLGHVRGQTGKNLFAVAEYWKNDLGALENYLSKTNWTMSAFDVPLHYNLYQASNSSGNYDMRNLLNGTLVQRHPSHAVTFVDNHDTQPGEALESFVQGWFKPLAYATILTREQGYPQVFYGDYYGIPSDGVPSYRQQIDPLLAARQQYAYGTQHDYLDNQDVIGWTREGDSAHAGSGLATVMSDGPGGSKTMYVGTAHAGQVFKDITGNRTDTVTINSAGNGTFPCNKGSVSIWVKQ

SEQ ID NO: 34386 - protein, 482 aa, Bacillus sp.
HDGTNGTIMQYFEWNVPNDGQHWNRLHNNAQNLKNAGITAIWIPPAWKATSQSDTGYGAYDLYDLGEFNQKGTVRTKYGTKAELERAIRSLKANGIQVYGDVVMNHKAGADFTERVQAVEVNPQNRNQEVSGTYQIEAWTGFNFPGRGNQHSSFKWRWYHFDGTDWDQSRQLSNRIYKFRGKAWDWEVDTEFGNYDYLMYTDLDMDHPEVINELNRWGVWYANTLNLDGFRLDAVKHIKFSFMRDWLGHVRGQTGKNLFAVAEYWKNDLGALENYLSKTNWTMSAFDVPLHYNLYQASNSSGNYDMRNLLNGTLVQRHPSHAVTFVDNHDTQPGEALESFVQGWFKPLAYATILTREQGYPQVFYGDYYGIPSDGVPSYRQQIDPLLAARQQYAYGTQHDYLDNQDVIGWTREGDSAHAGSGLATVMSDGPGGSKTMYVGTAHAGQVFKDITGNRTDTVTINSAGNGTFPCNKGSVSIWVKQ

SEQ ID NO: 34387 - protein, 482 aa, Bacillus sp.
HDGTNGTIMQYFEWNVPNDGQHWNRLHNNAQNLKNAGITAIWIPPAWKGTSQSDTGYGAYDLYDLGEFNQRGTVRTKYGTKAELERAIRSLKANGIQVYGDVVMNHKAGADFTEQVQAVEVNPQNRNQEVSGTYQIEAWTGFNFPGRGNQHSSFKWRWYHFDGTDWDQSRQLSNRIYKFRTKAWDWEVDTEFGNYDYLMYADLDMDHPEVINELNRWGVWYANTLNLDGFRLDAVKHIKFSFMRDWLGHVRGQTGKNLFAVAEYWKNDLGALENYLSKTNWTMSAFDVPLHYNLYQASNSSGNYDMRNLLNGTLVQRHPSHAVTFVDNHDTQPGEALESFVQGWFKPLAYATILTREQGYPQVFYGDYYGIPSDGVPSYRQQIDPLLAARQQYAYGTQHDYLDNQDVIGWTREGDSAHAGSGLATVMSDGPGGSKTMYVGTAHAGQVFKDITGNRTDTVTINSAGNGTFPCNKGSVSIWVKQ

SEQ ID NO: 34388 - protein, 482 aa, Bacillus sp.
HDGTNGTIMQYFEWNVPNDGQHWNRLHNNAQNLKNAGITAIWIPPAWKGTSQSDTGYGAYDLYDLGEFNQQGTVRTKYGTKAELERAIRSLKANGIQVYGDVVMNHKAGADFTERVQAVEVNPQNRNQEVSGTYQIEAWTGFNFPGRGNQHSSFKWRWYHFDGTDRDQSRQLSNRIYKFRGKAWDWEVDTEFGNYDYLMYADLDMDHPEVINELNRWGVWYANTLNLDGFRLDAVKHIKFSFMRDWLGHVRGQTGKNLFAVAEYWKNDLGALENYLSKTNWTMSAFDVPLHYNLYQASNSSGNYDMRNLLNGTLVQRHPSHAVTFVDNHDTQPGEALESFVQGWFKPLAYATILTREQGYPQVFYGDYYGIPSDGVPSYRQQIDPLLAARQQYAYGTQHDYLDNQDVIGWTREGDSAHAGSGLATVMSDGPGGSKTMYVGTAHAGQVFKDITGNRTDTVTINSAGNGTFPCNKGSVSIWVKQ

SEQ ID NO: 34389 - protein, 482 aa, Bacillus sp.
HDGTNGTIMQYFEWNVPNDGQHWNRLHNNAQNLKNAGITAIWIPPAWKGGSQSDTGYGAYDLYDLGEFNQKGTVRTKYGTKAELERAIRSLKANGIQVYGDVVMNHKAGADFTERVQAVEVNPQNRNQEVSGTYQIEAWTGFNFPGRGNQHSSFKWRWYHFDGTDWDQSRKLSNRIYKFRGKAWDWEVDTEFGNYDYLMYADLDMDHPEVINELNRWGVWYANTLNLDGFRLDAVKHIKFSFMRDWLGHVRGQTGKNLFAVAEYWKNDLGALENYLSKTNWTMSAFDVPLHYNLYQASNSSGNYDMRNLLNGTLVQRHPSHAVTFVDNHDTQPGEALESFVQGWFKPLAYATILTREQGYPQVFYGDYYGIPSDGVPSYRQQIDPLLAARQQYAYGTQHDYLDNQDVIGWTREGDSAHAGSGLATVMSDGPGGSKTMYVGTAHAGQVFKDITGNRTDTVTINSAGNGTFPCNKGSVSIWVKQ

SEQ ID NO: 34390 - protein, 482 aa, Bacillus sp.
HDGTNGTIMQYFEWNVPNDGQHWNRLHNNAQNLKNAGITAIWIPPAWKGTSQSDTGYGAYDLYDLGEFNQKGTVRTKYGTKAELERAIRSLKANGIQVYGDVVFNHKAGADFTERVQAVEVNPQNRNQEVSGTYQIEAWTGFNFPGRGNQHSSFKWRWYHFDGTDWDQSRQLSNRIYKFRTKAWDWEVDTEFGNYDYLMYADLDMDHPEVINELNRWGVWYANTLNLDGFRLDAVKHIKFSFMRDWLGHVRGQTGKNLFAVAEYWKNDLGALENYLSKTNWTMSAFDVPLHYNLYQASNSSGNYDMRNLLNGTLVQRHPSHAVTFVDNHDTQPGEALESFVQGWFKPLAYATILTREQGYPQVFYGDYYGIPSDGVPSYRQQIDPLLAARQQYAYGTQHDYLDNQDVIGWTREGDSAHAGSGLATVMSDGPGGSKTMYVGTAHAGQVFKDITGNRTDTVTINSAGNGTFPCNKGSVSIWVKQ

SEQ ID NO: 34391 - protein, 482 aa, Bacillus sp.
HDGTNGTIMQYFEWNVPNDGQHWNRLHNNAQNLKNAGITAIWIPPAWKGTSQSDTGYGAYDLYDLGEFNQKGTVRTKYGTKAELERAIRSLKANGIQVYGDVVMNHKSGADFTERVQAVEVNPQNRNQEVSGTYQIEAWTGFNFPGRGNQHSSFKWRWYHFDGTDFDQSRGLSNRIYKFRGKAWDWEVDTEFGNYDYLMYADLDMDHPEVINELNRWGVWYANTLNLDGFRLDAVKHIKFSFMRDWLGHVRGQTGKNLFAVAEYWKNDLGALENYLSKTNWTMSAFDVPLHYNLYQASNSSGNYDMRNLLNGTLVQRHPSHAVTFVDNHDTQPGEALESFVQGWFKPLAYATILTREQGYPQVFYGDYYGIPSDGVPSYRQQIDPLLAARQQYAYGTQHDYLDNQDVIGWTREGDSAHAGSGLATVMSDGPGGSKTMYVGTAHAGQVFKDITGNRTDTVTINSAGNGTFPCNKGSVSIWVKQ

SEQ ID NO: 34392 - protein, 482 aa, Bacillus sp.
HDGTNGTIMQYFEWNVPNDGQHWNRLHNNAQNLKNAGITAIWIPPAWKGTSQSDTGYGAYDLYDLGEFNQQGTVRTKYGTKAELERAIRSLKANGIQVYGDVVMNHKAGADFTERVQAVEVNPQNRNQEVSGTYQIEAWTGFNFPGRGNQHSSFKWRWYHFDGTDWDQSRMLSNRIYKFRGKAWDWEVDTEFGNYDYLMYADLDMDHPEVINELNRWGVWYANTLNLDGFRLDAVKHIKFSFMRDWLGHVRGQTGKNLFAVAEYWKNDLGALENYLSKTNWTMSAFDVPLHYNLYQASNSSGNYDMRNLLNGTLVQRHPSHAVTFVDNHDTQPGEALESFVQGWFKPLAYATILTREQGYPQVFYGDYYGIPSDGVPSYRQQIDPLLAARQQYAYGTQHDYLDNQDVIGWTREGDSAHAGSGLATVMSDGPGGSKTMYVGTAHAGQVFKDITGNRTDTVTINSAGNGTFPCNKGSVSIWVKQ

SEQ ID NO: 34393 - protein, 482 aa, Bacillus sp.
HDGTNGTIMQYFEWNVPNDGQHWNRLHNNAQNLKNAGITAIWIPPAWKGTSQSDTGYGAYDLYDLGEFNQKGTVRTKYGTKAELERAIRSLKANGIQVYGDVVMNHKAGADFTERVQAVEVNPQNRNQEVSGTYQIEAWTGFNFPGRGNQHSSFKWRWYHFDGTDFDQSRGLSNRIYKFRGKAWDWEVDTEFGNYDYLMYADLDMDHPEVINELNRWGVWYANTLNLDGFRLDAVKHIKFSFMRDWLGHVRGQTGKNLFAVAEYWKNDLGALENYLSKTNWTMSAFDVPLHYNLYQASNSSGNYDMRNLLNGTLVQRHPSHAVTFVDNHDTQPGEALESFVQGWFKPLAYATILTREQGYPQVFYGDYYGIPSDGVPSYRQQIDPLLAARQQYAYGTQHDYLDNQDVIGWTREGDSAHAGSGLATVMSDGPGGSKTMYVGTAHAGQVFKDITGNRTDTVTINSAGNGTFGCNKGSVSIWVKQ

SEQ ID NO: 34394 - protein, 482 aa, Bacillus sp.
HDGTNGTIMQYFEWNVPNDGQHWNRLHNNAQNLKNAGITAIWIPPAWKGTSQSDTGYGAYDLYDLGEFNQAGTVRTKYGTKAELERAIRSLKANGIQVYGDVVMNHKAGADFTERVQAVEVNPQNRNQEVSGTYQIEAWTGFNFPGRGNQHSSFKWRWYHFDGTDRDQSRQLSNRIYKFRGKAWDWEVDTEFGNYDYLMYADLDMDHPEVINELNRWGVWYANTLNLDGFRLDAVKHIKFSFMRDWLGHVRGQTGKNLFAVAEYWKNDLGALENYLSKTNWTMSAFDVPLHYNLYQASNSSGNYDMRNLLNGTLVQRHPSHAVTFVDNHDTQPGEALESFVQGWFKPLAYATILTREQGYPQVFYGDYYGIPSDGVPSYRQQIDPLLAARQQYAYGTQHDYLDNQDVIGWTREGDSAHAGSGLATVMSDGPGGSKTMYVGTAHAGQVFKDITGNRTDTVTINSAGNGTFPCNKGSVSIWVKQ

SEQ ID NO: 34395 - protein, 482 aa, Bacillus sp.
HDGTNGTIMQYFEWNVPNDGQHWNRLHNNAQNLKNAGITAIWIPPAWKATSQSDTGYGAYDLYDLGEFNQKGTVRTKYGTKAELERAIRSLKANGIQVYGDVVMNHKAGADFTERVQAVEVNPQNRNQEVSGTYQIEAWTGFNFPGRGNQHSSFKWRWYHFDGTDWDQSRNLSNRIYKFRGKAWDWEVDTEFGNYDYLMYADLDMDHPEVINELNRWGVWYANTLNLDGFRLDAVKHIKFSFMRDWLGHVRGQTGKNLFAVAEYWKNDLGALENYLSKTNWTMSAFDVPLHYNLYQASNSSGNYDMRNLLNGTLVQRHPSHAVTFVDNHDTQPGEALESFVQGWFKPLAYATILTREQGYPQVFYGDYYGIPSDGVPSYRQQIDPLLAARQQYAYGTQHDYLDNQDVIGWTREGDSAHAGSGLATVMSDGPGGSKTMYVGTAHAGQVFKDITGNRTDTVTINSAGNGTFPCNKGSVSIWVKQ

SEQ ID NO: 34396 - protein, 482 aa, Synthetic construct
HDGTNGTIMQYFEWNVPNDGQHWNRLHNNAQNLKNAGITAIWIPPAWKGTSQSDTGYGAYDLYDLGEFNQRGTVRTKYGTKAELERAIRSLKANGIQVYGDVVMNHKAGADFTEHVQAVEVNPQNRNQEVSGEYQIEAWTGFNFPGRGNQHSSFKWRWYHFDGTDFDQSRGVSNRIYKFRGKAWDWEVDTEFGNYDYLMYADLDMDHPEVINELNRWGVWYANTLNLDGFRLDAVKHIKFSFMRDWLGHVRAQTGKNLFAVAEYWKNDLGALENYLSKTNWTMSAFDVPLHYNLYQASNSSGNYDMRNLLNGTLVQRHPSHAVTFVDNHDTQPGEALESFVQGWFKPLAYATILTREQGYPQVFYGDYYGIPSDGVPSYRQQIDPLLAARQPYAYGTQHDYLDNQDVIGWTREGDSAHAGSGLATVMSDGPGGSKTMYVGQAHAGQVFKDITGNRTDTVTINSAGNGTFRCNKGSVSIWVKQ

SEQ ID NO: 34397 - protein, 482 aa, Bacillus sp.
HDGTNGTIMQYFEWNVPNDGQHWNRLHNNAQNLKNAGITAIWIPPAWKGTSQSDTGYGAYDLYDLGEFNQRGTVRTKYGTKAELERAIRSLKANGIQVYGDVVMNHKAGADFTERVQAVEVNPQNRNQEVSGTYQIEAWTGFNFPGRGNQHSSFKWRWYHFDGTDHDQSRQLSNRIYKFRGKAWDWEVDTEFGNYDYLMYADLDMDHPEVINELNRWGVWYANTLNLDGFRLDAVKHIKFSFMRDWLGHVRGQTGKNLFAVAEYWKNDLGALENYLSKTNWTMSAFDVPLHYNLYQASNSSGNYDMRNLLNGTLVQRHPSHAVTFVDNHDTQPGEALESFVQGWFKPLAYATILTREQGYPQVFYGDYYGIPSDGVPSYRQQIDPLLAARQQYAYGTQHDYLDNQDVIGWTREGDSAHAGSGLATVMSDGPGGSKTMYVGTAHAGQVFKDITGNRTDTVTINSAGNGTFPCNKGSVSIWVKQ

SEQ ID NO: 34398 - protein, 482 aa, Bacillus sp.
HDGTNGTIMQYFEWNVPNDGQHWNRLHNNAQNLKNAGITAIWIPPAWKGESQSDTGYGAYDLYDLGEFNQKGTVRTKYGTKAELERAIRSLKANGIQVYGDVVMNHKAGADFTERVQAVEVNPQNRNQEVSGTYQIEAWTGFNFPGRGNQHSSFKWRWYHFDGTDWDQSRTLSNRIYKFRGKAWDWEVDTEFGNYDYLMYADLDMDHPEVINELNRWGVWYANTLNLDGFRLDAVKHIKFSFMRDWLGHVRGQTGKNLFAVAEYWKNDLGALENYLSKTNWTMSAFDVPLHYNLYQASNSSGNYDMRNLLNGTLVQRHPSHAVTFVDNHDTQPGEALESFVQGWFKPLAYATILTREQGYPQVFYGDYYGIPSDGVPSYRQQIDPLLAARQQYAYGTQHDYLDNQDVIGWTREGDSAHAGSGLATVMSDGPGGSKTMYVGTAHAGQVFKDITGNRTDTVTINSAGNGTFPCNKGSVSIWVKQ

SEQ ID NO: 34399 - protein, 482 aa, Bacillus sp.
HDGTNGTIMQYFEWNVPNDGQHWNRLHNNAQNLKNAGITAIWIPPAWKGTSQSDTGYGAYDLYDLGEFNQKGTVRTKYGTKAELERAIRSLKANGIQVYGDVVMNHKAGADQTERVQAVEVNPQNRNQEVSGTYQIEAWTGFNFPGRGNQHSSFKWRWYHFDGTDFDQSRNLSNRIYKFRGKAWDWEVDTEFGNYDYLMYADLDMDHPEVINELNRWGVWYANTLNLDGFRLDAVKHIKFSFMRDWLGHVRGQTGKNLFAVAEYWKNDLGALENYLSKTNWTMSAFDVPLHYNLYQASNSSGNYDMRNLLNGTLVQRHPSHAVTFVDNHDTQPGEALESFVQGWFKPLAYATILTREQGYPQVFYGDYYGIPSDGVPSYRQQIDPLLAARQQYAYGTQHDYLDNQDVIGWTREGDSAHAGSGLATVMSDGPGGSKTMYVGTAHAGQVFKDITGNRNDTVTINSAGNGTFPCNKGSVSIWVKQ

SEQ ID NO: 34400 - protein, 482 aa, Bacillus sp.
HDGTNGTIMQYFEWNVPNDGQHWNRLHNNAQNLKNAGITAIWIPPAWKGTSQSDTGYGAYDLYDLGEFNQKGTVRTKYGTKAELERAIRSLKANGIQVYGDVVMNHKAGADFTERVQAVEVNPQNRNQEVSGTYQIEAWTGFNFPGRGNQHSSFKWRWYHFDGTDWDQSRQLSNRIYKFRGKAWDWEVDTEFGNYDYLMYADLDMDHPEVINELNRWGVWYANTLNLDGFRLDAVKHIKFSFFRDWLGHVRGQTGKNLFAVGEYWKNDLGALENYLSKTNWTMSAFDAPLHYNLYQASNSSGNYDMRNLLNGTLVQRHPSHAVTLVDNHDTQPGEALESFVQGWFKPLAYATILTREQGYPSVFYGDYYGIPSDGVPSYRQQIDPLLAARQQYAYGTQHDYLDNQDVIGWTREGDSAHAGSGLATVMSDGPGGSKTMYVGTAHAGQVFKDITGNRTDTVTINSAGNGTFPCNKGSVSIWVKQ

SEQ ID NO: 34401 - protein, 482 aa, Bacillus sp.
HDGTNGTIMQYFEWNVPNDGQHWNRLHNNAQNLKNAGITAIWIPPAWKGTSQSDTGYGAYDLYDLGEFNQRGTVRTKYGTKAELERAIRSLKANGIQVYGDVVMNHKAGADFTERVQAVEVNPQNRNQEVSGTYQIEAWTGFNFPGRGNQHSSFKWRWYHFDGTDTDQSRQLSNRIYKFRGKAWDWEVDTEFGNYDYLMYADLDMDHPEVINELNRWGVWYANTLNLDGFRLDAVKHIKFSFMRDWLGHVRGQTGKNLFAVAEYWKNDLGALENYLSKTNWTMSAFDVPLHYNLYQASNSSGNYDMRNLLNGTLVQRHPSHAVTFVDNHDTQPGEALESFVQGWFKPLAYATILTREQGYPQVFYGDYYGIPSDGVPSYRQQIDPLLAARQQYAYGTQHDYLDNQDVIGWTREGDSAHAGSGLATVMSDGPGGSKTMYVGTAHAGQVFKDITGNRTDTVTINSAGNGTFPCNKGSVSIWVKQ

SEQ ID NO: 34402 - protein, 482 aa, Bacillus sp.
HDGTNGTIMQYFEWNVPNDGQHWNRLHNNAQNLKNAGITAIWIPPAWKGVSQSDTGYGAYDLYDLGEFNQKGTVRTKYGTKAELERAIRSLKANGIQVYGDVVMNHKAGADFTERVQAVEVNPQNRNQEVSGTYQIEAWTGFNFPGRGNQHSSFKWRWYHFDGTDWDQSRDLSNRIYKFRGKAWDWEVDTEFGNYDYLMYADLDMDHPEVINELNRWGVWYANTLNLDGFRLDAVKHIKFSFMRDWLGHVRGQTGKNLFAVAEYWKNDLGALENYLSKTNWTMSAFDVPLHYNLYQASNSSGNYDMRNLLNGTLVQRHPSHAVTFVDNHDTQPGEALESFVQGWFKPLAYATILTREQGYPQVFYGDYYGIPSDGVPSYRQQIDPLLAARQQYAYGTQHDYLDNQDVIGWTREGDSAHAGSGLATVMSDGPGGSKTMYVGTAHAGQVFKDITGNRTDTVTINSAGNGTFPCNKGSVSIWVKQ

SEQ ID NO: 34403 - protein, 482 aa, Bacillus sp.
HDGTNGTIMQYFEWNVPNDGQHWNRLHNNAQNLKNAGITAIWIPPAWKGASQSDTGYGAYDLYDLGEFNQKGTVRTKYGTKAELERAIRSLKANGIQVYGDVVMNHKAGADFTERVQAVEVNPQNRNQEVSGTYQIEAWTGFNFPGRGNQHSSFKWRWYHFDGTDWDQSRSLSNRIYKFRGKAWDWEVDTEFGNYDYLMYADLDMDHPEVINELNRWGVWYANTLNLDGFRLDAVKHIKFSFMRDWLGHVRGQTGKNLFAVAEYWKNDLGALENYLSKTNWTMSAFDVPLHYNLYQASNSSGNYDMRNLLNGTLVQRHPSHAVTFVDNHDTQPGEALESFVQGWFKPLAYATILTREQGYPQVFYGDYYGIPSDGVPSYRQQIDPLLAARQQYAYGTQHDYLDNQDVIGWTREGDSAHAGSGLATVMSDGPGGSKTMYVGTAHAGQVFKDITGNRTDTVTINSAGNGTFPCNKGSVSIWVKQ

SEQ ID NO: 34404 - protein, 482 aa, Bacillus sp.
HDGTNGTIMQYFEWNVPNDGQHWNRLHNNAQNLKNAGITAIWIPPAWKGTSQSDTGYGAYDLYDLGEFNQRGTVRTKYGTKAELERAIRSLKANGIQVYGDVVMNHKAGADQTEQVQAVEVNPQNRNQEVSGEYQIEAWTGFNFPGRGNQHSSFKWRWYHFDGTDFDQSRRLSNRIYKFRGKAWDWEVDTEFGNYDYLMYADLDMDHPEVINELNRWGVWYANTLNLDGFRLDAVKHIKFSFMRDWLGHVRAQTGKNLFAVAEYWKNDLGALENYLSKTNWTMSAFDVPLHYNLYQASNSSGNYDMRNLLNGTLVQRHPSHAVTFVDNHDTQPGEALESFVQGWFKPLAYATILTREQGYPQVFYGDYYGIPSDGVPSYRQQIDPLLAARQQYAYGTQHDYLDNQDVIGWTREGDSAHAGSGLATVMSDGPGGSKTMYVGQAHAGQVFKDITGNRTDTVTINSAGNGTFRCNKGSVSIWVKQ

SEQ ID NO: 34405 - protein, 482 aa, Bacillus sp.
HDGTNGTIMQYFEWNVPNDGQHWNRLHNNAQNLKNAGITAIWIPPAWKGGSQSDTGYGAYDLYDLGEFNQKGTVRTKYGTKAELERAIRSLKANGIQVYGDVVMNHKAGADFTERVQAVEVNPQNRNQEVSGTYQIEAWTGFNFPGRGNQHSSFKWRWYHFDGTDWDQSRRLSNRIYKFRGKAWDWEVDTEFGNYDYLMYADLDMDHPEVINELNRWGVWYANTLNLDGFRLDAVKHIKFSFMRDWLGHVRGQTGKNLFAVAEYWKNDLGALENYLSKTNWTMSAFDVPLHYNLYQASNSSGNYDMRNLLNGTLVQRHPSHAVTFVDNHDTQPGEALESFVQGWFKPLAYATILTREQGYPQVFYGDYYGIPSDGVPSYRQQIDPLLAARQQYAYGTQHDYLDNQDVIGWTREGDSAHAGSGLATVMSDGPGGSKTMYVGTAHAGQVFKDITGNRTDTVTINSAGNGTFPCNKGSVSIWVKQ

SEQ ID NO: 34406 - protein, 482 aa, Bacillus sp.
HDGTNGTIMQYFEWNVPNDGQHWNRLHNNAQNLKNAGITAIWIPPAWKGTSQSDTGYGAYDLYDLGEFNQKGTVRTKYGTKAELERAIRSLKANGIQVYGDVVMNHKAGADFTERVQAVEVNPQNRNQEVSGTYQIEAWTGFNFPGRGNQHSSFKWRWYHFDGTDWDESRKLTNRIYKFRGKAWDWEVDTEFGNYDYLMYADLDMDHPEVINELNRWGVWYANTLNLDGFRLDAVKHIKFSFMRDWLGHVRGQTGKNLFAVAEYWKNDLGALENYLSKTNWTMSAFDVPLHYNLYQASNSSGNYDMRNLLNGTLVQRHPSHAVTFVDNHDTQPGEALESFVQGWFKPLAYATILTREQGYPQVFYGDYYGIPSDGVPSYRQQIDPLLAARQQYAYGTQHDYLDNQDVIGWTREGDSAHAGSGLATVMSDGPGGSKTMYVGTAHAGQVFKDITGNRTDTVTINSAGNGTFPCNKGSVSIWVKQ

SEQ ID NO: 34407 - protein, 482 aa, Bacillus sp.
HDGTNGTIMQYFEWNVPNDGQHWNRLHNNAQNLKNAGITAIWIPPAWKGASQSDTGYGAYDLYDLGEFNQKGTVRTKYGTKAELERAIRSLKANGIQVYGDVVMNHKAGADFTERVQAVEVNPQNRNQEVSGTYQIEAWTGFNFPGRGNQHSSFKWRWYHFDGTDWDQSRALSNRIYKFRGKAWDWEVDTEFGNYDYLMYADLDMDHPEVINELNRWGVWYANTLNLDGFRLDAVKHIKFSFMRDWLGHVRGQTGKNLFAVAEYWKNDLGALENYLSKTNWTMSAFDVPLHYNLYQASNSSGNYDMRNLLNGTLVQRHPSHAVTFVDNHDTQPGEALESFVQGWFKPLAYATILTREQGYPQVFYGDYYGIPSDGVPSYRQQIDPLLAARQQYAYGTQHDYLDNQDVIGWTREGDSAHAGSGLATVMSDGPGGSKTMYVGTAHAGQVFKDITGNRTDTVTINSAGNGTFPCNKGSVSIWVKQ

SEQ ID NO: 34408 - protein, 482 aa, Bacillus sp.
HDGTNGTIMQYFEWNVPNDGQHWNRLHNNAQNLKNAGITAIWIPPAWKGTSQSDTGYGAYDLYDLGEFNQRGTVRTKYGTKAELERAIRSLKANGIQVYGDVVFNHKAGADFTERVQAVEVNPQNRNQEVSGTYQIEAWTGFNFPGRGNQHSSFKWRWYHFDGTDWDQSRQLSNRIYKFRGKAWDWEVDTEFGNYDYLMYADLDMDHPEVINELNRWGVWYANTLNLDGFRLDAVKHIKFSFMRDWLGHVRAQTGKNLFAVAEYWKNDLGALENYLSKTNWTMSAFDVPLHYNLYQASNSSGNYDMRNLLNGTLVQRHPSHAVTFVDNHDTQPGEALESFVQGWFKPLAYATILTREQGYPQVFYGDYYGIPSDGVPSYRQQIDPLLAARQQYAYGTQHDYLDNQDVIGWTREGDSAHAGSGLATVMSDGPGGSKTMYVGTAHAGQVFKDITGNRTDTVTINSAGNGTFPCNKGSVSIWVKQ

SEQ ID NO: 34409 - protein, 482 aa, Bacillus sp.
HDGTNGTIMQYFEWNVPNDGQHWNRLHNNAQNLKNAGITAIWIPPAWKGTSQSDTGYGAYDLYDLGEFNQKGTVRTKYGTKAELERAIRSLKANGIQVYGDVVMNHKSGADFTERVQAVEVNPQNRNQEVSGTYQIEAWTGFNFPGRGNQHSSFKWRWYHFDGTDFDQSRRLSNRIYKFRGKAWDWEVDTEFGNYDYLMYADLDMDHPEVINELNRWGVWYANTLNLDGFRLDAVKHIKFSFMRDWLGHVRGQTGKNLFAVAEYWKNDLGALENYLSKTNWTMSAFDVPLHYNLYQASNSSGNYDMRNLLNGTLVQRHPSHAVTFVDNHDTQPGEALESFVQGWFKPLAYATILTREQGYPQVFYGDYYGIPSDGVPSYRQQIDPLLAARQQYAYGTQHDYLDNQDVIGWTREGDSAHAGSGLATVMSDGPGGSKTMYVGTAHAGQVFKDITGNRTDTVTINSAGNGTFPCNKGSVSIWVKQ

SEQ ID NO: 34410 - protein, 482 aa, Bacillus sp.
HDGTNGTIMQYFEWNVPNDGQHWNRLHNNAQNLKNAGITAIWIPPAWKGQSQSDTGYGAYDLYDLGEFNQKGTVRTKYGTKAELERAIRSLKANGIQVYGDVVMNHKAGADFTERVQAVEVNPQNRNQEVSGTYQIEAWTGFNFPGRGNQHSSFKWRWYHFDGTDWDQSRQLSNRIYKFRGKAWDWEVDTEFGNYDYLMFADLDMDHPEVINELNRWGVWYANTLNLDGFRLDAVKHIKFSFMRDWLGHVRGQTGKNLFAVAEYWKNDLGALENYLSKTNWTMSAFDVPLHYNLYQASNSSGNYDMRNLLNGTLVQRHPSHAVTFVDNHDTQPGEALESFVQGWFKPLAYATILTREQGYPQVFYGDYYGIPSDGVPSYRQQIDPLLAARQQYAYGTQHDYLDNQDVIGWTREGDSAHAGSGLATVMSDGPGGSKTMYVGTAHAGQVFKDITGNRTDTVTINSAGNGTFPCNKGSVSIWVKQ

SEQ ID NO: 34411 - protein, 482 aa, Bacillus sp.
HDGTNGTIMQYFEWNVPNDGQHWNRLHNNAQNLKNAGITAIWIPPAWKGTSQSDTGYGAYDLYDLGEFNQKGTVRTKYGTKAELERAIRSLKANGIQVYGDVVMNHKSGADFTEQVQAVEVNPQNRNQEVSGTYQIEAWTGFNFPGRGNQHSSFKWRWYHFDGTDFDQSRNLSNRIYKFRGKAWDWEVDTEFGNYDYLMYADLDMDHPEVINELNRWGVWYANTLNLDGFRLDAVKHIKFSFMRDWLGHVRGQTGKNLFAVAEYWKNDLGALENYLSKTNWTMSAFDVPLHYNLYQASNSSGNYDMRNLLNGTLVQRHPSHAVTFVDNHDTQPGEALESFVQGWFKPLAYATILTREQGYPQVFYGDYYGIPSDGVPSYRQQIDPLLAARQQYAYGTQHDYLDNQDVIGWTREGDSAHAGSGLATVMSDGPGGSKTMYVGTAHAGQVFKDITGNRTDTVTINSAGNGTFPCNKGSVSIWVKQ

SEQ ID NO: 34412 - protein, 482 aa, Bacillus sp.
HDGTNGTIMQYFEWNVPNDGQHWNRLHNNAQNLKNAGITAIWIPPAWKGTSQSDTGYGAYDLYDLGEFNQKGTVRTKYGTKAELERAIRSLKANGIQVYGDVVMNHKAGADFTERVQAVEVNPQNRNQEVSGTYQIEAWTGFNFPGRGNQHSSFKWRWYHFDGTDWDQSRDLSNRIYKFRGKAWDWEVDTEFGNYDYLMYADLDMDHPEVINELNRWGVWYANTLNLDGFRLDAVKHIKFSFMRDWLGHVRGQTGKNLFAVAEYWKNDLGALENYLSKTNWTMSAFDVPLHYNLYQASNSSGNYDMRNLLNGTLVQRHPSHAVTFVDNHDTQPGEALESFVQTWFKPLAYATILTREQGYPQVFYGDYYGIPSDGVPSYRQQIDPLLAARQQYAYGTQHDYLDNQDVIGWTREGDSAHAGSGLATVMSDGPGGSKTMYVGTAHAGQVFKDITGNRTDTVTINSAGNGTFPCNKASVSIWVKQ

SEQ ID NO: 34413 - protein, 477 aa, Bacillus licheniformis
NGTLMQYFEWYTPNDGQHWNRLRNDSAYLKEHGITAVWIPPAYKGTSQADVGYGAYDLYDLGEFNQKGTVRTKYGTKGQLQSAINSLKSNGINVYGDVVINHKGGADATELVRAVEVNPANRNQEISGEYLIEAYTYFDFPGRGSTHSNFKWRWYHFDGTDWDESRKLNRIYKFRGKAWDWEVSNENGNYDYLTYADIDYDHPDVAAEIRNWGTWYANTLQLDGFRLDAVKHIKFSFLRDWVNHVRSATGKNMFTVAEYWQNDLGALENYLNKTNFNHSVFDVPLHYQFHAASTQGGGYDMQNLLNGTVVSKHPLHSVTFVDNHDTQPGQSLESTVEEWFKPLAYAFILTRESGYPQVFYGDMYGIPTHGVPALKHKIEPILEARQKYAYGRQNDYFDHHDIVGWTREGNSSHANSGLAALITDGPGGAKWMYVGRQKAGQTWSDITGNRSGPVVINSEGWGNFSVNGGSVSIYVQR

SEQ ID NO: 34414 - protein, 481 aa, Bacillus sp.
HDGTNGTIMQYFEWNVPNDGQHWNRLHNNAQNLKNAGITAIWIPPAWKGTSQSDTGYGAYDLYDLGEFNQKGTVRTKYGTKAELERAIRSLKANGIQVYGDVVMNHKAGADFTERVQAVEVNPQNRNQEVSGTYQIEAWTGFNFPGRGNQHSSFKWRWYHFDGTDWDESRKLNRIYKFRTKAWDWEVDTEFGNYDYLMYADLDMDHPEVINELNRWGVWYANTLNLDGFRLDAVKHIKFSFMRDWLGHVRGQTGKNLFAVAEYWKNDLGALENYLSKTNWTMSAFDVPLHYNLYQASNSSGNYDMRNLLNGTLVQRHPSHAVTFVDNHDTQPGEALESFVQGWFKPLAYATILTREQGYPQVFYGDYYGIPSDGVPSYRQQIDPLLAARQQYAYGTQHDYLDNQDVIGWTREGDSAHAGSGLATVMSDGPGGSKTMYVGTAHAGQVFKDITGNRTDTVTINSAGNGTFPCNKGSVSIWVKQ

SEQ ID NO: 34415 - protein, 481 aa, Bacillus sp.
HDGTNGTIMQYFEWNVPNDGQHWNRLHNNAQNLKNAGITAIWIPPAWKGTSQSDTGYGAYDLYDLGEFNQKGTVRTKYGTKAELERAIRSLKANGIQVYGDVVMNHKAGADFTERVQAVEVNPQNRNQEVSGTYQIEAWTGFNFPGRGNQHSSFKWRWYHFDGTDWDESRKLNRIYKFRGKAWDWEVDTEFGNYDYLMYADLDMDHPEVINELNRWGVWYANTLNLDGFRLDAVKHIKFSFMRDWLGHVRGQTGKNLFAVAEYWKNDLGALENYLSKTNHTMSAFDVPLHYNLYQASNSSGNYDMRNLLNGTLVQRHPSHAVTFVDNHDTQPGEALESFVQGWFKPLAYATILTREQGYPQVFYGDYYGIPSDGVPSYRQQIDPLLAARQQYAYGTQHDYLDNQDVIGWTREGDSAHAGSGLATVMSDGPGGSKTMYVGTAHAGQVFKDITGNRTDTVTINSAGNGTFPCNKGSVSIWVKQ

SEQ ID NO: 34416 - protein, 481 aa, Bacillus sp.
HDGTNGTIMQYFEWNVPNDGQHWNRLHNNAQNLKNAGITAIWIPPAWKGTSQSDTGYGAYDLYDLGEFNQKGTVRTKYGTKAELERAIRSLKANGIQVYGDVVMNHKAGADFTERVQAVEVNPQNRNQEVSGTYQIEAWTGFNFPGRGNQHSSFKWRWYHFDGTDWDESRKLNRIYKFRGKNWDWEVDTEFGNYDYLMYADLDMDHPEVINELNRWGVWYANTLNLDGFRLDAVKHIKFSFMRDWLGHVRGQTGKNLFAVAEYWKNDLGALENYLSKTNWTMSAFDVPLHYNLYQASNSSGNYDMRNLLNGTLVQRHPSHAVTFVDNHDTQPGEALESFVQGWFKPLAYATILTREQGYPQVFYGDYYGIPSDGVPSYRQQIDPLLAARQQYAYGTQHDYLDNQDVIGWTREGDSAHAGSGLATVMSDGPGGSKTMYVGTAHAGQVFKDITGNRTDTVTINSAGNGTFPCNKGSVSIWVKQ

SEQ ID NO: 34417 - protein, 481 aa, Bacillus sp.
HDGTNGTIMQYFEWNVPNDGQHWNRLHNNAQNLKNAGITAIWIPPAWKGTSQSDTGYGAYDLYDLGEFNQKGTVRTKYGTKAELERAIRSLKANGIQVYGDVVMNHKAGADFTERVQAVEVNPQNRNQEVSGTYQIEAWTGFNFPGRGNQHSSFKWRWYHFDGTDWDESRKLNRIYKFRGKAWDWEVDTEFGNYDYLMYADLDMDHPEVINELNRWGVWYANTLNLDGFRLDAVKHIKFSFMRDWLGHVRGQTGKNLFAVAEYWQNDLGALENYLSKTNWTMSAFDVPLHYNLYQASNSSGNYDMRNLLNGTLVQRHPSHAVTFVDNHDTQPGEALESFVQGWFKPLAYATILTREQGYPQVFYGDYYGIPSDGVPSYRQQIDPLLAARQQYAYGTQHDYLDNQDVIGWTREGDSAHAGSGLATVMSDGPGGSKTMYVGTAHAGQVFKDITGNRTDTVTINSAGNGTFPCNKGSVSIWVKQ

SEQ ID NO: 34418 - protein, 481 aa, Bacillus sp.
HDGTNGTIMQYFEWNVPNDGQHWNRLHNNAQNLKNAGITAIWIPPAWKGTSQSDTGYGAYDLYDLGEFNQKGTVRTKYGTKAELERAIRSLKANGIQVYGDVVMNHKAGADFTERVQAVEVNPQNRNQEVSGTYQIEAWTGFNFPGRGNQHSSFKWRWYHFDGTDWDESRKLNRIYKFRGKAWDWEVDTEFGNYDYLMYADLDMDHPEVINELNRWGVWYANTLNLDGFRLDAVKHIKFSFMRDWLGHVRGQTGKNLFAVAEYWKNDLGALENYLSKTNWTMSAFDVPLHNNLYQASNSSGNYDMRNLLNGTLVQRHPSHAVTFVDNHDTQPGEALESFVQGWFKPLAYATILTREQGYPQVFYGDYYGIPSDGVPSYRQQIDPLLAARQQYAYGTQHDYLDNQDVIGWTREGDSAHAGSGLATVMSDGPGGSKTMYVGTAHAGQVFKDITGNRTDTVTINSAGNGTFPCNKGSVSIWVKQ

SEQ ID NO: 34419 - protein, 481 aa, Bacillus sp.
HDGTNGTIMQYFEWNVPNDGQHWNRLHNNAQNLKNAGITAIWIPPAWKGTSQSDTGYGAYDLYDLGEFNQKGTVRTKYGTKAELERAIRSLKANGIQVYGDVVMNHKAGADFTERVQAVEVNPQNRNQEVSGTYQIEAWTGFNFPGRGNQHSSFKWRWYHFDGTDWDESRKLNKIYKFRGKAWDWEVDTEFGNYDYLMYADLDMDHPEVINELNRWGVWYANTLNLDGFRLDAVKHIKFSFMRDWLGHVRGQTGKNLFAVAEYWKNDLGALENYLSKTNWTMSAFDVPLHYNLYQASNSSGNYDMRNLLNGTLVQRHPSHAVTFVDNHDTQPGEALESFVQGWFKPLAYATILTREQGYPQVFYGDYYGIPSDGVPSYRQQIDPLLAARQQYAYGTQHDYLDNQDVIGWTREGDSAHAGSGLATVMSDGPGGSKTMYVGTAHAGQVFKDITGNRTDTVTINSAGNGTFPCNKGSVSIWVKQ

SEQ ID NO: 34420 - protein, 481 aa, Bacillus sp.
HDGTNGTIMQYFEWNVPNDGQHWNRLHNNAQNLKNAGITAIWIPPAWKGTSQSDTGYGAYDLYDLGEFNQKGTVRTKYGTKAELERAIRSLKANGIQVYGDVVMNHKAGADFTERVQAVEVNPQNRNQEVSGTYQIEAWTGFNFPGRGNQHSSFKWRWYHFDGTDWDESRKLNRIYKFRGKAWDWEVDTEFGNYDYLMYADLDMDHPEVINELNRWGVWYANTLNLDGFRLDAVKHIKFSFMRDWLGHVRGQTGKNLFAVAEYWKGDLGALENYLSKTNWTMSAFDVPLHYNLYQASNSSGNYDMRNLLNGTLVQRHPSHAVTFVDNHDTQPGEALESFVQGWFKPLAYATILTREQGYPQVFYGDYYGIPSDGVPSYRQQIDPLLAARQQYAYGTQHDYLDNQDVIGWTREGDSAHAGSGLATVMSDGPGGSKTMYVGTAHAGQVFKDITGNRTDTVTINSAGNGTFPCNKGSVSIWVKQ

SEQ ID NO: 34421 - protein, 481 aa, Bacillus sp.
HDGTNGTIMQYFEWNVPNDGQHWNRLHNNAQNLKNAGITAIWIPPAWKGTSQSDTGYGAYDLYDLGEFNQKGTVRTKYGTKAELERAIRSLKANGIQVYGDVVMNHKAGADFTERVQAVEVNPQNRNQEVSGTYQIEAWTGFNFPGRGNQHSSFKWRWYHFDGTDWDESRKLNRIYKFRGKAWDWEVDTEFGNYDYLMYADLDMDHPEVINELNRWGVWYANTLNLDGFRLDAVKHIKFSFMRDWLGHVRGQTGKNLFAVAEYWKNDLGALENYLSKTNWTMSAFDAPLHYNLYQASNSSGNYDMRNLLNGTLVQRHPSHAVTFVDNHDTQPGEALESFVQGWFKPLAYATILTREQGYPQVFYGDYYGIPSDGVPSYRQQIDPLLAARQQYAYGTQHDYLDNQDVIGWTREGDSAHAGSGLATVMSDGPGGSKTMYVGTAHAGQVFKDITGNRTDTVTINSAGNGTFPCNKGSVSIWVKQ

SEQ ID NO: 34422 - protein, 481 aa, Bacillus sp.
HDGTNGTIMQYFEWNVPNDGQHWNRLHNNAQNLKNAGITAIWIPPAWKGTSQSDTGYGAYDLYDLGEFNQKGTVRTKYGTKAELERAIRSLKANGIQVYGDVVMNHKAGADFTERVQAVEVNPQNRNQEVSGTYQIEAWTGFNFPGRGNQHSSFKWRWYHFDGTDWDESRKLNRIYKFRGKAWDWEVDTEFGNYDYLMYADLDMDHPEVINELNRWGVWYANTLNLDGFRLDAVKHIKFSFMRDWLGHVRGQTGKNLFAVAEYWKNDLGALENYLSKTNWTMSAFDVPLHFNLYQASNSSGNYDMRNLLNGTLVQRHPSHAVTFVDNHDTQPGEALESFVQGWFKPLAYATILTREQGYPQVFYGDYYGIPSDGVPSYRQQIDPLLAARQQYAYGTQHDYLDNQDVIGWTREGDSAHAGSGLATVMSDGPGGSKTMYVGTAHAGQVFKDITGNRTDTVTINSAGNGTFPCNKGSVSIWVKQ

SEQ ID NO: 34423 - protein, 481 aa, Bacillus sp.
HDGTNGTIMQYFEWNVPNDGQHWNRLHNNAQNLKNAGITAIWIPPAWKGTSQSDTGYGAYDLYDLGEFNQKGTVRTKYGTKAELERAIRSLKANGIQVYGDVVMNHKAGADFTERVQAVEVNPQNRNQEVSGTYQIEAYTGFNFPGRGNQHSSFKWRWYHFDGTDWDESRKLNRIYKFRGKAWDWEVDTEFGNYDYLMYADLDMDHPEVINELNRWGVWYANTLNLDGFRLDAVKHIKFSFMRDWLGHVRGQTGKNLFAVAEYWKNDLGALENYLSKTNWTMSAFDVPLHYNLYQASNSSGNYDMRNLLNGTLVQRHPSHAVTFVDNHDTQPGEALESFVQGWFKPLAYATILTREQGYPQVFYGDYYGIPSDGVPSYRQQIDPLLAARQQYAYGTQHDYLDNQDVIGWTREGDSAHAGSGLATVMSDGPGGSKTMYVGTAHAGQVFKDITGNRTDTVTINSAGNGTFPCNKGSVSIWVKQ

SEQ ID NO: 34424 - protein, 481 aa, Bacillus sp.
HDGTNGTIMQYFEWNVPNDGQHWNRLHNNAQNLKNAGITAIWIPPAFKGTSQSDTGYGAYDLYDLGEFNQKGTVRTKYGTKAELERAIRSLKANGIQVYGDVVMNHKAGADFTERVQAVEVNPQNRNQEVSGTYQIEAWTGFNFPGRGNQHSSFKWRWYHFDGTDWDESRKLNRIYKFRGKAWDWEVDTEFGNYDYLMYADLDMDHPEVINELNRWGVWYANTLNLDGFRLDAVKHIKFSFMRDWLGHVRGQTGKNLFAVAEYWKNDLGALENYLSKTNWTMSAFDVPLHYNLYQASNSSGNYDMRNLLNGTLVQRHPSHAVTFVDNHDTQPGEALESFVQGWFKPLAYATILTREQGYPQVFYGDYYGIPSDGVPSYRQQIDPLLAARQQYAYGTQHDYLDNQDVIGWTREGDSAHAGSGLATVMSDGPGGSKTMYVGTAHAGQVFKDITGNRTDTVTINSAGNGTFPCNKGSVSIWVKQ

SEQ ID NO: 34425 - protein, 481 aa, Bacillus sp.
HDGTNGTIMQYFEWNVPNDGQHWNRLHNNAQNLKNAGITAIWIPPAWKGTSQSDTGYGAYDLYDLGEFNQKGTVRTKYGTKAELERAIRSLKANGIQVYGDVVMNHKAGADFTERVQAVEVNPQNRNQEVSGTYQIEAWTGFNFPGRGNQHSSFKWRWYHFDGTDWDESRKLNRIYKFRGKAWDWEVDTEFGNYDYLMYADLDMDHPEVINELNRWGVWYANTLNLDGFRLDAVKHIKFSFMRDWLGHVRGQTGKNLFAVAEYWKNDLGALENYLSKTNWTMSAFDVPLHYNLYQASNSSGNYDMRNLLNGTLVQRHPSHAVTLVDNHDTQPGEALESFVQGWFKPLAYATILTREQGYPQVFYGDYYGIPSDGVPSYRQQIDPLLAARQQYAYGTQHDYLDNQDVIGWTREGDSAHAGSGLATVMSDGPGGSKTMYVGTAHAGQVFKDITGNRTDTVTINSAGNGTFPCNKGSVSIWVKQ

SEQ ID NO: 34426 - protein, 478 aa, Bacillus licheniformis
LNGTLMQYFEWYTPNDGQHWNRLRNDSAYLKEHGITAVWIPPAYKGTSQADVGYGAYDLYDLGEFNQKGTVRTKYGTKGQLQSAINSLKSNGINVYGDVVINHKGGADATELVRAVEVNPANRNQEISGEYLIEAYTYFDFPGRGSTHSNFKWRWYHFDGTDWDESRKLNRIYKFRGKAWDWEVSNENGNYDYLTYADIDYDHPDVAAEIRNWGTWYANTLQLDGFRLDAVKHIKFSFLRDWVNHVRSATGKNMFTVAEYWQNDLGALENYLNKTNFNHSVFDVPLHYQFHAASTQGGGYDMQNLLNGTVVSKHPLHSVTFVDNHDTQPGQSLESTVEEWFKPLAYAFILTRESGYPQVFYGDMYGIPTHGVPALKHKIEPILEARQKYAYGRQNDYFDHHDIVGWTREGNSSHANSGLAALITDGPGGAKWMYVGRQKAGQTWSDITGNRSGPVVINSEGWGNFSVNGGSVSIYVQR

SEQ ID NO: 34427 - protein, 479 aa, Synthetic construct
LNGTLMQYFEWYMPNDGQHWRRLQNDSAYLAEHGITAVWIPPAYKGTSQADVGYGAYDLYDLGEFNQKGTVRTKYGTRSQLQAAVTSLKNNGIQVYGDVVINHKAGADATEMVTAVEVNPNNRNQEVTGDYTIEAYTRFDFPGRGNTHSSFKWRWYHFDGVDWDQSRSLSNRIYKFRGKAWDWPVDTENGNYDYLMYADLDMDHPEVVNELRNWGVWYTNTLGLDGFRIDAVKHIKFSFTRDWINHVRSATGKNMFAVAEYWKNDLGAIENYLNKTNFNHSVFDVPLHYNLYAASNSGGNYDMRNIFNGTVVSKHPLKSVTFVDNHDTQPEESLESFVEEWFKPLAYALTLTREQGYPSVFYGDYYGIPTHGIPALRSKIDPILEARQKYAYGPQHDYLDHPDIIGWTREGDSSHPKSGLATLITDGPGGSKRMYAGLKNAGETWYDITGNRSDTVKIGSDGWGTFHVNKGSVSIYVQK

SEQ ID NO: 34428 - protein, 475 aa, Hamigera avellanea
ATPADWRSRSIYFILTDRFARTDGSTTAECDTSARAYCGGTWRGIINKLDYIQNMGFTAIWITPVTAQLPGSTGHGSAYHGYWQQDIYSLEPNYGTADDLRALASALHERNMYLMVDVVANHMGWAGSGDSVDYSVFNPFDSADYFHPYCLISNYEDQTEVENCWLGDTNVALVDLDTTRSDVQNIWYEWVDSLVGNYSIDGLRIDTVRHVQKDFWPGFNDAAGVYSVGEVFSGDTAYTCPYQEVLDGVLNYPIYYPLLRAFQSTSGSINDLYNMINTVKSDCADSTLMGTFLENHDNPRFASYTSDVALAKNAIAFTILSDGIPIIYAGQEQHYSGGNDPANREAVWLSGYSTDSELYSFVAVTNQIRNYAISQDQGYVTWKNVPIYQDTSTLAMRKGTDGSQVITVLSNLGASGSSYTLTLGGSGYSSGQQLTEIFSCATVTVDSSGNIPVPMGSGQPKVFYPTAGLGGSGIC

SEQ ID NO: 34429 - protein, 478 aa, Synthetic construct
NGTMMQYFEWYLPNDGNHWNRLNSDASNLKSKGITAVWIPPAWKGASQNDVGYGAYDLYDLGEFNQKGTVRTKYGTRSQLQAAVTSLKNNGIQVYGDVVMNHKGGADATEMVRAVEVNPNNRNQEVTGEYTIEAWTRFDFPGRGNTHSSFKWRWYHFDGVDWDQSRRLNNRIYKFRGKAWDWEVDTENGNYDYLMYADIDMDHPEVVNELRNWGVWYTNTLGLDGFRIDAVKHIKYSFTRDWINHVRSATGKNMFAVAEFWKNDLGAIENYLQKTNWNHSVFDVPLHYNLYNASKSGGNYDMRKLLNGTVVSKHPSKAVTFVDNHDTQPEEALESFVQPWFKPLAYAFILTRESGYPSVFYGDMYGIPTHGVPAMKHKIEPILKARKQYAYGAQHDYLDHPDIIGWTREGDSSHPKSGLATLITDGPGGSKRMYAGLKNAGETWYDITGNRSDTVKIGSDGWGTFHVNKGSVSIYVQK

SEQ ID NO: 34430 - protein, 483 aa, Bacillus sp.
HHDGTNGTIMQYFEWNVPNDGQHWNRLHNNAQNLKNAGITAIWIPPAWKGTSQNDVGYGAYDLYDLGEFNQKGTVRTKYGTKAELERAIRSLKANGIQVYGDVVMNHKGGADFTERVQAVEVNPQNRNQEVSGTYQIEAWTGFNFPGRGNQHSSFKWRWYHFDGTDWDQSRQLANRIYKFRGKAWDWEVDTEFGNYDYLMYADVDMDHPEVINELNRWGVWYANTLNLDGFRLDAVKHIKFSFMRDWLGHVRGQTGKNLFAVAEYWKNDLGALENYLSKTNWTMSAFDVPLHYNLYQASNSSGNYDMRNLLNGTLVQRHPSHAVTFVDNHDTQPGEALESFVQGWFKPLAYATILTREQGYPQVFYGDYYGIPSDGVPSYRQQIDPLLKARQQYAYGPQHDYLDHPDVIGWTREGDSSAAKSGLAALITDGPGGSKRMYAGLKNAGETWYDITGNRSDTVKIGSDGWGEFHVNDGSVSIYVQK

SEQ ID NO: 34431 - protein, 485 aa, Bacillus sp.
HHDGTNGTIMQYFEWNVPNDGQHWNRLHNNAQNLKNAGITAIWIPPAWKGTSQNDVGYGAYDLYDLGEFNQKGTVRTKYGTKAELERAIRSLKANGIQVYGDVVMNHKGGADFTERVQAVEVNPQNRNQEVSGTYEIEAYTGFNFPGRGNQHSSFKWRWSHFDGTDWDQSRQLSNRIYKFRGDGKAWDWEVDTENGNYDYLMYADVDMNHPEVINELNRWGVWYANTLNLDGFRLDAVKHIQFSFMRNWLGHVRGQTGKNLFAVAEYWKNDLGALENYLSKTNWTMSAFDVPLHYNLYQASNSGGNYDMRNLLNGTLVQRHPSHAVTFVDNHDTQPGEALESFVQGWFKPLAYATILTREQGYPQVFYGDYYGIPSDGVPSYRQQIDPLLKARQKYAYGPQHDYLDHPDVIGWTREGDSSHPKSGLATLITDGPGGSKRMYAGLKNAGETWYDITGNRSDTVKIGSDGWGEFHVNDGSVSIYVQK

SEQ ID NO: 34432 - protein, 485 aa, Bacillus sp.
HHDGTNGTIMQYFEWNVPNDGQHWNRLHNNAQNLKNAGITAIWIPPAWKGTSQNDVGYGAYDLYDLGEFNQKGTVRTKYGTKAELERAIRSLKANGIQVYGDVVMNHKGGADFTERVQAVEVNPQNRNQEVSGTYEIEAWTGFNFPGRGNQHSSFKWRWSHFDGTDWDQSRQLSNRIYKFRGDGKAWDWEVDTDNGNYDYLMYADVDMNHPEVINELNRWGVWYANTLNLDGFRLDAVKHIQFSFMRNWLGHVRGQTGKNLFAVAEYWKNDLGALENYLSKTNWTMSAFDVPLHYNLYQASNSGGNYDMRNLLNGTLVQRHPSHAVTFVDNHDTQPGEALESFVQGWFKPLAYATILTREQGYPQVFYGDYYGIPSDGVPSYRQQIDPLLKARQKYAYGPQHDYLDHPDVIGWTREGDSSHPKSGLATLITDGPGGSKRMYAGLKNAGETWYDITGNRSDTVKIGSDGWGEFHVNDGSVSIYVQK

SEQ ID NO: 34433 - protein, 485 aa, Bacillus sp.
HHDGTNGTIMQYFEWNVPNDGQHWNRLHNNAQNLKNAGITAIWIPPAWKGTSQNDVGYGAYDLYDLGEFNQKGTVRTKYGTKAELERAIRSLKANGIQVYGDVVMNHKGGADFTERVQAVEVNPQNRNQEVSGTYEIEAWTGFNFPGRGNQHSSFKWRWYHFDGTDWDQSRQLSNRIYKFRGDGKAWDWEVDTENGNYDYLMYADVDMNHPEVINELNRWGVWYANTLNLDGFRLDAVKHIQFSFMRNWLGHVRGQTGKNLFAVAEYWKNDLGALENYLSKTNWTMSAFDVPLHYNLYQASNSGKNYDMRNLLNGTLVQRHPSHAVTFVDNHDTQPGEALESFVQGWFKPLAYATILTREQGYPQVFYGDYYGIPSDGVPSYRQQIDPLLKARQKYAYGPQHDYLDHPDVIGWTREGDSSHPKSGLATLITDGPGGSKRMYAGLKNAGETWYDITGNRSDTVKIGSDGWGEFHVNDRSVSIYVQK

SEQ ID NO: 34434 - protein, 485 aa, Bacillus sp.
HHDGTNGTIMQYFEWNVPNDGQHWNRLHNNAQNLKNAGITAIWIPPAWKGTSQNDVGYGAYDLYDLGEFNQKGTVRTKYGTKAELERAIRSLKANGIQVYGDVVMNHKGGADFTERVQAVEVNPQNRNQEVSGTYEIEAWTGFNFPGRGNQHSSFKWRWYHFDGTDWDQSRQLSNRIYKFRGDGKAWDWEVDTENGNYDYLMYADVDMNHPEVINELNRWGVWYANTLNLDGFRLDAVKHIQFSFMRNWLGHVRGQTGKNLFAVAEYWKNDLGALENYLSKTNGTMSAFDVPLHYNLYQASNSGGNYDMRNLLNGTLVQRHPSHAVTFVDNHDTQPGEALESFVQGWFKPLAYATILTREQGYPQVFYGDYYGIPSDGVPSYRQQIDPLLKARQKYAYGPQHDYLDHPDVIGWTREGDSSHPKSGLATLITDGPGGSKRMYAGLKNAGETWYDITGNRSDTVKIGSDGTGEFHVNDGSVSIYVQK

SEQ ID NO: 34435 - protein, 485 aa, Bacillus sp.
HHDGTNGTIMQYFEWNVPNDGQHWNRLHNNAQNLKNAGITAIWIPPAWKGTSQNDVGYGAYDLYDLGEFNQKGTVRTKYGTKAELERAIRSLKANGIQVYGDVVMNHKGGADFTERVQAVEVNPQNRNQEVSGTYEIEAYTGFNFPGRGNQHSSFKWRWYHFDGTDWDQSRQLSNRIYKFRGDGKAWDWEVDTENGNYDYLMYADVDMNHPEVINELNRWGVWYANTLNLDGFRLDAVKHIQFSFMRNWLGHVRGQTGKNLFAVAEYWKNDLGALENYLSKTNWTMSAFDVPLHYNLYQASNSRGNYDMRNLLNGTLVQRHPSHAVTFVDNHDTQPGEALESFVQGWFKPLAYATILTREQGYPQVFYGDYYGIPSDGVPSYRQQIDPLLKARQKYAYGPQHDYLDHPDVIGWTREGDSSHPKSGLATLITDGPGGSKRMYAGLKNAGETWYDITGNRSDTVKIGSDGWGEFHVNKGSVSIYVQK

SEQ ID NO: 34436 - protein, 485 aa, Bacillus sp.
HHDGTNGTIMQYFEWNVPNDGQHWNRLHNNAQNLKNAGITAIWIPPAWKGTSQNDVGYGAYDLYDLGEFNQKGTVRTKYGTKAELERAIRSLKANGIQVYGDVVMNHKGGADFTERVQAVEVNPQNRNQEVSGTYEIEAWTGFNFPGRGNQHSSFKWRWYHFDGTDWDQSRQLSNRIYKFRGDGKAWDWEVDTENGNYDYLMYADVDMNHPEVINELNRWGVWYANTLNLDGFRLDAVKHIQFSFMRNWLGHVRGQTGKNLFAVAEYWKNDLGALENYLSKTNGTMSAFDVPLHYNLYQASNSGGNYDMRNLLNGTLVQRHPSHAVTFVDNHDTQPGEALESFVQGWFKPLAYATILTREQGYPQVFYGDYYGIPSDGVPSYRQQIDPLLKARQKYAYGPQHDYLDHPDVIGWTREGDSSHPKSGLATLITDGPGGSKRMYAGLKNAGETWYDITGNRSDTVKIGSDGWGEFHVNDRSVSIYVQK

SEQ ID NO: 34437 - protein, 485 aa, Bacillus sp.
HHDGTNGTIMQYFEWNVPNDGQHWNRLHNNAQNLKNAGITAIWIPPAWKGTSQNDVGYGAYDLYDLGEFNQKGTVRTKYGTKAELERAIRSLKANGIQVYGDVVMNHKGGADFTERVQAVEVNPQNRNQEVSGTYEIEAWTGFNFPGRGNQHSSFKWRWSHFDGTDWDQSRQLSNRIYKFRGDGKAWDWEVDTENGNYDYLMYADVDMNHPEVINELNRWGVWYANTLNLDGFRLDAVKHIQFSFMRNWLGHVRGQTGKNLFAVAEYWKNDLGALENYLSKTNWTMSAFDVPLHYNLYQASNSGGNYDMRNLLNGTLVQRHPSHAVTFVDNHDTQPGEALESFVQGWFKPLAYATILTREQGYPQVFYGDYYGIPSDGVPSYRQQIDPLLKARQKYAYGPQHDYLDHPDVIGWTREGDSSHPKSGLATLITDGPGGSKRMYAGLKNAGETWYDITGNRSDTVKIGSDGWGEFHVNDRSVSIYVQK

SEQ ID NO: 34438 - protein, 485 aa, Bacillus sp.
HHDGTNGTIMQYFEWNVPNDGQHWNRLHNNAQNLKNAGITAIWIPPAWKGTSQNDVGYGAYDLYDLGEFNQKGTVRTKYGTKAELERAIRSLKANGIQVYGDVVMNHKGGADFTERVQAVEVNPQNRNQEVSGTYEIEAYTGFNFPGRGNQHSSFKWRWYHFDGTDWDQSRQLSNRIYKFRGDGKAWDWEVDTENGNYDYLMYADVDMNHPEVINELNRWGVWYANTLNLDGFRLDAVKHIQFSFMRNWLGHVRGQTGKNLFAVAEYWKNDLGALENYLSKTNWTMSAFDVPLHYNLYQASNSGGNYDMRNLLNGTLVQRHPSHAVTFVDNHDTQPGEALESFVQGWFKPLAYATILTREQGYPQVFYGDYYGIPSDGVPSYRQQIDPLLKARQKYAYGPQHDYLDHPDVIGWTREGDSSHPKSGLATLITDGPGGSKRMYAGLKNAGETWYDITGNRSDTVKIGSDGWGEFHVNDRSVSIYVQK

SEQ ID NO: 34439 - protein, 485 aa, Bacillus sp.
HHDGTNGTIMQYFEWNVPNDGQHWNRLHNNAQNLKNAGITAIWIPPAWKGTSQNDVGYGAYDLYDLGEFNQKGTVRTKYGTKAELERAIRSLKANGIQVYGDVVMNHKGGADFTERVQAVEVNPQNRNQEVSGTYEIEAWTGFNFPGRGNQHSSFKWRWSHFDGTDWDQSRQLSNRIYKFRGDGKAWDWEVDTENGNYDYLMYADVDMNHPEVINELNRWGVWYANTLNLDGFRLDAVKHIQFSFMRNWLGHVRGQTGKNLFAVAEYWKNDLGALENYLSKTNWTMSAFDVPLHYNLYQASNSKGNYDMRNLLNGTLVQRHPSHAVTFVDNHDTQPGEALESFVQGWFKPLAYATILTREQGYPQVFYGDYYGIPSDGVPSYRQQIDPLLKARQKYAYGPQHDYLDHPDVIGWTREGDSSHPKSGLATLITDGPGGSKRMYAGLKNAGETWYDITGNRSDTVKIGSDGWGEFHVNDGSVSIYVQK

SEQ ID NO: 34440 - protein, 483 aa, Bacillus sp.
HHDGTNGTIMQYFEWNVPNDGQHWNRLHNNAQNLKNAGITAIWIPPAWKGTSQNDVGYGAYDLYDLGEFNQKGTVRTKYGTKAELERAIRSLKANGIQVYGDVVMNHKGGADFTERVQAVEVNPQNRNQEVSGTYQIEAWTGFNFPGRGNQHSSFKWRWYHFDGTDWDQSRQLSNRIYKFRGKAWDWEVDTEFGNYDYLMYADVDMDHPEVINELNRWGVWYANTLNLDGFRLDAVKHIKFSFMRDWLGHVRGQTGKNLFAVAEYWKNDLGALENYLSKTNWTMSAFDVPLHYNLYQASNSSGNYDMRNLLNGTLVQRHPSHAVTFVDNHDTQPGEALESFVQGWFKPLAYATILTREQGYPQVFYGDYYGIPSDGVPSYRQQIDPLLKARQQYAYGPQHDYIDHPDVIGWTREGDSSAAKSGLAALITDGPGGSKRMYAGLKNAGETWYDITGNRSDTVKIGSDGWGEFHVNDGSVSIYVQK

SEQ ID NO: 34441 - protein, 485 aa, Bacillus sp.
HHDGTNGTIMQYFEWNVPNDGQHWNRLHNNAQNLKNAGITAIWIPPAWKGTSQNDVGYGAYDLYDLGEFNQKGTVRTKYGTKAELERAIRSLKANGIQVYGDVVMNHKGGADFTERVQAVEVNPQNRNQEVSGTYEIEAWTGFNFPGRGNQHSSFKWRWSHFDGTDWDQSRQLSNRIYKFRGDGKAWDWEVDTENGNYDYLMYADVDMNHPEVINELNRWGVWYANTLNLDGFRLDAVKHIQFSFMRNWLGHVRGQTGKNLFAVAEYWKNDLGALENYLSKTNWTMSAFDVPLHYNLYQASNSRGNYDMRNLLNGTLVQRHPSHAVTFVDNHDTQPGEALESFVQGWFKPLAYATILTREQGYPQVFYGDYYGIPSDGVPSYRQQIDPLLKARQKYAYGPQHDYLDHPDVIGWTREGDSSHPKSGLATLITDGPGGSKRMYAGLKNAGETWYDITGNRSDTVKIGSDGWGEFHVNDGSVSIYVQK

SEQ ID NO: 34442 - protein, 483 aa, Bacillus sp.
HHDGTNGTIMQYFEWNVPNDGQHWNRLHNNAQNLKNAGITAIWIPPAWKGTSQNDVGYGAYDLYDLGEFNQKGTVRTKYGTKAELERAIRSLKANGIQVYGDVVMNHKGGADFTERVQAVEVNPQNRNQEVSGTYQIEAWTGFNFPGRGNQHSSFKWRWYHFDGTDWDQSRQLANRIYKFRGKAWDWEVDTEFGNYDYLMYADVDMDHPEVINELNRWGVWYANTLNLDGFRLDAVKHIKFSFMRDWLGHVRGQTGKNLFAVAEYWKNDLGALENYLSKTNWTMSAFDVPLHYNLYQASNSSGNYDMRNLLNGTLVQRHPSHAVTFVDNHDTQPGEALESFVQGWFKPLAYATILTREQGYPQVFYGDYYGIPSDGVPSYRQQIDPLLAARQQYAYGPQHDYIDHPDVIGWTREGDSSAAKSGLAALITDGPGGSKRMYAGLKNAGETWYDITGNRSDTVKIGSDGWGEFHVNDGSVSIYVQK

SEQ ID NO: 34443 - protein, 483 aa, Bacillus sp.
HHDGTNGTIMQYFEWNVPNDGQHWNRLHNNAQNLKNAGITAIWIPPAWKGTSQNDVGYGAYDLYDLGEFNQKGTVRTKYGTKAELERAIRSLKANGIQVYGDVVMNHKGGADFTERVQAVEVNPQNRNQEVSGTYEIEAWTGFNFPGRGNQHSSFKWRWYHFDGTDWDQSRQLSNRIYKFGDKAWDWEVDTENGNYDYLMYADVDMNHPEVINELNRWGVWYANTLNLDGFRLDAVKHIQFSFMRNWLGHVRGQTGKNLFAVAEYWKNDLGALENYLSKTNWTMSAFDVPLHYNLYQASNSGGNYDMRNLLNGTLVQRHPSHAVTFVDNHDTQPGEALESFVQGWFKPLAYATILTREQGYPQVFYGDYYGIPSDGVPSYRQQIDPLLKARQKYAYGPQHDYLDHPDVIGWTREGDSSHPKSGLATLITDGPGGSKRMYAGLKNAGETWYDITGNRSDTVKIGSDGWGEFHVNDGSVSIYVQK

SEQ ID NO: 34444 - protein, 485 aa, Bacillus sp.
HHDGTNGTIMQYFEWNVPNDGQHWNRLHNNAQNLKNAGITAIWIPPAWKGTSQNDVGYGAYDLYDLGEFNQKGTVRTKYGTKAELERAIRSLKANGIQVYGDVVMNHKGGADFTERVQAVEVNPQNRNQEVSGTYEIEAWTGFNFPGRGNQHSSFKWRWYHFDGTDWDQSRQLSNRIYKFRGDGKAWDWEVDTENGNYDYLMYADVDMNHPEVINELNRWGVWYANTLNLDGFRLDAVKHIQFSFMRNWLGHVRGQTGKNLFAVAEYWKNDLGALENYLSKTNWTMSAFDVPLHYNLYQASNSKGNYDMRNLLNGTLVQRHPSHAVTFVDNHDTQPGEALESFVQGWFKPLAYATILTREQGYPQVFYGDYYGIPSDGVPSYRQQIDPLLKARQKYAYGPQHDYLDHPDVIGWTREGDSSHPKSGLATLITDGPGGSKRMYAGLKNAGETWYDITGNRSDTVKIGSDGWGEFHVNDRSVSIYVQK

SEQ ID NO: 34445 - protein, 485 aa, Bacillus sp.
HHDGTNGTIMQYFEWNVPNDGQHWNRLHNNAQNLKNAGITAIWIPPAWKGTSQNDVGYGAYDLYDLGEFNQKGTVRTKYGTKAELERAIRSLKANGIQVYGDVVMNHKGGADFTERVQAVEVNPQNRNQEVSGTYEIEAYTGFNFPGRGNQHSSFKWRWYHFDGTDWDQSRQLSNRIYKFRGDGKAWDWEVDTENGNYDYLMYADVDMNHPEVINELNRWGVWYANTLNLDGFRLDAVKHIQFSFMRNWLGHVRGQTGKNLFAVAEYWKNDLGALENYLSKTNWTMSAFDVPLHYNLYQASNSRGNYDMRNLLNGTLVQRHPSHAVTFVDNHDTQPGEALESFVQGWFKPLAYATILTREQGYPQVFYGDYYGIPSDGVPSYRQQIDPLLKARQKYAYGPQHDYLDHPDVIGWTREGDSSHPKSGLATLITDGPGGSKRMYAGLKNAGETWYDITGNRSDTVKIGSDGWGEFHVNDGSVSIYVQK

SEQ ID NO: 34446 - protein, 485 aa, Bacillus sp.
HHDGTNGTIMQYFEWNVPNDGQHWNRLHNNAQNLKNAGITAIWIPPAWKGTSQNDVGYGAYDLYDLGEFNQKGTVRTKYGTKAELERAIRSLKANGIQVYGDVVMNHKGGADFTERVQAVEVNPQNRNQEVSGTYEIEAWTGFNFPGRGNQHSSFKWRWSHFDGTDWDQSRQLSNRIYKFRGDGKAWDWEVDTENGNYDYLMYADVDMNHPEVINELNRWGVWYANTLNLDGFRLDAVKHIQFSFMRNWLGHVRGQTGKNLFAVAEYWKNDLGALENYLSKTNWTMSAFDVPLHYNLYQASNSGGNYDMRNLLNGTLVQRHPSHAVTFVDNHDTQPGEALESFVQGWFKPLAYATILTREQGYPQVFYGDYYGIPSDGVPSYRQQIDPLLKARQKYAYGPQHDYLDHPDVIGWTREGDSSHPKSGLATLITDGPGGSKRMYAGLKNAGETWYDITGNRSDTVKIGSDGTGEFHVNDGSVSIYVQK

SEQ ID NO: 34447 - protein, 485 aa, Bacillus sp.
HHDGTNGTIMQYFEWNVPNDGQHWNRLHNNAQNLKNAGITAIWIPPAWKGTSQNDVGYGAYDLYDLGEFNQKGTVRTKYGTKAELERAIRSLKANGIQVYGDVVMNHKGGADFTERVQAVEVNPQNRNQEVSGTYEIEAWTGFNFPGRGNQHSSFKWRWYHFDGTDWDQSRQLSNRIYKFRGDGKAWDWEVDTENGNYDYLMYADVDMNHPEVINELNRWGVWYANTLNLDGFRLDAVKHIQFSFMRNWLGHVRGQTGKNLFAVAEYWKNDLGALENYLSKTNGTMSAFDVPLHYNLYQASNSKGNYDMRNLLNGTLVQRHPSHAVTFVDNHDTQPGEALESFVQGWFKPLAYATILTREQGYPQVFYGDYYGIPSDGVPSYRQQIDPLLKARQKYAYGPQHDYLDHPDVIGWTREGDSSHPKSGLATLITDGPGGSKRMYAGLKNAGETWYDITGNRSDTVKIGSDGWGEFHVNDGSVSIYVQK

SEQ ID NO: 34448 - protein, 485 aa, Bacillus sp.
HHDGTNGTIMQYFEWNVPNDGQHWNRLHNNAQNLKNAGITAIWIPPAWKGTSQNDVGYGAYDLYDLGEFNQKGTVRTKYGTKAELERAIRSLKANGIQVYGDVVMNHKGGADFTERVQAVEVNPQNRNQEVSGTYEIEAWTGFNFPGRGNQHSSFKWRWYHFDGTDWDQSRQLSNRIYKFRGDGKAWDWEVDTENGNYDYLMYADVDMNHPEVINELNRWGVWYANTLNLDGFRLDAVKHIQFSFMRNWLGHVRGQTGKNLFAVAEYWKNDLGALENYLSKTNWTMSAFDVPLHYNLYQASNSGGNYDMRNLLNGTLVQRHPSHAVTFVDNHDTQPGEALESFVQGWFKPLAYATILTREQGYPQVFYGDYYGIPSDGVPSYRQQIDPLLKARQKYAYGPQHDYLDHPDVIGWTREGDSSHPKSGLATLITDGPGGSKRMYAGLKNAGETWYDITGNRSDTVKIGSDGTGEFHVNDRSVSIYVQK

SEQ ID NO: 34449 - protein, 485 aa, Bacillus sp.
HHDGTNGTIMQYFEWNVPNDGQHWNRLHNNAQNLKNAGITAIWIPPAWKGTSQNDVGYGAYDLYDLGEFNQKGTVRTKYGTKAELERAIRSLKANGIQVYGDVVMNHKGGADFTERVQAVEVNPQNRNQEVSGTYEIEAWTGFNFPGRGNQHSSFKWRWYHFDGTDWDQSRQLSNRIYKFRGDGKAWDWEVDTENGNYDYLMYADVDMNHPEVINELNRWGVWYANTLNLDGFRLDAVKHIQFSFMRNWLGHVRGQTGKNLFAVAEYWKNDLGALENYLSKTNWTMSAFDVPLHYNLYQASNSKGNYDMRNLLNGTLVQRHPSHAVTFVDNHDTQPGEALESFVQGWFKPLAYATILTREQGYPQVFYGDYYGIPSDGVPSYRQQIDPLLKARQKYAYGPQHDYLDHPDVIGWTREGDSSHPKSGLATLITDGPGGSKRMYAGLKNAGETWYDITGNRSDTVKIGSDGRGEFHVNDGSVSIYVQK

SEQ ID NO: 34450 - protein, 485 aa, Bacillus sp. (in: firmicutes)
HHDGTNGTIMQYFEWNVPNDGQHWNRLHNNAQNLKNAGITAIWIPPAWKGTSQSDTGYGAYDLYDLGEFNQRGTVRTKYGTKAELERAIRSLKANGIQVYGDVVMNHKAGADQTEQVQAVEVNPQNRNQEVSGTYQIEAWTGFNFPGRGNQHSSFKWRWYHFDGTDFDQSRGLSNRIYKFRGDTKAWDWEVDTEFGNYDYLMYADLDMDHPEVINELNRWGVWYANTLNLDGFRLDAVKHIKFSFMRDWLGHVRGQTGKNLFAVAEYWKNDLGALENYLSKTNWTMSAFDVPLHYNLYQASNSSGNYDMRNLLNGTLVQRHPSHAVTFVDNHDTQPGEALESFVQGWFKPLAYATILTREQGYPQVFYGDYYGIPSDGVPSYRQQIDPLLAARQQYAYGTQHDYLDNQDVIGWTREGDSAHAGSGLATVMSDGPGGSKTMYVGTAHAGQVFKDITGNRTDTVTINSAGNGTFRCNKGSVSIWVKQ

SEQ ID NO: 34451 - protein, 485 aa, Bacillus sp.
HHDGTNGTIMQYFEWNVPNDGQHWNRLHNNAQNLKNAGITAIWIPPAWKGTSQNDVGYGAYDLYDLGEFNQKGTVRTKYGTKAELERAIRSLKANGIQVYGDVVMNHKGGADFTERVQAVEVNPQNRNQEVSGTYEIEAYTGFNFPGRGNQHSSFKWRWYHFDGTDWDQSRQLSNRIYKFRGDGKAWDWEVDTENGNYDYLMYADVDMNHPEVINELNRWGVWYANTLNLDGFRLDAVKHIQFSFMRNWLGHVRGQTGKNLFAVAEYWKNDLGALENYLSKTNWTMSAFDVPLHYNLYQASNSKGNYDMRNLLNGTLVQRHPSHAVTFVDNHDTQPGEALESFVQGWFKPLAYATILTREQGYPQVFYGDYYGIPSDGVPSYRQQIDPLLKARQKYAYGPQHDYLDHPDVIGWTREGDSSHPKSGLATLITDGPGGSKRMYAGLKNAGETWYDITGNRSDTVKIGSDGWGEFHVNDGSVSIYVQK

SEQ ID NO: 34452 - protein, 485 aa, Bacillus sp.
HHDGTNGTIMQYFEWNVPNDGQHWNRLHNNAQNLKNAGITAIWIPPAWKGTSQNDVGYGAYDLYDLGEFNQKGTVRTKYGTKAELERAIRSLKANGIQVYGDVVMNHKGGADFTERVQAVEVNPQNRNQEVSGTYEIEAWTGFNFPGRGNQHSSFKWRWYHFDGTDWDQSRQLSNRIYKFRGDGKAWDWEVDTENGNYDYLMYADVDMNHPEVINELNRWGVWYANTLNLDGFRLDAVKHIQFSFMRNWLGHVRGQTGKNLFAVAEYWKNDLGALENYLSKTNGTMSAFDVPLHYNLYQASNSGRNYDMRNLLNGTLVQRHPSHAVTFVDNHDTQPGEALESFVQGWFKPLAYATILTREQGYPQVFYGDYYGIPSDGVPSYRQQIDPLLKARQKYAYGPQHDYLDHPDVIGWTREGDSSHPKSGLATLITDGPGGSKRMYAGLKNAGETWYDITGNRSDTVKIGSDGWGEFHVNDGSVSIYVQK

SEQ ID NO: 34453 - protein, 485 aa, Bacillus sp.
HHDGTNGTIMQYFEWNVPNDGQHWNRLHNNAQNLKNAGITAIWIPPAWKGTSQNDVGYGAYDLYDLGEFNQKGTVRTKYGTKAELERAIRSLKANGIQVYGDVVMNHKGGADFTERVQAVEVNPQNRNQEVSGTYEIEAYTGFNFPGRGNQHSSFKWRWYHFDGTDWDQSRQLSNRIYKFRGDGKAWDWEVDTENGNYDYLMYADVDMNHPEVINELNRWGVWYANTLNLDGFRLDAVKHIQFSFMRNWLGHVRGQTGKNLFAVAEYWKNDLGALENYLSKTNWTMSAFDVPLHYNLYQASNSGKNYDMRNLLNGTLVQRHPSHAVTFVDNHDTQPGEALESFVQGWFKPLAYATILTREQGYPQVFYGDYYGIPSDGVPSYRQQIDPLLKARQKYAYGPQHDYLDHPDVIGWTREGDSSHPKSGLATLITDGPGGSKNMYAGLKNAGETWYDITGNRSDTVKIGSDGWGEFHVNKGSVSIYVQK

SEQ ID NO: 34454 - protein, 485 aa, Bacillus sp.
HHDGTNGTIMQYFEWNVPNDGQHWNRLHNNAQNLKNAGITAIWIPPAWKGTSQNDVGYGAYDLYDLGEFNQKGTVRTKYGTKAELERAIRSLKANGIQVYGDVVMNHKGGADFTERVQAVEVNPQNRNQEVSGTYEIEAWTGFNFPGRGNQHSSFKWRWYHFDGTDWDQSRQLSNRIYKFRGDGKAWDWEVDTENGNYDYLMYADVDMNHPEVINELNRWGVWYANTLNLDGFRLDAVKHIQFSFMRNWLGHVRGQTGKNLFAVAEYWKNDLGALENYLSKTNWTMSAFDVPLHYNLYQASNSGKNYDMRNLLNGTLVQRHPSHAVTFVDNHDTQPGEALESFVQGWFKPLAYATILTREQGYPQVFYGDYYGIPSDGVPSYRQQIDPLLKARQKYAYGPQHDYLDHPDVIGWTREGDSSHPKSGLATLITDGPGGSKRMYAGLKNAGETWYDITGNRSDTVKIGSDGRGEFHVNDGSVSIYVQK

SEQ ID NO: 34455 - protein, 485 aa, Bacillus sp.
HHDGTNGTIMQYFEWNVPNDGQHWNRLHNNAQNLKNAGITAIWIPPAWKGTSQNDVGYGAYDLYDLGEFNQKGTVRTKYGTKAELERAIRSLKANGIQVYGDVVMNHKGGADFTERVQAVEVNPQNRNQEVSGTYEIEAYTGFNFPGRGNQHSSFKWRWYHFDGTDWDQSRQLSNRIYKFRGDGKAWDWEVDTENGNYDYLMYADVDMNHPEVINELNRWGVWYANTLNLDGFRLDAVKHIQFSFMRNWLGHVRGQTGKNLFAVAEYWKNDLGALENYLSKTNWTMSAFDVPLHYNLYQASNSGGNYDMRNLLNGTLVQRHPSHAVTFVDNHDTQPGEALESFVQGWFKPLAYATILTREQGYPQVFYGDYYGIPSDGVPSYRQQIDPLLKARQKYAYGPQHDYLDHPDVIGWTREGDSSHPKSGLATLITDGPGGSKRMYAGLKNAGETWYDITGNRSDTVKIGSDGTGEFHVNDGSVSIYVQK

SEQ ID NO: 34456 - protein, 485 aa, Bacillus sp.
HHDGTNGTIMQYFEWNVPNDGQHWNRLHNNAQNLKNAGITAIWIPPAWKGTSQNDVGYGAYDLYDLGEFNQKGTVRTKYGTKAELERAIRSLKANGIQVYGDVVMNHKGGADFTERVQAVEVNPQNRNQEVSGTYEIEAYTGFNFPGRGNQHSSFKWRWYHFDGTDWDQSRQLSNRIYKFRGDGKAWDWEVDTDNGNYDYLMYADVDMNHPEVINELNRWGVWYANTLNLDGFRLDAVKHIQFSFMRNWLGHVRGQTGKNLFAVAEYWKNDLGALENYLSKTNWTMSAFDVPLHYNLYQASNSGGNYDMRNLLNGTLVQRHPSHAVTFVDNHDTQPGEALESFVQGWFKPLAYATILTREQGYPQVFYGDYYGIPSDGVPSYRQQIDPLLKARQKYAYGPQHDYLDHPDVIGWTREGDSSHPKSGLATLITDGPGGSKRMYAGLKNAGETWYDITGNRSDTVKIGSDGWGEFHVNDGSVSIYVQK

SEQ ID NO: 34457 - protein, 485 aa, Bacillus sp.
HHDGTNGTIMQYFEWNVPNDGQHWNRLHNNAQNLKNAGITAIWIPPAWKGTSQNDVGYGAYDLYDLGEFNQKGTVRTKYGTKAELERAIRSLKANGIQVYGDVVMNHKGGADFTERVQAVEVNPQNRNQEVSGTYEIEAYTGFNFPGRGNQHSSFKWRWYHFDGTDWDQSRQLSNRIYKFRGDGKAWDWEVDTENGNYDYLMYADVDMNHPEVINELNRWGVWYANTLNLDGFRLDAVKHIQFSFMRNWLGHVRGQTGKPLFAVAEYWKNDLGALENYLSKTNWTMSAFDVPLHYNLYQASNSGKNYDMRNLLNGTLVQRHPSHAVTFVDNHDTQPGEALESFVQGWFKPLAYATILTREQGYPQVFYGDYYGIPSDGVPSYRQQIDPLLKARQKYAYGPQHDYLDHPDVIGWTREGDSSHPKSGLATLITDGPGGSKRMYAGLKNAGETWYDITGNRSDTVKIGSDGWGEFHVNKGSVSIYVQK

SEQ ID NO: 34458 - protein, 485 aa, Bacillus sp.
HHDGTNGTIMQYFEWNVPNDGQHWNRLHNNAQNLKNAGITAIWIPPAWKGTSQNDVGYGAYDLYDLGEFNQKGTVRTKYGTKAELERAIRSLKANGIQVYGDVVMNHKGGADFTERVQAVEVNPQNRNQEVSGTYEIEAWTGFNFPGRGNQHSSFKWRWSHFDGTDWDQSRQLSNRIYKFRGDGKAWDWEVDTENGNYDYLMYADVDMNHPDVINELNRWGVWYANTLNLDGFRLDAVKHIQFSFMRNWLGHVRGQTGKNLFAVAEYWKNDLGALENYLSKTNWTMSAFDVPLHYNLYQASNSGGNYDMRNLLNGTLVQRHPSHAVTFVDNHDTQPGEALESFVQGWFKPLAYATILTREQGYPQVFYGDYYGIPSDGVPSYRQQIDPLLKARQKYAYGPQHDYLDHPDVIGWTREGDSSHPKSGLATLITDGPGGSKRMYAGLKNAGETWYDITGNRSDTVKIGSDGWGEFHVNDGSVSIYVQK

SEQ ID NO: 34459 - protein, 483 aa, Bacillus sp.
HHDGTNGTIMQYFEWNVPNDGQHWNRLHNNAQNLKNAGITAIWIPPAWKGTSQNDVGYGAYDLYDLGEFNQKGTVRTKYGTKAELERAIRSLKANGIQVYGDVVMNHKGGADFTERVQAVEVNPQNRNQEVSGTYQIEAWTGFNFPGRGNQHSSFKWRWYHFDGTDWDQSRQLANRIYKFRGKAWDWEVDTEFGNYDYLMYADVDMDHPEVINELNRWGVWYANTLNLDGFRLDAVKHIKFSFMRDWLGHVRGQTGKNLFAVAEYWKNDLGALENYLSKTNWTMSAFDVPLHYNLYQASNSSGNYDMRNLLNGTLVQRHPSHAVTFVDNHDTQPGEALESFVQGWFKPLAYATILTREQGYPQVFYGDYYGIPSDGVPSYRQQIDPLLKARQQYAYGPQHDYIDHPDVIGWTREGDSSAAKSGLAALITDGPGGSKRMYAGLKNAGETWYDITGNRSDTVKIGSDGWGEFHVNKGSVSIYVQK

SEQ ID NO: 34460 - protein, 478 aa, Penicillium janthinellum
ATPAQWRSQSIYFMLTDRFARTDGSTTAPCDTSQRAYCGGTWQGIIDKLDYIQGMGFTAIWITPVTGQLDGDTGDGTAYHGYWQQDIYSLNSNYGTASDLKALASALHARGMYLMVDVVANHMGYNGAGNTVDYSVFDAFNSNQYFHSYCEVTNYSNQTNVEDCWLGDTTVSLPDLNTELSSVQSIWYNWVGSLVSNYSIDGLRVDTVKHVQKDFWPGYNKAAGVYCVGEVFDGDASYTCPYQEVMDGVLNYPMYYPLLRAFQSTSGSMSDLYNMINTVKSTCSDSTLLGTFVENHDNPRFASYTNDMSLAKNVAAFTIMADGIPIIYAGQEQHYSGGSDPANREAVWLSGYNTDSALYKLIAKVNAIRSYAISQSASYVTYKNYPIYQDASTLAMRKGSSGTQTITVLSNRGASGSQYTLSLGNTGYSTGTTLTEIITCAKITVDSSGNVPVPMASGEPRILYPSSSIKGSAICASS

SEQ ID NO: 34461 - protein, 478 aa, Hamigera avellanea
ATPADWRSRSIYFILTDRFARTDGSTTAECDTSARAYCGGTWRGIINKLDYIQNMGFTAIWITPVTAQLPGSTGHGSAYHGYWQQDIYSLEPNYGTADDLRALASALHERNMYLMVDVVANHMGWAGSGDSVDYSVFNPFDSADYFHPYCLISNYEDQTEVENCWLGDTNVALVDLDTTRSDVQNIWYEWVDSLVGNYSIDGLRIDTVRHVQKDFWPGFNDAAGVYSVGEVFSGDTAYTCPYQEVLDGVLNYPIYYPLLRAFQSTSGSINDLYNMINTVKSDCADSTLMGTFLENHDNPRFASYTSDVALAKNAIAFTILSDGIPIIYAGQEQHYSGGNDPANREAVWLSGYSTDSELYSFVAVTNQIRNYAISQDQGYVTWKNVPIYQDTSTLAMRKGTDGSQVITVLSNLGASGSSYTLTLGGSGYSSGQQLTEIFSCATVTVDSSGNIPVPMGSGQPKVFYPTAGLGGSGICQSS

SEQ ID NO: 34462 - protein, 482 aa, Synthetic construct
HDGTNGTIMQYFEWNVPNDGQHWNRLHNNAQNLKNAGITAIWIPPAWKGTSQSDTGYGAYDLYDLGEFNQRGTVRTKYGTKAELERAIRSLKANGIQVYGDVVMNHKAGADFTEHVQAVEVNPQNRNQEVSGEYQIEAWTGFNFPGRGNQHSSFKWRWYHFDGTDFDQSRGVSNRIYKFRGKAWDWEVDTEFGNYDYLMYADLDMDHPEVINELNRWGVWYANTLNLDGFRLDAVKHIKFSFMRDWLGHVRAQTGKNLFAVAEYWKNDLGALENYLSKTNWTMSAFDVPLHYNLYQASNSSGNYDMRNLLNGTLVQRHPSHAVTFVDNHDTQPGEALESFVQGWFKPLAYATILTREQGYPQVFYGDYYGIPSDGVPSYRQQIDPLLAARQQYAYGTQHDYLDNQDVIGWTREGDSAHAGSGLATVMSDGPGGSKTMYVGTAHAGQVFKDITGNRTDTVTINSAGNGTFPCNKGSVSIWVKQ

SEQ ID NO: 34463 - protein, 482 aa, Bacillus sp.
HDGTNGTIMQYFEWNVPNDGQHWNRLHNNAQNLKNAGITAIWIPPAWKGTSQSDTGYGVYDLYDLGEFNQKGTVRTKYGTKAELERAIRSLKANGIQVYGDVVMNHKAGADFTEQVQAVEVNPQNRNQEVSGTYQIEAWTGFNFPGRGNQHSSFKWRWYHFDGTDFDQSRRLSNRIYKFRGKAWDWEVDTEFGNYDYLMYADLDMDHPEVINELNRWGVWYANTLNLDGFRLDAVKHIKFSFMRDWLGHVRGQTGKNLFAVAEYWKNDLGALENYLSKTNWTMSAFDVPLHYNLYQASNSSGNYDMRNLLNGTLVQRHPSHAVTFVDNHDTQPGEALESFVQGWFKPLAYATILTREQGYPQVFYGDYYGIPSDGVPSYRQQIDPLLAARQQYAYGTQHDYLDNQDVIGWTREGDSAHAGSGLATVMSDGPGGSKTMYVGTAHAGQVFKDITGNRTDTVTINSAGNGTFPCNKGSVSIWVKQ

SEQ ID NO: 34464 - protein, 482 aa, Bacillus sp.
HDGTNGTIMQYFEWNVPNDGQHWNRLHNNAQNLKNAGITAIWIPPAWKGTSQSDTGYGAYDLYDLGEFNQRGTVRTKYGTKAELERAIRSLKANGIQVYGDVVMNHKAGADQTEHVQAVEVNPQNRNQEVSGTYQIEAWTGFNFPGRGNQHSSFKWRWYHFDGTDFDQSRGVSNRIYKFRTKAWDWEVDTEFGNYDYLMYADLDMDHPEVINELNRWGVWYANTLNLDGFRLDAVKHIKFSFMRDWLGHVRGQTGKNLFAVAEYWKNDLGALENYLSKTNWTMSAFDVPLHYNLYQASNSSGNYDMRNLLNGTLVQRHPSHAVTFVDNHDTQPGEALESFVQGWFKPLAYATILTREQGYPQVFYGDYYGIPSDGVPSYRQQIDPLLAARQQYAYGTQHDYLDNQDVIGWTREGDSAHAGSGLATVMSDGPGGSKTMYVGQAHAGQVFKDITGNRTDTVTINSAGNGTFRCNKGSVSIWVKQ

SEQ ID NO: 34465 - protein, 482 aa, Bacillus sp.
HDGTNGTIMQYFEWNVPNDGQHWNRLHNNAQNLKNAGITAIWIPPAWKGTSQNDVGYGAYDLYDLGEFNQKGTVRTKYGTKAELERAIRSLKANGIQVYGDVVMNHKGGADFTERVQAVEVNPQNRNQEVSGTYQIEAWTGFNFPGRGNQHSSFKWRWYHFDGTDWDQSRQLANRIYKFRGKAWDWEVDTEFGNYDYLMYADVDMDHPEVINELNRWGVWYANTLNLDGFRLDAVKHIKFSFMRDWLGHVRGQTGKNLFAVAEYWKNDLGALENYLSKTNWTMSAFDVPLHYNLYQASNSSGNYDMRNLLNGTLVQRHPSHAVTFVDNHDTQPGEALESFVQGWFKPLAYATILTREQGYPQVFYGDYYGIPSDGVPSYRQQIDPLLKARQQYAYGPQHDYIDHPDVIGWTREGDSSAAKSGLAALITDGPGGSKRMYAGLKNAGETWYDITGNRSDTVKIGSDGWGEFHVNDGSVSIYVQK

SEQ ID NO: 34466 - protein, 482 aa, Bacillus sp.
HDGTNGTIMQYFEWNVPNDGQHWNRLHNNAQNLKNAGITAIWIPPAWKGTSQSDTGYGAYDLYDLGEFNQRGTVRTKYGTKAELERAIRSLKANGIQVYGDVVMNHKAGADFTERVQAVEVNPQNRNQEVSGTYQIEAWTGFNFPGRGNQHSSFKWRWYHFDGTDFDQSRQLSNRIYKFRGKAWDWEVDTEFGNYDYLMYGDLDMDHPEVINELNRWGVWYANTLNLDGFRLDAVKHIKFSFMRDWLGHVRGQTGKNLFAVAEYWKNDLGALENYLSKTNWTMSAFDVPLHYNLYQASNSSGNYDMRNLLNGTLVQRHPSHAVTFVDNHDTQPGEALESFVQGWFKPLAYATILTREQGYPQVFYGDYYGIPSDGVPSYRQQIDPLLAARQQYAYGTQHDYLDNQDVIGWTREGDSAHAGSGLATVMSDGPGGSKTMYVGTAHAGQVFKDITGNRTDTVTINSAGNGTFPCNKGSVSIWVKQ

SEQ ID NO: 34467 - protein, 482 aa, Bacillus sp.
HDGTNGTIMQYFEWNVPNDGQHWNRLHNNAQNLKNAGITAIWIPPAWKGTSQSDTGYGAYDLYDLGEFNQRGTVRTKYGTKAELERAIRSLKANGIQVYGDVVMNHKAGADFTERVQAVEVNPQNRNQEVSGTYQIEAWTGFNFPGRGNQHSSFKWRWYHFDGTDFDQSRRLSNRIYKFRGKAWDWEVDTEFGNYDYLMYADLDMDHPEVINELNRWGVWYANTLNLDGFRLDAVKHIKFSFMRDWLGHVRGQTGKNLFAVAEYWKNDLGALENYLSKTNWTMSAFDVPLHYNLYQASNSSGNYDMRNLLNGTLVQRHPSHAVTFVDNHDTQPGEALESFVQGWFKPLAYATILTREQGYPQVFYGDYYGIPSDGVPSYRQQIDPLLAARQQYAYGTQHDYLDNQDVIGWTREGDSAHAGSGLATVMSDGPGGSKTMYVGTAHAGQVFKDITGNRTDTVTINSAGNGTFPCNKGSVSIWVKQ

SEQ ID NO: 34468 - protein, 482 aa, Bacillus sp.
HDGTNGTIMQYFEWNVPNDGQHWNRLHNNAQNLKNAGITAIWIPPAWKGTSQSDTGYGAYDLYDLGEFNQKGTVRTKYGTKAELERAIRSLKANGIQVYGDVVMNHKAGADFTEQVQAVEVNPQNRNQEVSGTYQIEAWTGFNFPGRGNQHSSFKWRWYHFDGTDFDQSRRLSNRIYKFRGKAWDWEVDTEFGNYDYLMYADLDMDHPEVINELNRWGVWYANTLNLDGFRLDAVKHIKFSFMRDWLGHVRGQTGKNLFAVGEYWKNDLGALENYLSKTNWTMSAFDVPLHYNLYQASNSSGNYDMRNLLNGTLVQRHPSHAVTFVDNHDTQPGEALESFVQGWFKPLAYATILTREQGYPQVFYGDYYGIPSDGVPSYRQQIDPLLAARQQYAYGTQHDYLDNQDVIGWTREGDSAHAGSGLATVMSDGPGGSKTMYVGTAHAGQVFKDITGNRTDTVTINSAGNGTFRCNKGSVSIWVKQ

SEQ ID NO: 34469 - protein, 482 aa, Bacillus sp.
HDGTNGTIMQYFEWNVPNDGQHWNRLHNNAQNLKNAGITAIWIPPAWKGTSQSDTGYGAYDLYDLGEFNQKGTVRTKYGTKAELERAIRSLKANGIQVYGDVVMNHKAGADQTEHVQAVEVNPQNRNQEVSGTYQIEAWTGFNFPGRGNQHSSFKWRWYHFDGTDFDQSRRLSNRIYKFRGKAWDWEVDTEFGNYDYLMYGDLDMDHPEVINELNRWGVWYANTLNLDGFRLDAVKHIKFSFMRDWLGHVRGQTGKNLFAVAEYWKNDLGALENYLSKTNWTMSAFDVPLHYNLYQASNSSGNYDMRNLLNGTLVQRHPSHAVTFVDNHDTQPGEALESFVQGWFKPLAYATILTREQGYPQVFYGDYYGIPSDGVPSYRQQIDPLLAARQQYAYGTQHDYLDNQDVIGWTREGDSAHAGSGLATVMSDGPGGSKTMYVGTAHAGQVFKDITGNRTDTVTINSAGNGTFRCNKGSVSIWVKQ

SEQ ID NO: 34470 - protein, 482 aa, Bacillus sp.
HDGTNGTIMQYFEWNVPNDGQHWNRLHNNAQNLKNAGITAIWIPPAWKGTSQSDTGYGAYDLYDLGEFNQRGTVRTKYGTKAELERAIRSLKANGIQVYGDVVMNHKAGADQTERVQAVEVNPQNRNQEVSGEYQIEAWTGFNFPGRGNQHSSFKWRWYHFDGTDFDQSRRLSNRIYKFRGKAWDWEVDTEFGNYDYLMYADLDMDHPEVINELNRWGVWYANTLNLDGFRLDAVKHIKFSFMRDWLGHVRAQTGKNLFAVAEYWKNDLGALENYLSKTNWTMSAFDVPLHYNLYQASNSSGNYDMRNLLNGTLVQRHPSHAVTFVDNHDTQPGEALESFVQGWFKPLAYATILTREQGYPQVFYGDYYGIPSDGVPSYRQQIDPLLAARQPYAYGTQHDYLDNQDVIGWTREGDSAHAGSGLATVMSDGPGGSKTMYVGTQHAGQVFKDITGNRTDTVTINSAGNGTFRCNKGSVSIWVKQ

SEQ ID NO: 34471 - protein, 482 aa, Bacillus sp.
HDGTNGTIMQYFEWNVPNDGQHWNRLHNNAQNLKNAGITAIWIPPAWKGTSQSDTGYGAYDLYDLGEFNQRGTVRTKYGTKAELERAIRSLKANGIQVYGDVVMNHKAGADFTERVQAVEVNPQNRNQEVSGTYQIEAWTGFNFPGRGNQHSSFKWRWYHFDGTDWDQSRRLSNRIYEFRGKAWDWEVDTEFGNYDYLMYADLDMDHPEVINELNRWGVWYANTLNLDGFRLDAVKHIKFSFMRDWLGHVRGQTGKNLFAVAEYWKNDLGALENYLSKTNWTMSAFDVPLHYNLYQASNSSGNYDMRNLLNGTLVQRHPSHAVTFVDNHDTQPGEALESFVQGWFKPLAYATILTREQGYPQVFYGDYYGIPSDGVPSYRQQIDPLLAARQQYAYGTQHDYLDNQDVIGWTREGDSAHAGSGLATVMSDGPGGSKTMYVGTAHAGQVFKDITGNRTDTVTINSAGNGTFPCNKGSVSIWVKQ

SEQ ID NO: 34472 - protein, 482 aa, Bacillus sp.
HDGTNGTIMQYFEWNVPNDGQHWNRLHNNAQNLKNHGITAIWIPPAWKGTSQSDTGYGVYDLYDLGEFNQKGTVRTKYGTKAELERAIRSLKANGIQVYGDVVMNHKAGADFTEQVQAVEVNPQNRNQEVSGTYQIEAWTGFNFPGRGNQHSSFKWRWYHFDGTDFDQSRNLSNRIYKFRGKAWDWEVDTEFGNYDYLMYADLDMDHPEVINELNRWGVWYANTLNLDGFRLDAVKHIKFSFMRDWLGHVRGQTGKNLFAVAEYWKNDLGALENYLSKTNWTMSAFDVPLHYNLYQASNSSGNYDMRNLLNGTLVQRHPSHAVTFVDNHDTQPGEALESFVQGWFKPLAYATILTREQGYPQVFYGDYYGIPSDGVPSYRQQIDPLLAARQQYAYGTQHDYLDNQDVIGWTREGDSAHAGSGLATVMSDGPGGSKTMYVGTAHAGQVFKDITGNRTDTVTINSAGNGTFPCNKGSVSIWVKQ

SEQ ID NO: 34473 - protein, 482 aa, Bacillus sp.
HDGTNGTIMQYFEWNVPNDGQHWNRLHNNAQNLKNAGITAIWIPPAWKGTSQSDTGYGAYDLYDLGEFNQRGTVRTKYGTKAELERAIRSLKANGIQVYGDVVMNHKAGADFTEHVQAVEVNPQNRNQEVSGTYQIEAWTGFNFPGRGNQHSSFKWRWYHFDGTDFDQSRRLSNRIYKFRGKAWDWEVDTEFGNYDYLMYADLDMDHPEVINELNRWGVWYANTLNLDGFRLDAVKHIKFSFMRDWLGHVRGQTGKNLFAVAEYWKNDLGALENYLSKTNWTMSAFDVPLHYNLYQASNSSGNYDMRNLLNGTLVQRHPSHAVTFVDNHDTQPGEALESFVQGWFKPLAYATILTREQGYPQVFYGDYYGIPSDGVPSYRQQIDPLLAARQQYAYGTQHDYLDNQDVIGWTREGDSAHAGSGLATVMSDGPGGSKTMYVGTAHAGQVFKDITGNRTDTVTINSAGNGTFPCNKGSVSIWVKQ

SEQ ID NO: 34474 - protein, 482 aa, Bacillus sp.
HDGTNGTIMQYFEWNVPNDGQHWNRLHNNAQNLKNVGITAIWIPPAWKGTSQSDTGYGAYDLYDLGEFNQKGTVRTKYGTKAELERAIRSLKANGIQVYGDVVMNHKAGADFTERVQAVEVNPQNRNQEVSGTYQIEAWTGFNFPGRGNQHSSFKWRWYHFDGTDFDQSRGLSNRIYKFRGKAWDWEVDTEFGNYDYLMYADLDMDHPEVINELNRWGVWYANTLNLDGFRLDAVKHIKFSFMRDWLGHVRGQTGKNLFAVAEYWKNDLGALENYLSKTNWTMSAFDVPLHYNLYQASNSSGNYDMRNLLNGTLVQRHPSHAVTFVDNHDTQPGEALESFVQTWFKPLAYATILTREQGYPQVFYGDYYGIPSDGVPSYRQQIDPLLAARQQYAYGTQHDYLDNQDVIGWTREGDSAHAGSGLATVMSDGPGGSKTMYVGTAHAGQVFKDITGNRTDTVTINSAGNGTFPCNKASVSIWVKQ

SEQ ID NO: 34475 - protein, 482 aa, Bacillus sp.
HDGTNGTIMQYFEWNVPNDGQHWNRLHNNAQNLKNAGITAIWIPPAWKGTSQSDTGYGAYDLYDLGEFNQKGTVRTKYGTKAELERAIRSLKANGIQVYGDVVMNHKAGADFTERVQAVEVNPQNRNQEVSGTYQIEAWTGFNFPGRGNQHSSFKWRWYHFDGTDWDQSRQLSNRIYKFRGKAWDWEVDTEFGNYDYLMYADLDMDHPEVINELNRWGVWYANTLNLDGFRLDAVKHIKFSFMRDWLGHVRGQTGKNLFAVAEYWKNDLGALENYLSKTNWTMSAFDVPLHYNLYQASNSSGNYDMRNLLNGTLVQRHPSHAVTFVDNHDTQPGEALESFVQGWFKPLAYATILTREQGYPQVFYGDYYGIPSDGVPSYRQQIDPLLAARQQYAYGPQHDYLDHPDVIGWTREGDSSHPKSGLATLITDGPGGSKRMYAGLKNAGETWYDITGNRSDTVKIGSDGWGEFHVNGGSVSIYVQK

SEQ ID NO: 34476 - protein, 482 aa, Bacillus sp.
HDGTNGTIMQYFEWNVPNDGQHWNRLHNNAQNLKNAGITAIWIPPAWKGTSQSDTGYGAYDLYDLGEFNQRGTVRTKYGTKAELERAIRSLKANGIQVYGDVVMNHKAGADQTEQVQAVEVNPQNRNQEVSGTYQIEAWTGFNFPGRGNQHSSFKWRWYHFDGTDFDQSRGLSNRIYKFRGKAWDWEVDTEFGNYDYLMYADLDMDHPEVINELNRWGVWYANTLNLDGFRLDAVKHIKFSFMRDWLGHVRGQTGKNLFAVAEYWKNDLGALENYLSKTNWTMSAFDVPLHYNLYQASNSSGNYDMRNLLNGTLVQRHPSHAVTFVDNHDTQPGEALESFVQGWFKPLAYATILTREQGYPQVFYGDYYGIPSDGVPSYRQQIDPLLAARQQYAYGTQHDYLDNQDVIGWTREGDSAHAGSGLATVMSDGPGGSKTMYVGTAHAGQVFKDITGNRTDTVTINSAGNGTFPCNKGSVSIWVKQ

SEQ ID NO: 34477 - protein, 482 aa, Bacillus sp.
HDGTNGTIMQYFEWNVPNDGQHWNRLHNNAQNLKNAGITAIWIPPAWKGTSQSDTGYGAYDLYDLGEFNQRGTVRTKYGTKAELERAIRSLKANGIQVYGDVVMNHKAGADFTERVQAVEVNPQNRNQEVSGTYQIEAWTGFNFPGRGNQHSSFKWRWYHFDGTDWDQSRQLSNRIYKFRTKAWDWEVDTEFGNYDYLMYGDLDMDHPEVINELNRWGVWYANTLNLDGFRLDAVKHIKFSFMRDWLGHVRGQTGKNLFAVAEYWKNDLGALENYLSKTNWTMSAFDVPLHYNLYQASNSSGNYDMRNLLNGTLVQRHPSHAVTFVDNHDTQPGEALESFVQGWFKPLAYATILTREQGYPQVFYGDYYGIPSDGVPSYRQQIDPLLAARQQYAYGTQHDYLDNQDVIGWTREGDSAHAGSGLATVMSDGPGGSKTMYVGTAHAGQVFKDITGNRTDTVTINSAGNGTFRCNKGSVSIWVKQ

SEQ ID NO: 34478 - protein, 482 aa, Bacillus sp.
HDGTNGTIMQYFEWNVPNDGQHWNRLHNNAQNLKNAGITAIWIPPAWKGTSQSDTGYGAYDLYDLGEFNQKGTVRTKYGTKAELERAIRSLKANGIQVYGDVVMNHKAGADFTERVQAVEVNPQNRNQEVSQTYQIEAWTGFNFPGRGNQHSSFKWRWYHFDGTDFDQSRNLSNRIYKFRGKAWDWEVDTEFGNYDYLMYADLDMDHPEVINELNRWGVWYANTLNLDGFRLDAVKHIKFSFMRDWLGHVRGQTGKNLFAVAEYWKNDLGALENYLSKTNWTMSAFDVPLHYNLYQASNSSGNYDMRNLLNGTLVQRHPSHAVTFVDNHDTQPGEALESFVQGWFKPLAYATILTREQGYPQVFYGDYYGIPSDGVPSYRQQIDPLLAARQPYAYGTQHDYLDNQDVIGWTREGDSAHAGSGLATVMSDGPGGSKTMYVGTAHAGQVFKDITGNRTDTVTINSAGNGTFPCNKGSVSIWVKQ

SEQ ID NO: 34479 - protein, 482 aa, Bacillus sp.
HDGTNGTIMQYFEWNVPNDGQHWNRLHNNAQNLKNHGITAIWIPPAWKGTSQSDTGYGVYDLYDLGEFNQKGTVRTKYGTKAELERAIRSLKANGIQVYGDVVMNHKAGADFTEQVQAVEVNPQNRNQEVSGTYQIEAWTGFNFPGRGNQHSSFKWRWYHFDGTDFDQSRRLSNRIYKFRGKAWDWEVDTEFGNYDYLMYADLDMDHPEVINELNRWGVWYANTLNLDGFRLDAVKHIKFSFMRDWLGHVRGQTGKNLFAVAEYWKNDLGALENYLSKTNWTMSAFDVPLHYNLYQASNSSGNYDMRNLLNGTLVQRHPSHAVTFVDNHDTQPGEALESFVQGWFKPLAYATILTREQGYPQVFYGDYYGIPSDGVPSYRQQIDPLLAARQQYAYGTQHDYLDNQDVIGWTREGDSAHAGSGLATVMSDGPGGSKTMYVGTAHAGQVFKDITGNRTDTVTINSAGNGTFPCNKGSVSIWVKQ

SEQ ID NO: 34480 - protein, 482 aa, Bacillus sp.
HDGTNGTIMQYFEWNVPNDGQHWNRLHNNAQNLKNAGITAIWIPPAWKGTSQSDTGYGAYDLYDLGEFNQRGTVRTKYGTKAELERAIRSLKANGIQVYGDVVMNHKAGADFTERVQAVEVNPQNRNQEVSGTYQIEAWTGFNFPGRGNQHSSFKWRWYHFDGTDWDQSRMLSNRIYKFRGKAWDWEVDTEFGNYDYLMYADLDMDHPEVINELNRWGVWYANTLNLDGFRLDAVKHIKFSFMRDWLGHVRGQTGKNLFAVAEYWKNDLGALENYLSKTNWTMSAFDVPLHNNLYQASNSSGNYDMRNLLNGTLVQRHPSHAVTFVDNHDTQPGEALESFVQGWFKPLAYATILTREQGYPQVFYGDYYGIPSDGVPSYRQQIDPLLAARQQYAYGTQHDYLDNQDVIGWTREGDSAHAGSGLATVMSDGPGGSKTMYVGTAHAGQVFKDITGNRTDTVTINSAGNGTFPCNKGSVSIWVKQ

SEQ ID NO: 34481 - protein, 482 aa, Bacillus sp.
HDGTNGTIMQYFEWNVPNDGQHWNRLHNNAQNLKNAGITAIWIPPAWKGTSQSDTGYGAYDLYDLGEFNQRGTVRTKYGTKAELERAIRSLKANGIQVYGDVVMNHKAGADQTEHVQAVEVNPQNRNQEVSGEYQIEAWTGFNFPGRGNQHSSFKWRWYHFDGTDFDQSRRLSNRIYKFRGKAWDWEVDTEFGNYDYLMYADLDMDHPEVINELNRWGVWYANTLNLDGFRLDAVKHIKFSFMRDWLGHVRAQTGKNLFAVAEYWKNDLGALENYLSKTNWTMSAFDVPLHYNLYQASNSSGNYDMRNLLNGTLVQRHPSHAVTFVDNHDTQPGEALESFVQGWFKPLAYATILTREQGYPQVFYGDYYGIPSDGVPSYRQQIDPLLAARQPYAYGTQHDYLDNQDVIGWTREGDSAHAGSGLATVMSDGPGGSKTMYVGTAHAGQVFKDITGNRTDTVTINSAGNGTFPCNKGSVSIWVKQ

SEQ ID NO: 34482 - protein, 482 aa, Bacillus sp.
HDGTNGTIMQYFEWNVPNDGQHWNRLHNNAQNLKNAGITAIWIPPAWKGTSQSDTGYGAYDLYDLGEFNQRGTVRTKYGTKAELERAIRSLKANGIQVYGDVVMNHKAGADQTEQVQAVEVNPQNRNQEVSGTYQIEAWTGFNFPGRGNQHSSFKWRWYHFDGTDFDQSRGLSNRIYKFRTKAWDWEVDTEFGNYDYLMYADLDMDHPEVINELNRWGVWYANTLNLDGFRLDAVKHIKFSFMRDWLGHVRGQTGKNLFAVAEYWKNDLGALENYLSKTNWTMSAFDVPLHYNLYQASNSSGNYDMRNLLNGTLVQRHPSHAVTFVDNHDTQPGEALESFVQGWFKPLAYATILTREQGYPQVFYGDYYGIPSDGVPSYRQQIDPLLAARQQYAYGTQHDYLDNQDVIGWTREGDSAHAGSGLATVMSDGPGGSKTMYVGTAHAGQVFKDITGNRTDTVTINSAGNGTFRCNGGSVSIWVKQ

SEQ ID NO: 34483 - protein, 482 aa, Bacillus sp.
HDGTNGTIMQYFEWNVPNDGQHWNRLHNNAQNLKNAGITAIWIPPAWKGTSQSDTGYGAYDLYDLGEFNQKGTVRTKYGTKAELERAIRSLKANGIQVYGDVVMNHKAGADQTEQVQAVEVNPQNRNQEVSGTYQIEAWTGFNFPGRGNQHSSFKWRWYHFDGTDWDQSRQLSNRIYKFRGKAWDWEVDTENGNYDYLMYADVDMDHPEVINELNRWGVWYANTLNLDGFRLDAVKHIKFSFMRDWLGHVRGQTGKNLFAVAEYWKNDLGALENYLSKTNWTMSAFDVPLHYNLYQASNSSGNYDMRNLLNGTLVQRHPSHAVTFVDNHDTQPGEALESFVQGWFKPLAYATILTREQGYPQVFYGDYYGIPSDGVPSYRQQIDPLLKARQQYAYGPQHDYIDHPDVIGWTREGDSSAPKSGLATLITDGPGGSKRMYAGLKNAGETWYDITGNRSDTVKIGSDGWGEFHVNDGSVSIYVQK

SEQ ID NO: 34484 - protein, 482 aa, Bacillus sp.
HDGTNGTIMQYFEWNVPNDGQHWNRLHNNAQNLKNAGITAIWIPPAWKGTSQSDTGYGVYDLYDLGEFNQKGTVRTKYGTKAELERAIRSLKANGIQVYGDVVMNHKAGADFTEQVQAVEVNPQNRNQEVSGTYQIEAWTGFNFPGRGNQHSSFKWRWYHFDGTDFDQSRNLSNRIYKFRGKAWDWEVDTEFGNYDYLMYADLDMDHPEVINELNRWGVWYANTLNLDGFRLDAVKHIKFSFMRDWLGHVRGQTGKNLFAVAEYWKNDLGALENYLSKTNWTMSAFDVPLHYNLYQASNSSGNYDMRNLLNGTLVQRHPSHAVTFVDNHDTQPGEALESFVQGWFKPLAYATILTREQGYPQVFYGDYYGIPSDGVPSYRQQIDPLLAARQQYAYGTQHDYLDNQDVIGWTREGDSAHAGSGLATVMSDGPGGSKTMYVGTAHAGQVFKDITGNRTDTVTINSAGNGTFPCNKGSVSIWVKQ

SEQ ID NO: 34485 - protein, 482 aa, Bacillus sp.
HDGTNGTIMQYFEWNVPNDGQHWNRLHNNAQNLKNAGITAIWIPPAWKGTSQSDTGYGAYDLYDLGEFNQKGTVRTKYGTKAELERAIRSLKANGIQVYGDVVMNHKAGADQTERVQAVEVNPQNRNQEVSGTYQIEAWTGFNFPGRGNQHSSFKWRWYHFDGTDFDQSRNLSNRIYKFRGKAWDWEVDTEFGNYDYLMYGDLDMDHPEVINELNRWGVWYANTLNLDGFRLDAVKHIKFSFMRDWLGHVRGQTGKNLFAVAEYWKNDLGALENYLSKTNWTMSAFDVPLHYNLYQASNSSGNYDMRNLLNGTLVQRHPSHAVTFVDNHDTQPGEALESFVQGWFKPLAYATILTREQGYPQVFYGDYYGIPSDGVPSYRQQIDPLLAARQQYAYGTQHDYLDNQDVIGWTREGDSAHAGSGLATVMSDGPGGSKTMYVGTAHAGQVFKDITGNRTDTVTINSAGNGTFRCNKGSVSIWVKQ

SEQ ID NO: 34486 - protein, 482 aa, Bacillus sp.
HDGTNGTIMQYFEWNVPNDGQHWNRLHNNAQNLKNAGITAIWIPPAWKGTSQSDTGYGAYDLYDLGEFNQKGTVRTKYGTKAELERAIRSLKANGIQVYGDVVMNHKAGADQTEHVQAVEVNPQNRNQEVSGTYQIEAWTGFNFPGRGNQHSSFKWRWYHFDGTDWDQSRNLSNRIYKFRGKAWDWEVDTENGNYDYLMYADVDMDHPEVINELNRWGVWYANTLNLDGFRLDAVKHIKFSFMRDWLGHVRGQTGKNLFAVAEYWKNDLGALENYLSKTNWTMSAFDVPLHYNLYQASNSSGNYDMRNLLNGTLVQRHPSHAVTFVDNHDTQPGEALESFVQGWFKPLAYATILTREQGYPQVFYGDYYGIPSDGVPSYRQQIDPLLKARQQYAYGPQHDYIDHPDVIGWTREGDSSHPKSGLATLITDGPGGSKRMYAGLKNAGETWYDITGNRSDTVKIGSDGWGEFHVNDGSVSIYVQK

SEQ ID NO: 34487 - protein, 482 aa, Bacillus sp.
HDGTNGTIMQYFEWNVPNDGQHWNRLHNNAQNLKNAGITAIWIPPAWKGTSQSDTGYGVYDLYDLGEFNQKGTVRTKYGTKAELERAIRSLKANGIQVYGDVVMNHKAGADFTEQVQAVEVNPQNRNQEVSGTYQIEAWTGFNFPGRGNQHSSFKWRWYHFDGTDFDQSRNVSNRIYKFRGKAWDWEVDTEFGNYDYLMYADLDMDHPEVINELNRWGVWYANTLNLDGFRLDAVKHIKFSFMRDWLGHVRGQTGKNLFAVAEYWKNDLGALENYLSKTNWTMSAFDVPLHYNLYQASNSSGNYDMRNLLNGTLVQRHPSHAVTFVDNHDTQPGEALESFVQGWFKPLAYATILTREQGYPQVFYGDYYGIPSDGVPSYRQQIDPLLAARQQYAYGTQHDYLDNQDVIGWTREGDSAHAGSGLATVMSDGPGGSKTMYVGTAHAGQVFKDITGNRTDTVTINSAGNGTFPCNKGSVSIWVKQ

SEQ ID NO: 34488 - protein, 482 aa, Bacillus sp.
HDGTNGTIMQYFEWNVPNDGQHWNRLHNNAQNLKNAGITAIWIPPAWKGTSQSDTGYGVYDLYDLGEFNQKGTVRTKYGTKAELERAIRSLKANGIQVYGDVVMNHKAGADFTEQVQAVEVNPQNRNQEVSGTYQIEAWTGFNFPGRGNQHSSFKWRWYHFDGTDFDQSRGVSNRIYKFRGKAWDWEVDTEFGNYDYLMYADLDMDHPEVINELNRWGVWYANTLNLDGFRLDAVKHIKFSFMRDWLGHVRGQTGKNLFAVAEYWKNDLGALENYLSKTNWTMSAFDVPLHYNLYQASNSSGNYDMRNLLNGTLVQRHPSHAVTFVDNHDTQPGEALESFVQGWFKPLAYATILTREQGYPQVFYGDYYGIPSDGVPSYRQQIDPLLAARQQYAYGTQHDYLDNQDVIGWTREGDSAHAGSGLATVMSDGPGGSKTMYVGTAHAGQVFKDITGNRTDTVTINSAGNGTFPCNKGSVSIWVKQ

SEQ ID NO: 34489 - protein, 482 aa, Bacillus sp.
HDGTNGTIMQYFEWNVPNDGQHWNRLHNNAQNLKNAGITAIWIPPAWKGTSQSDTGYGAYDLYDLGEFNQRGTVRTKYGTKAELERAIRSLKANGIQVYGDVVMNHKAGADQTEQVQAVEVNPQNRNQEVSGTYQIEAWTGFNFPGRGNQHSSFKWRWYHFDGTDFDQSRGLSNRIYKFRTKAWDWEVDTEFGNYDYLMYADVDMDHPEVINELNRWGVWYANTLNLDGFRLDAVKHIKFSFMRDWLGHVRGQTGKNLFAVAEYWKNDLGALENYLSKTNWTMSAFDVPLHYNLYQASNSSGNYDMRNLLNGTLVQRHPSHAVTFVDNHDTQPGEALESFVQGWFKPLAYATILTREQGYPQVFYGDYYGIPSDGVPSYRQQIDPLLAARQQYAYGTQHDYLDNQDVIGWTREGDSAHAGSGLATVMSDGPGGSKTMYVGTAHAGQVFKDITGNRTDTVTINSAGNGTFRCNKGSVSIWVKQ

SEQ ID NO: 34490 - protein, 482 aa, Bacillus sp.
HDGTNGTIMQYFEWNVPNDGQHWNRLHNNAQNLKNAGITAIWIPPAWKGTSQSDTGYGAYDLYDLGEFNQKGTVRTKYGTKAELERAIRSLKANGIQVYGDVVMNHKAGADQTEHVQAVEVNPQNRNQEVSGTYQIEAWTGFNFPGRGNQHSSFKWRWYHFDGTDFDQSRRLSNRIYKFRGKAWDWEVDTEFGNYDYLMYADLDMDHPEVINELNRWGVWYANTLNLDGFRLDAVKHIKFSFMRDWLGHVRGQTGKNLFAVAEYWKNDLGALENYLSKTNWTMSAIDVPLHYNLYQASNSSGNYDMRNLLNGTLVQRHPSHAVTFVDNHDTQPGEALESFVQGWFKPLAYATILTREQGYPQVFYGDYYGIPSDGVPSYRQQIDPLLAARQQYAYGTQHDYLDNQDVIGWTREGDSAHAGSGLATVMSDGPGGSKTMYVGTAHAGQVFKDITGNRTDTVTINSAGNGTFPCNKGSVSIWVKQ

SEQ ID NO: 34491 - protein, 482 aa, Bacillus sp.
HDGTNGTIMQYFEWNVPNDGQHWNRLHNNAQNLKNAGITAIWIPPAWKGTSQSDTGYGAYDLYDLGEFNQKGTVRTKYGTKAELERAIRSLKANGIQVYGDVVMNHKAGADFTEAVQAVEVNPQNRNQEVSGTYQIEAWTGFNFPGRGNQHSSFKWRWYHFDGTDFDQSRRLSNRIYKFRGKAWDWEVDTEFGNYDYLMYGDLDMDHPEVINELNRWGVWYANTLNLDGFRLDAVKHIKFSFMRDWLGHVRGQTGKNLFAVAEYWKNDLGALENYLSKTNWTMSAFDVPLHYNLYQASNSSGNYDMRNLLNGTLVQRHPSHAVTFVDNHDTQPGEALESFVQGWFKPLAYATILTREQGYPQVFYGDYYGIPSDGVPSYRQQIDPLLAARQQYAYGTQHDYLDNQDVIGWTREGDSAHAGSGLATVMSDGPGGSKTMYVGTAHAGQVFKDITGNRTDTVTINSAGNGTFRCNKGSVSIWVKQ

SEQ ID NO: 34492 - protein, 482 aa, Bacillus sp.
HDGTNGTIMQYFEWNVPNDGQHWNRLHNNAQNLKNAGITAIWIPPAWKGTSQSDTGYGAYDLYDLGEFNQRGTVRTKYGTKAELERAIRSLKANGIQVYGDVVMNHKAGADFTERVQAVEVNPQNRNQEVSGEYQIEAWTGFNFPGRGNQHSSFKWRWYHFDGTDFDQSRNLSNRIYKFRGKAWDWEVDTEFGNYDYLMYADLDMDHPEVINELNRWGVWYANTLNLDGFRLDAVKHIKFSFMRDWLGHVRAQTGKNLFAVGEYWKNDLGALENYLSKTNWTMSAFDVPLHYNLYQASNSSGNYDMRNLLNGTLVQRHPSHAVTFVDNHDTQPGEALESFVQGWFKPLAYATILTREQGYPQVFYGDYYGIPSDGVPSYRQQIDPLLAARQQYAYGTQHDYLDNQDVIGWTREGDSAHAGSGLATVMSDGPGGSKTMYVGQAHAGQVFKDITGNRTDTVTINSAGNGTFRCNKGSVSIWVKQ

SEQ ID NO: 34493 - protein, 482 aa, Bacillus sp.
HDGTNGTIMQYFEWNVPNDGQHWNRLHNNAQNLKNAGITAIWIPPAWKGTSQSDTGYGAYDLYDLGEFNQRGTVRTKYGTKAELERAIRSLKANGIQVYGDVVMNHKAGADQTEQVQAVEVNPQNRNQEVSGTYQIEAWTGFNFPGRGNQHSSFKWRWYHFDGTDFDQSRNVSNRIYKFRTKAWDWEVDTEFGNYDYLMYADLDMDHPEVINELNRWGVWYANTLNLDGFRLDAVKHIKFSFMRDWLGHVRGQTGKNLFAVAEYWKNDLGALENYLSKTNWTMSAFDVPLHYNLYQASNSSGNYDMRNLLNGTLVQRHPSHAVTFVDNHDTQPGEALESFVQGWFKPLAYATILTREQGYPQVFYGDYYGIPSDGVPSYRQQIDPLLAARQQYAYGTQHDYLDNQDVIGWTREGDSAHAGSGLATVMSDGPGGSKTMYVGQAHAGQVFKDITGNRTDTVTINSAGNGTFRCNKGSVSIWVKQ

SEQ ID NO: 34494 - protein, 482 aa, Synthetic construct
HDGTNGTIMQYFEWNVPNDGQHWNRLHNNAQNLKNAGITAIWIPPAWKGTSQSDTGYGAYDLYDLGEFNQRGTVRTKYGTKAELERAIRSLKANGIQVYGDVVMNHKAGADQTERVQAVEVNPQNRNQEVSGTYQIEAWTGFNFPGRGNQHSSFKWRWYHFDGTDFDQSRRLSNRIYKFRGKAWDWEVDTEFGNYDYLMYADLDMDHPEVINELNRWGVWYANTLNLDGFRLDAVKHIKFSFMRDWLGHVRGQTGKNLFAVAEYWKNDLGALENYLSKTNWTMSAFDVPLHYNLYQASNSSGNYDMRNLLNGTLVQRHPSHAVTFVDNHDTQPGEALESFVQGWFKPLAYATILTREQGYPQVFYGDYYGIPSDGVPSYRQQIDPLLAARQQYAYGTQHDYLDNQDVIGWTREGDSAHAGSGLATVMSDGPGGSKTMYVGTAHAGQVFKDITGNRTDTVTINSAGNGTFPCNKGSVSIWVKQ

SEQ ID NO: 34495 - protein, 482 aa, Bacillus sp.
HDGTNGTIMQYFEWNVPNDGQHWNRLHNNAQNLKNAGITAIWIPPAWKGTSQSDTGYGAYDLYDLGEFNQKGTVRTKYGTKAELERAIRSLKANGIQVYGDVVMNHKAGADFTERVQAVEVNPQNRNQEVSGTYQIEAWTGFNFPGRGNQHSSFKWRWYHFDGTDWDQSRQLSNRIYKFRGKAWDWEVDTEFGNYDYLMYADLDMDHPEVINELNRWGVWYANTLNLDGFRLDAVKHIKFSFMRDWLGHVRGQTGKNLFAVGEYWKNDLGALENYLSKTNWTMSAFDAPLHYNLYQASNSSGNYDMRNLLNGTLVQRHPSHAVTLVDNHDTQPGEALESFVQGWFKPLAYATILTREQGYPQVFYGDYYGIPSDGVPSYRQQIDPLLAARQQYAYGTQHDYLDNQDVIGWTREGDSAHAGSGLATVMSDGPGGSKTMYVGTAHAGQVFKDITGNRTDTVTINSAGNGTFPCNKGSVSIWVKQ

SEQ ID NO: 34496 - protein, 484 aa, Synthetic construct
HDGTNGTIMQYFEWNVPNDGQHWNRLHNNAQNLKNAGITAIWIPPAWKGTSQSDTGYGAYDLYDLGEFNQRGTVRTKYGTKAELERAIRSLKANGIQVYGDVVMNHKAGADQTEQVQAVEVNPQNRNQEVSGTYQIEAWTGFNFPGRGNQHSSFKWRWYHFDGTDFDQSRGLSNRIYKFRGDTKAWDWEVDTEFGNYDYLMYADLDMDHPEVINELNRWGVWYANTLNLDGFRLDAVKHIKFSFMRDWLGHVRGQTGKNLFAVAEYWKNDLGALENYLSKTNWTMSAFDVPLHYNLYQASNSSGNYDMRNLLNGTLVQRHPSHAVTFVDNHDTQPGEALESFVQGWFKPLAYATILTREQGYPQVFYGDYYGIPSDGVPSYRQQIDPLLAARQQYAYGTQHDYLDNQDVIGWTREGDSAHAGSGLATVMSDGPGGSKTMYVGTAHAGQVFKDITGNRTDTVTINSAGNGTFRCNKGSVSIWVKQ

SEQ ID NO: 34497 - protein, 484 aa, Synthetic construct
HDGTNGTIMQYFEWNVPNDGQHWNRLHNNAQNLKNAGITAIWIPPAWKGTSQSDTGYGAYDLYDLGEFNQRGTVRTKYGTKAELERAIRSLKANGIQVYGDVVMNHKAGADQTERVQAVEVNPQNRNQEVSGTYQIEAWTGFNFPGRGNQHSSFKWRWYHFDGTDFDQSRGLSNRIYKFRGDTKAWDWEVDTEFGNYDYLMYADLDMDHPEVINELNRWGVWYANTLNLDGFRLDAVKHIKFSFMRDWLGHVRGQTGKNLFAVAEYWKNDLGALENYLSKTNWTMSAFDVPLHYNLYQASNSSGNYDMRNLLNGTLVQRHPSHAVTFVDNHDTQPGEALESFVQGWFKPLAYATILTREQGYPQVFYGDYYGIPSDGVPSYRQQIDPLLAARQQYAYGTQHDYLDNQDVIGWTREGDSAHAGSGLATVMSDGPGGSKTMYVGTAHAGQVFKDITGNRTDTVTINSAGNGTFRCNKGSVSIWVKQ

SEQ ID NO: 34498 - protein, 477 aa, Synthetic construct
NGTLMQYFEWYLPNDGNHWNRLNSDASNLASKGITAVWIPPAYKGTSQADVGYGAYDLYDLGEFNQKGTVRTKYGTRSQLQAAVTSLKNNGIQVYGDVVINHKAGADATEMVTAVEVNPNNRNQEVTGEYTIEAYTRFDFPGRGNTHSSFKWRWYHFDGVDWDQSRSLNRIYKFQGKAWDWPVDTENGNYDYLMYADLDMDHPEVVNELRNWGVWYTNTLGLDGFRLDAVKHIKFSFLRDWINHVRSATGKNMFAVAEYWKNDLGAIENYLNFTNWNHSVFDVPLHYNLYAASTSGGNYDMRNIFNGTVVQKHPSHAVTFVDNHDTQPEESLESFVQPWFKPLAYALILTRESGYPSVFYGDYYGIPTHGIPALRSKIDPILEARQKYAYGPQHDYLDHPDIIGWTREGDSSHPKSGLATLITDGPGGSKRMYAGLKNAGETWYDITGNRSDTVKIGSDGWGEFHVNKGSVSIYVQK

SEQ ID NO: 34499 - protein, 485 aa, Bacillus sp.
HHDGTNGTIMQYFEWNVPNDGQHWNRLHNNAQNLKNAGITAIWIPPAWKGTSQNDVGYGAYDLYDLGEFNQKGTVRTKYGTKAELERAIRSLKANGIQVYGDVVMNHKGGADFTERVQAVEVNPQNRNQEVSGTYEIEAYTGFNFPGRGNQHSSFKWRWYHFDGTDWDQSRQLSNRIYKFRGDGKAWDWEVDTENGNYDYLMYADVDMNHPEVINELNRWGVWYANTLNLDGFRLDAVKHIQFSFMRNWLGHVRGQTGKPLFAVAEYWKNDLGALENYLSKTNWTMSAFDVPLHYNLYQASNSGKNYDMRNLLNGTLVQRHPSHAVTFVDNHDTQPGEALESFVQGWFKPLAYATILTREQGYPQVFYGDYYGIPSDGVPSYRQQIDPLLKARQKYAYGPQHDYLDHPDVIGWTREGDSSHPKSGLATLITDGPGGSKRMYAGLKNAGETWYDITGNRSDTVKIGSDGWGEFHVNDKSVSIYVQK

SEQ ID NO: 34500 - protein, 485 aa, Bacillus sp.
HHDGTNGTIMQYFEWNVPNDGQHWNRLHNNAQNLKNAGITAIWIPPAWKGTSQNDVGYGAYDLYDLGEFNQKGTVRTKYGTKAELERAIRSLKANGIQVYGDVVMNHKGGADFTERVQAVEVNPQNRNQEVSGTYEIEAYTGFNFPGRGNQHSSFKWRWYHFDGTDWDQSRQLSNRIYKFRGDGKAWDWEVDTENGNYDYLMYADVDMNHPEVINELNRWGVWYANTLNLDGFRLDAVKHIQFSFMRNWLGHVRGQTGKNLFAVAEYWKNDLGALENYLSKTNWTMSAFDVPLHYNLYQASNSGKNYDMRNLLNGTLVQRHPSHAVTFVDNHDTQPGEALESFVQGWFKPLAYATILTREQGYPQVFYGDYYGIPSDGVPSYRQQIDPLLKARQKYAYGPQHDYLDHPDVIGWTREGDSSHPKSGLATLITDGPGGSKNMYAGLKNAGETWYDITGNRSDTVKIGSDGWGEFHVNDKSVSIYVQK

SEQ ID NO: 34501 - protein, 483 aa, Bacillus sp.
HHDGTNGTIMQYFEWNVPNDGQHWNRLHNNAQNLKNAGITAIWIPPAWKGTSQSDVGYGAYDLYDLGEFNQKGTVRTKYGTKAELERAIRSLKANGIQVYGDVVMNHKGGADFTERVQAVEVNPQNRNQEVSGTYQIEAWTGFNFPGRGNQHSSFKWRWYHFDGTDWDQSRQLANRIYKFRGKAWDWEVDTEFGNYDYLMYADVDMDHPEVINELNRWGVWYANTLNLDGFRLDAVKHIKFSFMRDWLGHVRGQTGKNLFAVAEYWKNDLGALENYLSKTNWTMSAFDVPLHYNLYQASNSSGNYDMRNLLNGTLVQRHPSHAVTFVDNHDTQPGEALESFVQGWFKPLAYATILTREQGYPQVFYGDYYGIPSDGVPSYRQQIDPLLKARQQYAYGPQHDYIDHPDVIGWTREGDSSAAKSGLAALITDGPGGSKRMYAGLKNAGETWYDITGNRSDTVKIGSDGWGEFHVNDGSVSIYVQK

SEQ ID NO: 34502 - protein, 485 aa, Bacillus sp.
HHDGTNGTIMQYFEWNVPNDGQHWNRLHNNAQNLKNAGITAIWIPPAWKGTSQNDVGYGAYDLYDLGEFNQKGTVRTKYGTKAELERAIRSLKANGIQVYGDVVMNHKGGADFTERVQAVEVNPQNRNQEVSGTYEIEAYTGFNFPGRGNQHSSFKWRWYHFDGTDWDQSRQLSNRIYKFRGDGKAWDWEVDTENGNYDYLMYADVDMNHPEVINELNRWGVWYANTLNLDGFRLDAVKHIQFSFMRNWLGHVRGQTGKNLFAVAEYWKNDLGALENYLSKTNWTMSAFDVPLHYNLYQASNSGKNYDMRNLLNGTLVQRHPSHAVTFVDNHDTQPGEALESFVQGWFKPLAYATILTREQGYPQVFYGDYYGIPSDGVPSYRQQIDPLLKARQKYAYGPQHDYLDHPDVIGWTREGDSSHPKSGLATLITDGPGGSKRMYAGLKNAGETWYDITGNRSDTVKIGSDGWGEFHVNDKSVSIYVQK

SEQ ID NO: 34503 - protein, 485 aa, Bacillus sp.
HHDGTNGTIMQYFEWNVPNDGQHWNRLHNNAQNLKNAGITAIWIPPAWKGTSQNDVGYGAYDLYDLGEFNQKGTVRTKYGTKAELERAIRSLKANGIQVYGDVVMNHKGGADFTERVQAVEVNPQNRNQEVSGTYEIEAWTGFNFPGRGNQHSSFKWRWYHFDGTDWDQSRQLSNRIYKFRGDGKAWDWEVDTENGNYDYLMYADVDMNHPEVINELNRWGVWYANTLNLDGFRLDAVKHIQFSFMRNWLGHVRGQTGKNLFAVAEYWKNDLGALENYTSKTNGTMSAFDVPLHYNLYQASNSGGNYDMRNLLNGTLVQRHPSNAVTFVDNHDTQPGEALESFVQGWFKPLAYATILTREQGYPQVFYGDYYGIPSDGVPSYRQQIDPLLKARQKYAYGPQHDYLDHPDVIGWTREGDSSHPKSGLATLITDGPGGSKRMYAGLKNAGETWYDITGNRSDTVKIGSDGWGEFHVNKGSVSIYVQK

SEQ ID NO: 34504 - protein, 485 aa, Bacillus sp.
HHDGTNGTIMQYFEWNVPNDGQHWNRLHNNAQNLKNAGITAIWIPPAWKGTSQNDVGYGAYDLYDLGEFNQKGTVRTKYGTKAELERAIRSLKANGIQVYGDVVMNHKGGADFTERVQAVEVNPQNRNQEVSGTYEIEAYTGFNFPGRGNQHSSFKWRWYHFDGTDWDQSRQLSNRIYKFRGDGKAWDWEVDTENGNYDYLMYADVDMNHPEVINELNRWGVWYANTLNLDGFRLDAVKHIQFSFMRNWLGHVRGQTGKNLFAVAEYWKNDLGALENYLSKTNWTMSAFDVPLHYNLYQASNSGKNYDMRNLLNGTLVQRHPSHAVTFVDNHDTQPGEALESFVQGWFKPLAYATILTREQGYPQVFYGDYYGIPSDGVPSYRQQIDPLLKARQKYAYGPQHDYLDHPDVIGWTREGDSSHPKSGLATLITDGPGGSKRMYAGLKNAGETWYDITGNRSDTVKIGSDGTGEFHVNKGSVSIYVQK

SEQ ID NO: 34505 - protein, 485 aa, Bacillus sp.
HHDGTNGTIMQYFEWNVPNDGQHWNRLHNNAQNLKNAGITAIWIPPAWKGTSQNDVGYGAYDLYDLGEFNQKGTVRTKYGTKAELERAIRSLKANGIQVYGDVVMNHKGGADFTERVQAVEVNPQNRNQEVSGTYEIEAYTGFNFPGRGNQHSSFKWRWYHFDGTDWDQSRQLSNRIYKFRGDGKAWDWEVDTENGNYDYLMYADVDMNHPEVINELNRWGVWYANTLNLDGFRLDAVKHIQFSFMRNWLGHVRGQTGKPLFAVAEYWKNDLGALENYLSKTNWTMSAFDVPLHYNLYQASNSRGNYDMRNLLNGTLVQRHPSHAVTFVDNHDTQPGEALESFVQGWFKPLAYATILTREQGYPQVFYGDYYGIPSDGVPSYRQQIDPLLKARQKYAYGPQHDYLDHPDVIGWTREGDSSHPKSGLATLITDGPGGSKRMYAGLKNAGETWYDITGNRSDTVKIGSDGWGEFHVNDKSVSIYVQK

SEQ ID NO: 34506 - protein, 485 aa, Bacillus sp.
HHDGTNGTIMQYFEWNVPNDGQHWNRLHNNAQNLKNAGITAIWIPPAWKGTSQNDVGYGAYDLYDLGEFNQKGTVRTKYGTKAELERAIRSLKANGIQVYGDVVMNHKGGADFTERVQAVEVNPQNRNQEVSGTYEIEAYTGFNFPGRGNQHSSFKWRWYHFDGTDWDQSRQLSNRIYKFRGDGKAWDWEVDTENGNYDYLMYADVDMNHPEVINELNRWGVWYANTLNLDGFRLDAVKHIQFSFMRNWLGHVRGQTGKNLFAVAEYWKNDLGALENYLSKTNWTMSAFDVPLHYNLYQASNSRGNYDMRNLLNGTLVQRHPSHAVTFVDNHDTQPGEALESFVQGWFKPLAYATILTREQGYPQVFYGDYYGIPSDGVPSYRQQIDPLLKARQKYAYGPQHDYLDHPDVIGWTREGDSSHPKSGLATLITDGPGGSKNMYAGLKNAGETWYDITGNRSDTVKIGSDGWGEFHVNDKSVSIYVQK

SEQ ID NO: 34507 - protein, 483 aa, Bacillus sp.
HHDGTNGTIMQYFEWNVPNDGQHWNRLHNNAQNLKNAGITAIWIPPAWKGTSQNDTGYGAYDLYDLGEFNQKGTVRTKYGTKAELERAIRSLKANGIQVYGDVVMNHKGGADFTERVQAVEVNPQNRNQEVSGTYQIEAWTGFNFPGRGNQHSSFKWRWYHFDGTDWDQSRQLANRIYKFRGKAWDWEVDTEFGNYDYLMYADVDMDHPEVINELNRWGVWYANTLNLDGFRLDAVKHIKFSFMRDWLGHVRGQTGKNLFAVAEYWKNDLGALENYLSKTNWTMSAFDVPLHYNLYQASNSSGNYDMRNLLNGTLVQRHPSHAVTFVDNHDTQPGEALESFVQGWFKPLAYATILTREQGYPQVFYGDYYGIPSDGVPSYRQQIDPLLKARQQYAYGPQHDYIDHPDVIGWTREGDSSAAKSGLAALITDGPGGSKRMYAGLKNAGETWYDITGNRSDTVKIGSDGWGEFHVNDGSVSIYVQK

SEQ ID NO: 34508 - protein, 485 aa, Bacillus sp.
HHDGTNGTIMQYFEWNVPNDGQHWNRLHNNAQNLKNAGITAIWIPPAWKGTSQNDVGYGAYDLYDLGEFNQKGTVRTKYGTKAELERAIRSLKANGIQVYGDVVMNHKGGADFTERVQAVEVNPQNRNQEVSGTYEIEAYTGFNFPGRGNQHSSFKWRWYHFDGTDWDQSRQLSNRIYKFRGDGKAWDWEVDTENGNYDYLMYADVDMNHPEVINELNRWGVWYANTLNLDGFRLDAVKHIQFSFMRNWLGHVRGQTGKNLFAVAEYWKNDLGALENYLSKTNWTMSAFDVPLHYNLYQASNSGKNYDMRNLLNGTLVQRHPSHAVTFVDNHDTQPGEALESFVQGWFKPLAYATILTREQGYPQVFYGDYYGIPSDGVPSYRQQIDPLLKARQKYAYGPQHDYLDHPDVIGWTREGDSSHPKSGLATLITDGPGGSKRMYAGLKNAGETWYDITGNRSDTVKIGSDGWGEFHVKDGSVSIYVQK

SEQ ID NO: 34509 - protein, 483 aa, Bacillus sp.
HHDGTNGTIMQYFEWNVPNDGQHWNRLHNNAQNLKNAGITAIWIPPAWKGTSQNDVGYGAYDLYDLGEFNQKGTVRTKYGTKAELERAIRSLKANGIQVYGDVVMNHKAGADFTERVQAVEVNPQNRNQEVSGTYQIEAWTGFNFPGRGNQHSSFKWRWYHFDGTDWDQSRQLANRIYKFRGKAWDWEVDTEFGNYDYLMYADVDMDHPEVINELNRWGVWYANTLNLDGFRLDAVKHIKFSFMRDWLGHVRGQTGKNLFAVAEYWKNDLGALENYLSKTNWTMSAFDVPLHYNLYQASNSSGNYDMRNLLNGTLVQRHPSHAVTFVDNHDTQPGEALESFVQGWFKPLAYATILTREQGYPQVFYGDYYGIPSDGVPSYRQQIDPLLKARQQYAYGPQHDYIDHPDVIGWTREGDSSAAKSGLAALITDGPGGSKRMYAGLKNAGETWYDITGNRSDTVKIGSDGWGEFHVNDGSVSIYVQK

SEQ ID NO: 34510 - protein, 485 aa, Bacillus sp.
HHDGTNGTIMQYFEWNVPNDGQHWNRLHNNAQNLKNAGITAIWIPPAWKGTSQNDVGYGAYDLYDLGEFNQKGTVRTKYGTKAELERAIRSLKANGIQVYGDVVMNHKGGADFTERVQAVEVNPQNRNQEVSGTYEIEAYTGFNFPGRGNQHSSFKWRWYHFDGTDWDQSRQLSNRIYKFRGDGKAWDWEVDTENGNYDYLMYADVDMNHPEVINELNRWGVWYANTLNLDGFRLDAVKHIQFSFMRNWLGHVRGQTGKNLFAVAEYWKNDLGALENYLSKTNWTMSAFDVPLHYNLYQASNSRGNYDMRNLLNGTLVQRHPSHAVTFVDNHDTQPGEALESFVQGWFKPLAYATILTREQGYPQVFYGDYYGIPSDGVPSYRQQIDPLLKARQKYAYGPQHDYLDHPDVIGWTREGDSSHPKSGLATLITDGPGGSKRMYAGLKNAGETWYDITGNRSDTVKIGSDGWGEFHVKDGSVSIYVQK

SEQ ID NO: 34511 - protein, 485 aa, Bacillus sp.
HHDGTNGTIMQYFEWNVPNDGQHWNRLHNNAQNLKNAGITAIWIPPAWKGTSQNDVGYGAYDLYDLGEFNQKGTVRTKYGTKAELERAIRSLKANGIQVYGDVVMNHKGGADFTERVQAVEVNPQNRNQEVSGTYEIEAYTGFNFPGRGNQHSSFKWRWYHFDGTDWDQSRQLSNRIYKFRGDGKAWDWEVDTENGNYDYLMYADVDMNHPDVINELNRWGVWYANTLNLDGFRLDAVKHIQFSFMRNWLGHVRGQTGKNLFAVAEYWKNDLGALENYLSKTNWTMSAFDVPLHYNLYQASNSGKNYDMRNLLNGTLVQRHPSHAVTFVDNHDTQPGEALESFVQGWFKPLAYATILTREQGYPQVFYGDYYGIPSDGVPSYRQQIDPLLKARQKYAYGPQHDYLDHPDVIGWTREGDSSHPKSGLATLITDGPGGSKRMYAGLKNAGETWYDITGNRSDTVKIGSDGWGEFHVNKGSVSIYVQK

SEQ ID NO: 34512 - protein, 485 aa, Bacillus sp.
HHDGTNGTIMQYFEWNVPNDGQHWNRLHNNAQNLKNAGITAIWIPPAWKGTSQNDVGYGAYDLYDLGEFNQKGTVRTKYGTKAELERAIRSLKANGIQVYGDVVMNHKGGADFTERVQAVEVNPQNRNQEVSGTYEIEAYTGFNFPGRGNQHSSFKWRWYHFDGTDWDQSRQLSNRIYKFRGDGKAWDWEVDTENGNYDYLMYADVDMNHPEVINELNRWGVWYANTLNLDGFRLDAVKHIQFSFMRNWLGHVRGQTGKPLFAVAEYWKNDLGALENYLSKTNWTMSAFDVPLHYNLYQASNSRGNYDMRNLLNGTLVQRHPSHAVTFVDNHDTQPGEALESFVQGWFKPLAYATILTREQGYPQVFYGDYYGIPSDGVPSYRQQIDPLLKARQKYAYGPQHDYLDHPDVIGWTREGDSSHPKSGLATLITDGPGGSKRMYAGLKNAGETWYDITGNRSDTVKIGSDGWGEFHVKDGSVSIYVQK

SEQ ID NO: 34513 - protein, 485 aa, Bacillus sp.
HHDGTNGTIMQYFEWNVPNDGQHWNRLHNNAQNLKNAGITAIWIPPAWKGTSQNDVGYGAYDLYDLGEFNQKGTVRTKYGTKAELERAIRSLKANGIQVYGDVVMNHKGGADFTERVQAVEVNPQNRNQEVSGTYEIEAWTGFNFPGRGNQHSSFKWRWYHFDGTDWDQSRQLSNRIYKFRGDGKAWDWEVDTENGNYDYLMYADVDMNHPEVINELNRWGVWYANTLNLDGFRLDAVKHIQFSFMRNWLGHVRGQTGKNLFAVAEYWKNDLGALENYTSKTNGTMSAFDVPLHYNLYQASNSGGNYDMRNLLNGTLVQRHPSNAVTFVDNHDTQPGEALESFVQGWFKPLAYATILTREQGYPQVFYGDYYGIPSDGVPSYRQQIDPLLKARQKYAYGPQHDYLDHPDVIGWTREGDSSHPKSGLATLITDGPGGSKNMYAGLKNAGETWYDITGNRSDTVKIGSDGWGEFHVNDGSVSIYVQK

SEQ ID NO: 34514 - protein, 482 aa, Synthetic construct
HDGTNGTIMQYFEWNVPNDGQHWNRLHNNAQNLKNAGITAIWIPPAWKGTSQSDTGYGAYDLYDLGEFNQRGTVRTKYGTKAELERAIRSLKANGIQVYGDVVMNHKAGADQTEQVQAVEVNPQNRNQEVSGTYQIEAWTGFNFPGRGNQHSSFKWRWYHFDGTDFDQSRGLSNRIYKFRTKAWDWEVDTEFGNYDYLMYADLDMDHPEVINELNRWGVWYANTLNLDGFRLDAVKHIKFSFMRDWLGHVRGQTGKNLFAVAEYWKNDLGALENYLSKTNWTMSAFDVPLHYNLYQASNSSGNYDMRNLLNGTLVQRHPSHAVTFVDNHDTQPGEALESFVQGWFKPLAYATILTREQGYPQVFYGDYYGIPSDGVPSYRQQIDPLLAARQQYAYGTQHDYLDNQDVIGWTREGDSAHAGSGLATVMSDGPGGSKTMYVGTAHAGQVFKDITGNRTDTVTINSAGNGTFRCNKGSVSIWVKQ

SEQ ID NO: 34515 - protein, 482 aa, Bacillus sp.
HDGTNGTIMQYFEWNVPNDGQHWNRLHNNAQNLKNAGITAIWIPPAWKGTSQSDTGYGAYDLYDLGEFNQKGTVRTKYGTKAELERAIRSLKANGIQVYGDVVMNHKAGADQTERVQAVEVNPDNRNQEVSGTYQIEAWTGFNFPGRGNQHSSFKWRWYHFDGTDWDQSRQLSNRIYKFRGKAWDWEVDTEFGNYDYLMYADLDMDHPEVINELNRWGVWYANTLNLDGFRLDAVKHIKFSFMRDWLGHVRGQTGKNLFAVAEYWKNDLGALENYLSKTNWTMSAFDVPLHYNLYQASNSSGNYDMRNLLNGTLVQRHPSHAVTFVDNHDTQPGEALESFVQGWFKPLAYATILTREQGYPQVFYGDYYGIPSDGVPSYRQQIDPLLKARQQYAYGPQHDYLDHPDVIGWTREGDSSHPKSGLATLITDGPGGSKRMYAGLKNAGETWYDITGNRSDTVKIGSDGWGEFHVNDGSVSIYVQK

SEQ ID NO: 34516 - protein, 482 aa, Bacillus sp.
HDGTNGTIMQYFEWNVPNDGQHWNRLHNNAQNLKNAGITAIWIPPAWKGTSQSDTGYGAYDLYDLGEFNQKGTVRTKYGTKAELERAIRSLKANGIQVYGDVVMNHKAGADFTERVQAVEVNPQNRNQEVSGTYQIEAWTGFNFPGRGNQHSSFKWRWYHFDGTDWDQSRQLSNRIYKFRGKAWDWEVDTEFGNYDYLMYADLDMDHPEVINELNRWGVWYANTLNLDGFRLDAVKHIKFSFMRDWLGHVRGQTGKNLFAVAEYWKNDLGALENYLSKTNWTMSAFDVPLHYNLYQASNSNGNYDMRNLLNGTLVQRHPSHAVTFVDNHDTQPGEALESFVQGWFKPLAYATILTREQGYPQVFYGDYYGIPSDGVPSYRQQIDPLLKARQQYAYGPQHDYLDHPDVIGWTREGDSSHPKSGLATLITDGPGGSKRMYAGLKNAGETWYDITGNRSDTVKIGSDGWGEFHVNKGSVSIYVQK

SEQ ID NO: 34517 - protein, 482 aa, Bacillus sp.
HDGTNGTIMQYFEWNVPNDGQHWNRLHNNAQNLKNAGITAIWIPPAWKGTSQSDTGYGAYDLYDLGEFNQKGTVRTKYGTKAELERAIRSLKANGIQVYGDVVMNHKAGADFTERVQAVEVNPQNRNQEVSGTYQIEAWTGFNFPGRGNQHSSFKWRWYHFDGTDWDQSRQLSNRIYKFRGKAWDWEVDTEFGNYDYLMYADLDMDHPEVINELNRWGVWYANTLNLDGFRLDAVKHIKFSFMRDWLGHVRGQTGKNLFAVAEYWKNDLGALENYLSKTNWTMSAFDVPLHYNLYQASNSSGNYDMRNLLNGTLVQRHPSHAVTFVDNHDTQPGEALESFVQGWFKPLAYATILTREQGYPQVFYGDYYGIPSDGVPSYRQQIDPLLKARQQYAYGPQHDYLDHPDVIGWTREGDSSHPKSGLATLITDGPGGSKRMYAGLKNAGETWYDITGNRSDTVKIGSDGWGEFHVNDGSVSIYVQK

SEQ ID NO: 34518 - protein, 482 aa, Bacillus sp.
HDGTNGTIMQYFEWNVPNDGQHWNRLHNNAQNLKNAGITAIWIPPAWKGTSQSDTGYGAYDLYDLGEFNQKGTVRTKYGTKAELERAIRSLKANGIQVYGDVVMNHKAGADQTERVQAVEVNPQNRNQEVSGTYQIEAWTGFNFPGRGNQHSSFKWRWYHFDGTDFDQSRGLSNRIYKFRGKAWDWEVDTENGNYDYLMYADVDMDHPEVINELNRWGVWYANTLNLDGFRLDAVKHIKFSFMRDWLGHVRGQTGKNLFAVAEYWKNDLGALENYLSKTNWTMSAFDVPLHYNLYQASNSSGNYDMRNLLNGTLVQRHPSHAVTFVDNHDTQPGEALESFVQGWFKPLAYATILTREQGYPQVFYGDYYGIPSDGVPSYRQQIDPLLKARQQYAYGPQHDYIDHPDVIGWTREGDSSHPKSGLATLITDGPGGSKRMYAGLKNAGETWYDITGNRSDTVKIGSDGWGEFHVNDGSVSIYVQK

SEQ ID NO: 34519 - protein, 482 aa, Bacillus sp.
HDGTNGTIMQYFEWNVPNDGQHWNRLHNNAQNLKNAGITAIWIPPAWKGTSQSDTGYGAYDLYDLGEFNQKGTVRTKYGTKAELERAIRSLKANGIQVYGDVVMNHKAGADFTERVQAVEVNPQNRNQEVSGTYQIEAWTGFNFPGRGNQHSSFKWRWYHFDGTDWDQSRQLSNRIYKFRGKAWDWEVDTEFGNYDYLMYADLDMDHPEVINELNRWGVWYANTLNLDGFRLDAVKHIKFSFMRDWLGHVRGQTGKNLFAVAEYWKNDLGALENYLSKTNWTMSAFDVPLHYNLYQASNSSGNYDMRNLLNGTLVQRHPSHAVTFVDNHDTQPGEALESFVQGWFKPLAYATILTREQGYPQVFYGDYYGIPSDGVPSYRQQIDPLLAARQQYAYGPQHDYLDHPDVIGWTREGDSSHPKSGLATLITDGPGGSKRMYAGLKNAGETWYDITGNRSDTVKIGSDGWGEFHVNKGSVSIYVQK

SEQ ID NO: 34520 - protein, 482 aa, Bacillus sp.
HDGTNGTIMQYFEWNVPNDGQHWNRLHNNAQNLKNAGITAIWIPPAWKGTSQSDTGYGAYDLYDLGEFNQRGTVRTKYGTKAELERAIRSLKANGIQVYGDVVMNHKAGADFTERVQAVEVNPQNRNQEVSQTYQIEAWTGFNFPGRGNQHSSFKWRWYHFDGTDFDQSRRLSNRIYKFRGKAWDWEVDTEFGNYDYLMYADLDMDHPEVINELNRWGVWYANTLNLDGFRLDAVKHIKFSFMRDWLGHVRGQTGKNLFAVAEYWKNDLGALENYLSKTNWTMSAFDVPLHYNLYQASNSSGNYDMRNLLNGTLVQRHPSHAVTFVDNHDTQPGEALESFVQGWFKPLAYATILTREQGYPQVFYGDYYGIPSDGVPSYRQQIDPLLAARQQYAYGTQHDYLDNQDVIGWTREGDSAHAGSGLATVMSDGPGGSKTMYVGTAHAGQVFKDITGNRTDTVTINSAGNGTFPCNKGSVSIWVKQ

SEQ ID NO: 34521 - protein, 482 aa, Bacillus sp.
HDGTNGTIMQYFEWNVPNDGQHWNRLHNNAQNLKNAGITAIWIPPAWKGTSQSDTGYGAYDLYDLGEFNQKGTVRTKYGTKAELERAIRSLKANGIQVYGDVVMNHKAGADFTERVQAVEVNPQNRNQEVSGTYQIEAWTGFNFPGRGNQHSSFKWRWYHFDGTDWDQSRQLSNRIYKFRGKAWDWEVDTEFGNYDYLMYADIDMDHPEVINELNRWGVWYANTLNLDGFRLDAVKHIKFSFMRDWLGHVRGQTGKNLFAVAEYWKNDLGALENYLSKTNWTMSAFDVPLHYNLYQASNSSGNYDMRNLLNGTLVQRHPSHAVTFVDNHDTQPGEALESFVQGWFKPLAYATILTREQGYPQVFYGDYYGIPSDGVPSYRQQIDPLLKARQQYAYGPQHDYLDHPDVIGWTREGDSSHPKSGLATLITDGPGGSKRMYAGLKNAGETWYDITGNRSDTVKIGSDGWGEFHVNDGSVSIYVQK

SEQ ID NO: 34522 - protein, 482 aa, Bacillus sp.
HDGTNGTIMQYFEWNVPNDGQHWNRLHNNAQNLKNAGITAIWIPPAWKGTSQSDTGYGAYDLYDLGEFNQKGTVRTKYGTKAELERAIRSLKANGIQVYGDVVMNHKAGADQTEQVQAVEVNPQNRNQEVSGTYQIEAWTGFNFPGRGNQHSSFKWRWYHFDGTDWDQSRQLSNRIYKFRGKAWDWEVDTEFGNYDYLMYADLDMDHPEVINELNRWGVWYANTLNLDGFRLDAVKHIKFSFMRDWLGHVRGQTGKNLFAVAEYWKNDLGALENYLSKTNWTMSAFDVPLHYNLYQASNSSGNYDMRNLLNGTLVQRHPSHAVTFVDNHDTQPGEALESFVQGWFKPLAYATILTREQGYPQVFYGDYYGIPSDGVPSYRQQIDPLLKARQQYAYGPQHDYLDHPDVIGWTREGDSSHPKSGLATLITDGPGGSKRMYAGLKNAGETWYDITGNRSDTVKIGSDGWGEFHVNDGSVSIYVQK

SEQ ID NO: 34523 - protein, 482 aa, Bacillus sp.
HDGTNGTIMQYFEWNVPNDGQHWNRLHNNAQNLKNAGITAIWIPPAWKGTSQSDTGYGAYDLYDLGEFNQRGTVRTKYGTKAELERAIRSLKANGIQVYGDVVMNHKAGADQTEHVQAVEVNPQNRNQEVSGTYQIEAWTGFNFPGRGNQHSSFKWRWYHFDGTDFDQSRGLSNRIYKFRTKAWDWEVDTEFGNYDYLMYADLDMDHPEVINELNRWGVWYANTLNLDGFRLDAVKHIKFSFMRDWLGHVRGQTGKNLFAVAEYWKNDLGALENYLSKTNWTMSAFDVPLHYNLYQASNSSGNYDMRNLLNGTLVQRHPSHAVTFVDNHDTQPGEALESFVQGWFKPLAYATILTREQGYPQVFYGDYYGIPSDGVPSYRQQIDPLLAARQQYAYGTQHDYLDNQDVIGWTREGDSAHAGSGLATVMSDGPGGSKTMYVGTAHAGQVFKDITGNRTDTVTINSAGNGTFRCNKGSVSIWVKQ

SEQ ID NO: 34524 - protein, 482 aa, Bacillus sp.
HDGTNGTIMQYFEWNVPNDGQHWNRLHNNAQNLKNAGITAIWIPPAWKGTSQSDTGYGAYDLYDLGEFNQKGTVRTKYGTKAELERAIRSLKANGIQVYGDVVMNHKAGADFTEVVQAVEVNPQNRNQEVSGTYQIEAWTGFNFPGRGNQHSSFKWRWYHFDGTDWDQSRQLSNRIYKFRGKAWDWEVDTEFGNYDYLMYADLDMDHPEVINELNRWGVWYANTLNLDGFRLDAVKHIKFSFMRDWLGHVRGQTGKNLFAVAEYWKNDLGALENYLSKTNWTMSAFDVPLHYNLYQASNSSGNYDMRNLLNGTLVQRHPSHAVTFVDNHDTQPGEALESFVQGWFKPLAYATILTREQGYPQVFYGDYYGIPSDGVPSYRQQIDPLLKARQQYAYGPQHDYLDHPDVIGWTREGDSSHPKSGLATLITDGPGGSKRMYAGLKNAGETWYDITGNRSDTVKIGSDGWGEFHVNDGSVSIYVQK

SEQ ID NO: 34525 - protein, 482 aa, Bacillus sp.
HDGTNGTIMQYFEWNVPNDGQHWNRLHNNAQNLKNAGITAIWIPPAWKGTSQSDTGYGAYDLYDLGEFNQKGTVRTKYGTKAELERAIRSLKANGIQVYGDVVMNHKAGADFTERVQAVEVNPQNRNQEVSGTYQIEAWTGFNFPGRGNQHSSFKWRWYHFDGTDWDQSRQLSNRIYKFRGKAWDWEVDTEFGNYDYLMYADLDMDHPEVINELNRWGVWYANTLNLDGFRLDAVKHIKFSFMRDWLGHVRGQTGKNLFAVAEYWKNDLGALENYLSKTNWTMSAFDVPLHYNLYQASNSSGNYDMRNLLNGTLVQRHPSHAVTFVDNHDTQPGEALESFVQGWFKPLAYATILTREQGYPQVFYGDYYGIPSDGVPSYRQQIDPLLAARQQYAYGPQHDYLDHPDVIGWTREGDSSHPKSGLATLITDGPGGSKRMYAGLKNAGETWYDITGNRSDTVKIGSDGWGEFHVNNGSVSIYVQK

SEQ ID NO: 34526 - protein, 482 aa, Bacillus sp.
HDGTNGTIMQYFEWNVPNDGQHWNRLHNNAQNLKNAGITAIWIPPAWKGTSQSDTGYGAYDLYDLGEFNQKGTVRTKYGTKAELERAIRSLKANGIQVYGDVVMNHKAGADFTEQVQAVEVNPQNRNQEVSGTYQIEAWTGFNFPGRGNQHSSFKWRWYHFDGTDWDQSRQLSNRIYKFRGKAWDWEVDTEFGNYDYLMYADLDMDHPEVINELNRWGVWYANTLNLDGFRLDAVKHIKFSFMRDWLGHVRGQTGKNLFAVAEYWKNDLGALENYLSKTNWTMSAFDVPLHYNLYQASNSSGNYDMRNLLNGTLVQRHPSHAVTFVDNHDTQPGEALESFVQGWFKPLAYATILTREQGYPQVFYGDYYGIPSDGVPSYRQQIDPLLKARQQYAYGPQHDYLDHPDVIGWTREGDSSHPKSGLATLITDGPGGSKRMYAGLKNAGETWYDITGNRSDTVKIGSDGWGEFHVNDGSVSIYVQK

SEQ ID NO: 34527 - protein, 482 aa, Bacillus sp.
HDGTNGTIMQYFEWNVPNDGQHWNRLHNNAQNLKNAGITAIWIPPAWKGTSQSDTGYGAYDLYDLGEFNQKGTVRTKYGTKAELERAIRSLKANGIQVYGDVVMNHKAGADFTERVQAVEVNPQNRNQEVSGTYQIEAWTGFNFPGRGNQHSSFKWRWYHFDGTDWDQSRQLSNRIYKFRGKAWDWEVDTEFGNYDYLMYADLDMDHPEVINELNRWGVWYANTLNLDGFRLDAVKHIKFSFMRDWLGHVRGQTGKNLFAVAEYWKNDLGALENYLSKTNWTMSAFDVPLHYNLYQASNSSGNYDMRNLLNGTLVQRHPSHAVTFVDNHDTQPGEALESFVQGWFKPLAYATILTREQGYPQVFYGDYYGIPSDGVPSYRQQIDPLLAARQQYAYGPQHDYLDHPDVIGWTREGDSSHPKSGLATLITDGPGGSKRMYAGLKNAGETWYDITGNRSDTVKIGSDGWGEFHVNYGSVSIYVQK

SEQ ID NO: 34528 - protein, 482 aa, Bacillus sp.
HDGTNGTIMQYFEWNVPNDGQHWNRLHNNAQNLKNVGITAIWIPPAWKGTSQSDTGYGAYDLYDLGEFNQRGTVRTKYGTKAELERAIRSLKANGIQVYGDVVMNHKAGADFTEHVQAVEVNPQNRNQEVSGTYQIEAWTGFNFPGRGNQHSSFKWRWYHFDGTDFDQSRRLSNRIYKFRTKAWDWEVDTEFGNYDYLMYADLDMDHPEVINELNRWGVWYANTLNLDGFRLDAVKHIKFSFMRDWLGHVRGQTGKNLFAVAEYWKNDLGALENYLSKTNWTMSAFDVPLHYNLYQASNSSGNYDMRNLLNGTLVQRHPSHAVTFVDNHDTQPGEALESFVQGWFKPLAYATILTREQGYPQVFYGDYYGIPSDGVPSYRQQIDPLLAARQQYAYGTQHDYLDNQDVIGWTREGDSAHAGSGLATVMSDGPGGSKTMYVGTAHAGQVFKDITGNRTDTVTINSAGNGTFRCNKGSVSIWVKQ

SEQ ID NO: 34529 - protein, 482 aa, Bacillus sp.
HDGTNGTIMQYFEWNVPNDGQHWNRLHNNAQNLKNAGITAIWIPPAWKGTSQSDTGYGAYDLYDLGEFNQKGTVRTKYGTKAELERAIRSLKANGIQVYGDVVMNHKAGADFTERVQAVEVNPQNRNQEVSGTYQIEAWTGFNFPGRGNQHSSFKWRWYHFDGTDWDQSRQLSNRIYKFRGKAWDWEVDTEFGNYDYLMYADLDMDHPEVINELNRWGVWYANTLNLDGFRLDAVKHIKFSFMRDWLGHVRGQTGKNLFAVAEYWKNDLGALENYLSKTNWTMSAFDVPLHYNLYQASNSSGNYDMRNLLNGTLVQRHPSHAVTFVDNHDTQPGEALESFVQGWFKPLAYATILTREQGYPQVFYGDYYGIPSDGVPSYRQQIDPLLAARQQYAYGPQHDYLDHPDVIGWTREGDSSHPKSGLATLITDGPGGSKRMYAGLKNAGETWYDITGNRSDTVKIGSDGWGEFHVNGTSVSIYVQK

SEQ ID NO: 34530 - protein, 482 aa, Bacillus sp.
HDGTNGTIMQYFEWNVPNDGQHWNRLHNNAQNLKNAGITAIWIPPAWKGTSQSDTGYGAYDLYDLGEFNQRGTVRTKYGTKAELERAIRSLKANGIQVYGDVVMNHKAGADQTEQVQAVEVNPQNRNQEVSGTYQIEAWTGFNFPGRGNQHSSFKWRWYHFDGTDFDQSRGLSNRIYKFRGKAWDWEVDTEFGNYDYLMYGDLDMDHPEVINELNRWGVWYANTLNLDGFRLDAVKHIKFSFMRDWLGHVRGQTGKNLFAVAEYWKNDLGALENYLSKTNWTMSAFDVPLHYNLYQASNSSGNYDMRNLLNGTLVQRHPSHAVTFVDNHDTQPGEALESFVQGWFKPLAYATILTREQGYPQVFYGDYYGIPSDGVPSYRQQIDPLLAARQQYAYGTQHDYLDNQDVIGWTREGDSAHAGSGLATVMSDGPGGSKTMYVGTAHAGQVFKDITGNRTDTVTINSAGNGTFPCNKGSVSIWVKQ

SEQ ID NO: 34531 - protein, 482 aa, Bacillus sp.
HDGTNGTIMQYFEWNVPNDGQHWNRLHNNAQNLKNAGITAIWIPPAWKGTSQSDTGYGAYDLYDLGEFNQKGTVRTKYGTKAELERAIRSLKANGIQVYGDVVMNHKAGADFTERVQAVEVNPQNRNQEVSGTYQIEAWTGFNFPGRGNQHSSFKWRWYHFDGTDWDQSRQLSNRIYKFRGKAWDWEVDTEFGNYDYLMYADLDMDHPEVINELNRWGVWYANTLNLDGFRLDAVKHIKFSFMRDWLGHVRGQTGKNLFAVAEYWKNDLGALENYLSKTNWTMSAFDVPLHYNLYQASNSSGNYDMRNLLNGTLVQRHPSHAVTFVDNHDTQPGEALESFVQGWFKPLAYATILTREQGYPQVFYGDYYGIPSDGVPSYRQQIDPLLKARQQYAYGPQHDYLDHPDVIGWTREGDSSHPKSGLATLITDGPGGSKRMYAGLKNAGETWYDITGNRSDTVKIGSDGWGEFHVNKGSVSIYVQK

SEQ ID NO: 34532 - protein, 482 aa, Bacillus sp.
HDGTNGTIMQYFEWNVPNDGQHWNRLHNNAQNLKNAGITAIWIPPAWKGTSQSDTGYGAYDLYDLGEFNQRGTVRTKYGTKAELERAIRSLKANGIQVYGDVVMNHKAGADQTEQVQAVEVNPQNRNQEVSGTYQIEAWTGFNFPGRGNQHSSFKWRWYHFDGTDFDQSRGLSNRIYKFRTKAWDWEVDTEFGNYDYLMYADLDMDHPEVINELNRWGVWYANTLNLDGFRLDAVKHIKFSFMRDWLGHVRGQTGKNLFAVAEYWKNDLGALENYLSKTNWTMSAFDVPLHYNLYQASNSSGNYDMRNLLNGTLVQRHPSHAVTFVDNHDTQPGEALESFVQGWFKPLAYATILTREQGYPQVFYGDYYGIPSDGVPSYRQQIDPLLKARQQYAYGTQHDYLDNQDVIGWTREGDSAHAGSGLATVMSDGPGGSKTMYVGTAHAGQVFKDITGNRTDTVTINSAGNGTFRCNKGSVSIWVKQ

SEQ ID NO: 34533 - protein, 482 aa, Bacillus sp.
HDGTNGTIMQYFEWNVPNDGQHWNRLHNNAQNLKNAGITAIWIPPAWKGTSQSDTGYGAYDLYDLGEFNQKGTVRTKYGTKAELERAIRSLKANGIQVYGDVVMNHKAGADFTERVQAVEVNPQNRNQEVSGEYQIEAWTGFNFPGRGNQHSSFKWRWYHFDGTDWDQSRQLSNRIYKFRGKAWDWEVDTEFGNYDYLMYADLDMDHPEVINELNRWGVWYANTLNLDGFRLDAVKHIKFSFMRDWLGHVRGQTGKNLFAVAEYWKNDLGALENYLSKTNWTMSAFDVPLHYNLYQASNSSGNYDMRNLLNGTLVQRHPSHAVTFVDNHDTQPGEALESFVQGWFKPLAYATILTREQGYPQVFYGDYYGIPSDGVPSYRQQIDPLLKARQQYAYGPQHDYLDHPDVIGWTREGDSSHPKSGLATLITDGPGGSKRMYAGLKNAGETWYDITGNRSDTVKIGSDGWGEFHVNDGSVSIYVQK

SEQ ID NO: 34534 - protein, 483 aa, Bacillus sp.
HDGTNGTIMQYFEWNVPNDGQHWNRLHNNAQNLKNAGITAIWIPPAWKGTSQSDTGYGAYDLYDLGEFNQKGTVRTKYGTKAELERAIRSLKANGIQVYGDVVMNHKAGADFTERVQAVEVNPQNRNQEVSGTYQIEAWTGFNFPGRGNQHSSFKWRWYHFDGTDWDQSRQLSNRIYKFRGGKAWDWEVDTEFGNYDYLMYADLDMDHPEVINELNRWGVWYANTLNLDGFRLDAVKHIKFSFMRDWLGHVRGQTGKNLFAVAEYWKNDLGALENYLSKTNWTMSAFDVPLHYNLYQASNSSGNYDMRNLLNGTLVQRHPSHAVTFVDNHDTQPGEALESFVQGWFKPLAYATILTREQGYPQVFYGDYYGIPSDGVPSYRQQIDPLLAARQQYAYGPQHDYLDHPDVIGWTREGDSSHPKSGLATLITDGPGGSKRMYAGLKNAGETWYDITGNRSDTVKIGSDGWGEFHVNDGSVSIYVQK

SEQ ID NO: 34535 - protein, 396 aa, unidentified
NGTMMQYFEWYVPNDGQQWNRLRTDAPYLSSVGITAVWTPPAYKGTSQADVGYGPYDLYDLGEFNQKGTVRTKYGTKGELKSAVNTLHSNGIQVYGDVVMNHKAGADYTENVTAVEVNPSNRNQETSGEYNIQAWTGFNFPGRGTTYSNFKWQWFHFDGTDWDQSRSLSRIFKFRGTGKAWDWEVSSENGNYDYLMYADIDYDHPDVVNEMKKWGVWYANEVGLDGYRLDAVKHIKFSFLKDWVDNARAATGKEMFTVGEYWQNDLGALNNYLAKVNYNQSLFDAPLHYNFYAASTGGGYYDMRNILNNTLVASNPTKAVTLVENHDTQPGQSLESTVQPWFKPLAYAFILTRSGGYPSVFYGDMYGTKGTTTREIPALKSKIEPLLKARKDYAYG

SEQ ID NO: 34536 - protein, 485 aa, Bacillus sp.
HHDGTNGTIMQYFEWNVPNDGQHWNRLHNNAQNLKNAGITAIWIPPAWKGTSQNDVGYGAYDLYDLGEFNQKGTVRTKYGTKAELERAIRSLKANGIQVYGDVVMNHKGGADFTERVQAVEVNPQNRNQEVSGTYEIEAYTGFNFPGRGNQHSSFKWRWYHFDGTDWDQSRQLSNRIYKFRGDGKAWDWEVDTENGNYDYLMYADVDMNHPEVINELNRWGVWYANTLNLDGFRLDAVKHIQFSFMRNWLGHVRGQTGKNLFAVAEYWKNDLGALENYLSKTNKTMSAFDVPLHYNLYQASNSGKNYDMRNLLNGTLVQRHPSHAVTFVDNHDTQPGEALESFVQGWFKPLAYATILTREQGYPQVFYGDYYGIPSDGVPSYRQQIDPLLKARQKYAYGPQHDYLDHPDVIGWTREGDSSHPKSGLATLITDGPGGSKRMYAGLKNAGETWYDITGNRSDTVKIGSDGWGEFHVNDKSVSIYVQK

SEQ ID NO: 34537 - protein, 485 aa, Bacillus sp.
HHDGTNGTIMQYFEWNVPNDGQHWNRLHNNAQNLKNAGITAIWIPPAWKGTSQNDVGYGAYDLYDLGEFNQKGTVRTKYGTKAELERAIRSLKANGIQVYGDVVMNHKGGADFTERVQAVEVNPQNRNQEVSGTYEIEAYTGFNFPGRGNQHSSFKWRWYHFDGTDWDQSRQLSNRIYKFRGDGKAWDWEVDTENGNYDYLMYADVDMNHPEVINELNRWGVWYANTLNLDGFRLDAVKHIQFSFMRNWLGHVRGQTGKNLFAVAEYWKNDLGALENYLSKTNWTMSAFDVPLHYNLYQASNSRGNYDMRNLLNGTLVQRHPSHAVTFVDNHDTQPGEALESFVQGWFKPLAYATILTREQGYPQVFYGDYYGIPSDGVPSYRQQIDPLLKARQKYAYGPQHDYLDHPDVIGWTREGDSSHPKSGLATLITDGPGGSKRMYAGLKNAGETWYDITGNRSDTVKIGSDTWGEFHVKDGSVSIYVQK

SEQ ID NO: 34538 - protein, 485 aa, Bacillus sp.
HHDGTNGTIMQYFEWNVPNDGQHWNRLHNNAQNLKNAGITAIWIPPAWKGTSQNDVGYGAYDLYDLGEFNQKGTVRTKYGTKAELERAIRSLKANGIQVYGDVVMNHKGGADFTERVQAVEVNPQNRNQEVSGTYEIEAYTGFNFPGRGNQHSSFKWRWYHFDGTDWDQSRQLSNRIYKFRGDGKAWDWEVDTENGNYDYLMYADVDMNHPDVINELNRWGVWYANTLNLDGFRLDAVKHIQFSFMRNWLGHVRGQTGKNLFAVAEYWKNDLGALENYLSKTNWTMSAFDVPLHYNLYQASNSRGNYDMRNLLNGTLVQRHPSHAVTFVDNHDTQPGEALESFVQGWFKPLAYATILTREQGYPQVFYGDYYGIPSDGVPSYRQQIDPLLKARQKYAYGPQHDYLDHPDVIGWTREGDSSHPKSGLATLITDGPGGSKRMYAGLKNAGETWYDITGNRSDTVKIGSDGWGEFHVKDGSVSIYVQK

SEQ ID NO: 34539 - protein, 485 aa, Bacillus sp.
HHDGTNGTIMQYFEWNVPNDGQHWNRLHNNAQNLKNAGITAIWIPPAWKGTSQNDVGYGAYDLYDLGEFNQKGTVRTKYGTKAELERAIRSLKANGIQVYGDVVMNHKGGADFTERVQAVEVNPQNRNQEVSGTYEIEAWTGFNFPGRGNQHSSFKWRWYHFDGTDWDQSRQLSNRIYKFRGDGKAWDWEVDTENGNYDYLMYADVDMNHPEVINELNRWGVWYANTLNLDGFRLDAVKHIQFSFMRNWLGHVRGQTGKNLFAVAEYWKNDLGALENYTSKTNGTMSAFDVPLHYNLYQASNSKGNYDMRNLLNGTLVQRHPSNAVTFVDNHDTQPGEALESFVQGWFKPLAYATILTREQGYPQVFYGDYYGIPSDGVPSYRQQIDPLLKARQKYAYGPQHDYLDHPDVIGWTREGDSSHPKSGLATLITDGPGGSKRMYAGLKNAGETWYDITGNRSDTVKIGSDGWGEFHVNDGSVSIYVQK

SEQ ID NO: 34540 - protein, 485 aa, Bacillus sp.
HHDGTNGTIMQYFEWNVPNDGQHWNRLHNNAQNLKNAGITAIWIPPAWKGTSQNDVGYGAYDLYDLGEFNQKGTVRTKYGTKAELERAIRSLKANGIQVYGDVVMNHKGGADFTERVQAVEVNPQNRNQEVSGTYEIEAWTGFNFPGRGNQHSSFKWRWYHFDGTDWDQSRQLSNRIYKFRGDGKAWDWEVDTENGNYDYLMYADVDMNHPEVINELNRWGVWYANTLNLDGFRLDAVKHIQFSFMRNWLGHVRGQTGKNLFAVAEYWKNDLGALENYTSKTNGTMSAFDVPLHYNLYQASNSGRNYDMRNLLNGTLVQRHPSNAVTFVDNHDTQPGEALESFVQGWFKPLAYATILTREQGYPQVFYGDYYGIPSDGVPSYRQQIDPLLKARQKYAYGPQHDYLDHPDVIGWTREGDSSHPKSGLATLITDGPGGSKRMYAGLKNAGETWYDITGNRSDTVKIGSDGWGEFHVNDGSVSIYVQK

SEQ ID NO: 34541 - protein, 485 aa, Bacillus sp.
HHDGTNGTIMQYFEWNVPNDGQHWNRLHNNAQNLKNAGITAIWIPPAWKGTSQNDVGYGAYDLYDLGEFNQKGTVRTKYGTKAELERAIRSLKANGIQVYGDVVMNHKGGADFTERVQAVEVNPQNRNQEVSGTYEIEAWTGFNFPGRGNQHSSFKWRWYHFDGTDWDQSRQLSNRIYKFRGDGKAWDWEVDTENGNYDYLMYADVDMNHPEVINELNRWGVWYANTLNLDGFRLDAVKHIQFSFMRNWLGHVRGQTGKNLFAVAEYWKNDLGALENYTSKTNGTMSAFDVPLHYNLYQASNSGGNYDMRNLLNGTLVQRHPSNAVTFVDNHDTQPGEALESFVQGWFKPLAYATILTREQGYPQVFYGDYYGIPSDGVPSYRQQIDPLLKARQKYAYGPQHDYLDHPDVIGWTREGDSSHPKSGLATLITDGPGGSKRMYAGLKNAGETWYDITGNRSDTVKIGSDGWGEFHVNDRSVSIYVQK

SEQ ID NO: 34542 - protein, 485 aa, Bacillus sp.
HHDGTNGTIMQYFEWNVPNDGQHWNRLHNNAQNLKNAGITAIWIPPAWKGTSQNDVGYGAYDLYDLGEFNQKGTVRTKYGTKAELERAIRSLKANGIQVYGDVVMNHKGGADFTERVQAVEVNPQNRNQEVSGTYEIEAYTGFNFPGRGNQHSSFKWRWYHFDGTDWDQSRQLSNRIYKFRGDGKAWDWEVDTENGNYDYLMYADVDMNHPDVINELNRWGVWYANTLNLDGFRLDAVKHIQFSFMRNWLGHVRGQTGKNLFAVAEYWKNDLGALENYLSKTNWTMSAFDVPLHYNLYQASNSRGNYDMRNLLNGTLVQRHPSHAVTFVDNHDTQPGEALESFVQGWFKPLAYATILTREQGYPQVFYGDYYGIPSDGVPSYRQQIDPLLKARQKYAYGPQHDYLDHPDVIGWTREGDSSHPKSGLATLITDGPGGSKRMYAGLKNAGETWYDITGNRSDTVKIGSDGWGEFHVNDKSVSIYVQK

SEQ ID NO: 34543 - protein, 485 aa, Bacillus sp.
HHDGTNGTIMQYFEWNVPNDGQHWNRLHNNAQNLKNAGITAIWIPPAWKGTSQNDVGYGAYDLYDLGEFNQKGTVRTKYGTKAELERAIRSLKANGIQVYGDVVMNHKGGADFTERVQAVEVNPQNRNQEVSGTYEIEAWTGFNFPGRGNQHSSFKWRWYHFDGTDWDQSRQLSNRIYKFRGDGKAWDWEVDTENGNYDYLMYADVDMNHPEVINELNRWGVWYANTLNLDGFRLDAVKHIQFSFMRNWLGHVRGQTGKNLFAVAEYWKNDLGALENYTSKTNGTMSAFDVPLHYNLYQASNSGGNYDMRNLLNGTLVQRHPSNAVTFVDNHDTQPGEALESFVQGWFKPLAYATILTREQGYPQVFYGDYYGIPSDGVPSYRQQIDPLLKARQKYAYGPQHDYLDHPDVIGWTREGDSSHPKSGLATLITDGPGGSKRMYAGLKNAGETWYDITGNRSDTVKIGSDGTGEFHVNDGSVSIYVQK

SEQ ID NO: 34544 - protein, 485 aa, Bacillus sp.
HHDGTNGTIMQYFEWNVPNDGQHWNRLHNNAQNLKNAGITAIWIPPAWKGTSQNDVGYGAYDLYDLGEFNQKGTVRTKYGTKAELERAIRSLKANGIQVYGDVVMNHKGGADFTERVQAVEVNPQNRNQEVSGTYEIEAYTGFNFPGRGNQHSSFKWRWYHFDGTDWDQSRQLSNRIYKFRGDGKAWDWEVDTENGNYDYLMYADVDMNHPDVINELNRWGVWYANTLNLDGFRLDAVKHIQFSFMRNWLGHVRGQTGKNLFAVAEYWKNDLGALENYLSKTNWTMSAFDVPLHYNLYQASNSGKNYDMRNLLNGTLVQRHPSHAVTFVDNHDTQPGEALESFVQGWFKPLAYATILTREQGYPQVFYGDYYGIPSDGVPSYRQQIDPLLKARQKYAYGPQHDYLDHPDVIGWTREGDSSHPKSGLATLITDGPGGSKRMYAGLKNAGETWYDITGNRSDTVKIGSDGWGEFHVNDKSVSIYVQK

SEQ ID NO: 34545 - protein, 483 aa, Bacillus sp.
HHDGTNGTIMQYFEWNVPNDGQHWNRLHNNAQNLKNAGITAIWIPPAWKGTSQSDTGYGAYDLYDLGEFNQKGTVRTKYGTKAELERAIRSLKANGIQVYGDVVMNHKGGADFTERVQAVEVNPQNRNQEVSGTYQIEAWTGFNFPGRGNQHSSFKWRWYHFDGTDWDQSRQLANRIYKFRGKAWDWEVDTEFGNYDYLMYADVDMDHPEVINELNRWGVWYANTLNLDGFRLDAVKHIKFSFMRDWLGHVRGQTGKNLFAVAEYWKNDLGALENYLSKTNWTMSAFDVPLHYNLYQASNSSGNYDMRNLLNGTLVQRHPSHAVTFVDNHDTQPGEALESFVQGWFKPLAYATILTREQGYPQVFYGDYYGIPSDGVPSYRQQIDPLLKARQQYAYGPQHDYIDHPDVIGWTREGDSSAAKSGLAALITDGPGGSKRMYAGLKNAGETWYDITGNRSDTVKIGSDGWGEFHVNDGSVSIYVQK

SEQ ID NO: 34546 - protein, 485 aa, Bacillus sp.
HHDGTNGTIMQYFEWNVPNDGQHWNRLHNNAQNLKNAGITAIWIPPAWKGTSQNDVGYGAYDLYDLGEFNQKGTVRTKYGTKAELERAIRSLKANGIQVYGDVVMNHKGGADFTERVQAVEVNPQNRNQEVSGTYEIEAYTGFNFPGRGNQHSSFKWRWYHFDGTDWDQSRQLSNRIYKFRGDGKAWDWEVDTENGNYDYLMYADVDMNHPEVINELNRWGVWYANTLNLDGFRLDAVKHIQFSFMRNWLGHVRGQTGKNLFAVAEYWKNDLGALENYLSKTNWTMSAFDVPLHYNLYQASNSRGNYDMRNLLNGTLVQRHPSHAVTFVDNHDTQPGEALESFVQGWFKPLAYATILTREQGYPQVFYGDYYGIPSDGVPSYRQQIDPLLKARQKYAYGPQHDYLDHPDVIGWTREGDSSHPKSGLATLITDGPGGSKRMYAGLKNAGETWYDITGNRSDTVKIGSDGTGEFHVNDKSVSIYVQK

SEQ ID NO: 34547 - protein, 485 aa, Bacillus sp.
HHDGTNGTIMQYFEWNVPNDGQHWNRLHNNAQNLKNAGITAIWIPPAWKGTSQNDVGYGAYDLYDLGEFNQKGTVRTKYGTKAELERAIRSLKANGIQVYGDVVMNHKGGADFTERVQAVEVNPQNRNQEVSGTYEIEAYTGFNFPGRGNQHSSFKWRWYHFDGTDWDQSRQLSNRIYKFRGDGKAWDWEVDTENGNYDYLMYADVDMNHPEVINELNRWGVWYANTLNLDGFRLDAVKHIQFSFMRNWLGHVRGQTGKNLFAVAEYWKNDLGALENYLSKTNWTMSAFDVPLHYNLYQASNSGKNYDMRNLLNGTLVQRHPSHAVTFVDNHDTQPGEALESFVQGWFKPLAYATILTREQGYPQVFYGDYYGIPSDGVPSYRQQIDPLLKARQKYAYGPQHDYLDHPDVIGWTREGDSSHPKSGLATLITDGPGGSKRMYAGLKNAGETWYDITGNRSDTVKIGSDGTGEFHVNDKSVSIYVQK

SEQ ID NO: 34548 - protein, 485 aa, Bacillus sp.
HHDGTNGTIMQYFEWNVPNDGQHWNRLHNNAQNLKNAGITAIWIPPAWKGTSQNDVGYGAYDLYDLGEFNQKGTVRTKYGTKAELERAIRSLKANGIQVYGDVVMNHKGGADFTERVQAVEVNPQNRNQEVSGTYEIEAYTGFNFPGRGNQHSSFKWRWYHFDGTDWDQSRQLSNRIYKFRGDGKAWDWEVDTENGNYDYLMYADVDMNHPEVINELNRWGVWYANTLNLDGFRLDAVKHIQFSFMRNWLGHVRGQTGKNLFAVAEYWKNDLGALENYLSKTNWTMSAFDVPLHYNLYQASNSRGNYDMRNLLNGTLVQRHPSHAVTFVDNHDTQPGEALESFVQGWFKPLAYATILTREQGYPQVFYGDYYGIPSDGVPSYRQQIDPLLKARQKYAYGPQHDYLDHPDVIGWTREGDSSHPKSGLATLITDGPGGSRRMYAGLKNAGETWYDITGNRSDTVKIGSDGWGEFHVKDGSVSIYVQK

SEQ ID NO: 34549 - protein, 483 aa, Synthetic construct
NGTLMQYFEWYMPNDGQHWKRLQNDSAYLAEHGITAVWIPPAYKGTSQADVGYGAYDLYDLGEFHQKGTVRTKYGTKGELQSAIKSLHSRDINVYGDVVINHKGGADATENVLAVEVNPNNRNQEISGDYTIEAWTKFDFPGRGNTYSDFKWRWYHFDGVDWDQSRQFQNRIYKFRGDGKAWDWEVDSENGNYDYLMYADVDYDHPDVAAEIKRWGTWYANELQLDGFRLDAVKHIKFSFLRDWVNHVREKTGKEMFTVAEYWSYDLGALENYLNKTNFNHSVFDVPLHYQFHAASTQGGGYDMRKLLNGTVVSKHPLKSVTFVDNHDTQPGQSLESTVQTWFKPLAYAFILTRESGYPQVFYGDMYGTKGDSQREIPALKHKIEPILKARKQYAYGAQHDYFDHHDIVGWTREGDSSVANSGLAALITDGPGGAKRMYVGRQNAGETWHDITGNRSEPVVINSAGWGEFHVNGGSVSIYVQR

SEQ ID NO: 34550 - protein, 482 aa, Bacillus sp.
HDGTNGTIMQYFEWNVPNDGQHWNRLHNNAQNLKNAGITAIWIPPAWKGTSQSDTGYGAYDLYDLGEFNQKGTVRTKYGTKAELERAIRSLKANGIQVYGDVVMNHKAGADQTEHVQAVEVNPQNRNQEVSGTYQIEAWTGFNFPGRGNQHSSFKWRWYHFDGTDWDQSRNLSNRIYKFRGKAWDWEVDTEFGNYDYLMYADLDMDHPEVINELNRWGVWYANTLNLDGFRLDAVKHIKFSFMRDWLGHVRGQTGKNLFAVAEYWKNDLGALENYLSKTNWTMSAFDVPLHYNLYQASNSSGNYDMRNLLNGTLVQRHPSHAVTFVDNHDTQPGEALESFVQGWFKPLAYATILTREQGYPQVFYGDYYGIPSDGVPSYRQQIDPLLKARQQYAYGPQHDYLDHPDVIGWTREGDSSHPKSGLATLITDGPGGSKRMYAGLKNAGETWYDITGNRSDTVKIGSDGWGEFHVNDGSVSIYVQK

SEQ ID NO: 34551 - protein, 482 aa, Bacillus sp.
HDGTNGTIMQYFEWNVPNDGQHWNRLHNNAQNLKNAGITAIWIPPAWKGTSQSDTGYGAYDLYDLGEFNQRGTVRTKYGTKAELERAIRSLKANGIQVYGDVVMNHKAGADFTERVQAVEVNPQNRNQEVSGTYQIEAWTGFNFPGRGNQHSSFKWRWYHFDGTDWDQSRQLSNRIYKFRGKAWDWEVDTEFGNYDYLMYADLDMDHPEVINELNRWGVWYANTLNLDGFRLDAVKHIKFSFMRDWLGHVRAQTGKNLFAVAEYWKNDLGALENYLSKTNWTMSAFDVPLHYNLYQASNSSGNYDMRNLLNGTLVQRHPSHAVTFVDNHDTQPGEALESFVQGWFKPLAYATILTREQGYPQVFYGDYYGIPSDGVPSYRQQIDPLLKARQQYAYGPQHDYLDHPDVIGWTREGDSSHPKSGLATLITDGPGGSKRMYAGLKNAGETWYDITGNRSDTVKIGSDGWGEFHVNDGSVSIYVQK

SEQ ID NO: 34552 - protein, 482 aa, Bacillus sp.
HDGTNGTIMQYFEWNVPNDGQHWNRLHNNAQNLKNAGITAIWIPPAWKGTSQSDTGYGAYDLYDLGEFNQKGTVRTKYGTKAELERAIRSLKANGIQVYGDVVMNHKAGADFTERVQAVEVNPQNRNQEVSGTYQIEAWTGFNFPGRGNQHSSFKWRWYHFDGTDWDQSRQLSNRIYKFRGKAWDWEVDTEFGNYDYLMYADLDMDHPEVINELNRWGVWYANTLNLDGFRLDAVKHIKFSFMRDWLGHVRGQTGKNLFAVAEYWKNDLGALENYLSKTNWTMSAFDVPLHYNLYQASNSSGNYDMRNLLNGTLVQRHPSHAVTFVDNHDTQPGEALESFVQGWFKPLAYATILTREQGYPQVFYGDYYGIPSDGVPSYRQQIDPLLAARQQYAYGPQHDYLDHPDVIGWTREGDSSHPKSGLATLITDGPGGSKRMYAGLKNAGETWYDITGNRSDTVKIGSDGWGEFHVNKASVSIYVQK

SEQ ID NO: 34553 - protein, 482 aa, Bacillus sp.
HDGTNGTIMQYFEWNVPNDGQHWNRLHNNAQNLKNAGIDAIWIPPAWKGTSQSDTGYGAYDLYDLGEFNQKGTVRTKYGTKAELERAIRSLKANGIQVYGDVVMNHKAGADFTERVQAVEVNPQNRNQEVSGTYQIEAWTGFNFPGRGNQHSSFKWRWYHFDGTDWDQSRQLSNRIYKFRGKAWDWEVDTEFGNYDYLMYADLDMDHPEVINELNRWGVWYANTLNLDGFRLDAVKHIKFSFMRDWLGHVRGQTGKNLFAVAEYWKNDLGALENYLSKTNWTMSAFDVPLHYNLYQASNSSGNYDMRNLLNGTLVQRHPSHAVTFVDNHDTQPGEALESFVQGWFKPLAYATILTREQGYPQVFYGDYYGIPSDGVPSYRQQIDPLLKARQQYAYGPQHDYLDHPDVIGWTREGDSSHPKSGLATLITDGPGGSKRMYAGLKNAGETWYDITGNRSDTVKIGSDGWGEFHVNDGSVSIYVQK

SEQ ID NO: 34554 - protein, 482 aa, Bacillus sp.
HDGTNGTIMQYFEWNVPNDGQHWNRLHNNAQNLKNAGITAIWIPPAWKGTSQSDTGYGAYDLYDLGEFNQKGTVRTKYGTKAELERAIRSLKANGIQVYGDVVMNHKAGADFTERVQAVEVNPQNRNQEVSGTYQIEAWTGFNFPGRGNQHSSFKWRWYHFDGTDWDQSRQLSNRIYKFRGKAWDWEVDTEFGNYDYLMYADLDMDHPEVINELNRWGVWYANTLNLDGFRLDAVKHIKFSFMRDWLGHVRGQTGKNLFAVAEYWKNDLGALENYLQKTNWTMSAFDVPLHYNLYQASNSSGNYDMRNLLNGTLVQRYPSHAVTFVDNHDTQPGEALESFVQGWFKPLAYATILTREQGYPQVFYGDYYGIPSDGVPSYRQQIDPLLKARQQYAYGPQHDYLDHPDVIGWTREGDSSHPKSGLATLITDGPGGSKRMYAGLKNAGETWYDITGNRSDTVKIGSDGWGEFHVNDGSVSIYVQK

SEQ ID NO: 34555 - protein, 482 aa, Bacillus sp.
HDGTNGTIMQYFEWNVPNDGQHWNRLHNNAQNLKNAGITAIWIPPAWKGTSQSDTGYGAYDLYDLGEFNQKGTVRTKYGTKAELERAIRSLKANGIQVYGDVVMNHKAGADQTERVQAVEVNPDNRNQEVSGTYQIEAWTGFNFPGRGNQHSSFKWRWYHFDGTDWDQSRQLSNRIYKFRGKAWDWEVDTEFGNYDYLMYADLDMDHPEVINELNRWGVWYANTLNLDGFRLDAVKHIKFSFMRDWLGHVRGQTGKNLFAVAEYWKNDLGALENYLSKTNWTMSAFDVPLHYNLYQASNSSGNYDMRNLLNGTLVQRHPSHAVTFVDNHDTQPGEALESFVQGWFKPLAYATILTREQGYPQVFYGDYYGIPSDGVPSYRQQIDPLLKARQQYAYGPQHDYLDHPDVIGWTREGDSSHAKSGLATLITDGPGGSKRMYAGLKNAGETWYDITGNRSDTVKIGSDGWGEFHVNDGSVSIYVQK

SEQ ID NO: 34556 - protein, 482 aa, Bacillus sp.
HDGTNGTIMQYFEWNVPNDGQHWNRLHNNAQNLKNAGITAIWIPPAWKGTSQSDTGYGAYDLYDLGEFNQRGTVRTKYGTKAELERAIRSLKANGIQVYGDVVMNHKAGADQTERVQAVEVNPQNRNQEVSGEYQIEAWTGFNFPGRGNQHSSFKWRWYHFDGTDWDQSRQLSNRIYKFRGKAWDWEVDTEFGNYDYLMYADLDMDHPEVINELNRWGVWYANTLNLDGFRLDAVKHIKFSFMRDWLGHVRAQTGKNLFAVAEYWKNDLGALENYLSKTNWTMSAFDVPLHYNLYQASNSSGNYDMRNLLNGTLVQRHPSHAVTFVDNHDTQPGEALESFVQGWFKPLAYATILTREQGYPQVFYGDYYGIPSDGVPSYRQQIDPLLKARQQYAYGPQHDYLDHPDVIGWTREGDSSHPKSGLATLITDGPGGSKRMYAGLKNAGETWYDITGNRSDTVKIGSDGWGEFHVNDGSVSIYVQK

SEQ ID NO: 34557 - protein, 482 aa, Bacillus sp.
HDGTNGTIMQYFEWNVPNDGQHWNRLHNNAQNLKNAGITAIWIPPAWKGTSQSDTGYGAYDLYDLGEFNQKGTVRTKYGTKAELERAIRSLKANGIQVYGDVVMNHKAGADQTERVQAVEVNPQNRNQEVSGTYQIEAWTGFNFPGRGNQHSSFKWRWYHFDGTDWDQSRNLSNRIYKFRGKAWDWEVDTEFGNYDYLMYADLDMDHPEVINELNRWGVWYANTLNLDGFRLDAVKHIKFSFMRDWLGHVRGQTGKNLFAVAEYWKNDLGALENYLSKTNWTMSAFDVPLHYNLYQASNSSGNYDMRNLLNGTLVQRHPSHAVTFVDNHDTQPGEALESFVQGWFKPLAYATILTREQGYPQVFYGDYYGIPSDGVPSYRQQIDPLLKARQQYAYGPQHDYLDHPDVIGWTREGDSSHPKSGLATLITDGPGGSKRMYAGLKNAGETWYDITGNRSDTVKIGSDGWGEFHVNDGSVSIYVQK

SEQ ID NO: 34558 - protein, 482 aa, Bacillus sp.
HDGTNGTIMQYFEWNVPNDGQHWNRLHNNAQNLKNAGITAIWIPPAWKGTSQSDTGYGAYDLYDLGEFNQKGTVRTKYGTKAELERAIRSLKANGIQVYGDVVMNHKAGADQTEHVQAVEVNPQNRNQEVSGTYQIEAWTGFNFPGRGNQHSSFKWRWYHFDGGDWDQSRGLSNRIYKFRGKAWDWEVDTEFGNYDYLMYADLDMDHPEVINELNRWGVWYANTLNLDGFRLDAVKHIKFSFMRDWLGHVRGQTGKNLFAVAEYWKNDLGALENYLSKTNWTMSAFDVPLHYNLYQASNSSGNYDMRNLLNGTLVQRHPSHAVTFVDNHDTQPGEALESFVQGWFKPLAYATILTREQGYPQVFYGDYYGIPSDGVPSYRQQIDPLLKARQQYAYGPQHDYLDHPDVIGWTREGDSSHPKSGLATLITDGPGGSKRMYAGLKNAGETWYDITGNRSDTVKIGSDGWGEFHVNDGSVSIYVQK

SEQ ID NO: 34559 - protein, 482 aa, Bacillus sp.
HDGTNGTIMQYFEWNVPNDGQHWNRLHNNAQNLKNAGITAIWIPPAWKGTSQSDTGYGAYDLYDLGEFNQKGTVRTKYGTKAELERAIRSLKANGIQVYGDVVMNHKAGADFTERVQAVEVNPQNRNQEVSGTYQIEAWTGFNFPGRGNQHSSFKWRWYHFDGTDWDQSRQLSNRIYKFRGKAWDWEVDTEFGNYDYLMYADLDMDHPEVINELNRWGVWYANTLNLDGFRLDAVKHIKFSFMRDWLGHVRGQTGKNLFAVAEYWKNDLGALENYLSKTNWTMSAFDVPLHYNLYQASNSSGNYDMRNLLNGTLVQRHPSHAVTFVDNHDTQPGEALESFVQGWFKPLAYATILTREQGYPQVFYGDYYGIPSDGVPSYRQQIDPLLAARQQYAYGPQHDYLDHPDVIGWTREGDSSHPKSGLATLITDGPGGSKRMYAGLKNAGETWYDITGNRSDTVKIGSDGWGEFHVNDQSVSIYVQK

SEQ ID NO: 34560 - protein, 482 aa, Bacillus sp.
HDGTNGTIMQYFEWNVPNDGQHWNRLHNNAQNLKNAGITAIWIPPAWKGTSQSDTGYGAYDLYDLGEFNQKGTVRTKYGTKAELERAIRSLKANGIQVYGDVVMNHKAGADFTERVQAVEVNPQNRNQEVSGTYQIEAWTGFNFPGRGNQHSSFKWRWYHFDGTDWDQSRQLSNRIYKFRGKAWDWEVDTEFGNYDYLMYADLDMDHPEVINELNRWGVWYANTLNLDGFRLDAVKHIKFSFMRDWLGHVRGQTGKNLFAVAEYWKNDLGALENYLSKTNWTMSAFDVPLHYNLYQASNSSGNYDMRNLLNGTLVQRHPSHAVTFVDNHDTQPGEALESFVQGWFKPLAYATILTREQGYPQVFYGDYYGIPSDGVPSYRQQIDPLLAARQQYAYGPQHDYLDHPDVIGWTREGDSSHPKSGLATLITDGPGGSKRMYAGLKNAGETWYDITGNRSDTVKIGSDGWGEFHVNKSSVSIYVQK

SEQ ID NO: 34561 - protein, 482 aa, Bacillus sp.
HDGTNGTIMQYFEWNVPNDGQHWNRLHNNAQNLKNAGITAIWIPPAWKGTSQSDTGYGAYDLYDLGEFNQKGTVRTKYGTKAELERAIRSLKANGIQVYGDVVMNHKAGADFTERVQAVEVNPQNRNQEVSGTYQIEAWTGFNFPGRGNQHSSFKWRWYHFDGTDWDQSRQLSNRIYKFRGKAWDWEVDTEFGNYDYLMYADLDMDHPEVINELNRWGVWYANTLNLDGFRLDAVKHIKFSFMRDWLGHVRGQTGKNLFAVAEYWKNDLGALENYLSKTNWTMSAFDVPLHYNLYQASNSSGNYDMRNLLNGTLVQRHPSHAVTFVDNHDTQPGEALESFVQGWFKPLAYATILTREQGYPQVFYGDYYGIPSDGVPSYRQQIDPLLAARQQYAYGPQHDYLDHPDVIGWTREGDSSHPKSGLATLITDGPGGSKRMYAGLKNAGETWYDITGNRSDTVKIGSDGWGEFHVNKQSVSIYVQK

SEQ ID NO: 34562 - protein, 482 aa, Bacillus sp.
HDGTNGTIMQYFEWNVPNDGQHWNRLHNNAQNLKNAGITAIWIPPAWKGTSQSDTGYGAYDLYDLGEFNQKGTVRTKYGTKAELERAIRSLKANGIQVYGDVVMNHKAGADQTEHVQAVEVNPQNRNQEVSGTYQIEAWTGFNFPGRGNQHSSFKWRWYHFDGTDWDQSRGLSNRIYKFRGKAWDWEVDTEFGNYDYLMYADLDMDHPEVINELNRWGVWYANTLNLDGFRLDAVKHIKFSFMRDWLGHVRGQTGKNLFAVAEYWKNDLGALENYLSKTNWTMSAFDVPLHYNLYQASNSSGNYDMRNLLNGTLVQRHPSHAVTFVDNHDTQPGEALESFVQGWFKPLAYATILTREQGYPQVFYGDYYGIPSDGVPSYRQQIDPLLKARQQYAYGPQHDYLDHPDVIGWTREGDSSHPKSGLATLITDGPGGSKRMYAGLKNAGETWYDITGNRSDTVKIGSDGWGEFHVNDGSVSIYVQK

SEQ ID NO: 34563 - protein, 482 aa, Bacillus sp.
HDGTNGTIMQYFEWNVPNDGQHWNRLHNNAQNLKNAGITAIWIPPAWKGTSQSDTGYGAYDLYDLGEFNQKGTVRTKYGTKAELERAIRSLKANGIQVYGDVVMNHKAGADFTERVQAVEVNPQNRNQEVSGTYQIEAWTGFNFPGRGNQHSSFKWRWYHFDGTDWDQSRQLSNRIYKFRGKAWDWEVDTEFGNYDYLMYADLDMDHPEVINELNRWGVWYANTLNLDGFRLDAVKHIKFSFMRDWLGHVRGQTGKNLFAVAEYWKNDLGALENYLSKTNWTMSAFDVPLHYNLYQASNSSGNYDMRNLLNGTLVQRHPSHAVTFVDNHDTQPGEALESFVQGWFKPLAYATILTREQGYPQVFYGDYYGIPSDGVPSYRQQIDPLLAARQQYAYGPQHDYLDHPDVIGWTREGDSSHPKSGLATLITDGPGGSKRMYAGLKNAGETWYDITGNRSDTVKIGSDGWGEFHVNDASVSIYVQK

SEQ ID NO: 34564 - protein, 482 aa, Bacillus sp.
HDGTNGTIMQYFEWNVPNDGQHWNRLHNNAQNLKNAGITAIWIPPAWKGTSQSDTGYGVYDLYDLGEFNQKGTVRTKYGTKAELERAIRSLKANGIQVYGDVVMNHKAGADFTEQVQAVEVNPQNRNQEVSGTYQIEAWTGFNFPGRGNQHSSFKWRWYHFDGTDWDQSRQLSNRIYKFRGKAWDWEVDTEFGNYDYLMYADLDMDHPEVINELNRWGVWYANTLNLDGFRLDAVKHIKFSFMRDWLGHVRGQTGKNLFAVAEYWKNDLGALENYLSKTNWTMSAFDVPLHYNLYQASNSSGNYDMRNLLNGTLVQRHPSHAVTFVDNHDTQPGEALESFVQGWFKPLAYATILTREQGYPQVFYGDYYGIPSDGVPSYRQQIDPLLKARQQYAYGPQHDYLDHPDVIGWTREGDSSHPKSGLATLITDGPGGSKRMYAGLKNAGETWYDITGNRSDTVKIGSDGWGEFHVNDGSVSIYVQK

SEQ ID NO: 34565 - protein, 482 aa, Bacillus sp.
HDGTNGTIMQYFEWNVPNDGQHWNRLHNNAQNLKNAGITAIWIPPAWKGTSQSDTGYGAYDLYDLGEFNQKGTVRTKYGTKAELERAIRSLKANGIQVYGDVVMNHKAGADQTEQVQAVEVNPQNRNQEVSGTYQIEAWTGFNFPGRGNQHSSFKWRWYHFDGTDWDQSRNLSNRIYKFRGKAWDWEVDTEFGNYDYLMYADLDMDHPEVINELNRWGVWYANTLNLDGFRLDAVKHIKFSFMRDWLGHVRGQTGKNLFAVAEYWKNDLGALENYLSKTNWTMSAFDVPLHYNLYQASNSSGNYDMRNLLNGTLVQRHPSHAVTFVDNHDTQPGEALESFVQGWFKPLAYATILTREQGYPQVFYGDYYGIPSDGVPSYRQQIDPLLKARQQYAYGPQHDYLDHPDVIGWTREGDSSHPKSGLATLITDGPGGSKRMYAGLKNAGETWYDITGNRSDTVKIGSDGWGEFHVNDGSVSIYVQK

SEQ ID NO: 34566 - protein, 482 aa, Bacillus sp.
HDGTNGTIMQYFEWNVPNDGQHWNRLHNNAQNLKNHGITAIWIPPAWKGTSQSDTGYGVYDLYDLGEFNQKGTVRTKYGTKAELERAIRSLKANGIQVYGDVVMNHKAGADFTEQVQAVEVNPQNRNQEVSGTYQIEAWTGFNFPGRGNQHSSFKWRWYHFDGGDWDQSRQLSNRIYKFRGKAWDWEVDTEFGNYDYLMYADLDMDHPEVINELNRWGVWYANTLNLDGFRLDAVKHIKFSFMRDWLGHVRGQTGKNLFAVAEYWKNDLGALENYLSKTNWTMSAFDVPLHYNLYQASNSSGNYDMRNLLNGTLVQRHPSHAVTFVDNHDTQPGEALESFVQGWFKPLAYATILTREQGYPQVFYGDYYGIPSDGVPSYRQQIDPLLKARQQYAYGPQHDYLDHPDVIGWTREGDSSHPKSGLATLITDGPGGSKRMYAGLKNAGETWYDITGNRSDTVKIGSDGWGEFHVNDGSVSIYVQK

SEQ ID NO: 34567 - protein, 478 aa, Synthetic construct
NGTLMQYFEWYLPNDGNHWNRLNSDASNLASKGITAVWIPPAYKGTSQADVGYGAYDLYDLGEFNQKGTVRTKYGTRSQLQAAVTSLKNNGIQVYGDVVINHKAGADATEMVTAVEVNPNNRNQEVTGEYTIEAYTRFDFPGRGNTHSSFKWRWYHFDGVDWDQSRSLNNRIYKFQGKAWDWPVDTENGNYDYLMYADLDMDHPEVVNELRNWGVWYTNTLGLDGFRLDAVKHIKFSFLRDWINHVRSATGKNMFAVAEYWKNDLGAIENYLNFTNWNHSVFDVPLHYNLYAASTSGGNYDMRNIFNGTVVQKHPSHAVTFVDNHDTQPEESLESFVQPWFKPLAYALTLTREQGYPSVFYGDYYGIPTHGIPALRSKIDPILEARQKYAYGPQHDYLDHPDIIGWTREGDSSHPKSGLATLITDGPGGSKRMYAGLKNAGETWYDITGNRSDTVKIGSDGWGEFHVNKGSVSIYVQK

SEQ ID NO: 34568 - protein, 482 aa, Bacillus sp.
HDGTNGTIMQYFEWNVPNDGQHWNRLHNNAQNLKNAGITAIWIPPAWKGTSQSDTGYGAYDLYDLGEFNQKGTVRTKYGTKAELERAIRSLKANGIQVYGDVVMNHKAGADQTEQVQAVEVNPQNRNQEVSGTYQIEAWTGFNFPGRGNQHSSFKWRWYHFDGTDWDQSRNLSNRIYKFRGKAWDWEVDTEFGNYDYLMYADLDMDHPEVINELNRWGVWYANTLNLDGFRLDAVKHIKFSFMRDWLGHVRGQTGKNLFAVGEYWKNDLGALENYLSKTNWTMSAFDVPLHYNLYQASNSSGNYDMRNLLNGTLVQRHPSHAVTFVDNHDTQPGEALESFVQGWFKPLAYATILTREQGYPQVFYGDYYGIPSDGVPSYRQQIDPLLKARQQYAYGPQHDYLDHPDVIGWTREGDSSHPKSGLATLITDGPGGSKRMYAGLKNAGETWYDITGNRSDTVKIGSDGWGEFHVNDGSVSIYVQK

SEQ ID NO: 34569 - protein, 482 aa, Bacillus sp.
HDGTNGTIMQYFEWNVPNDGQHWNRLHNNAQNLKNAGITAIWIPPAWKGTSQSDTGYGAYDLYDLGEFNQKGTVRTKYGTKAELERAIRSLKANGIQVYGDVVMNHKAGADFTEQVQAVEVNPQNRNQEVSQTYQIEAWTGFNFPGRGNQHSSFKWRWYHFDGGDWDQSRGLSNRIYKFRGKAWDWEVDTEFGNYDYLMYADLDMDHPEVINELNRWGVWYANTLNLDGFRLDAVKHIKFSFMRDWLGHVRGQTGKNLFAVAEYWKNDLGALENYLSKTNWTMSAFDVPLHYNLYQASNSSGNYDMRNLLNGTLVQRHPSHAVTFVDNHDTQPGEALESFVQGWFKPLAYATILTREQGYPQVFYGDYYGIPSDGVPSYRQQIDPLLKARQQYAYGPQHDYLDHPDVIGWTREGDSSHPKSGLATLITDGPGGSKRMYAGLKNAGETWYDITGNRSDTVKIGSDGWGEFHVNDGSVSIYVQK

SEQ ID NO: 34570 - protein, 482 aa, Bacillus sp.
HDGTNGTIMQYFEWNVPNDGQHWNRLHNNAQNLKNAGITAIWIPPAWKGTSQSDTGYGAYDLYDLGEFNQRGTVRTKYGTKAELERAIRSLKANGIQVYGDVVMNHKAGADFTERVQAVEVNPQNRNQEVSGEYQIEAWTGFNFPGRGNQHSSFKWRWYHFDGTDWDQSRQLSNRIYKFRGKAWDWEVDTEFGNYDYLMYGDLDMDHPEVINELNRWGVWYANTLNLDGFRLDAVKHIKFSFMRDWLGHVRAQTGKNLFAVAEYWKNDLGALENYLSKTNWTMSAFDVPLHYNLYQASNSSGNYDMRNLLNGTLVQRHPSHAVTFVDNHDTQPGEALESFVQGWFKPLAYATILTREQGYPQVFYGDYYGIPSDGVPSYRQQIDPLLKARQQYAYGPQHDYLDHPDVIGWTREGDSSHPKSGLATLITDGPGGSKRMYAGLKNAGETWYDITGNRSDTVKIGSDGWGEFHVNDGSVSIYVQK

SEQ ID NO: 34571 - protein, 482 aa, Bacillus sp.
HDGTNGTIMQYFEWNVPNDGQHWNRLHNNAQNLKNAGITAIWIPPAWKGTSQSDTGYGAYDLYDLGEFNQKGTVRTKYGTKAELERAIRSLKANGIQVYGDVVFNHKAGADFTERVQAVEVNPQNRNQEVSGTYQIEAWTGFNFPGRGNQHSSFKWRWYHFDGTDWDQSRQLSNRIYKFRGKAWDWEVDTEFGNYDYLMYADLDMDHPEVINELNRWGVWYANTINLDGFRLDAVKHIKFSFMRDWLGHVRGQTGKNLFAVAEYWKNDLGALENYLSKTNWTMSAFDVPLHYNLYQASNSSGNYDMRNLLNGTLVQAHPNHAVTFVDNHDTQPGEALESFVQGWFKPLAYATILTREQGYPQVFYGDYYGIPSDGVPSYRQQIDPLLKARQQYAYGPQHDYLDHPDVIGWTREGDSSHPKSGLATLITDGPGGSKRMYAGLKNAGETWYDITGNRSDTVKIGSDGWGEFHVNDGSVSIYVQK

SEQ ID NO: 34572 - protein, 482 aa, Bacillus sp.
HDGTNGTIMQYFEWNVPNDGQHWNRLHNNAQNLKNAGITAIWIPPAWKGTSQSDTGYGAYDLYDLGEFNQKGTVRTKYGTKAELERAIRSLKANGIQVYGDVVMNHKAGADQTEHVQAVEVNPQNRNQEVSGTYQIEAWTGFNFPGRGNQHSSFKWRWYHFDGTDFDQSRGVSNRIYKFRGKAWDWEVDTEFGNYDYLMYADLDMDHPEVINELNRWGVWYANTLNLDGFRLDAVKHIKFSFMRDWLGHVRGQTGKNLFAVAEYWKNDLGALENYLSKTNWTMSAFDVPLHYNLYQASNSSGNYDMRNLLNGTLVQRHPSHAVTFVDNHDTQPGEALESFVQGWFKPLAYATILTREQGYPQVFYGDYYGIPSDGVPSYRQQIDPLLKARQQYAYGPQHDYLDHPDVIGWTREGDSSHPKSGLATLITDGPGGSKRMYAGLKNAGETWYDITGNRSDTVKIGSDGWGEFHVNDGSVSIYVQK

SEQ ID NO: 34573 - protein, 482 aa, Bacillus sp.
HDGTNGTIMQYFEWNVPNDGQHWNRLHNNAQNLKNAGITAIWIPPAWKGTSQSDTGYGAYDLYDLGEFNQKGTVRTKYGTKAELERAIRSLKANGIQVYGDVVMNHKAGADQTERVQAVEVNPQNRNQEVSGTYQIEAWTGFNFPGRGNQHSSFKWRWYHFDGTDFDQSRGLSNRIYKFRGKAWDWEVDTEFGNYDYLMYADLDMDHPEVINELNRWGVWYANTLNLDGFRLDAVKHIKFSFMRDWLGHVRGQTGKNLFAVAEYWKNDLGALENYLSKTNWTMSAFDVPLHYNLYQASNSSGNYDMRNLLNGTLVQRHPSHAVTFVDNHDTQPGEALESFVQGWFKPLAYATILTREQGYPQVFYGDYYGIPSDGVPSYRQQIDPLLKARQQYAYGPQHDYLDHPDVIGWTREGDSSHPKSGLATLITDGPGGSKRMYAGLKNAGETWYDITGNRSDTVKIGSDGWGEFHVNDGSVSIYVQK

SEQ ID NO: 34574 - protein, 482 aa, Bacillus sp.
HDGTNGTIMQYFEWNVPNDGQHWNRLHNNAQNLKNAGITAIWIPPAWKGTSQSDTGYGAYDLYDLGEFNQRGTVRTKYGTKAELERAIRSLKANGIQVYGDVVMNHKAGADFTERVQAVEVNPQNRNQEVSGTYQIEAWTGFNFPGRGNQHSSFKWRWYHFDGTDFDQSRQLSNRIYKFRGKAWDWEVDTEFGNYDYLMYADLDMDHPEVINELNRWGVWYANTLNLDGFRLDAVKHIKFSFMRDWLGHVRGQTGKNLFAVAEYWKNDLGALENYLSKTNWTMSAFDVPLHYNLYQASNSSGNYDMRNLLNGTLVQRHPSHAVTFVDNHDTQPGEALESFVQGWFKPLAYATILTREQGYPQVFYGDYYGIPSDGVPSYRQQIDPLLKARQQYAYGPQHDYLDHPDVIGWTREGDSSHPKSGLATLITDGPGGSKRMYAGLKNAGETWYDITGNRSDTVKIGSDGWGEFHVNDGSVSIYVQK

SEQ ID NO: 34575 - protein, 482 aa, Bacillus sp.
HDGTNGTIMQYFEWNVPNDGQHWNRLHNNAQNLKNAGITAIWIPPAWKGTSQSDTGYGAYDLYDLGEFNQKGTVRTKYGTKAELERAIRSLKANGIQVYGDVVMNHKAGADQTEQVQAVEVNPQNRNQEVSGTYQIEAWTGFNFPGRGNQHSSFKWRWYHFDGTDWDQSRGLSNRIYKFRGKAWDWEVDTEFGNYDYLMYADLDMDHPEVINELNRWGVWYANTLNLDGFRLDAVKHIKFSFMRDWLGHVRGQTGKNLFAVAEYWKNDLGALENYLSKTNWTMSAFDVPLHYNLYQASNSSGNYDMRNLLNGTLVQRHPSHAVTFVDNHDTQPGEALESFVQGWFKPLAYATILTREQGYPQVFYGDYYGIPSDGVPSYRQQIDPLLKARQQYAYGPQHDYLDHPDVIGWTREGDSSHPKSGLATLITDGPGGSKRMYAGLKNADETWYDITGNRSDTVKIGSDGWGEFHVNDGSVSIYVQK

SEQ ID NO: 34576 - protein, 482 aa, Bacillus sp.
HDGTNGTIMQYFEWNVPNDGQHWNRLHNNAQNLKNAGITAIWIPPAWKGTSQSDTGYGAYDLYDLGEFNQKGTVRTKYGTKAELERAIRSLKANGIQVYGDVVMNHKAGADFTERVQAVEVNPQNRNQEVSGTYQIEAWTGFNFPGRGNQHSSFKWRWYHFDGTDWDQSRDLSNRIYKFRGKAWDWEVDTEFGNYDYLMYGDLDMDHPEVINELNRWGVWYANTLNLDGFRLDAVKHIKFSFMRDWLGHVRGQTGKNLFAVAEYWKNDLGALENYLSKTNWTMSAFDVPLHYNLYQASNSSGNYDMRNLLNGTLVQRHPSHAVTFVDNHDTQPGEALESFVQGWFKPLAYATILTREQGYPQVFYGDYYGIPSDGVPSYRQQIDPLLKARQQYAYGPQHDYLDHPDVIGWTREGDSSHPKSGLATLITDGPGGSKRMYAGLKNAGETWYDITGNRSDTVKIGSDGWGEFHVNDGSVSIYVQK

SEQ ID NO: 34577 - protein, 478 aa, Bacillus sp.
NGTIMQYFEWNVPNDGQHWNRLHNNAQNLKNAGITAIWIPPAWKGTSQSDTGYGAYDLYDLGEFNQKGTVRTKYGTKAELERAIRSLKANGIQVYGDVVMNHKAGADQTEQVQAVEVNPQNRNQEVSGTYQIEAWTGFNFPGRGNQHSSFKWRWYHFDGTDWDQSRQLSNRIYKFRGKAWDWEVDTENGNYDYLMYADVDMDHPEVINELNRWGVWYANTLNLDGFRLDAVKHIKFSFMRDWLGHVRGQTGKNLFAVAEYWKNDLGALENYLSKTNWTMSAFDVPLHYNLYQASNSSGNYDMRNLLNGTLVQRHPSHAVTFVDNHDTQPGEALESFVQGWFKPLAYATILTREQGYPQVFYGDYYGIPSDGVPSYRQQIDPLLKARQQYAYGPQHDYIDHPDVIGWTREGDSSAPKSGLATLITDGPGGSKRMYAGLKNAGETWYDITGNRSDTVKIGSDGWGEFHVNDGSVSIYVQK

SEQ ID NO: 34578 - protein, 478 aa, Synthetic construct
NGTMMQYFEWYLPNDGQHWKRLQNDASNLASKGITAVWIPPAWKGTSQADVGYGAYDLYDLGEFHQKGTVRTKYGTRSDLQAAIKSLHNNGINVYGDVVMNHKAGADATEDVQAVEVNPNNRNQVITGEYLIKAWTRFDFPGRGNTHSSFKWRWYHFDGVDFDQSRSLNNRIYKFQGKAWDWEVDTENGNYDYLMYADLDMDHPEVVNELRNWGVWYTNTLQLDGFRLDAVKHIKFSFTRDWINHVRSATGKNMFAVAEYWKNDLGAIENYLNFTNWNHSVFDVPLHYNLYAASNSGGNYDMRNIFNGTVVSKHPSHAVTFVDNHDTQPEESLESTVQTWFKPLAYALTLTREQGYPSVFYGDYYGTPTHGIPALKSKIDPILEARQKYAYGAQHDYLDHPDIIGWTREGDSSHPNSGLATLITDGPGGSKRMYAGAKNAGETWYDITGNRSDTVVIGSDGWGTFHVNKGSVSIYVQK

SEQ ID NO: 34579 - protein, 482 aa, Bacillus sp.
HDGTNGTIMQYFEWNVPNDGQHWNRLHNNAQNLKNAGITAIWIPPAWKGTSQSDTGYGAYDLYDLGEFNQRGTVRTKYGTKAELERAIRSLKANGIQVYGDVVMNHKAGADFTEQVQAVEVNPQNRNQEVSGTYQIEAWTGFNFPGRGNQHSSFKWRWYHFDGTDFDQSRRLSNRIYKFRGKAWDWEVDTEFGNYDYLMYADLDMDHPEVINELNRWGVWYANTLNLDGFRLDAVKHIKFSFMRDWLGHVRGQTGKNLFAVAEYWKNDLGALENYLSKTNWTMSAFDVPLHYNLYQASNSSGNYDMRNLLNGTLVQRHPSHAVTFVDNHDTQPGEALESFVQGWFKPLAYATILTREQGYPQVFYGDYYGIPSDGVPSYRQQIDPLLKARQQYAYGPQHDYLDHPDVIGWTREGDSSHPKSGLATLITDGPGGSKRMYAGLKNAGETWYDITGNRSDTVKIGSDGWGEFHVNDGSVSIYVQK

SEQ ID NO: 34580 - protein, 482 aa, Bacillus sp.
HDGTNGTIMQYFEWNVPNDGQHWNRLHNNAQNLKNAGITAIWIPPAWKGTSQSDTGYGAYDLYDLGEFNQRGTVRTKYGTKAELERAIRSLKANGIQVYGDVVMNHKAGADQTERVQAVEVNPQNRNQEVSGEYQIEAWTGFNFPGRGNQHSSFKWRWYHFDGTDFDQSRGLSNRIYKFRGKAWDWEVDTEFGNYDYLMYADLDMDHPEVINELNRWGVWYANTLNLDGFRLDAVKHIKFSFMRDWLGHVRAQTGKNLFAVAEYWKNDLGALENYLSKTNWTMSAFDVPLHYNLYQASNSSGNYDMRNLLNGTLVQRHPSHAVTFVDNHDTQPGEALESFVQGWFKPLAYATILTREQGYPQVFYGDYYGIPSDGVPSYRQQIDPLLKARQQYAYGPQHDYLDHPDVIGWTREGDSSHPKSGLATLITDGPGGSKRMYAGLKNAGETWYDITGNRSDTVKIGSDGWGEFHVNDGSVSIYVQK

SEQ ID NO: 34581 - protein, 482 aa, Bacillus sp.
HDGTNGTIMQYFEWNVPNDGQHWNRLHNNAQNLKNAGITAIWIPPAWKGTSQSDTGYGAYDLYDLGEFNQRGTVRTKYGTKAELERAIRSLKANGIQVYGDVVMNHKAGADFTERVQAVEVNPQNRNQEVSGEYQIEAWTGFNFPGRGNQHSSFKWRWYHFDGTDWDQSRQLSNRIYKFRGKAWDWEVDTEFRNYDYLMYADLDMDHPEVINELNRWGVWYANTLNLDGFRLDAVKHIKFSFMRDWLGHVRAQTGKNLFAVAEYWKNDLGALENYLSKTNWTMSAFDVPLHYNLYQASNSSGNYDMRNLLNGTLVQRHPSHAVTFVDNHDTQPGEALESFVQGWFKPLAYATILTREQGYPQVFYGDYYGIPSDGVPSYRQQIDPLLKARQQYAYGPQHDYIDHPDVIGWTREGDSSAPKSGLATLITDGPGGSKRMYAGLKNAGETWYDITGNRSDTVKIGSDGWGEFHVNDGSVSIYVQK

SEQ ID NO: 34582 - protein, 482 aa, Bacillus sp.
HDGTNGTIMQYFEWNVPNDGQHWNRLHNNAQNLKNAGITAIWIPPAWKGTSQSDTGYGAYDLYDLGEFNQKGTVRTKYGTKAELERAIRSLKANGIQVYGDVVMNHKAGADQTERVQAVEVNPQNRNQEVSGTYQIEAWTGFNFPGRGNQHSSFKWRWYHFDGTDWDQSRNLSNRIYKFRGKAWDWEVDTEFGNYDYLMYADLDMDHPEVINELNRWGVWYANTLNLDGFRLDAVKHIKFSFMRDWLGHVRGQTGKNLFAVAEYWKNDLGALENYLSKTNWTMSAFDVPLHYNLYQASNSSGNYDMRNLLNGTLVQRHPSHAVTFVDNHDTQPGEALESFVQGWFKPLAYATILTREQGYPQVFYGDYYGIPSDGVPSYRQQIDPLLKARQQYAYGPQHDYLDHPDVIGWTREGDSSHAKSGLAALITDGPGGSKRMYAGLKNAGETWYDITGNRSDTVKIGSDGWGEFHVNDGSVSIYVQK

SEQ ID NO: 34583 - protein, 482 aa, Bacillus sp.
HDGTNGTIMQYFEWNVPNDGQHWNRLHNNAQNLKNAGITAIWIPPAWKGTSQSDTGYGAYDLYDLGEFNQRGTVRTKYGTKAELERAIRSLKANGIQVYGDVVMNHKAGADFTEQVQALEVNPQNRNQEVSGTYQIEAWTGFNFPGRGNQHSSFKWRWYHFDGTDWDQSRQLSNRIYKFRTKAWDWEVDTEFGNYDYLMYADLDMDHPEVINELNRWGVWYANTLNLDGFRLDAVKHIKFSFMRDWLGHVRGQTGKNLFAVAEYWKNDLGALENYLSKTNWTMSAFDVPLHYNLYQASNSSGNYDMRNLLNGTLVQRHPSHAVTFVDNHDTQPGEALESFVQGWFKPLAYATILTREQGYPQVFYGDYYGIPSDGVPSYRQQIDPLLKARQQYAYGPQHDYLDHPDVIGWTREGDSSHPKSGLATLITDGPGGSKRMYAGLKNAGETWYDITGNRSDTVKIGSDGWGEFHVNDGSVSIYVQK

SEQ ID NO: 34584 - protein, 482 aa, Bacillus sp.
HDGTNGTIMQYFEWNVPNDGQHWNRLHNNAQNLKNHGITAIWIPPAWKGTSQSDTGYGVYDLYDLGEFNQKGTVRTKYGTKAELERAIRSLKANGIQVYGDVVMNHKAGADFTEQVQAVEVNPQNRNQEVSGTYQIEAWTGFNFPGRGNQHSSFKWRWYHFDGTDFDQSRRLSNRIYKFRGKAWDWEVDTEFGNYDYLMYADLDMDHPEVINELNRWGVWYANTLNLDGFRLDAVKHIKFSFMRDWLGHVRGQTGKNLFAVAEYWKNDLGALENYLSKTNWTMSAFDVPLHYNLYQASNSSGNYDMRNLLNGTLVQRHPSHAVTFVDNHDTQPGEALESFVQGWFKPLAYATILTREQGYPQVFYGDYYGIPSDGVPSYRQQIDPLLKARQQYAYGPQHDYLDHPDVIGWTREGDSSHPKSGLATLITDGPGGSKRMYAGLKNAGETWYDITGNRSDTVKIGSDGWGEFHVNDGSVSIYVQK

SEQ ID NO: 34585 - protein, 482 aa, Bacillus sp.
HDGTNGTIMQYFEWNVPNDGQHWNRLHNNAQNLKNAGITAIWIPPAWKGTSQSDTGYGAYDLYDLGEFNQKGTVRTKYGTKAELERAIRSLKANGIQVYGDVVMNHKAGADQTEQVQAVEVNPQNRNQEVSGTYQIEAWTGFNFPGRGNQHSSFKWRWYHFDGTDFDQSRGLSNRIYKFRGKAWDWEVDTEFGNYDYLMYGDLDMDHPEVINELNRWGVWYANTLNLDGFRLDAVKHIKFSFMRDWLGHVRGQTGKNLFAVAEYWKNDLGALENYLSKTNWTMSAFDVPLHYNLYQASNSSGNYDMRNLLNGTLVQRHPSHAVTFVDNHDTQPGEALESFVQGWFKPLAYATILTREQGYPQVFYGDYYGIPSDGVPSYRQQIDPLLKARQQYAYGPQHDYLDHPDVIGWTREGDSSHPKSGLATLITDGPGGSKRMYAGLKNAGETWYDITGNRSDTVKIGSDGWGEFHVNDGSVSIYVQK

SEQ ID NO: 34586 - protein, 482 aa, Bacillus sp.
HDGTNGTIMQYFEWNVPNDGQHWNRLHNNAQNLKNAGITAIWIPPAWKGTSQSDTGYGAYDLYDLGEFNQKGTVRTKYGTKAELERAIRSLKANGIQVYGDVVMNHKAGADQTEHVQAVEVNPQNRNQEVSGTYQIEAWTGFNFPGRGNQHSSFKWRWYHFDGTDFDQSRGLSNRIYKFRGKAWDWEVDTEFGNYDYLMYADLDMDHPEVINELNRWGVWYANTLNLDGFRLDAVKHIKFSFMRDWLGHVRGQTGKNLFAVGEYWKNDLGALENYLSKTNWTMSAFDVPLHYNLYQASNSSGNYDMRNLLNGTLVQRHPSHAVTFVDNHDTQPGEALESFVQGWFKPLAYATILTREQGYPQVFYGDYYGIPSDGVPSYRQQIDPLLKARQQYAYGPQHDYLDHPDVIGWTREGDSSHPKSGLATLITDGPGGSKRMYAGLKNAGETWYDITGNRSDTVKIGSDGWGEFHVNDGSVSIYVQK

SEQ ID NO: 34587 - protein, 482 aa, Bacillus sp.
HDGTNGTIMQYFEWNVPNDGQHWNRLHNNAQNLKNAGITAIWIPPAWKGTSQSDTGYGVYDLYDLGEFNQKGTVRTKYGTKAELERAIRSLKANGIQVYGDVVMNHKAGADFTEQVQAVEVNPQNRNQEVSGTYQIEAWTGFNFPGRGNQHSSFKWRWYHFDGTDFDQSRNVSNRIYKFRGKAWDWEVDTEFGNYDYLMYADLDMDHPEVINELNRWGVWYANTLNLDGFRLDAVKHIKFSFMRDWLGHVRGQTGKNLFAVAEYWKNDLGALENYLSKTNWTMSAFDVPLHYNLYQASNSSGNYDMRNLLNGTLVQRHPSHAVTFVDNHDTQPGEALESFVQGWFKPLAYATILTREQGYPQVFYGDYYGIPSDGVPSYRQQIDPLLKARQQYAYGPQHDYLDHPDVIGWTREGDSSHPKSGLATLITDGPGGSKRMYAGLKNAGETWYDITGNRSDTVKIGSDGWGEFHVNDGSVSIYVQK

SEQ ID NO: 34588 - protein, 482 aa, Bacillus sp.
HDGTNGTIMQYFEWNVPNDGQHWNRLHNNAQNLKNAGITAIWIPPAWKGTSQSDTGYGAYDLYDLGEFNQRGTVRTKYGTKAELERAIRSLKANGIQVYGDVVMNHKAGADFTERVQAVEVNPQNRNQEVSGEYQIEAWTGFNFPGRGNQHSSFKWRWYHFDGTDWDQSRQLSNRIYKFRGKAWDWEVDTEFRNYDYLMYADLDMDHPEVINELNRWGVWYANTLNLDGFRLDAVKHIKFSFMRDWLGHVRAQTGKNLFAVAEYWKNDLGALENYLSKTNWTMSAFDVPLHYNLYQASNSSGNYDMRNLLNGTLVQRHPSHAVTFVDNHDTQPGEALESFVQGWFKPLAYATILTREQGYPQVFYGDYYGIPSDGVPSYRQQIDPLLKARQQYAYGPQHDYLDHPDVIGWTREGDSSHPKSGLATLITDGPGGSKRMYAGLKNAGETWYDITGNRSDTVKIGSDGWGEFHVSDGSVSIYVQK

SEQ ID NO: 34589 - protein, 482 aa, Bacillus sp.
HDGTNGTIMQYFEWNVPNDGQHWNRLHNNAQNLKNAGITAIWIPPAWKGTSQSDTGYGAYDLYDLGEFNQRGTVRTKYGTKAELERAIRSLKANGIQVYGDVVMNHKAGADQTEHVQAVEVNPQNRNQEVSGTYQIEAWTGFNFPGRGNQHSSFKWRWYHFDGTDFDQSRGVSNRIYKFRGKAWDWEVDTEFGNYDYLMYADLDMDHPEVINELNRWGVWYANTLNLDGFRLDAVKHIKFSFMRDWLGHVRGQTGKNLFAVAEYWKNDLGALENYLSKTNWTMSAFDVPLHYNLYQASNSSGNYDMRNLLNGTLVQRHPSHAVTFVDNHDTQPGEALESFVQGWFKPLAYATILTREQGYPQVFYGDYYGIPSDGVPSYRQQIDPLLKARQQYAYGPQHDYLDHPDVIGWTREGDSSHPKSGLATLITDGPGGSKRMYAGLKNAGETWYDITGNRSDTVKIGSDGWGEFHVNDGSVSIYVQK

SEQ ID NO: 34590 - protein, 482 aa, Cytophaga sp.
NGTMMQYFEWYVPNDGQQWNRLRTDAPYLSSVGITAVWTPPAYKGTSQADVGYGPYDLYDLGEFNQKGTVRTKYGTKGELKSAVNTLHSNGIQVYGDVVMNHKAGADYTENVTAVEVNPSNRNQETSGEYNIQAWTGFNFPGRGTTYSNFKWQWFHFDGTDWDQSRSLSRIFKFRGTGKAWDWEVSSENGNYDYLMYADIDYDHPDVVNEMKKWGVWYANEVGLDGYRLDAVKHIKFSFLKDWVDNARAATGKEMFTVGEYWQNDLGALNNYLAKVNYNQSLFDAPLHYNFYAASTGGGYYDMRNILNNTLVASHPTKAVTLVENHDTQPGQSLESTVQPWFKPLAYAFILTRSGGYPSVFYGDMYGTKGTTTREIPALKSKIEPLLKARKDYAYGTQRDYIDNPDVIGWTREGDSTKAKSGLATVITDGPGGSKRMYVGTSNAGEIWYDLTGNRTDKITIGSDGYATFPVNGGSVSVWVQQ

SEQ ID NO: 34591 - protein, 482 aa, Cytophaga sp.
NGTMMQYFEWYVPNDGQQWNRLRTDAPYLSSVGITAVWTPPAYKGTSQADVGYGPYDLYDLGEFNQKGTVRTKYGTKGELKSAVNTLHSNGIQVYGDVVMNHKAGADYTENVTAVEVNPSNRNQETSGEYNIQAWTGFNFPGRGTTYSNFKWQWFHFDGTDWDQSRSLSRIFKFRGTGKAWDWEVSSENGNYDYLMYADIDYDHPDVVNEMKKWGVWYANEVGLDGYRLDAVKHIKFSFLKDWVDNARAATGKEMFTVGEYWQNDLGALNNYLAKVNYNQSLFDAPLHYNFYAASTGGGYYDMRNILNNTLVARNPTKAVTLVENHDTQPGQSLESTVQPWFKPLAYAFILTRSGGYPSVFYGDMYGTKGTTTREIPALKSKIEPLLKARKDYAYGTQRDYIDNPDVIGWTREGDSTKAKSGLATVITDGPGGSKRMYVGTSNAGEIWYDLTGNRTDKITIGSDGYATFPVNGGSVSVWVQQ

SEQ ID NO: 34592 - protein, 478 aa, Bacillus sp.
NGTIMQYFEWNVPNDGQHWNRLHNNAQNLKNAGITAIWIPPAWKGTSQSDTGYGAYDLYDLGEFNQKGTVRTKYGTKAELERAIRSLKANGIQVYGDVVMNHKAGADQTEHVQAVEVNPQNRNQEVSGTYQIEAWTGFNFPGRGNQHSSFKWRWYHFDGTDWDQSRNLSNRIYKFRGKAWDWEVDTENGNYDYLMYADVDMDHPEVINELNRWGVWYANTLNLDGFRLDAVKHIKFSFMRDWLGHVRGQTGKNLFAVAEYWKNDLGALENYLSKTNWTMSAFDVPLHYNLYQASNSSGNYDMRNLLNGTLVQRHPSHAVTFVDNHDTQPGEALESFVQGWFKPLAYATILTREQGYPQVFYGDYYGIPSDGVPSYRQQIDPLLKARQQYAYGPQHDYIDHPDVIGWTREGDSSHPKSGLATLITDGPGGSKRMYAGLKNAGETWYDITGNRSDTVKIGSDGWGEFHVNDGSVSIYVQK

SEQ ID NO: 34593 - protein, 478 aa, unidentified
NGTIMQYFEWNVPNDGQHWNRLHNNAQNLKNAGITAIWIPPAWKGTSQNDVGYGAYDLYDLGEFNQKGTVRTKYGTKAELERAIRSLKANGIQVYGDVVMNHKGGADFTERVQAVEVNPQNRNQEVSGTYQIEAWTGFNFPGRGNQHSSFKWRWYHFDGTDWDQSRQLANRIYKFRGKAWDWEVDTENGNYDYLMYADVDMDHPEVINELNRWGVWYANTLNLDGFRLDAVKHIKFSFMRDWLGHVRGQTGKNLFAVAEYWKNDLGALENYLSKTNWTMSAFDVPLHYNLYQASNSSGNYDMRNLLNGTLVQRHPSHAVTFVDNHDTQPGEALESFVQGWFKPLAYATILTREQGYPQVFYGDYYGIPSDGVPSYRQQIDPLLKARQQYAYGPQHDYIDHPDVIGWTREGDSSAAKSGLAALITDGPGGSKRMYAGLKNAGETWYDITGNRSDTVKIGSDGWGEFHVNDGSVSIYVQK

SEQ ID NO: 34594 - protein, 478 aa, Bacillus sp.
NGTIMQYFEWNVPNDGQHWNRLHNNAQNLKNAGITAIWIPPAWKGTSQSDVGYGAYDLYDLGEFNQKGTVRTKYGTKAELERAIRSLKANGIQVYGDVVMNHKGGADFTERVQAVEVNPQNRNQEVSGTYQIEAWTGFNFPGRGNQHSSFKWRWYHFDGTDWDQSRQLANRIYKFRGKAWDWEVDTEFGNYDYLMYADVDMDHPEVINELNRWGVWYANTLNLDGFRLDAVKHIKFSFMRDWLGHVRGQTGKNLFAVAEYWKNDLGALENYLSKTNWTMSAFDVPLHYNLYQASNSSGNYDMRNLLNGTLVQRHPSHAVTFVDNHDTQPGEALESFVQGWFKPLAYATILTREQGYPQVFYGDYYGIPSDGVPSYRQQIDPLLKARQQYAYGPQHDYIDHPDVIGWTREGDSSAAKSGLAALITDGPGGSKRMYAGLKNAGETWYDITGNRSDTVKIGSDGWGEFHVNDGSVSIYVQK

SEQ ID NO: 34595 - protein, 478 aa, Bacillus sp.
NGTIMQYFEWNVPNDGQHWNRLHNNAQNLKNAGITAIWIPPAWKGTSQSDTGYGAYDLYDLGEFNQKGTVRTKYGTKAELERAIRSLKANGIQVYGDVVMNHKGGADFTERVQAVEVNPQNRNQEVSGTYQIEAWTGFNFPGRGNQHSSFKWRWYHFDGTDWDQSRQLANRIYKFRGKAWDWEVDTEFGNYDYLMYADVDMDHPEVINELNRWGVWYANTLNLDGFRLDAVKHIKFSFMRDWLGHVRGQTGKNLFAVAEYWKNDLGALENYLSKTNWTMSAFDVPLHYNLYQASNSSGNYDMRNLLNGTLVQRHPSHAVTFVDNHDTQPGEALESFVQGWFKPLAYATILTREQGYPQVFYGDYYGIPSDGVPSYRQQIDPLLKARQQYAYGPQHDYIDHPDVIGWTREGDSSAAKSGLAALITDGPGGSKRMYAGLKNAGETWYDITGNRSDTVKIGSDGWGEFHVNDGSVSIYVQK

SEQ ID NO: 34596 - protein, 478 aa, Bacillus sp.
NGTIMQYFEWNVPNDGQHWNRLHNNAQNLKNAGITAIWIPPAWKGTSQNDVGYGAYDLYDLGEFNQKGTVRTKYGTKAELERAIRSLKANGIQVYGDVVMNHKGGADFTERVQAVEVNPQNRNQEVSGTYQIEAWTGFNFPGRGNQHSSFKWRWYHFDGTDWDQSRQLSNRIYKFRGKAWDWEVDTEFGNYDYLMYADVDMDHPEVINELNRWGVWYANTLNLDGFRLDAVKHIKFSFMRDWLGHVRGQTGKNLFAVAEYWKNDLGALENYLSKTNWTMSAFDVPLHYNLYQASNSSGNYDMRNLLNGTLVQRHPSHAVTFVDNHDTQPGEALESFVQGWFKPLAYATILTREQGYPQVFYGDYYGIPSDGVPSYRQQIDPLLKARQQYAYGPQHDYIDHPDVIGWTREGDSSAAKSGLAALITDGPGGSKRMYAGLKNAGETWYDITGNRSDTVKIGSDGWGEFHVNDGSVSIYVQK

SEQ ID NO: 34597 - protein, 478 aa, Bacillus sp.
NGTIMQYFEWNVPNDGQHWNRLHNNAQNLKNAGITAIWIPPAWKGTSQNDVGYGAYDLYDLGEFNQKGTVRTKYGTKAELERAIRSLKANGIQVYGDVVMNHKAGADFTERVQAVEVNPQNRNQEVSGTYQIEAWTGFNFPGRGNQHSSFKWRWYHFDGTDWDQSRQLANRIYKFRGKAWDWEVDTEFGNYDYLMYADVDMDHPEVINELNRWGVWYANTLNLDGFRLDAVKHIKFSFMRDWLGHVRGQTGKNLFAVAEYWKNDLGALENYLSKTNWTMSAFDVPLHYNLYQASNSSGNYDMRNLLNGTLVQRHPSHAVTFVDNHDTQPGEALESFVQGWFKPLAYATILTREQGYPQVFYGDYYGIPSDGVPSYRQQIDPLLKARQQYAYGPQHDYIDHPDVIGWTREGDSSAAKSGLAALITDGPGGSKRMYAGLKNAGETWYDITGNRSDTVKIGSDGWGEFHVNDGSVSIYVQK

SEQ ID NO: 34598 - protein, 481 aa, Cytophaga sp.
NGTMMQYFEWYVPNDGQQWNRLRTDAPYLSSVGITAVWTPPAYKGTSQADVGYGPYDLYDLGEFNQKGTVRTKYGTKGELKSAVNTLHSNGIQVYGDVVMNHKAGADYTENVTAVEVNPSNRNQETSGEYNIQAWTGFNFPGRGTTYSNFKWQWFHFDGTDWDQSRSLSRIFKFRGGKAWDWEVSSENGNYDYLMYADIDYDHPDVVNEMKKWGVWYANEVGLDGYRLDAVKHIKFSFLKDWVDNARAATGKEMFTVGEYWQNDLGALNNYLAKVNYNQSLFDAPLHYNFYAASTGGGYYDMRNILNNTLVASNPTKAVTLVENHDTQPGQSLESTVQPWFKPLAYAFILTRSGGYPSVFYGDMYGTKGTTTREIPALKSKIEPLLKARKDYAYGTQRDYIDNPDVIGWTREGDSTKAKSGLATVITDGPGGSKRMYVGTSNAGEIWYDLTGNRTDKITIGSDGYATFPVNGGSVSVWVQQ

SEQ ID NO: 34599 - protein, 478 aa, Bacillus licheniformis
LNGTLMQYFEWYTPNDGQHWNRLRNDSAYLKEHGITAVWIPPAYKGASQNDVGYGAYDLYDLGEFNQKGTVRTKYGTKGQLQSAINSLKSNGINVYGDVVINHKGGADATELVRAVEVNPANRNQEISGEYLIEAYTYFDFPGRGSTHSNFKWRWYHFDGVDWDQSRRLNRIYKFRGKAWDWEVDTEFGNYDYLTYADIDYDHPDVAAEIRNWGTWYANTLQLDGFRLDAVKHIKYSFLRDWVNHVRSATGKNMFTVAEFWKNDLGALENYLNKTNFNHSVFDVPLHYQFYAASKQGGGYDMQNLLNGTVVSKHPLHSVTFVDNHDTQPEEALESTVEEWFKPLAYAFILTRESGYPQVFYGDMYGIPTHGVPALKHKIEPILEARQKYAYGAQHDYFDHHDIVGWTREGDSSVANSGLAALITDGPGGAKWMYVGRQNAGQTWHDITGNRSEPVVINSEGWGEFHVNGGSVSIYVQR

SEQ ID NO: 34600 - protein, 480 aa, Cytophaga sp.
NGTMMQYFEWYVPNDGQQWNRLRTDAPYLSSVGITAVWTPPAYKGTSQADVGYGPYDLYDLGEFNQKGTVRTKYGTKGELKSAVNTLHSNGIQVYGDVVMNHKAGADYTENVTAVEVNPSNRNQETSGEYNIQAWTGFNFPGRGTTYSNFKWQWFHFDGTDWDQSRSLSRIFKFTGKAWDWEVSSENGNYDYLMYADIDYDHPDVVNEMKKWGVWYANEVGLDGYRLDAVKHIKFSFLKDWVDNARAATGKEMFTVGEYWQNDLGALNNYLAKVNYNQSLFDAPLHYNFYAASTGGGYYDMRNILNNTLVASNPTKAVTLVENHDTQPGQSLESTVQPWFKPLAYAFILTREGGYPSVFYGDMYGTKGTTTREIPALKSKIEPLLKARKDYAYGTQRDYIDNPDVIGWTREGDSTKAKSGLATVITDGPGGSKRMYVGTSNAGEIWYDLTGNRTDKITIGSDGYATFPVNGGSVSVWVQQ

SEQ ID NO: 34601 - protein, 480 aa, Cytophaga sp.
NGTMMQYFEWYVPNDGQQWNRLRTDAPYLSSVGITAVWTPPAYKGTSQADVGYGPYDLYDLGEFNQKGTVRTKYGTKGELKSAVNTLHSNGIQVYGDVVMNHKAGADYTENVTAVEVNPSNRNQETSGEYNIQAWTGFNFPGRGTTYSNFKWQWFHFDGTDWDQSRSLSRIFKFTGKAWDWEVSSENGNYDYLMYADIDYDHPDVVNEMKKWGVWYANEVGLDGYRLDAVKHIKFSFLKDWVQNARAATGKEMFTVGEYWQNDLGALNNYLAKVNYNQSLFDAPLHYNFYAASTGGGYYDMRNILNNTLVASNPTKAVTLVENHDTQPGQSLESTVQPWFKPLAYAFILTRSGGYPSVFYGDMYGTKGTTTREIPALKSKIEPLLKARKDYAYGTQRDYIDNPDVIGWTREGDSTKAKSGLATVITDGPGGSKRMYVGTSNAGEIWYDLTGNRTDKITIGSDGYATFPVNGGSVSVWVQQ

SEQ ID NO: 34602 - protein, 480 aa, Cytophaga sp.
NGTMMQYFEWYVPNDGQQWNRLRTDAPYLSSVGITAVWTPPAYKGTSQADVGYGPYDLYDLGEFNQKGTVRTKYGTKGELKSAVNTLHSNGIQVYGDVVMNHKAGADYTENVTAVEVNPSNRNQETSGEYNIQAWTGFNFPGRGTTYSNFKWQWFHFDGTDWDQSRSLSRIFKFTGKAWDWEVSSENGNYDYLMYADIDYDHPDVVNEMKKWGVWYANEVGLDGYRLDAVKHIKFSFLKDWVDNARAATGKEMFTVGEYWQNDLGALNNYLAKVNYNQSLFDAPLHYNFYAASTGGGYYDMRNILNNTLVASNPTKAVTLVENHDTQPGQSLESTVQPWFKPLAYAFILTRSGGYPSVFYGDMYGTKGTTTREIPALKSKIEPLLKARKDYAYGTQRDYIDNPDVIGWTREGDSTKAKSGLATVITDGPGGSKRMYVGTSNAGEIWYDLTGNRTDKITIGSDGYATFPVNDGSVSVWVQQ

SEQ ID NO: 34603 - protein, 480 aa, Cytophaga sp.
NGTMMQYFEWYVPNDGQQWNRLRTDAPYLSSVGITAVWTPPAYKGTSQADVGYGPYDLYDLGEFNQKGTVRTKYGTKGELKSAVNTLHSNGIQVYGDVVMNHKAGADYTENVTAVEVNPSNRNQETSGEYNIQAWTGFNFPGRGTTYSNFKWQWFHFDGTDWDQSRSLSRIFKFTGKAWDWEVSSENGNYDYLMYADIDYDHPDVVNEMKKWGVWYANEVGLDGYRLDAVKHIKFSFLKDWVDNARAATGKEMFTVGEYWQNDLGALNNYLAKVNYNQSLFDAPLHYNFYAASTGGGYYDMRNILNNTLVASNPTKAVTLVENHDTQPGQSLESTVQPWFKPLAYAFILTRSGGYPSVFYGDMYGTKGTTTREIPALKSKIEPLLKARKDYAYGTQRDYIDNPDVIGWTREGDSTKAKSGLATVITDGPGGSKRMYVGTSNAGEIWYDITGNRTDKITIGSDGYATFPVNGGSVSVWVQQ

SEQ ID NO: 34604 - protein, 480 aa, Cytophaga sp.
NGTMMQYFEWYVPNDGQQWNRLRTDAPYLSSVGITAVWTPPAYKGTSQADVGYGPYDLYDLGEFNQKGTVRTKYGTKGELKSAVNTLHSNGIQVYGDVVMNHKAGADYTENVTAVEVNPSNRNQETSGEYNIQAWTGFNFPGRGTTYSNFKWQWFHFDGTDWDQSRSLSRIFKFTGKAWDWEVSSENGNYDYLMYADIDYDHPDVVNEMKKWGVWYANEVGLDGYRLDAAKHIKFSFLKDWVDNARAATGKEMFTVGEYWQNDLGALNNYLAKVNYNQSLFDAPLHYNFYAASTGGGYYDMRNILNNTLVASNPTKAVTLVENHDTQPGQSLESTVQPWFKPLAYAFILTRSGGYPSVFYGDMYGTKGTTTREIPALKSKIEPLLKARKDYAYGTQRDYIDNPDVIGWTREGDSTKAKSGLATVITDGPGGSKRMYVGTSNAGEIWYDLTGNRTDKITIGSDGYATFPVNGGSVSVWVQQ

SEQ ID NO: 34605 - protein, 480 aa, Cytophaga sp.
NGTMMQYFEWYVPNDGQQWNRLRTDAPYLSSVGITAVWTPPAYKGTSQADVGYGPYDLYDLGEFNQKGTVRTKYGTKGELKSAVNTLHSNGIQVYGDVVMNHKAGADYTENVTAVEVNPSNRNQETSGEYNIQAWTGFNFPGRGTTYSNFKWQWFHFDGTDWDQSRSLSRIFKFTGKAWDWEVSSENGNYDYLMYADIDYDHPDVVNEMKKWGVWYANEVGLDGYRLDAVKHIKFSFLKDWVDNARAATGKEMFTVGEYWQNDLGALNNYLAKVNYNQSLFDVPLHYNFYAASTGGGYYDMRNILNNTLVASNPTKAVTLVENHDTQPGQSLESTVQPWFKPLAYAFILTRSGGYPSVFYGDMYGTKGTTTREIPALKSKIEPLLKARKDYAYGTQRDYIDNPDVIGWTREGDSTKAKSGLATVITDGPGGSKRMYVGTSNAGEIWYDLTGNRTDKITIGSDGYATFPVNGGSVSVWVQQ

SEQ ID NO: 34606 - protein, 480 aa, Cytophaga sp.
NGTMMQYFEWYVPNDGQQWNRLRTDAPYLSSVGITAVWTPPAYKGTSQADVGYGPYDLYDLGEFNQKGTVRTKYGTKGELKSAVNTLHSNGIQVYGDVVMNHKAGADYTENVTAVEVNPSNRNQETSGEYNIQAWTGFNFPGRGTTYSNFKWQWYHFDGTDWDQSRSLSRIFKFTGKAWDWEVSSENGNYDYLMYADIDYDHPDVVNEMKKWGVWYANEVGLDGYRLDAVKHIKFSFLKDWVDNARAATGKEMFTVGEYWQNDLGALNNYLAKVNYNQSLFDAPLHYNFYAASTGGGYYDMRNILNNTLVASNPTKAVTLVENHDTQPGQSLESTVQPWFKPLAYAFILTRSGGYPSVFYGDMYGTKGTTTREIPALKSKIEPLLKARKDYAYGTQRDYIDNPDVIGWTREGDSTKAKSGLATVITDGPGGSKRMYVGTSNAGEIWYDLTGNRTDKITIGSDGYATFPVNGGSVSVWVQQ

SEQ ID NO: 34607 - protein, 480 aa, Cytophaga sp.
NGTMMQYFEWYVPNDGQQWNRLRTDAPYLSSVGITAVWTPPAYKGTSQADVGYGPYDLYDLGEFNQKGTVRTKYGTKGELKSAVNTLHSNGIQVYGDVVMNHKAGADYTENVTAVEVNPSNRNQETSGEYNIQAWTGFNFPGRGTTYSNFKWQWFHFDGTDWDQSRSLSRIFKFTGKAWDWEVSSENGNYDYLMYADIDYDHPDVVNEMKKWGVWYANEVGLDGYRLDAVKHIKFSFLKDWVDNARAATGKEMFTVGEYWQNDLGALNNYLAKVNYNQSLFDAPLHYNFYAASTGGGYYDMRNILNNTLVASNPTKAVTLVENHDTQPGQSLESTVQPWFKPLAYAFILTRSGGYPSVFYGDMYGTKGTTTREIPALKSKIEPLLKARKDYAYGTQRDYIDHPDVIGWTREGDSTKAKSGLATVITDGPGGSKRMYVGTSNAGEIWYDLTGNRTDKITIGSDGYATFPVNGGSVSVWVQQ

SEQ ID NO: 34608 - protein, 480 aa, Cytophaga sp.
NGTMMQYFEWYVPNDGQQWNRLRNDAPYLSSVGITAVWTPPAYKGTSQADVGYGPYDLYDLGEFNQKGTVRTKYGTKGELKSAVNTLHSNGIQVYGDVVMNHKAGADYTENVTAVEVNPSNRNQETSGEYNIQAWTGFNFPGRGTTYSNFKWQWFHFDGTDWDQSRSLSRIFKFTGKAWDWEVSSENGNYDYLMYADIDYDHPDVVNEMKKWGVWYANEVGLDGYRLDAVKHIKFSFLKDWVDNARAATGKEMFTVGEYWQNDLGALNNYLAKVNYNQSLFDAPLHYNFYAASTGGGYYDMRNILNNTLVASNPTKAVTLVENHDTQPGQSLESTVQPWFKPLAYAFILTRSGGYPSVFYGDMYGTKGTTTREIPALKSKIEPLLKARKDYAYGTQRDYIDNPDVIGWTREGDSTKAKSGLATVITDGPGGSKRMYVGTSNAGEIWYDLTGNRTDKITIGSDGYATFPVNGGSVSVWVQQ

SEQ ID NO: 34609 - protein, 480 aa, Cytophaga sp.
NGTMMQYFEWYVPNDGQQWNRLRTDAPYLSSVGITAVWTPPAYKGTSQADVGYGPYDLYDLGEFNQKGTVRTKYGTKGELKSAVNTLHSNGIQVYGDVVMNHKAGADYTENVTAVEVNPSNRNQETSGEYNIQAWTGFNFPGRGTTYSNFKWQWFHFDGTDWDQSRSLSRIFKFTGKAWDWEVSSENGNYDYLMYADIDYDHPDVVNEMKKWGVWYANEVGLDGYRLDAVKHIKFSFLKDWVDNARAATGKEMFTVGEYWQNDLGALNNYLAKVNYNQSLFDAPLHYNFYAASTGGGYYDMRNILNNTLVASNPTKAVTLVENHDTQPGQSLESTVQPWFKPLAYAFILTRSGGYPSVFYGDMYGTKGTTTREIPALKSKIEPLLKARKDYAYGTQRDYIDNPDVIGWTREGDSTKAKSGLATVITDGPGGSKRMYVGTSNAGEIWYDLTGNRSDKITIGSDGYATFPVNGGSVSVWVQQ

SEQ ID NO: 34610 - protein, 480 aa, Cytophaga sp.
NGTMMQYFEWYVPNDGQQWNRLRTDAPYLSSIGITAVWTPPAYKGTSQADVGYGPYDLYDLGEFNQKGTVRTKYGTKGELKSAVNTLHSNGIQVYGDVVMNHKAGADYTENVTAVEVNPSNRNQETSGEYNIQAWTGFNFPGRGTTYSNFKWQWFHFDGTDWDQSRSLSRIFKFTGKAWDWEVSSENGNYDYLMYADIDYDHPDVVNEMKKWGVWYANEVGLDGYRLDAVKHIKFSFLKDWVDNARAATGKEMFTVGEYWQNDLGALNNYLAKVNYNQSLFDAPLHYNFYAASTGGGYYDMRNILNNTLVASNPTKAVTLVENHDTQPGQSLESTVQPWFKPLAYAFILTRSGGYPSVFYGDMYGTKGTTTREIPALKSKIEPLLKARKDYAYGTQRDYIDNPDVIGWTREGDSTKAKSGLATVITDGPGGSKRMYVGTSNAGEIWYDLTGNRTDKITIGSDGYATFPVNGGSVSVWVQQ

SEQ ID NO: 34611 - protein, 480 aa, Cytophaga sp.
NGTMMQYFEWYVPNDGQQWNRLRTDAPYLSSVGITAVWTPPAYKGLSQADVGYGPYDLYDLGEFNQKGTVRTKYGTKGELKSAVNTLHSNGIQVYGDVVMNHKAGADYTENVTAVEVNPSNRNQETSGEYNIQAWTGFNFPGRGTTYSNFKWQWFHFDGTDWDQSRSLSRIFKFTGKAWDWEVSSENGNYDYLMYADIDYDHPDVVNEMKKWGVWYANEVGLDGYRLDAVKHIKFSFLKDWVDNARAATGKEMFTVGEYWQNDLGALNNYLAKVNYNQSLFDAPLHYNFYAASTGGGYYDMRNILNNTLVASNPTKAVTLVENHDTQPGQSLESTVQPWFKPLAYAFILTRSGGYPSVFYGDMYGTKGTTTREIPALKSKIEPLLKARKDYAYGTQRDYIDNPDVIGWTREGDSTKAKSGLATVITDGPGGSKRMYVGTSNAGEIWYDLTGNRTDKITIGSDGYATFPVNGGSVSVWVQQ

SEQ ID NO: 34612 - protein, 480 aa, Cytophaga sp.
NGTMMQYFEWYVPNDGQQWNRLRTDAPYLSSVGITAVWTPPAYKGTSQADVGYGPYDLYDLGEFNQKGTVRTKYGTKGELKSAVNTLHSNGIQVYGDVVMNHKAGADYTENVTAVEVNPSNRNQETSGEYNIQAWTGFNFPGRGTTYSNFKWQWFHFDGTDWDQSRSLSRIFKFTGKAWDWEVSSENGNYDYLMYADIDYDHPDVVNEMKKWGVWYANEVGLDGYRLDAVKHIKFSFLKDWVDNARAATGKEMFTVGEYWQNDLGALNNYLAKVNYNQSLFDAPLHYNFYAASTGGGYYDMRNILNNTLVASNPTKAVTLVENHDTQPGQSLESTVQPWFKPLAYAFILTRSGGYPSVFYGDMYGTKGTTTREIPALKSKIEPLLKARKDYAYGTQRDYIDNPDVIGWTREGDSTKAKSGLATVITDGPGGSKRMYVGTSNAGEIWYDLTGNRTDKITIGSDGYATFPVNGGSVSIWVQQ

SEQ ID NO: 34613 - protein, 480 aa, Cytophaga sp.
NGTMMQYFEWYVPNDGQQWNRLRTDAPYLSSVGITAVWTPPAYKGTSQADVGYGPYDLYDLGEFNQKGTVRTKYGTKGELKSAVNTLHSNGIQVYGDVVMNHKAGADYTENVTAVEVNPSNRNQETSGEYNIQAWTGFNFPGRGTTYSNFKWQWFHFDGTDWDQSRSLSRIFKFTGKAWDWEVSSENGNYDYLMYADIDYDHPDVVNEMKKWGVWYANEVGLDGYRLDAVKHIKFSFLKDWVDNARAATGKEMFTVGEYWQNDLGALNNYLAKVNYNQSLFDAPLHYNFYAASTGGGYYDMRNILNNTLVASNPTKAVTLVENHDTQPGQSLESTVQPWFKPLAYAFILTRSGGYPQVFYGDMYGTKGTTTREIPALKSKIEPLLKARKDYAYGTQRDYIDNPDVIGWTREGDSTKAKSGLATVITDGPGGSKRMYVGTSNAGEIWYDLTGNRTDKITIGSDGYATFPVNGGSVSVWVQQ

SEQ ID NO: 34614 - protein, 480 aa, Cytophaga sp.
NGTMMQYFEWYVPNDGQQWNRLRTDAPYLSSVGITAVWTPPAYKGTSQADVGYGPYDLYDLGEFNQKGTVRTKYGTKGELKSAVNTLHSNGIQVYGDVVMNHKAGADYTENVTAVEVNPSNRNQETSGEYNIQAWTGFNFPGRGTTYSNFKWQWFHFDGTDWDQSRSLSRIFKFTGKAWDWEVSSENGNYDYLMYADIDYDHPDVVNEMKKWGVWYANELGLDGYRLDAVKHIKFSFLKDWVDNARAATGKEMFTVGEYWQNDLGALNNYLAKVNYNQSLFDAPLHYNFYAASTGGGYYDMRNILNNTLVASNPTKAVTLVENHDTQPGQSLESTVQPWFKPLAYAFILTRSGGYPSVFYGDMYGTKGTTTREIPALKSKIEPLLKARKDYAYGTQRDYIDNPDVIGWTREGDSTKAKSGLATVITDGPGGSKRMYVGTSNAGEIWYDLTGNRTDKITIGSDGYATFPVNGGSVSVWVQQ

SEQ ID NO: 34615 - protein, 480 aa, Cytophaga sp.
NGTMMQYFEWYVPNDGQQWNRLRTDAPYLSSVGITAVWTPPAYKGTSQADVGYGPYDLYDLGEFNQKGTVRTKYGTKGELKSAVNTLHSNGIQVYGDVVMNHKAGADYTENVTAVEVNPSNRNQETSGEYNIQAWTGFNFPGRGTTYSNFKWQWFHFDGTDWDQSRSLSRIFKFTGKAWDWEVSSENGNYDYLMYADIDYDHPDVVNEMKKWGVWYANEVGLDGYRLDAVKHIKFSFLKDWVDNARAATGKEMFTVGEYWQNDLGALNNYLAKVNYNQSLFDAPLHYNFYAASTGGGYYDMRNILNNTLVASNPEKAVTLVENHDTQPGQSLESTVQPWFKPLAYAFILTRSGGYPSVFYGDMYGTKGTTTREIPALKSKIEPLLKARKDYAYGTQRDYIDNPDVIGWTREGDSTKAKSGLATVITDGPGGSKRMYVGTSNAGEIWYDLTGNRTDKITIGSDGYATFPVNGGSVSVWVQQ

SEQ ID NO: 34616 - protein, 480 aa, Cytophaga sp.
NGTMMQYFEWYVPNDGQQWNRLRTDAPHLSSVGITAVWTPPAYKGTSQADVGYGPYDLYDLGEFNQKGTVRTKYGTKGELKSAVNTLHSNGIQVYGDVVMNHKAGADYTENVTAVEVNPSNRNQETSGEYNIQAWTGFNFPGRGTTYSNFKWQWFHFDGTDWDQSRSLSRIFKFTGKAWDWEVSSENGNYDYLMYADIDYDHPDVVNEMKKWGVWYANEVGLDGYRLDAVKHIKFSFLKDWVDNARAATGKEMFTVGEYWQNDLGALNNYLAKVNYNQSLFDAPLHYNFYAASTGGGYYDMRNILNNTLVASNPTKAVTLVENHDTQPGQSLESTVQPWFKPLAYAFILTRSGGYPSVFYGDMYGTKGTTTREIPALKSKIEPLLKARKDYAYGTQRDYIDNPDVIGWTREGDSTKAKSGLATVITDGPGGSKRMYVGTSNAGEIWYDLTGNRTDKITIGSDGYATFPVNGGSVSVWVQQ

SEQ ID NO: 34617 - protein, 480 aa, Cytophaga sp.
NGTMMQYFEWYVPNDGQQWNRLRTDAPYLSSVGITAVWTPPAYKGTSQADVGYGPYDLYDLGEFNQKGTVRTKYGTKGELKSAVNTLHSNGIQVYGDVVMNHKAGADYTENVTAVEVNPSNRNQETSGEYNIQAWTGFNFPGRGTTYSNFKWQWFHFDGTDWDQSRSLSRIFKFTGKAWDWEVSSENGNYDYLMYADIDYDHPDVVNEMKKWGVWYANEVGLDGYRLDAVKHIKFSFLKDWVDNARAATGKEMFTVGEYWQNDLGALNNYLAKVNYNQSLFDAPLHYNFYAASTGGGYYDMRNILNNTLVASNPTKAVTLVENHDTQPGQSLESTVQPWFKPLAYAFILTRSGGYPSVFYGDMYGTKGTTTREIPALKSKIEPLLKARKDYAYGTQRDYIDNPDVIGWTREGDSTAAKSGLATVITDGPGGSKRMYVGTSNAGEIWYDLTGNRTDKITIGSDGYATFPVNGGSVSVWVQQ

SEQ ID NO: 34618 - protein, 480 aa, Cytophaga sp.
NGTMMQYFEWYVPNDGQQWNRLRTDAPYLSSVGITAVWTPPAYKGTSQADVGYGPYDLYDLGEFNQKGTVRTKYGTKGELKSAVNTLHSNGIQVYGDVVMNHKAGADYTENVTAVEVNPSNRNQETSGEYNIQAWTGFNFPGRGTTYSNFKWQWFHFDGTDWDQSRSLSRIFKFTGKAWDWEVSSENGNYDYLMYADIDYDHPDVVNEMKKWGVWYANEVGLDGYRLDAVKHIKFSFLKDWVDNARAATGKEMFTVGEYWQNDLGALNNYLAKVNYNQSLFDAPLHYNFYAASTGGGYYDMRNILNNTLVASNPTKAVTLVENHDTQPGQSLESTVQPWFKPLAYAFILTRSGGYPSVFYGDMYGTKGTTTREIPALKSKIEPLLKARKDYAYGTQRDYIDNPDVIGWTREGDSTKAKSGLATLITDGPGGSKRMYVGTSNAGEIWYDLTGNRTDKITIGSDGYATFPVNGGSVSVWVQQ

SEQ ID NO: 34619 - protein, 480 aa, Cytophaga sp.
NGTMMQYFEWYVPNDGQQWNRLRTDAPYLSSVGITAVWTPPAYKGTSQADVGYGPYDLYDLGEFNQKGTVRTKYGTKGELKSAVNTLHSNGIQVYGDVVMNHKAGADYTENVTAVEVNPSNRNQETSGEYNIQAWTGFNFPGRGTTYSNFKWQWFHFDGTDWDQSRSLSRIFKFTGKAWDWEVSSENGNYDYLMYADIDYDHPDVVNEMKKWGVWYANEVGLDGYRLDAVKHIKFSFLKDWVDNARAATGKEMFTVGEYWQNDLGALNNYLAKVNYNQSLFDAPLHYNFYAASTGGGYYDMRNILNNTLVASNPTKAVTLVENHDTQPGQSLESTVQPWFKPLAYAFILTRSGGYPSVFYGDMYGTKGTTTREIPALKSKIEPLLKARKDYAYGTQRDYIDNPDVIGWTREGDSTKAKSGLATVITDGPGGSKRMYAGTSNAGEIWYDLTGNRTDKITIGSDGYATFPVNGGSVSVWVQQ

SEQ ID NO: 34620 - protein, 480 aa, Cytophaga sp.
NGTMMQYFEWYVPNDGQQWNRLRTDAPYLSSVGITAVWTPPAYKGTSQADVGYGPYDLYDLGEFNQKGTVRTKYGTKGELKSAVNTLHSNGIQVYGDVVMNHKAGADYTENVTAVEVNPSNRNQETSGEYNIQAWTGFNFPGRGTTYSNFKWQWFHFDGTDWDQSRSLSRIFKFTGKAWDWEVSSENGNYDYLMYADIDYDHPDVVNEMKKWGVWYANEVGLDGYRLDAVKHIKFSFLKDWVDNARAATGKEMFTVGEYWQNDLGALNNYLAKVNYNQSLFDAPLHYNFYAASTGGGYYDMRNILNNTLVASNPTKAVTLVENHDTQPGQSLESTVQPWFKPLAYAFILTRSGGYPSVFYGDMYGTKGTTTREIPALKSKIEPLLKARKDYAYGTQRDYIDNPDVIGWTREGDSTKAKSGLATVITDGPGGSKRMYVGTSNAGEIWYDLTGNRTDKITIGSDGYATFPVNGGSVSVYVQQ

SEQ ID NO: 34621 - protein, 480 aa, Cytophaga sp.
NGTMMQYFEWYVPNDGQQWNRLRTDAPYLSSVGITAVWTPPAYKGTSQADVGYGPYDLYDLGEFNQKGTVRTKYGTKGELQSAVNTLHSNGIQVYGDVVMNHKAGADYTENVTAVEVNPSNRNQETSGEYNIQAWTGFNFPGRGTTYSNFKWQWFHFDGTDWDQSRSLSRIFKFTGKAWDWEVSSENGNYDYLMYADIDYDHPDVVNEMKKWGVWYANEVGLDGYRLDAVKHIKFSFLKDWVDNARAATGKEMFTVGEYWQNDLGALNNYLAKVNYNQSLFDAPLHYNFYAASTGGGYYDMRNILNNTLVASNPTKAVTLVENHDTQPGQSLESTVQPWFKPLAYAFILTRSGGYPSVFYGDMYGTKGTTTREIPALKSKIEPLLKARKDYAYGTQRDYIDNPDVIGWTREGDSTKAKSGLATVITDGPGGSKRMYVGTSNAGEIWYDLTGNRTDKITIGSDGYATFPVNGGSVSVWVQQ

SEQ ID NO: 34622 - protein, 480 aa, Cytophaga sp.
NGTMMQYFEWYVPNDGQQWNRLRTDAPYLSSVGITAVWTPPAYKGTSQADVGYGPYDLYDLGEFNQKGTVRTKYGTKGELKSAVNTLHSNGIQVYGDVVMNHKAGADYTENVTAVEVNPSNRNQETSGEYNIQAWTGFNFPGRGTTYSNFKWQWFHFDGTDWDQSRSLSRIFKFTGKAWDWEVSSENGNYDYLMYADIDYDHPDVVNEMKKWGIWYANEVGLDGYRLDAVKHIKFSFLKDWVDNARAATGKEMFTVGEYWQNDLGALNNYLAKVNYNQSLFDAPLHYNFYAASTGGGYYDMRNILNNTLVASNPTKAVTLVENHDTQPGQSLESTVQPWFKPLAYAFILTRSGGYPSVFYGDMYGTKGTTTREIPALKSKIEPLLKARKDYAYGTQRDYIDNPDVIGWTREGDSTKAKSGLATVITDGPGGSKRMYVGTSNAGEIWYDLTGNRTDKITIGSDGYATFPVNGGSVSVWVQQ

SEQ ID NO: 34623 - protein, 480 aa, Cytophaga sp.
NGTMMQYFEWYVPNDGQQWNRLRTDAPYLSSVGITAVWTPPAYKGTSQADVGYGPYDLYDLGEFNQKGTVRTKYGTKGELKSAVNTLHSNGIQVYGDVVMNHKAGADYTENVTAVEVNPSNRNQETSGEYNIQAWTGFNFPGRGTTYSNFKWQWFHFDGTDWDQSRSLSRIFKFTGKAWDWEVSSENGNYDYLMYADIDYDHPDVVNEMKKWGVWYANEVGLDGYRLDAVKHIKFSFLKDWVDAARAATGKEMFTVGEYWQNDLGALNNYLAKVNYNQSLFDAPLHYNFYAASTGGGYYDMRNILNNTLVASNPTKAVTLVENHDTQPGQSLESTVQPWFKPLAYAFILTRSGGYPSVFYGDMYGTKGTTTREIPALKSKIEPLLKARKDYAYGTQRDYIDNPDVIGWTREGDSTKAKSGLATVITDGPGGSKRMYVGTSNAGEIWYDLTGNRTDKITIGSDGYATFPVNGGSVSVWVQQ

SEQ ID NO: 34624 - protein, 480 aa, Cytophaga sp.
NGTMMQYFEWYVPNDGQQWNRLRTDAPYLSSVGITAVWTPPAYKGTSQADVGYGPYDLYDLGEFNQKGTVRTKYGTKGELKSAVNTLHSNNIQVYGDVVMNHKAGADYTENVTAVEVNPSNRNQETSGEYNIQAWTGFNFPGRGTTYSNFKWQWFHFDGTDWDQSRSLSRIFKFTGKAWDWEVSSENGNYDYLMYADIDYDHPDVVNEMKKWGVWYANEVGLDGYRLDAVKHIKFSFLKDWVDNARAATGKEMFTVGEYWQNDLGALNNYLAKVNYNQSLFDAPLHYNFYAASTGGGYYDMRNILNNTLVASNPTKAVTLVENHDTQPGQSLESTVQPWFKPLAYAFILTRSGGYPSVFYGDMYGTKGTTTREIPALKSKIEPLLKARKDYAYGTQRDYIDNPDVIGWTREGDSTKAKSGLATVITDGPGGSKRMYVGTSNAGEIWYDLTGNRTDKITIGSDGYATFPVNGGSVSVWVQQ

SEQ ID NO: 34625 - protein, 480 aa, Cytophaga sp.
NGTMMQYFEWYVPNDGQQWNRLRTDAPYLSSVGITAVWTPPAYKGTSQADVGYGPYDLYDLGEFNQKGTVRTKYGTKGELKSAVNTLHSNGIQVYGDVVMNHKAGADYTENVTAVEVNPSNRNQETSGEYNIQAWTGFNFPGRGTTYSNFKWQWFHFDGTDWDQSRSLSRIFKFTGKAWDWEVSSENGNYDYLMYADIDYDHPDVVAEMKKWGVWYANEVGLDGYRLDAVKHIKFSFLKDWVDNARAATGKEMFTVGEYWQNDLGALNNYLAKVNYNQSLFDAPLHYNFYAASTGGGYYDMRNILNNTLVASNPTKAVTLVENHDTQPGQSLESTVQPWFKPLAYAFILTRSGGYPSVFYGDMYGTKGTTTREIPALKSKIEPLLKARKDYAYGTQRDYIDNPDVIGWTREGDSTKAKSGLATVITDGPGGSKRMYVGTSNAGEIWYDLTGNRTDKITIGSDGYATFPVNGGSVSVWVQQ

SEQ ID NO: 34626 - protein, 480 aa, Cytophaga sp.
NGTMMQYFEWYVPNDGQQWNRLRTDAPYLSSVGITAVWTPPAYKGTSQADVGYGPYDLYDLGEFNQKGTVRTKYGTKGELKSAVNTLHSNGIQVYGDVVMNHKAGADYTENVTAVEVNPSNRNQETSGEYNIKAWTGFNFPGRGTTYSNFKWQWFHFDGTDWDQSRSLSRIFKFTGKAWDWEVSSENGNYDYLMYADIDYDHPDVVNEMKKWGVWYANEVGLDGYRLDAVKHIKFSFLKDWVDNARAATGKEMFTVGEYWQNDLGALNNYLAKVNYNQSLFDAPLHYNFYAASTGGGYYDMRNILNNTLVASNPTKAVTLVENHDTQPGQSLESTVQPWFKPLAYAFILTRSGGYPSVFYGDMYGTKGTTTREIPALKSKIEPLLKARKDYAYGTQRDYIDNPDVIGWTREGDSTKAKSGLATVITDGPGGSKRMYVGTSNAGEIWYDLTGNRTDKITIGSDGYATFPVNGGSVSVWVQQ

SEQ ID NO: 34627 - protein, 480 aa, Cytophaga sp.
NGTMMQYFEWYVPNDGQQWNRLRTDAPYLSSVGITAVWTPPAYKGTSQADVGYGPYDLYDLGEFNQKGTVRTKYGTKGELKSAVNTLHSNGIQVYGDVVMNHKAGADYTENVTAVEVNPSNRNQETSGEYNIQAWTGFNFPGRGTTYSNFKWHWFHFDGTDWDQSRSLSRIFKFTGKAWDWEVSSENGNYDYLMYADIDYDHPDVVNEMKKWGVWYANEVGLDGYRLDAVKHIKFSFLKDWVDNARAATGKEMFTVGEYWQNDLGALNNYLAKVNYNQSLFDAPLHYNFYAASTGGGYYDMRNILNNTLVASNPTKAVTLVENHDTQPGQSLESTVQPWFKPLAYAFILTRSGGYPSVFYGDMYGTKGTTTREIPALKSKIEPLLKARKDYAYGTQRDYIDNPDVIGWTREGDSTKAKSGLATVITDGPGGSKRMYVGTSNAGEIWYDLTGNRTDKITIGSDGYATFPVNGGSVSVWVQQ

SEQ ID NO: 34628 - protein, 480 aa, Cytophaga sp.
NGTMMQYFEWYVPNDGQQWNRLRTDAPYLSSVGITAVWTPPAYKGTSQADVGYGPYDLYDLGEFNQKGTVRTKYGTKGELKSAVNTLHSNGIQVYGDVVMNHKAGADYTENVTAVEVNPSNRNQETSGEYNIQAWTGFNFPGRGTTYSNFKWQWFHFDGTDWDQSRSLSRIFKFTGKAWDWEVSSENGNYDYLMYADIDYDHPDVVNEMKKWGVWYANEVGLDGYRLDAVKHIKFSFLKDWVDNARAATGKEMFTVGEYWQNDAGALNNYLAKVNYNQSLFDAPLHYNFYAASTGGGYYDMRNILNNTLVASNPTKAVTLVENHDTQPGQSLESTVQPWFKPLAYAFILTRSGGYPSVFYGDMYGTKGTTTREIPALKSKIEPLLKARKDYAYGTQRDYIDNPDVIGWTREGDSTKAKSGLATVITDGPGGSKRMYVGTSNAGEIWYDLTGNRTDKITIGSDGYATFPVNGGSVSVWVQQ

SEQ ID NO: 34629 - protein, 480 aa, Cytophaga sp.
NGTMMQYFEWYVPNDGQQWNRLRTDAPYLSSVGITAVWTPPAYKGTSQADVGYGPYDLYDLGEFNQKGTVRTKYGTKGELKSAVNTLHSNGIQVYGDVVMNHKAGADYTENVTAVEVNPSNRNQETSGEYNIQAWTGFNFPGRGTTYSNFKWQWFHFDGTDWDQSRSLSRIFKFTGKAWDWEVSSENGNYDYLMYADIDYDHPDVVNEMKKWGVWYANEVGLDGYRLDAVKHIKFSFLKDWVDNARAATGKEMFTVGEYWQNDLGALNNYLAKVNYNQSLFDAPLHYNFYAASTGGGYYDMRNILNNTLVASNPTKAVTLVENHDTQPGQSLESTVQPWFKPLAYAFILTRSGGYPSVFYGDMYGTKGTTTREIPALKSKIEPLLKARKDYAYGTQRDYIDNPDVIGWTREGDSTKAKSGLATVITDGPGGSKRMYVGTSNAGEIWYDLTGNRTDKITIGSDGYAEFPVNGGSVSVWVQQ

SEQ ID NO: 34630 - protein, 480 aa, Cytophaga sp.
NGTMMQYFEWYVPNDGQQWNRLRTDAPYLSSVGITAVWTPPAYKGTSQADVGYGPYDLYDLGEFNQKGTVRTKYGTKGELKSAVNTLHSNGIQVYGDVVMNHKAGADYTENVTAVEVNPSNRNQETSGEYNIQAWTGFNFPGRGTTYSNFKWQWFHFDGTDWDQSRSLSRIFKFTGKAWDWEVSSENGNYDYLMYADIDYDHPDVVNEMKKWGVWYANEVGLDGYRLDAVKHIKFSFLKDWVDNARAATGKEMFTVGEYWQNDLGALNNYLAKVNYNQSLFDAPLHYNFYAASTGGGYYDMRNILNNTLVASNPTKAVTLVENHDTQPGQSLESTVQPWFKPLAYAFILTRSGGYPSVFYGDMYGTKGTTTREIPALKSKIEPLLKARKDYAYGTQRDYIDNPDVIGWTREGDSTKAKSGLATVITDGPGGSKRMYVGTSNAGEIWYDLTGNRTDKVTIGSDGYATFPVNGGSVSVWVQQ

SEQ ID NO: 34631 - protein, 480 aa, Cytophaga sp.
NGTMMQYFEWYVPNDGQQWNRLRTDAPYLSSVGITAVWTPPAYKGTSQADVGYGPYDLYDLGEFNQKGTVRTKYGTKGELKSAVNTLHSNGIQVYGDVVMNHKAGADYTENVTAVEVNPSNRNQETSGEYNIQAWTGFNFPGRGTTYSNFKWQWFHFDGTDWDQSRSLSRIFKFTGKAWDWEVSSENGNYDYLMYADIDYDHPDVVNEMKKWGVWYANEVGLDGYRLDAVKHIKFSFLKDWVDNARAATGKEMFTVGEYWQNDLGALNNYLAKVNYNQSLFDAPLHYNFYAASTGGGYYDMRNILNNTLVASNPTKAVTLVENHDTQPGQSLESTVQPWFKPLAYAFILTRSGGYPSVFYGDMYGTKGTTTREIPALKSKIEPLLKARKDYAYGTQRDYIDNPDVIGWTREGDSTKAKSGLATVITDGPGGSKRMYVGTSNAGEIWYDLTGNRTDKITIGSDGYGTFPVNGGSVSVWVQQ

SEQ ID NO: 34632 - protein, 480 aa, Cytophaga sp.
NGTMMQYFEWYVPNDGQQWNRLRTDAPYLSSVGITAVWTPPAYKGTSQADVGYGPYDLYDLGEFNQKGTVRTKYGTKGELKSAVNTLHSNGIQVYGDVVMNHKAGADYTENVTAVEVNPSNRNQETSGEYNIQAWTGFNFPGRGTTYSNFKWQWFHFDGTDWDQSRSLSRIFKFRGKAWDWEVSSENGNYDYLMYADIDYDHPDVVNEMKKWGVWYANEVGLDGYRLDAVKHIKFSFLKDWVDNARAATGKEMFTVGEYWQNDLGALNNYLAKVNYNQSLFDAPLHYNFYAASTGGGYYDMRNILNNTLVASNPTKAVTLVENHDTQPGQSLESTVQPWFKPLAYAFILTRSGGYPSVFYGDMYGTKGTTTREIPALKSKIEPLLKARKDYAYGTQRDYIDNPDVIGWTREGDSTKAKSGLATVITDGPGGSKRMYVGTSNAGEIWYDLTGNRTDKITIGSDGYATFPVNGGSVSVWVQQ

SEQ ID NO: 34633 - protein, 480 aa, Cytophaga sp.
NGTMMQYFEWYVPNDGQQWNRLRTDAPYLSSVGITAVWIPPAYKGTSQADVGYGPYDLYDLGEFNQKGTVRTKYGTKGELKSAVNTLHSNGIQVYGDVVMNHKAGADYTENVTAVEVNPSNRNQETSGEYNIQAWTGFNFPGRGTTYSNFKWQWFHFDGTDWDQSRSLSRIFKFTGKAWDWEVSSENGNYDYLMYADIDYDHPDVVNEMKKWGVWYANEVGLDGYRLDAVKHIKFSFLKDWVDNARAATGKEMFTVGEYWQNDLGALNNYLAKVNYNQSLFDAPLHYNFYAASTGGGYYDMRNILNNTLVASNPTKAVTLVENHDTQPGQSLESTVQPWFKPLAYAFILTRSGGYPSVFYGDMYGTKGTTTREIPALKSKIEPLLKARKDYAYGTQRDYIDNPDVIGWTREGDSTKAKSGLATVITDGPGGSKRMYVGTSNAGEIWYDLTGNRTDKITIGSDGYATFPVNGGSVSVWVQQ

SEQ ID NO: 34634 - protein, 480 aa, Cytophaga sp.
NGTMMQYFEWYVPNDGQQWNRLRTDAPYLSSVGITAVWTPPAYKGTSQADVGYGPYDLYDLGEFNQKGTVRTKYGTKGELKSAVNTLHSNGIQVYGDVVMNHKAGADYTENVTAVEVNPSNRNQETSGEYNIQAWTGFNFPGRGTTYSNFKWQWFHFDGTDWDQSRSLSRIFKFTGKAWDWEVSSENGNYDYLMYADIDYDHPDVVNEMKKWGVWYANEVGLDGYRLDAVKHIKFSFLKDWVDNARAATGKEMFTVGEYWQNDLGALNNYLNKVNYNQSLFDAPLHYNFYAASTGGGYYDMRNILNNTLVASNPTKAVTLVENHDTQPGQSLESTVQPWFKPLAYAFILTRSGGYPSVFYGDMYGTKGTTTREIPALKSKIEPLLKARKDYAYGTQRDYIDNPDVIGWTREGDSTKAKSGLATVITDGPGGSKRMYVGTSNAGEIWYDLTGNRTDKITIGSDGYATFPVNGGSVSVWVQQ

SEQ ID NO: 34635 - protein, 480 aa, Cytophaga sp.
NGTMMQYFEWYVPNDGQQWNRLRTDAPYLSSVGITAVWTPPAYKGTSQADVGYGPYDLYDLGEFNQKGTVRTKYGTKGELKSAVNTLHSNGIQVYGDVVMNHKAGADYTENVTAVEVNPSNRNQETSGEYNIQAWTGFNFPGRGTTYSNFKWQWFHFDGTDWDQSRSLSRIFKFTGKAWDWEVSSENGNYDYLMYADIDYDHPDVVNEMKKWGVWYANEVGLDGYRLDAVKHIKFSFLKDWVDNARAATGKEMFTVGEYWQNDLGALNNYLAKVNYNQSLFDAPLHYNFYAASTGGGYYDMRNILNNTLVASNPTKAVTLVENHDTQPGQSLESTVQPWFKPLAYAFILTRSGGYPSVFYGDMYGTKGTTTREIPALKSKIEPLLKARKDYAYGTQRDYIDNPDVIGWTREGDSSKAKSGLATVITDGPGGSKRMYVGTSNAGEIWYDLTGNRTDKITIGSDGYATFPVNGGSVSVWVQQ

SEQ ID NO: 34636 - protein, 480 aa, Cytophaga sp.
NGTMMQYFEWYVPNDGQQWNRLRTDAEYLSSVGITAVWTPPAYKGTSQADVGYGPYDLYDLGEFNQKGTVRTKYGTKGELKSAVNTLHSNGIQVYGDVVMNHKAGADYTENVTAVEVNPSNRNQETSGEYNIQAWTGFNFPGRGTTYSNFKWQWFHFDGTDWDQSRSLSRIFKFTGKAWDWEVSSENGNYDYLMYADIDYDHPDVVNEMKKWGVWYANEVGLDGYRLDAVKHIKFSFLKDWVDNARAATGKEMFTVGEYWQNDLGALNNYLAKVNYNQSLFDAPLHYNFYAASTGGGYYDMRNILNNTLVASNPTKAVTLVENHDTQPGQSLESTVQPWFKPLAYAFILTRSGGYPSVFYGDMYGTKGTTTREIPALKSKIEPLLKARKDYAYGTQRDYIDNPDVIGWTREGDSTKAKSGLATVITDGPGGSKRMYVGTSNAGEIWYDLTGNRTDKITIGSDGYATFPVNGGSVSVWVQQ

SEQ ID NO: 34637 - protein, 480 aa, Cytophaga sp.
NGTMMQYFEWYVPNDGQQWKRLRTDAPYLSSVGITAVWTPPAYKGTSQADVGYGPYDLYDLGEFNQKGTVRTKYGTKGELKSAVNTLHSNGIQVYGDVVMNHKAGADYTENVTAVEVNPSNRNQETSGEYNIQAWTGFNFPGRGTTYSNFKWQWFHFDGTDWDQSRSLSRIFKFTGKAWDWEVSSENGNYDYLMYADIDYDHPDVVNEMKKWGVWYANEVGLDGYRLDAVKHIKFSFLKDWVDNARAATGKEMFTVGEYWQNDLGALNNYLAKVNYNQSLFDAPLHYNFYAASTGGGYYDMRNILNNTLVASNPTKAVTLVENHDTQPGQSLESTVQPWFKPLAYAFILTRSGGYPSVFYGDMYGTKGTTTREIPALKSKIEPLLKARKDYAYGTQRDYIDNPDVIGWTREGDSTKAKSGLATVITDGPGGSKRMYVGTSNAGEIWYDLTGNRTDKITIGSDGYATFPVNGGSVSVWVQQ

SEQ ID NO: 34638 - protein, 480 aa, Cytophaga sp.
NGTMMQYFEWYVPNDGQQWNRLRTDAPYLSSVGITAVWTPPAYKGTSQADVGYGPYDLYDLGEFNQKGTVRTKYGTKGELKSAVNTLHSNGIQVYGDVVMNHKAGADYTENVTAVEVNPSNRNQETSGEYNIQAWTGFNFPGRGTTYSNFKWQWFHFDGTDWDQSRSLSRIFKFTGKAWDWEVSSENGNYDYLMYADIDYDHPDVVNEMKKWGVWYANEVGLDGYRLDAVKHIKFSFLKDWVDNARAATGKEMFTVGEYWQNDLGALNNYLAKVNYNQSLFDAPLHYNFYAASTGGGYYDMRRILNNTLVASNPTKAVTLVENHDTQPGQSLESTVQPWFKPLAYAFILTRSGGYPSVFYGDMYGTKGTTTREIPALKSKIEPLLKARKDYAYGTQRDYIDNPDVIGWTREGDSTKAKSGLATVITDGPGGSKRMYVGTSNAGEIWYDLTGNRTDKITIGSDGYATFPVNGGSVSVWVQQ

SEQ ID NO: 34639 - protein, 480 aa, Cytophaga sp.
NGTMMQYFEWYVPNDGQQWNRLRTDAPYLSSVGITAVWTPPAYKGTSQADVGYGPYDLYDLGEFNQKGTVRTKYGTKSELKSAVNTLHSNGIQVYGDVVMNHKAGADYTENVTAVEVNPSNRNQETSGEYNIQAWTGFNFPGRGTTYSNFKWQWFHFDGTDWDQSRSLSRIFKFTGKAWDWEVSSENGNYDYLMYADIDYDHPDVVNEMKKWGVWYANEVGLDGYRLDAVKHIKFSFLKDWVDNARAATGKEMFTVGEYWQNDLGALNNYLAKVNYNQSLFDAPLHYNFYAASTGGGYYDMRNILNNTLVASNPTKAVTLVENHDTQPGQSLESTVQPWFKPLAYAFILTRSGGYPSVFYGDMYGTKGTTTREIPALKSKIEPLLKARKDYAYGTQRDYIDNPDVIGWTREGDSTKAKSGLATVITDGPGGSKRMYVGTSNAGEIWYDLTGNRTDKITIGSDGYATFPVNGGSVSVWVQQ

SEQ ID NO: 34640 - protein, 480 aa, Cytophaga sp.
NGTMMQYFEWYVPNDGQQWNRLRTDAPYLSSVGITAVWTPPAYKGTSQADVGYGPYDLYDLGEFNQKGTVRTKYGTKGELKSAVNTLHSNGIQVYGDVVMNHKAGADYTENVTAVEVNPSNRNQETSGEYNIQAWTGFNFPGRGTTYSNFKWQWFHFDGTDWDQSRSLSRIFKFTGKAWDWEVSSENGNYDYLMYADIDYDHPDVVNEMKKWGVWYANEVGLDGYRLDAVKHIKFSFLKDWVDNARAATGKEMFTVGEYWQNDLGALNNYLAKVNYNQSLFDAPLHYNFYAASTGGGYYDMRNILNNTLVASNPTKAVTLVENHDTQPGQSLESTVQPWFKPLAYAFILTRSGGYPSVFYGDMYGTKGTTTREIPALKSKIEPLLKARKDYAYGTQRDYIDNPDVIGWTREGDSTKAKSGLATVITDGPGGSKRMYVGTSNAGEIWYDLTGNRTDKIKIGSDGYATFPVNGGSVSVWVQQ

SEQ ID NO: 34641 - protein, 480 aa, Cytophaga sp.
NGTMMQYFEWYVPNDGQQWNRLRTDAPYLSSVGITAVWTPPAYKGTSQADVGYGPYDLYDLGEFNQKGTVRTKYGTKGELKSAVNTLHSNGIQVYGDVVMNHKAGADYTENVTAVEVNPSNRNQETSGEYNIQAWTGFNFPGRGTTYSNFKWQWFHFDGTDWDQSRSLSRIFKFTGKAWDWEVSSENGNYDYLMYADIDYDHPDVVNEMKKWGVWYANEVGLDGYRLDAVKHIKFSFLKDWVDNARAATGKEMFTVGEYWQNDLGALNNYLAKVNYNQSLFDAPLHYNFYAASTGGGYYDMRNILNNTLVASNPTKAVTLVENHDTQPGQSLESTVQPWFKPLAYAFILTRSGGYPSVFYGDMYGTKGTTTKEIPALKSKIEPLLKARKDYAYGTQRDYIDNPDVIGWTREGDSTKAKSGLATVITDGPGGSKRMYVGTSNAGEIWYDLTGNRTDKITIGSDGYATFPVNGGSVSVWVQQ

SEQ ID NO: 34642 - protein, 480 aa, Cytophaga sp.
NGTMMQYFEWYVPNDGQQWNRLRTDAPYLSSVGITAVWTPPAYKGTSQADVGYGPYDLYDLGEFNQKGTVRTKYGTKGELKSAVNTLHSNGIQVYGDVVMNHKAGADYTENVTAVEVNPSNRNQETSGEYNIQAWTGFNFPGRGTTYSNFKWQWFHFDGTDWDQSRSLSRIFKFTGKAWDWEVSSENGNYDYLMYADIDYDHPDVVNEMKKWGVWYANEVGLDGYRLDAVKHIKFSFLKDWVDNARAATGKEMFTVGEYWQNDLGALNNYLAKVNYNQSLFDAPLHYNFYAASTGGGYYDMRNILNNTLVASNPTKAVTLVENHDTQPGQSLESTVQPWFKPLAYAFILTRSGGYPSVFYGDMYGTKGTTTREIPALKDKIEPLLKARKDYAYGTQRDYIDNPDVIGWTREGDSTKAKSGLATVITDGPGGSKRMYVGTSNAGEIWYDLTGNRTDKITIGSDGYATFPVNGGSVSVWVQQ

SEQ ID NO: 34643 - protein, 480 aa, Cytophaga sp.
NGTMMQYFEWYVPNDGQQWNRLRTDAPYLSSVGITAVWTPPAYKGTSQADVGYGPYDLYDLGEFNQKGTVRTKYGTKGELKSAVNTLHSNGIQVYGDVVMNHKAGADYTENVTAVEVNPSNRNQETSGEYNIQAWTGFNFPGRGTTYSNFKWQWFHFDGTDWDQSRSLSRIFKFTGKAWDWEVSSENGNYDYLMYADIDYDHPDVVNEMKKWGVWYANEVGLDGYRLDAVKHIKFSFLKDWVDNARAATGKEMFTVGEYWQNDLGALNNYLAKVNYNQSLFDAPLHYNFYAASTGGGYYDMRNILNNTLVASNPTKAVTLVENHDTQPGQSLESTVQPWFKPLAYAFILTRSGGYPSVFYGDMYGTKGTTTREIPALKSKIEPLLKARKEYAYGTQRDYIDNPDVIGWTREGDSTKAKSGLATVITDGPGGSKRMYVGTSNAGEIWYDLTGNRTDKITIGSDGYATFPVNGGSVSVWVQQ

SEQ ID NO: 34644 - protein, 480 aa, Cytophaga sp.
NGTMMQYFEWYVPNDGQQWNRLRTDAPYLSSVGITAVWTPPAYKGTSQADVGYGPYDLYDLGEFNQKGTVRTKYGTKGELKSAVNTLHSNGIQVYGDVVMNHKAGADYTENVTAVEVNPSNRNQETSGEYNIQAWTGFNFPGRGTTYSNFKWQWFHFDGTDWDQSRSLSRIFKFTGKAWDWEVSSENGNYDYLMYADIDYDHPDVVNEMKKWGVWYANEVGLDGYRLDAVKHIKFSFLKDWVDNARAATGKEMFTVGEYWQNDLGALNNYLAKVNYNQSLFDAPLHYNFYAASTGGGYYDMRNILNGTLVASNPTKAVTLVENHDTQPGQSLESTVQPWFKPLAYAFILTRSGGYPSVFYGDMYGTKGTTTREIPALKSKIEPLLKARKDYAYGTQRDYIDNPDVIGWTREGDSTKAKSGLATVITDGPGGSKRMYVGTSNAGEIWYDLTGNRTDKITIGSDGYATFPVNGGSVSVWVQQ

SEQ ID NO: 34645 - protein, 480 aa, Cytophaga sp.
NGTMMQYFEWYVPNDGQQWNRLRTDAPYLSSVGITAVWTPPAYKGTSQADVGYGPYDLYDLGEFNQKGTVRTKYGTKGELKSAVNSLHSNGIQVYGDVVMNHKAGADYTENVTAVEVNPSNRNQETSGEYNIQAWTGFNFPGRGTTYSNFKWQWFHFDGTDWDQSRSLSRIFKFTGKAWDWEVSSENGNYDYLMYADIDYDHPDVVNEMKKWGVWYANEVGLDGYRLDAVKHIKFSFLKDWVDNARAATGKEMFTVGEYWQNDLGALNNYLAKVNYNQSLFDAPLHYNFYAASTGGGYYDMRNILNNTLVASNPTKAVTLVENHDTQPGQSLESTVQPWFKPLAYAFILTRSGGYPSVFYGDMYGTKGTTTREIPALKSKIEPLLKARKDYAYGTQRDYIDNPDVIGWTREGDSTKAKSGLATVITDGPGGSKRMYVGTSNAGEIWYDLTGNRTDKITIGSDGYATFPVNGGSVSVWVQQ

SEQ ID NO: 34646 - protein, 480 aa, Cytophaga sp.
NGTMMQYFEWYVPNDGQQWNRLRTDAPYLSSVGITAVWTPPAYKGTSQADVGYGPYDLYDLGEFNQKGTVRTKYGTKGELKSAVNTLHSNGIQVYGDVVMNHKAGADYTENVTAVEVNPSNRNQETSGEYNIQAWTGFNFPGRGTTYSNFKWQWFHFDGTDWDQSRSLSRIFKFTGKAWDWEVSSENGNYDYLMYADIDYDHPDVVNEMKKWGVWYANEVGLDGYRLDAVKHIKFSFLKDWVDNARAATGKEMFTVGEYWQNDLGALNNYLAKVNYNQSLFDAPLHYNFYAASTGGGYYDMRNILNNTLVASNPTKAVTLVENHDTQPGQSLESTVQPWFKPLAYAFILTRSGGYPSVFYGDMYGTKGTTTREIPALKSKIEPLLKARKDYAYGTQRDYIDNPDVIGWTREGDSTKAKSGLATVITDGPGGSKRMYVGTSNAGEIWYDLTGNRTDKITIGSDGYATFPVNGGSVSVWVQK

SEQ ID NO: 34647 - protein, 480 aa, Cytophaga sp.
NGTMMQYFEWYVPNDGQQWNRLRTDAPYLSSVGITAVWTPPAYKGTSQADVGYGPYDLYDLGEFNQKGTVRTKYGTKGELKSAVNTLHSNGIQVYGDVVMNHKAGADYTENVTAVEVNPSNRNQETSGEYNIQAWTGFNFPGRGTTYSNFKWQWFHFDGTDWDQSRSLSRIFKFTGKAWDWEVSSENGNYDYLMYADIDYDHPDVVNEMKKWGVWYANEVGLDGYRLDAVKHIKFSFLRDWVDNARAATGKEMFTVGEYWQNDLGALNNYLAKVNYNQSLFDAPLHYNFYAASTGGGYYDMRNILNNTLVASNPTKAVTLVENHDTQPGQSLESTVQPWFKPLAYAFILTRSGGYPSVFYGDMYGTKGTTTREIPALKSKIEPLLKARKDYAYGTQRDYIDNPDVIGWTREGDSTKAKSGLATVITDGPGGSKRMYVGTSNAGEIWYDLTGNRTDKITIGSDGYATFPVNGGSVSVWVQQ

SEQ ID NO: 34648 - protein, 480 aa, Cytophaga sp.
NGTMMQYFEWYVPNDGQQWNRLRTDAPYLSSVGITAVWTPPAYKGTSQADVGYGPYDLYDLGEFNQKGTVRTKYGTKGELKSAVNTLHSNGIQVYGDVVMNHKAGADYTENVTAVEVNPSNRNQETSGEYNIQAWTGFNFPGRGTTYSNFKWQWFHFDGTDWDQSRSLSRIFKFTGKAWDWEVSSENGNYDYLMYADIDYDHPDVVNEMKKWGVWYANEVGLDGYRLDAVKHIKFSFLKDWVDNARAATGKEMFTVGEYWQNDLGALNNYLAKVNYNQSLFDAPLHYNFYAASTGGGYYDMRNILNNTLVASNPTKAVTLVENHDTQPGQSLESTVQPWFKPLAYAFILTRSGGYPSVFYGDMYGTKGTTTREIPALKSKIEPLLKARKDYAYGTQRDYIDNPDVIGWTREGDSTKAKSGLATVITDGPGGSKRMYVGLSNAGEIWYDLTGNRTDKITIGSDGYATFPVNGGSVSVWVQQ

SEQ ID NO: 34649 - protein, 480 aa, Cytophaga sp.
NGTMMQYFEWYVPNDGQQWNRLRTDAPYLSSVGITAVWTPPAYKGTSQADVGYGPYDLYDLGEFNQKGTVRTKYGTKGELKSAVNTLHSNGIQVYGDVVMNHKAGADYTENVTAVEVNPSNRNQETSGEYNIQAWTGFRFPGRGTTYSNFKWQWFHFDGTDWDQSRSLSRIFKFTGKAWDWEVSSENGNYDYLMYADIDYDHPDVVNEMKKWGVWYANEVGLDGYRLDAVKHIKFSFLKDWVDNARAATGKEMFTVGEYWQNDLGALNNYLAKVNYNQSLFDAPLHYNFYAASTGGGYYDMRNILNNTLVASNPTKAVTLVENHDTQPGQSLESTVQPWFKPLAYAFILTRSGGYPSVFYGDMYGTKGTTTREIPALKSKIEPLLKARKDYAYGTQRDYIDNPDVIGWTREGDSTKAKSGLATVITDGPGGSKRMYVGTSNAGEIWYDLTGNRTDKITIGSDGYATFPVNGGSVSVWVQQ

SEQ ID NO: 34650 - protein, 480 aa, Cytophaga sp.
NGTMMQYFEWYVPNDGQQWNRLRTDAPYLSSVGITAVWTPPAYKGTSQADVGYGPYDLYDLGEFNQKGTVRTKYGTKGELKSAVNTLHSNGIQVYGDVVMNHKAGADYTENVTAVEVNPSNRNQETSGEYNIQAWTGFNFPGRGTTYSNFKWQWFHFDGTDWDQSRSLSRIFKFTGKAWDWEVSSENGNYDYLMYADIDYDHPDVVNEMKKWGVWYANEVGLDGYRLDAVKHIKFSFLKDWVDNARAATGKEMFTVGEYWQNDLGALNNYLAKVNYNQSLFDAPLHYNFYAASTQGGYYDMRNILNNTLVASNPTKAVTLVENHDTQPGQSLESTVQPWFKPLAYAFILTRSGGYPSVFYGDMYGTKGTTTREIPALKSKIEPLLKARKDYAYGTQRDYIDNPDVIGWTREGDSTKAKSGLATVITDGPGGSKRMYVGTSNAGEIWYDLTGNRTDKITIGSDGYATFPVNGGSVSVWVQQ

SEQ ID NO: 34651 - protein, 480 aa, Cytophaga sp.
NGTMMQYFEWYVPNDGQQWNRLRTDAPYLSSVGITAVWTPPAYKGTSQADVGYGPYDLYDLGEFNQKGTVRTKYGTKGELKSAVNTLHSNGIQVYGDVVMNHKAGADYTENVTAVEVNPANRNQETSGEYNIQAWTGFNFPGRGTTYSNFKWQWFHFDGTDWDQSRSLSRIFKFTGKAWDWEVSSENGNYDYLMYADIDYDHPDVVNEMKKWGVWYANEVGLDGYRLDAVKHIKFSFLKDWVDNARAATGKEMFTVGEYWQNDLGALNNYLAKVNYNQSLFDAPLHYNFYAASTGGGYYDMRNILNNTLVASNPTKAVTLVENHDTQPGQSLESTVQPWFKPLAYAFILTRSGGYPSVFYGDMYGTKGTTTREIPALKSKIEPLLKARKDYAYGTQRDYIDNPDVIGWTREGDSTKAKSGLATVITDGPGGSKRMYVGTSNAGEIWYDLTGNRTDKITIGSDGYATFPVNGGSVSVWVQQ

SEQ ID NO: 34652 - protein, 480 aa, Cytophaga sp.
NGTMMQYFEWYVPNDGQQWNRLRTDAPYLSSVGITAVWTPPAYKGTSQADVGYGPYDLYDLGEFNQKGTVRTKYGTKGELKSAVNTLHSNGIQVYGDVVMNHKAGADYTENVTAVEVNPSNRNQETSGEYNIQAWTGFNFPGRGTTYSDFKWQWFHFDGTDWDQSRSLSRIFKFTGKAWDWEVSSENGNYDYLMYADIDYDHPDVVNEMKKWGVWYANEVGLDGYRLDAVKHIKFSFLKDWVDNARAATGKEMFTVGEYWQNDLGALNNYLAKVNYNQSLFDAPLHYNFYAASTGGGYYDMRNILNNTLVASNPTKAVTLVENHDTQPGQSLESTVQPWFKPLAYAFILTRSGGYPSVFYGDMYGTKGTTTREIPALKSKIEPLLKARKDYAYGTQRDYIDNPDVIGWTREGDSTKAKSGLATVITDGPGGSKRMYVGTSNAGEIWYDLTGNRTDKITIGSDGYATFPVNGGSVSVWVQQ

SEQ ID NO: 34653 - protein, 480 aa, Cytophaga sp.
NGTMMQYFEWYVPNDGQQWNRLRTDAPYLSSVGITAVWTPPAYKGTSQADVGYGPYDLYDLGEFNQKGTVRTKYGTKGELKSAVNTLHSNGIQVYGDVVMNHKAGADYTENVTAVEVNPSNRNQETSGEYNIQAWTGFNFPGRGTTYSNFKWQWFHFDGTDWDQSRSISRIFKFTGKAWDWEVSSENGNYDYLMYADIDYDHPDVVNEMKKWGVWYANEVGLDGYRLDAVKHIKFSFLKDWVDNARAATGKEMFTVGEYWQNDLGALNNYLAKVNYNQSLFDAPLHYNFYAASTGGGYYDMRNILNNTLVASNPTKAVTLVENHDTQPGQSLESTVQPWFKPLAYAFILTRSGGYPSVFYGDMYGTKGTTTREIPALKSKIEPLLKARKDYAYGTQRDYIDNPDVIGWTREGDSTKAKSGLATVITDGPGGSKRMYVGTSNAGEIWYDLTGNRTDKITIGSDGYATFPVNGGSVSVWVQQ

SEQ ID NO: 34654 - protein, 480 aa, Cytophaga sp.
NGTMMQYFEWYVPNDGQQWNRLRTDAPYLSSVGITAVWTPPAYKGTSQADVGYGPYDLYDLGEFNQKGTVRTKYGTKGELKSAVNTLHSNGIQVYGDVVMNHKAGADYTENVTAVEVNPSNRNQETSGEYNIQAWTGFNFPGRGTTYSNFKWQWFHFDGTDWDQSRSLSRIFKFTGKAWDWEVSSENGNYDYLMYADVDYDHPDVVNEMKKWGVWYANEVGLDGYRLDAVKHIKFSFLKDWVDNARAATGKEMFTVGEYWQNDLGALNNYLAKVNYNQSLFDAPLHYNFYAASTGGGYYDMRNILNNTLVASNPTKAVTLVENHDTQPGQSLESTVQPWFKPLAYAFILTRSGGYPSVFYGDMYGTKGTTTREIPALKSKIEPLLKARKDYAYGTQRDYIDNPDVIGWTREGDSTKAKSGLATVITDGPGGSKRMYVGTSNAGEIWYDLTGNRTDKITIGSDGYATFPVNGGSVSVWVQQ

SEQ ID NO: 34655 - protein, 480 aa, Cytophaga sp.
NGTMMQYFEWYVPNDGQQWNRLRTDAPYLSSVGITAVWTPPAYKGTSQADVGYGPYDLYDLGEFNQKGTVRTKYGTKGELKSAVNTLHSNGIQVYGDVVMNHKAGADYTENVTAVEVNPSNRNQETSGEYNIQAWTGFNFPGRGTTYSNFKWQWFHFDGTDWDQSRSLSRIFKFTGKAWDWEVSSENGNYDYLMYADIDYDHPDVVNEMKKWGVWYANEVGLDGYRLDAVKHIKFSFLKDWVDNARAATGKEMFTVGEYWQNDLGALENYLAKVNYNQSLFDAPLHYNFYAASTGGGYYDMRNILNNTLVASNPTKAVTLVENHDTQPGQSLESTVQPWFKPLAYAFILTRSGGYPSVFYGDMYGTKGTTTREIPALKSKIEPLLKARKDYAYGTQRDYIDNPDVIGWTREGDSTKAKSGLATVITDGPGGSKRMYVGTSNAGEIWYDLTGNRTDKITIGSDGYATFPVNGGSVSVWVQQ

SEQ ID NO: 34656 - protein, 480 aa, Cytophaga sp.
NGTMMQYFEWYVPNDGQQWNRLRTDAPYLSSVGITAVWTPPAYKGTSQADVGYGPYDLYDLGEFNQKGTVRTKYGTKGELKSAVNTLHSNGIQVYGDVVMNHKAGADYTENVTAVEVNPSNRNQETSGEYNIQAWTGFNFPGRGTTYSNFKWQWFHFDGTDWDQSRSLSRIFKFTGKAWDWEVSSENGNYDYLMYADIDYDHPDVVNEMKKWGVWYANEVGLDGYRLDAVKHIKFSFLKDWVDNARAATGKEMFTVGEYWQNDLGALNNYLAKVNYNQSLFDAPLHYNFYAASTGGGYYDMRNILDNTLVASNPTKAVTLVENHDTQPGQSLESTVQPWFKPLAYAFILTRSGGYPSVFYGDMYGTKGTTTREIPALKSKIEPLLKARKDYAYGTQRDYIDNPDVIGWTREGDSTKAKSGLATVITDGPGGSKRMYVGTSNAGEIWYDLTGNRTDKITIGSDGYATFPVNGGSVSVWVQQ

SEQ ID NO: 34657 - protein, 480 aa, Cytophaga sp.
NGTMMQYFEWYVPNDGQQWNRLRTDAPYLSSVGITAVWTPPAYKGTSQADVGYGPYDLYDLGEFNQKGTVRTKYGTKGELKSAVNTLHSNGIQVYGDVVMNHKAGADYTENVTAVEVNPSNRNQETSGEYNIQAWTGFNFPGRGTTYSNFKWQWFHFDGTDWDQSRSLSRIFKFTGKAWDWEVSSENGNYDYLMYADIDYDHPDVVNEMKKWGVWYANEVGLDGYRLDAVKHIKFSFLKDWVDNARAATGKEMFTVAEYWQNDLGALNNYLAKVNYNQSLFDAPLHYNFYAASTGGGYYDMRNILNNTLVASNPTKAVTLVENHDTQPGQSLESTVQPWFKPLAYAFILTRSGGYPSVFYGDMYGTKGTTTREIPALKSKIEPLLKARKDYAYGTQRDYIDNPDVIGWTREGDSTKAKSGLATVITDGPGGSKRMYVGTSNAGEIWYDLTGNRTDKITIGSDGYATFPVNGGSVSVWVQQ

SEQ ID NO: 34658 - protein, 480 aa, Cytophaga sp.
NGTMMQYFEWYVPNDGQQWNRLRTDAPYLSSVGITAVWTPPAYKGTSQADVGYGPYDLYDLGEFNQKGTVRTKYGTKGELKSAVNTLHSNGIQVYGDVVMNHKAGADYTENVTAVEVNPSNRNQETSGEYQIQAWTGFNFPGRGTTYSNFKWQWFHFDGTDWDQSRSLSRIFKFTGKAWDWEVSSENGNYDYLMYADIDYDHPDVVNEMKKWGVWYANEVGLDGYRLDAVKHIKFSFLKDWVDNARAATGKEMFTVGEYWQNDLGALNNYLAKVNYNQSLFDAPLHYNFYAASTGGGYYDMRNILNNTLVASNPTKAVTLVENHDTQPGQSLESTVQPWFKPLAYAFILTRSGGYPSVFYGDMYGTKGTTTREIPALKSKIEPLLKARKDYAYGTQRDYIDNPDVIGWTREGDSTKAKSGLATVITDGPGGSKRMYVGTSNAGEIWYDLTGNRTDKITIGSDGYATFPVNGGSVSVWVQQ

SEQ ID NO: 34659 - protein, 480 aa, Cytophaga sp.
NGTMMQYFEWYVPNDGQQWNRLRTDAPYLSSVGITAVWTPPAYKGTSQADVGYGPYDLYDLGEFNQKGTVRTKYGTKGELKSAVNTLHSNGIQVYGDVVMNHKAGADYTENVTAVEVNPSNRNQETSGEYNIQAWTGFNFPGRGTTYSNFKWQWFHFDGTDWDQSRSLSRIFKFTGKAWDWEVSSENGNYDYLMYADIDYDHPDVVNEMKKWGVWYANEVGLDGYRLDAVKHIKFSFLKDWVDNARAATGKEMFTVGEYWQNDLGALNNYLAKVNYNQSLFDAPLHYNFYAASTGGGYYDMRNILNNTLVSSNPTKAVTLVENHDTQPGQSLESTVQPWFKPLAYAFILTRSGGYPSVFYGDMYGTKGTTTREIPALKSKIEPLLKARKDYAYGTQRDYIDNPDVIGWTREGDSTKAKSGLATVITDGPGGSKRMYVGTSNAGEIWYDLTGNRTDKITIGSDGYATFPVNGGSVSVWVQQ

SEQ ID NO: 34660 - protein, 480 aa, Cytophaga sp.
NGTMMQYFEWYVPNDGQQWNRLRTDAPYLSSVGITAVWTPPAYKGTSQADVGYGPYDLYDLGEFNQKGTVRTKYGTKGELKSAVNTLHSNGIQVYGDVVMNHKAGADYTENVTAVEVNPSNRNQETSGEYNIQAWTGFNFPGRGTTYSNFKWQWFHFDGTDWDQSRSLSRIFKFTGKAWDWEVSSENGNYDYLMYADIDYDHPDVVNEMKKWGVWYANEVGLDGYRLDAVKHIKFSFLKDWVDNARAATGKEMFTVGEYWQNDLGALNNYLAKVNYNQSLFDAPLHYNFYAASTGGGYYDMRNILNNTLVASNPTKAVTLVENHDTQPGQSLESTVQPWFKPLAYAFILTRSGGYPSVFYGDMYGTKGTTTREIPALKSKIEPLLKARKDYAYGTQRDYIDNPDVIGWTREGDSTKAKSGLATVITDGPGGSKRMYVGTSNAGETWYDLTGNRTDKITIGSDGYATFPVNGGSVSVWVQQ

SEQ ID NO: 34661 - protein, 480 aa, Cytophaga sp.
NGTMMQYFEWYVPNDGQQWNRLRTDAPYLSSVGITAVWTPPAYKGTSQADNGYGPYDLYDLGEFNQKGTVRTKYGTKGELKSAVNTLHSNGIQVYGDVVMNHKAGADYTENVTAVEVNPSNRNQETSGEYNIQAWTGFNFPGRGTTYSNFKWQWFHFDGTDWDQSRSLSRIFKFTGKAWDWEVSSENGNYDYLMYADIDYDHPDVVNEMKKWGVWYANEVGLDGYRLDAVKHIKFSFLKDWVDNARAATGKEMFTVGEYWQNDLGALNNYLAKVNYNQSLFDAPLHYNFYAASTGGGYYDMRNILNNTLVASNPTKAVTLVENHDTQPGQSLESTVQPWFKPLAYAFILTRSGGYPSVFYGDMYGTKGTTTREIPALKSKIEPLLKARKDYAYGTQRDYIDNPDVIGWTREGDSTKAKSGLATVITDGPGGSKRMYVGTSNAGEIWYDLTGNRTDKITIGSDGYATFPVNGGSVSVWVQQ

SEQ ID NO: 34662 - protein, 480 aa, Cytophaga sp.
NGTMMQYFEWYVPNDGQQWNRLRTDAPYLSSVGITAVWTPPAYKGTSQADVGYGPYDLYDLGEFNQKGTVRTKYGTKGELKSAVNTLHSNGIQVYGDVVMNHKAGADYTENVTAVEVNPSNRNQETSGEYNIQAWTGFNFPGRGTTYSNFKWQWFHFDGTDWDQSRSLSRIFKFTGKAWDWEVSSENGNYDYLMYADIDYDHPDVVNEMKKWGVWYANEVGLDGYRLDAVKHIKFSFLKDWVDNARAATGKEMFTVGEYWQNDLGALNNYLAKVNYNQSLFDAPLHYNFYAASTGGGYYDMRNILNNTLVASNPTKAVTLVENHDTQPGQSLESTVQPWFKPLAYAFILTRSSGYPSVFYGDMYGTKGTTTREIPALKSKIEPLLKARKDYAYGTQRDYIDNPDVIGWTREGDSTKAKSGLATVITDGPGGSKRMYVGTSNAGEIWYDLTGNRTDKITIGSDGYATFPVNGGSVSVWVQQ

SEQ ID NO: 34663 - protein, 480 aa, Cytophaga sp.
NGTMMQYFEWYTPNDGQQWNRLRTDAPYLSSVGITAVWTPPAYKGTSQADVGYGPYDLYDLGEFNQKGTVRTKYGTKGELKSAVNTLHSNGIQVYGDVVMNHKAGADYTENVTAVEVNPSNRNQETSGEYNIQAWTGFNFPGRGTTYSNFKWQWFHFDGTDWDQSRSLSRIFKFTGKAWDWEVSSENGNYDYLMYADIDYDHPDVVNEMKKWGVWYANEVGLDGYRLDAVKHIKFSFLKDWVDNARAATGKEMFTVGEYWQNDLGALNNYLAKVNYNQSLFDAPLHYNFYAASTGGGYYDMRNILNNTLVASNPTKAVTLVENHDTQPGQSLESTVQPWFKPLAYAFILTRSGGYPSVFYGDMYGTKGTTTREIPALKSKIEPLLKARKDYAYGTQRDYIDNPDVIGWTREGDSTKAKSGLATVITDGPGGSKRMYVGTSNAGEIWYDLTGNRTDKITIGSDGYATFPVNGGSVSVWVQQ

SEQ ID NO: 34664 - protein, 480 aa, Cytophaga sp.
NGTMMQYFEWYVPNDGQQWNRLRTDAPYLSSVGITAVWTPPAYKGTSQADVGYGPYDLYDLGEFNQKGTVRTKYGTKGELKSAVNTLHSNGIQVYGDVVMNHKAGADYTENVTAVEVNPSNRNQETSGEYNIQAWTGFNFPGRGTTYSNFKWQWFHFDGTDWDQSRSLSRIFKFTGKAWDWEVSSENGNYDYLMYADIDYDHPDVVNEMKKWGVWYANEVGLDGYRLDAVKHIKFSFLKDWVDNARAATGKEMFTVGEYWQNDLGALNNYLAKVNYNQSLFDAPLHYNFQAASTGGGYYDMRNILNNTLVASNPTKAVTLVENHDTQPGQSLESTVQPWFKPLAYAFILTRSGGYPSVFYGDMYGTKGTTTREIPALKSKIEPLLKARKDYAYGTQRDYIDNPDVIGWTREGDSTKAKSGLATVITDGPGGSKRMYVGTSNAGEIWYDLTGNRTDKITIGSDGYATFPVNGGSVSVWVQQ

SEQ ID NO: 34665 - protein, 480 aa, Cytophaga sp.
NGTMMQYFEWYVPNDGQQWNRLRTDAPYLSSVGITAVWTPPAYKGTSQADVGYGPYDLYDLGEFNQKGTVRTKYGTKGELKDAVNTLHSNGIQVYGDVVMNHKAGADYTENVTAVEVNPSNRNQETSGEYNIQAWTGFNFPGRGTTYSNFKWQWFHFDGTDWDQSRSLSRIFKFTGKAWDWEVSSENGNYDYLMYADIDYDHPDVVNEMKKWGVWYANEVGLDGYRLDAVKHIKFSFLKDWVDNARAATGKEMFTVGEYWQNDLGALNNYLAKVNYNQSLFDAPLHYNFYAASTGGGYYDMRNILNNTLVASNPTKAVTLVENHDTQPGQSLESTVQPWFKPLAYAFILTRSGGYPSVFYGDMYGTKGTTTREIPALKSKIEPLLKARKDYAYGTQRDYIDNPDVIGWTREGDSTKAKSGLATVITDGPGGSKRMYVGTSNAGEIWYDLTGNRTDKITIGSDGYATFPVNGGSVSVWVQQ

SEQ ID NO: 34666 - protein, 480 aa, Cytophaga sp.
NGTMMQYFEWYVPNDGQQWNRLRTDAPYLSSVGITAVWTPPAYKGTSQADVGYGPYDLYDLGEFNQKGTVRTKYGTKGELKSAVNTLHSNGIQVYGDVVMNHKAGADYTENVTAVEVNPSNRNQETSGEYNIQAWTGFNFPGRGTTYSNFKWQWFHFDGTDWDQSRSLSRIFKFTGKAWDWEVSSENGNYDYLMYADIDYDHPDVVNEMKKWGVWYANEVGLDGYRLDAVKHIKFSFLKDWVDNARAATGKEMFTVGEYWQNDLGALNNYLAKVNYNQSLFDAPLHYNFYAASTGGGYYDMRNILNNTLVASNPTKAVTLVENHDTQPGQSLESTVQPWFKPLAYAFILTRSGGYPSVFYGDMYGTKGTSTREIPALKSKIEPLLKARKDYAYGTQRDYIDNPDVIGWTREGDSTKAKSGLATVITDGPGGSKRMYVGTSNAGEIWYDLTGNRTDKITIGSDGYATFPVNGGSVSVWVQQ

SEQ ID NO: 34667 - protein, 480 aa, Cytophaga sp.
NGTMMQYFEWYVPNDGQQWNRLRTDAPYLSSVGITAVWTPPAYKGTSQADVGYGPYDLYDLGEFNQKGTVRTKYGTKGELKSAINTLHSNGIQVYGDVVMNHKAGADYTENVTAVEVNPSNRNQETSGEYNIQAWTGFNFPGRGTTYSNFKWQWFHFDGTDWDQSRSLSRIFKFTGKAWDWEVSSENGNYDYLMYADIDYDHPDVVNEMKKWGVWYANEVGLDGYRLDAVKHIKFSFLKDWVDNARAATGKEMFTVGEYWQNDLGALNNYLAKVNYNQSLFDAPLHYNFYAASTGGGYYDMRNILNNTLVASNPTKAVTLVENHDTQPGQSLESTVQPWFKPLAYAFILTRSGGYPSVFYGDMYGTKGTTTREIPALKSKIEPLLKARKDYAYGTQRDYIDNPDVIGWTREGDSTKAKSGLATVITDGPGGSKRMYVGTSNAGEIWYDLTGNRTDKITIGSDGYATFPVNGGSVSVWVQQ

SEQ ID NO: 34668 - protein, 480 aa, Cytophaga sp.
NGTMMQYFEWYVPNDGQQWNRLRTDAPYLSSVGITAVWTPPAYKGTSQADVGYGPYDLYDLGEFNQKGTVRTKYGTKGELKSAVNTLHSNGIQVYGDVVMNHKAGADYTENVTAVEVNPSNRNQETSGEYNIQAWTDFNFPGRGTTYSNFKWQWFHFDGTDWDQSRSLSRIFKFTGKAWDWEVSSENGNYDYLMYADIDYDHPDVVNEMKKWGVWYANEVGLDGYRLDAVKHIKFSFLKDWVDNARAATGKEMFTVGEYWQNDLGALNNYLAKVNYNQSLFDAPLHYNFYAASTGGGYYDMRNILNNTLVASNPTKAVTLVENHDTQPGQSLESTVQPWFKPLAYAFILTRSGGYPSVFYGDMYGTKGTTTREIPALKSKIEPLLKARKDYAYGTQRDYIDNPDVIGWTREGDSTKAKSGLATVITDGPGGSKRMYVGTSNAGEIWYDLTGNRTDKITIGSDGYATFPVNGGSVSVWVQQ

SEQ ID NO: 34669 - protein, 480 aa, Cytophaga sp.
NGTMMQYFEWYVPNDGQQWNRLRTDAPYLSSVGITAVWTPPAYKGTSQADVGYGPYDLYDLGEFNQKGTVRTKYGTKGELKSAVNTLHSNGIQVYGDVVMNHKAGADATENVTAVEVNPSNRNQETSGEYNIQAWTGFNFPGRGTTYSNFKWQWFHFDGTDWDQSRSLSRIFKFTGKAWDWEVSSENGNYDYLMYADIDYDHPDVVNEMKKWGVWYANEVGLDGYRLDAVKHIKFSFLKDWVDNARAATGKEMFTVGEYWQNDLGALNNYLAKVNYNQSLFDAPLHYNFYAASTGGGYYDMRNILNNTLVASNPTKAVTLVENHDTQPGQSLESTVQPWFKPLAYAFILTRSGGYPSVFYGDMYGTKGTTTREIPALKSKIEPLLKARKDYAYGTQRDYIDNPDVIGWTREGDSTKAKSGLATVITDGPGGSKRMYVGTSNAGEIWYDLTGNRTDKITIGSDGYATFPVNGGSVSVWVQQ

SEQ ID NO: 34670 - protein, 480 aa, Cytophaga sp.
NGTMMQYFEWYVPNDGQQWNRLRTDAPYLSSVGITAVWTPPAYKGTSQADVGYGPYDLYDLGEFNQKGTVRTKYGTKGELKSAVNTLHSNGIQVYGDVVMNHKAGADYTENVTAVEVNPSNRNQETSGEYNIQAWTGFNFPGRGTTYSNFKWQWFHFDGTDWDQSRSLSRIFKFTGKAWDWEVSSENGNYDYLMYADIDYDHPDVVNEMKKWGVWYANEVGLDGYRLDAVKHIKFSFLKDWVDNARAATGKEMFTVGEYWQNDLGALNNYLAKVNYNQSLFDAPLHYNFYAASTGGGYYDMRNILNNTLVASNPTKAVTFVENHDTQPGQSLESTVQPWFKPLAYAFILTRSGGYPSVFYGDMYGTKGTTTREIPALKSKIEPLLKARKDYAYGTQRDYIDNPDVIGWTREGDSTKAKSGLATVITDGPGGSKRMYVGTSNAGEIWYDLTGNRTDKITIGSDGYATFPVNGGSVSVWVQQ

SEQ ID NO: 34671 - protein, 480 aa, Cytophaga sp.
NGTMMQYFEWYVPNDGQQWNRLRTDAPYLSSVGITAVWTPPAYKGTSQSDVGYGPYDLYDLGEFNQKGTVRTKYGTKGELKSAVNTLHSNGIQVYGDVVMNHKAGADYTENVTAVEVNPSNRNQETSGEYNIQAWTGFNFPGRGTTYSNFKWQWFHFDGTDWDQSRSLSRIFKFTGKAWDWEVSSENGNYDYLMYADIDYDHPDVVNEMKKWGVWYANEVGLDGYRLDAVKHIKFSFLKDWVDNARAATGKEMFTVGEYWQNDLGALNNYLAKVNYNQSLFDAPLHYNFYAASTGGGYYDMRNILNNTLVASNPTKAVTLVENHDTQPGQSLESTVQPWFKPLAYAFILTRSGGYPSVFYGDMYGTKGTTTREIPALKSKIEPLLKARKDYAYGTQRDYIDNPDVIGWTREGDSTKAKSGLATVITDGPGGSKRMYVGTSNAGEIWYDLTGNRTDKITIGSDGYATFPVNGGSVSVWVQQ

SEQ ID NO: 34672 - protein, 480 aa, Cytophaga sp.
NGTMMQYFEWYVPNDGQQWNRLRTDAPYLSSVGITAVWTPPAYKGTSQADVGYGPYDLYDLGEFNQKGTVRTKYGTKGELKSAVNTLHSNGIQVYGDVVMNHKAGADYTENVTAVEVNPSNRNQETSGEYNIQAWTGFNFPGRGTTYSNFKWQWFHFDGTDWDQSRSLSRIFKFTGKAWDWEVSSENGNYDYLMYADIDYDHPDVVNEMKKWGVWYANEVGLDGYRLDAVKHIKFSFLKDWVDNARAATGKEMFTVGEYWQNDLGALNNYLAKVNYNQSLFDAPLHYNFYAASTGGGYYDMRNILNNTLVASHPTKAVTLVENHDTQPGQSLESTVQPWFKPLAYAFILTRSGGYPSVFYGDMYGTKGTTTREIPALKSKIEPLLKARKDYAYGTQRDYIDNPDVIGWTREGDSTKAKSGLATVITDGPGGSKRMYVGTSNAGEIWYDLTGNRTDKITIGSDGYATFPVNGGSVSVWVQQ

SEQ ID NO: 34673 - protein, 478 aa, Synthetic construct
NGTMMQYFEWYLPNDGNHWNRLNSDASNLKSKGITAVWIPPAWKGASQNDVGYGAYDLYDLGEFNQKGTVRTKYGTRSQLQAAVTSLKNNGIQVYGDVVMNHKGGADATEMVRAVEVNPNNRNQEVTGEYTIEAWTRFDFPGRGNTHSSFKWRWYHFDGVDWDQSRRLNNRIYKFRGKAWDWEVDTENGNYDYLMYADIDMDHPEVVNELRNWGVWYTNTLGLDGFRIDAVKHIKYSFTRDWINHVRSATGKNMFAVAEFWKNDLGAIENYLQKTNWNHSVFDVPLHYNLYNASKSGGNYDMRNIFNGTVVQRHPSHAVTFVDNHDSQPEEALESFVEEWFKPLAYALTLTREQGYPSVFYGDYYGIPTHGVPAMRSKIDPILEARQKYAYGPQHDYIDHPDVIGWTREGDSSAAKSGLAALITDGPGGSKRMYAGLKNAGETWYDITGNRSDTVKIGSDGWGEFHVNDGSVSIYVQK

SEQ ID NO: 34674 - protein, 480 aa, unidentified
NGTIMQYFEWNVPNDGQHWNRLHNNAQNLKNAGITAIWIPPAWKGTSQNDVGYGAYDLYDLGEFNQKGTVRTKYGTKAELERAIRSLKANGIQVYGDVVMNHKGGADFTERVQAVEVNPQNRNQEVSGTYQIEAWTGFNFPGRGNQHSSFKWRWYHFDGTDWDQSRQLANRIYKFRGDGKAWDWEVDTENGNYDYLMYADVDMDHPEVINELNRWGVWYANTLNLDGFRLDAVKHIKFSFMRDWLGHVRGQTGKNLFAVAEYWKNDLGALENYLSKTNWTMSAFDVPLHYNLYQASNSSGNYDMRNLLNGTLVQRHPSHAVTFVDNHDTQPGEALESFVQGWFKPLAYATILTREQGYPQVFYGDYYGIPSDGVPSYRQQIDPLLKARQQYAYGPQHDYIDHPDVIGWTREGDSSAAKSGLAALITDGPGGSKRMYAGLKNAGETWYDITGNRSDTVKIGSDGWGEFHVNDGSVSIYVQK

SEQ ID NO: 34675 - protein, 479 aa, Cytophaga sp.
NGTMMQYFEWYVPNDGQQWNRLRTDAPYLSSVGITAVWTPPAYKGTSQADVGYGPYDLYDLGEFNQKGTVRTKYGTKGELKSAVNTLHSNGIQVYGDVVMNHKAGADYTENVTAVEVNPSNRNQETSGEYNIQAWTGFNFPGRGTTYSNFKWQWFHFDGTDWDQSRSLSRIFKFTGKAWDWEVSSENGNYDYLMYADIDYDHPDVVNEMKKWGVWYANEVGLDGYRLDAVKHIKFSFLKDWVDNARAATGKEMFTVGEYWQNDLGALNNYLAKVNYNQSLFDAPLHYNFYAASTGGGYYDMRNILNNTLVASNPTKAVTLVENHDTQPGQSLESTVQPWFKPLAYAFILTRSGGYPSVFYGDMYGTKGTTTREIPALKSKIEPLLKARKDYAYGTQRDYIDNPDVIGWTREGDSTKAKSGLATVITDGPGGSKRMYVGTSNAGEIWYDLTGNRTDKITIGSDGYATFPVNGGSVSVWVQ

SEQ ID NO: 34676 - protein, 480 aa, Bacillus sp.
NGTIMQYFEWNVPNDGQHWNRLHNNAQNLKNAGITAIWIPPAWKGTSQNDVGYGAYDLYDLGEFNQKGTVRTKYGTKAELERAIRSLKANGIQVYGDVVMNHKGGADFTERVQAVEVNPQNRNQEVSGTYQIEAWTGFNFPGRGNQHSSFKWRWYHFDGTDWDQSRQLANRIYKFRGTGKAWDWEVDTENGNYDYLMYADVDMDHPEVINELNRWGVWYANTLNLDGFRLDAVKHIKFSFMRDWLGHVRGQTGKNLFAVAEYWKNDLGALENYLSKTNWTMSAFDVPLHYNLYQASNSSGNYDMRNLLNGTLVQRHPSHAVTFVDNHDTQPGEALESFVQGWFKPLAYATILTREQGYPQVFYGDYYGIPSDGVPSYRQQIDPLLKARQQYAYGPQHDYIDHPDVIGWTREGDSSAAKSGLAALITDGPGGSKRMYAGLKNAGETWYDITGNRSDTVKIGSDGWGEFHVNDGSVSIYVQK

SEQ ID NO: 34677 - protein, 477 aa, Bacillus sp.
NGTLMQYFEWYLPNDGNHWNRLNSDASNLKSKGITAVWIPPAWKGASQNDVGYGAYDLYDLGEFNQKGTVRTKYGTRSQLQAAVTSLKNNGIQVYGDVVMNHKGGADATEMVRAVEVNPNNRNQEVTGEYTIEAWTRFDFPGRANTHSSFKWRWYHFDGVDWDQSRRLNNRIYKFRTKAWDWEVDTENGNYDYLLYADIDMDHPEVVNELRNWGVWYTNTLGLDGFRIDAVKHIKYSFTRDWINHVRSAGKNMFAVAEFWKNDLGAIENYLQKTNWNHSVFDVPLHFNLYYASKSGGNYDMRNIFNGTVVQRHPSHAVTFVDNHDSQPEESLESFVREWFKPLAYALTLTREQGYPSVFYGDYYGIPTHGVPAMRSKIDPILEARQKYAYGPQHDYIDHPDVIGWTREGDSSAAKSGLAALITDGPGGSKRMYAGLKNAGETWYDITGNRSDTVKIGSDGWGEFHVNDGSVSIYVQK

SEQ ID NO: 34678 - protein, 478 aa, Cytophaga sp.
NGTMMQYFEWYVPNDGQQWNRLRTDAPYLSSVGITAVWTPPAYKGTSQADVGYGPYDLYDLGEFNQKGTVRTKYGTKGELKSAVNTLHSNGIQVYGDVVMNHKAGADYTENVTAVEVNPSNRNQETSGEYNIQAWTGFNFPGRGTTYSNFKWQWFHFDGTDWDQSRSLSRIFKFTGKAWDWEVSSENGNYDYLMYADIDYDHPDVVNEMKKWGVWYANEVGLDGYRLDAVKHIKFSFLKDWVDNARAATGKEMFTVGEYWQNDLGALNNYLAKVNYNQSLFDAPLHYNFYAASTGGGYYDMRNILNNTLVASNPTKAVTLVENHDTQPGQSLESTVQPWFKPLAYAFILTRSGGYPSVFYGDMYGTKGTTTREIPALKSKIEPLLKARKDYAYGTQRDYIDNPDVIGWTREGDSTKAKSGLATVITDGPGGSKRMYVGTSNAGEIWYDLTGNRTDKITIGSDGYATFPVNGGSVSVWV

SEQ ID NO: 34679 - protein, 482 aa, Bacillus sp.
HDGTNGTIMQYFEWNVPNDGQHWNRLHNNAQNLKNAGITAIWIPPAWKGTSQSDTGYGAYDLYDLGEFNQRGTVRTKYGTKAELERAIRSLKANGIQVYGDVVMNHKAGADFTEQVQAVEVNPQNRNQEVSGTYQIEAWTGFNFPGRGNQHSSFKWRWYHFDGTDFDQSRRVSNRIYKFRGKAWDWEVDTEFGNYDYLMYADLDMDHPEVINELNRWGVWYANTLNLDGFRLDAVKHIKFSFMRDWLGHVRGQTGKNLFAVGEYWKNDLGALENYLSKTNWTMSAFDVPLHYNLYQASNSSGNYDMRNLLNGTLVQRHPSHAVTFVDNHDTQPGEALESFVQGWFKPLAYATILTREQGYPQVFYGDYYGIPSDGVPSYRQQIDPLLKARQQYAYGPQHDYLDHPDVIGWTREGDSSHPKSGLATLITDGPGGSKRMYAGLKNAGETWYDITGNRSDTVKIGSDGWGEFHVNDGSVSIYVQK

SEQ ID NO: 34680 - protein, 482 aa, Bacillus sp.
HDGTNGTIMQYFEWNVPNDGQHWNRLHNNAQNLKNAGITAIWIPPAWKGTSQSDTGYGAYDLYDLGEFNQRGTVRTKYGTKAELERAIRSLKANGIQVYGDVVMNHKAGADFTERVQAVEVNPQNRNQEVSGEYQIEAWTGFNFPGRGNQHSSFKWRWYHFDGTDFDQSRNLSNRIYKFRGKAWDWEVDTEFGNYDYLMYADLDMDHPEVINELNRWGVWYANTLNLDGFRLDAVKHIKFSFMRDWLGHVRAQTGKNLFAVGEYWKNDLGALENYLSKTNWTMSAFDVPLHYNLYQASNSSGNYDMRNLLNGTLVQRHPSHAVTFVDNHDTQPGEALESFVQGWFKPLAYATILTREQGYPQVFYGDYYGIPSDGVPSYRQQIDPLLKARQQYAYGPQHDYLDHPDVIGWTREGDSSHPKSGLATLITDGPGGSKRMYAGLKNAGETWYDITGNRSDTVKIGSDGWGEFHVNDGSVSIYVQK

SEQ ID NO: 34681 - protein, 482 aa, Bacillus sp.
HDGTNGTIMQYFEWNVPNDGQHWNRLHNNAQNLKNAGITAIWIPPAWKGTSQSDTGYGAYDLYDLGEFNQRGTVRTKYGTKAELERAIRSLKANGIQVYGDVVMNHKAGADQTEHVQAVEVNPQNRNQEVSGTYQIEAWTGFNFPGRGNQHSSFKWRWYHFDGTDFDQSRGVSNRIYKFRTKAWDWEVDTEFGNYDYLMYADLDMDHPEVINELNRWGVWYANTLNLDGFRLDAVKHIKFSFMRDWLGHVRGQTGKNLFAVAEYWKNDLGALENYLSKTNWTMSAFDVPLHYNLYQASNSSGNYDMRNLLNGTLVQRHPSHAVTFVDNHDTQPGEALESFVQGWFKPLAYATILTREQGYPQVFYGDYYGIPSDGVPSYRQQIDPLLKARQQYAYGPQHDYLDHPDVIGWTREGDSSHPKSGLATLITDGPGGSKRMYAGLKNAGETWYDITGNRSDTVKIGSDGWGEFHVNDGSVSIYVQK

SEQ ID NO: 34682 - protein, 482 aa, Bacillus sp.
HDGTNGTIMQYFEWNVPNDGQHWNRLHNNAQNLKNAGITAIWIPPAWKGTSQSDTGYGAYDLYDLGEFNQRGTVRTKYGTKAELERAIRSLKANGIQVYGDVVMNHKAGADQTEQVQAVEVNPQNRNQEVSGTYQIEAWTGFNFPGRGNQHSSFKWRWYHFDGTDFDQSRGLSNRIYKFRTKAWDWEVDTEFGNYDYLMYADLDMDHPEVINELNRWGVWYANTLNLDGFRLDAVKHIKFSFMRDWLGHVRGQTGKNLFAVAEYWKNDLGALENYLSKTNWTMSAFDVPLHYNLYQASNSSGNYDMRNLLNGTLVQRHPSHAVTFVDNHDTQPGEALESFVQGWFKPLAYATILTREQGYPQVFYGDYYGIPSDGVPSYRQQIDPLLKARQQYAYGPQHDYLDHPDVIGWTREGDSSHPKSGLATLITDGPGGSKRMYAGLKNAGETWYDITGNRSDTVKIGSDGWGEFHVNDGSVSIYVQK

SEQ ID NO: 34683 - protein, 482 aa, Bacillus sp.
HDGTNGTIMQYFEWNVPNDGQHWNRLHNNAQNLKNAGITAIWIPPAWKGTSQSDTGYGAYDLYDLGEFNQKGTVRTKYGTKAELERAIRSLKANGIQVYGDVVMNHKAGADFTERVQAVEVNPQNRNQEVSGTYQIEAWTGFNFPGRGNQHSSFKWRWYHFDGTDWDQSRQLSNRIYKFRGKAWDWEVDTEFGNYDYLMYADLDMDHPEVINELNRWGVWYANTLNLDGFRLDAVKHIKFSFMRDWLGHVRGQTGKNLFAVAEYWKNDLGALENYLSKTNWTMSAFDVPLHYNLYQASNSSGNYDMRNLLNGTLVQRHPSHAVTFVDNHDTQPGEALESFVQGWFKPLAYATILTREQGYPQVFYGDYYGIPSDGVPSYRQQIDPLLAARQQYAYGTQHDYLDNQDVIGWTREGDSAHAGSGLATVMSDGPGGSKTMYVGTAHAGQVFKDITGNRTDTVTINSAGNGTFPCNKGSVSIWVGQ

SEQ ID NO: 34684 - protein, 482 aa, Cytophaga sp.
NGTMMQYFEWYVPNDGQQWNRLRTDAPYLSSVGITAVWTPPAYKGTSQADVGYGPYDLYDLGEFNQKGTVRTKYGTKGELKSAVNTLHSNGIQVYGDVVMNHKAGADYTENVTAVEVNPSNRNQETSGEYNIQAWTGFNFPGRGTTYSNFKWQWFHFDGTDWDQSRSLSRIFKFRGTGKAWDWEVSSENGNYDYLMYADIDYDHPDVVNEMKKWGVWYANEVGLDGYRLDAVKHIKFSFLKDWVDNARAATGKEMFTVGEYWQNDLGALNNYLAKVNYNQSLFDAPLHYNFYAASTGGGYYDMRNILNNTLVASAPTKAVTLVENHDTQPGQSLESTVQPWFKPLAYAFILTRSGGYPSVFYGDMYGTKGTTTREIPALKSKIEPLLKARKDYAYGTQRDYIDNPDVIGWTREGDSTKAKSGLATVITDGPGGSKRMYVGTSNAGEIWYDLTGNRTDKITIGSDGYATFPVNGGSVSVWVQQ

SEQ ID NO: 34685 - protein, 482 aa, Cytophaga sp.
NGTMMQYFEWYVPNDGQQWNRLRTDAPYLSSVGITAVWTPPAYKGTSQADVGYGPYDLYDLGEFNQKGTVRTKYGTKGELKSAVNTLHSNGIQVYGDVVMNHKAGADYTENVTAVEVNPSNRNQETSGEYNIQAWTGFNFPGRGTTYSNFKWQWFHFDGTDWDQSRSLSRIFKFRGTGKAWDWEVSSENGNYDYLMYADIDYDHPDVVNEMKKWGVWYANEVGLDGYRLDAVKHIKFSFLKDWVDNARAATGKEMFTVGEYWQNDLGALNNYLAKVNYNQSLFDAPLHYNFYAASTGGGYYDMRNILNNTLVASNPHKAVTLVENHDTQPGQSLESTVQPWFKPLAYAFILTRSGGYPSVFYGDMYGTKGTTTREIPALKSKIEPLLKARKDYAYGTQRDYIDNPDVIGWTREGDSTKAKSGLATVITDGPGGSKRMYVGTSNAGEIWYDLTGNRTDKITIGSDGYATFPVNGGSVSVWVQQ

SEQ ID NO: 34686 - protein, 482 aa, Cytophaga sp.
NGTMMQYFEWYVPNDGQQWNRLRTDAPYLSSVGITAVWTPPAYKGTSQADVGYGPYDLYDLGEFNQKGTVRTKYGTKGELKSAVHTLHSNGIQVYGDVVMNHKAGADYTENVTAVEVNPSNRNQETSGEYNIQAWTGFNFPGRGTTYSNFKWQWFHFDGTDWDQSRSLSRIFKFRGTGKAWDWEVSSENGNYDYLMYADIDYDHPDVVNEMKKWGVWYANEVGLDGYRLDAVKHIKFSFLKDWVDNARAATGKEMFTVGEYWQNDLGALNNYLAKVNYNQSLFDAPLHYNFYAASTGGGYYDMRNILNNTLVASNPTKAVTLVENHDTQPGQSLESTVQPWFKPLAYAFILTRSGGYPSVFYGDMYGTKGTTTREIPALKSKIEPLLKARKDYAYGTQRDYIDNPDVIGWTREGDSTKAKSGLATVITDGPGGSKRMYVGTSNAGEIWYDLTGNRTDKITIGSDGYATFPVNGGSVSVWVQQ

SEQ ID NO: 34687 - protein, 482 aa, Cytophaga sp.
NGTMMQYFEWYVPNDGQQWNRLRTDAPYLSSVGITAVWTPPAYKGTSQADVGYGPYDLYDLGEFNQKGTVRTKYGTKGELKSAVNTLHSNGIQVYGDVVMNHKAGADYTENVTAVEVNPSNRNQETSGEYNIQAWTGFNFPGRGTTYSNFKWQWFHFDGTDWDQSRSLSRIFKFRGTGKAWDWEVSSENGNYDYLMYADIDYDHPDVVNEMKKWGVWYANEVGLDGYRLDAVKHIKFSFLKDWVDNARAATGKEMFTVGEYWQNDLGALNNYLAKVNYNQSLFDAPLHYNFYAASTGGGYYDMRTILNNTLVASNPTKAVTLVENHDTQPGQSLESTVQPWFKPLAYAFILTRSGGYPSVFYGDMYGTKGTTTREIPALKSKIEPLLKARKDYAYGTQRDYIDNPDVIGWTREGDSTKAKSGLATVITDGPGGSKRMYVGTSNAGEIWYDLTGNRTDKITIGSDGYATFPVNGGSVSVWVQQ

SEQ ID NO: 34688 - protein, 482 aa, Cytophaga sp.
NGTMMQYFEWYVPNDGQQWNRLRTDAPYLSSVGITAVWTPPAYKGTSQADVGYGPYDLYDLGEFNQKGTVRTKYGTKGELKSAVNTLHSNGIQVYGDVVMNHKAGADYTENVTAVEVNPSNRNQETSGEYNIQAWTGFNFPGRGTTYSNFKWQWFHFDGTDWDQSRSLSRIFKFRGTGKAWDWEVSSENGNYDYLMYADIDYDHPDVVNEMKKWGVWYANEVGLDGYRLDAVKHIKFSFLKDWVDNARAATGKEMFTVGEYWQNDLGALNNYLAKVNYNQSLFDAPLHYNFYAASTGGGYYDMRNILNNTLVASNPDKAVTLVENHDTQPGQSLESTVQPWFKPLAYAFILTRSGGYPSVFYGDMYGTKGTTTREIPALKSKIEPLLKARKDYAYGTQRDYIDNPDVIGWTREGDSTKAKSGLATVITDGPGGSKRMYVGTSNAGEIWYDLTGNRTDKITIGSDGYATFPVNGGSVSVWVQQ

SEQ ID NO: 34689 - protein, 482 aa, Cytophaga sp.
NGTMMQYFEWYVPNDGQQWNRLRTDAPYLSSVGITAVWTPPAYKGTSQADVGYGPYDLYDLGEFNQKGTVRTKYGTKGELKSAVNTLHSNGIQVYGDVVMNHKAGADYTENVTAVEVNPSNRNQETSGEYNIQAWTGFNFPGRGTTYSNFKWQWFHFDGTDWDQSRSLSRIFKFRGTGKAWDWEVSSENGNYDYLMYADIDYDHPDVVNEMKKWGVWYANEVGLDGYRLDAVKHIKFSFLKDWVDNARAATGKEMFTVGEYWQNDLGALNNYLAKVNYNQSLFDAPLHYNFYAASTGGGYYDMRNILNNTLVATNPTKAVTLVENHDTQPGQSLESTVQPWFKPLAYAFILTRSGGYPSVFYGDMYGTKGTTTREIPALKSKIEPLLKARKDYAYGTQRDYIDNPDVIGWTREGDSTKAKSGLATVITDGPGGSKRMYVGTSNAGEIWYDLTGNRTDKITIGSDGYATFPVNGGSVSVWVQQ

SEQ ID NO: 34690 - protein, 482 aa, Cytophaga sp.
NGTMMQYFEWYVPNDGQQWNRLRTDAPYLSSVGITAVWTPPAYKGTSQADVGYGPYDLYDLGEFNQKGTVRTKYGTKGELKSAVNTLHSNGIQVYGDVVMNHKAGADYTENVTAVEVNPSNRNQETSGEYNIQAWTGFNFPGRGTTYSNFKWQWFHFDGTDWDQSRSLSRIFKFRGTGKAWDWEVSSENGNYDYLMYADIDYDHPDVVNEMKKWGVWYANEVGLDGYRLDAVKHIKFSFLKDWVDNARAATGKEMFTVGEYWQNDLGALNNYLAKVNYNQSLFDAPLHYNFYAASTGGGYYDMRNILNNTLVASYPTKAVTLVENHDTQPGQSLESTVQPWFKPLAYAFILTRSGGYPSVFYGDMYGTKGTTTREIPALKSKIEPLLKARKDYAYGTQRDYIDNPDVIGWTREGDSTKAKSGLATVITDGPGGSKRMYVGTSNAGEIWYDLTGNRTDKITIGSDGYATFPVNGGSVSVWVQQ

SEQ ID NO: 34691 - protein, 482 aa, Cytophaga sp.
NGTMMQYFEWYVPNDGQQWNRLRTDAPYLSSVGITAVWTPPAYKGTSQADVGYGPYDLYDLGEFNQKGTVRTKYGTKGELKSAVNTLHSNGIQVYGDVVMNHKAGADYTENVTAVEVNPSNRNQETSGEYNIQAWTGFNFPGRGTTYSNFKWQWFHFDGTDWDQSRSLSRIFKFRGTGKAWDWEVSSENGNYDYLMYADIDYDHPDVVNEMKKWGVWYANEVGLDGYRLDAVKHIKFSFLKDWVDNARAATGKEMFTVGEYWQNDLGALNNYLAKVNYNQSLFDAPLHYNFYAASTGGGYYDMRNILNNTLVASNPCKAVTLVENHDTQPGQSLESTVQPWFKPLAYAFILTRSGGYPSVFYGDMYGTKGTTTREIPALKSKIEPLLKARKDYAYGTQRDYIDNPDVIGWTREGDSTKAKSGLATVITDGPGGSKRMYVGTSNAGEIWYDLTGNRTDKITIGSDGYATFPVNGGSVSVWVQQ

SEQ ID NO: 34692 - protein, 482 aa, Cytophaga sp.
NGTMMQYFEWYVPNDGQQWNRLRTDAPYLSSVGITAVWTPPAYKGTSQADVGYGPYDLYDLGEFNQKGTVRTKYGTKGELKSAVNTLHSNGIQVYGDVVMNHKAGADYTENVTAVEVNPSNRNQETSGEYNIQAWTGFNFPGRGTTYSNFKWQWFHFDGTDWDQSRSLSRIFKFRGTGKAWDWEVSSENGNYDYLMYADIDYDHPDVVNEMKKWGVWYANEVGLDGYRLDAVKHIKFSFLKDWVDNARAATGKEMFTVGEYWQNDLGALNNYLAKVNYNQSLFDAPLHYNFYAASTGGGYYDMRIILNNTLVASNPTKAVTLVENHDTQPGQSLESTVQPWFKPLAYAFILTRSGGYPSVFYGDMYGTKGTTTREIPALKSKIEPLLKARKDYAYGTQRDYIDNPDVIGWTREGDSTKAKSGLATVITDGPGGSKRMYVGTSNAGEIWYDLTGNRTDKITIGSDGYATFPVNGGSVSVWVQQ

SEQ ID NO: 34693 - protein, 482 aa, Cytophaga sp.
NGTMMQYFEWYVPNDGQQWNRLRTDAPYLSSVGITAVWTPPAYKGTSQADVGYGPYDLYDLGEFNQKGTVRTKYGTKGELKSAVNTLHSNGIQVYGDVVMNHKAGADYTENVTAVEVNPSNRNQETSGEYNIQAWTGFNFPGRGTTYSNFKWQWFHFDGTDWDQSRSLSRIFKFRGTGKAWDWEVSSENGNYDYLMYADIDYDHPDVVNEMKKWGVWYANEVGLDGYRLDAVKHIKFSFLKDWVDNARAATGKEMFTVGEYWQNDLGALNNYLAKVNYNQSLFDAPLHYNFYAASTGGGYYDMRNILNNTLVASGPTKAVTLVENHDTQPGQSLESTVQPWFKPLAYAFILTRSGGYPSVFYGDMYGTKGTTTREIPALKSKIEPLLKARKDYAYGTQRDYIDNPDVIGWTREGDSTKAKSGLATVITDGPGGSKRMYVGTSNAGEIWYDLTGNRTDKITIGSDGYATFPVNGGSVSVWVQQ

SEQ ID NO: 34694 - protein, 482 aa, Cytophaga sp.
NGTMMQYFEWYVPNDGQQWNRLRTDAPYLSSVGITAVWTPPAYKGTSQADVGYGPYDLYDLGEFNQKGTVRTKYGTKGELKSAVNTLHSNGIQVYGDVVMNHKAGADYTENVTAVEVNPSNRNQETSGEYNIQAWTGFNFPGRGTTYSNFKWQWFHFDGTDWDQSRSLSRIFKFRGTGKAWDWEVSSENGNYDYLMYADIDYDHPDVVNEMKKWGVWYANEVGLDGYRLDAVKHIKFSFLKDWVDNARAATGKEMFTVGEYWQNDLGALNNYLAKVNYNQSLFDAPLHYNFYAASTGGGYYDMRNILNNTLVAENPTKAVTLVENHDTQPGQSLESTVQPWFKPLAYAFILTRSGGYPSVFYGDMYGTKGTTTREIPALKSKIEPLLKARKDYAYGTQRDYIDNPDVIGWTREGDSTKAKSGLATVITDGPGGSKRMYVGTSNAGEIWYDLTGNRTDKITIGSDGYATFPVNGGSVSVWVQQ

SEQ ID NO: 34695 - protein, 482 aa, Cytophaga sp.
NGTMMQYFEWYVPNDGQQWNRLRTDAPYLSSVGITAVWTPPAYKGTSQADVGYGPYDLYDLGEFNQKGTVRTKYGTKGELKSAVNTLHSNGIQVYGDVVMNHKAGADYTENVTAVEVNPSNRNQETSGEYNIQAWTGFNFPGRGTTYSNFKWQWFHFDGTDWDQSRSLSRIFKFRGTGKAWDWEVSSENGNYDYLMYADIDYDHPDVVNEMKKWGVWYANEVGLDGYRLDAVKHIKFSFLKDWVDNARAATGKEMFTVGEYWQNDLGALNNYLAKVNYNQSLFDAPLHYNFYAASTGGGYYDMRSILNNTLVASNPTKAVTLVENHDTQPGQSLESTVQPWFKPLAYAFILTRSGGYPSVFYGDMYGTKGTTTREIPALKSKIEPLLKARKDYAYGTQRDYIDNPDVIGWTREGDSTKAKSGLATVITDGPGGSKRMYVGTSNAGEIWYDLTGNRTDKITIGSDGYATFPVNGGSVSVWVQQ

SEQ ID NO: 34696 - protein, 482 aa, Bacillus koreensis
NGTMMQYFEWYVPNDGQQWNRLRTDAPYLSSVGITAVWTPPAYKGTSQADVGYGPYDLYDLGEFNQKGTVRTKYGTKAELKSAVNTLHSNGIQVYGDVVMNHKAGADYTENVTAVEVNPSNRNQETSGEYNIQAWTGFNFPGRGTTYSNFKWQWFHFDGTDWDQSRSLSRIFKFRGTGKAWDWEVSSENGNYDYLMYADIDYDHPDVVNEMKKWGVWYANEVGLDGYRLDAVKHIKFSFLKDWVDNARAATGKEMFTVGEYWQNDLGALNNYLAKVNYNQSLFDAPLHYNFYAASTGGGYYDMRNILNNTLVASNPTKAVTLVENHDTQPGQSLESTVQPWFKPLAYAFILTRSGGYPSVFYGDMYGTKGTTTREIPALKSKIEPLLKARKDYAYGTQRDYIDNPDVIGWTREGDSTKAKSGLATVITDGPGGSKRMYVGTSNAGEVWYDLTGNRTDKITIGSDGYATFPVNGGSVSVWVQQ

SEQ ID NO: 34697 - protein, 482 aa, Cytophaga sp.
NGTMMQYFEWYVPNDGQQWNRLRTDAPYLSSVGITAVWTPPAYKGTSQADVGYGPYDLYDLGEFNQKGTVRTKYGTKGELKSAVNTLHSNGIQVYGDVVMNHKAGADYTENVTAVEVNPSNRNQETSGEYNIQAWTGFNFPGRGTTYSNFKWQWFHFDGTDWDQSRSLSRIFKFRGTGKAWDWEVSSENGNYDYLMYADIDYDHPDVVNEMKKWGVWYANEVGLDGYRLDAVKHIKFSFLKDWVDNARAATGKEMFTVGEYWQNDLGALNNYLAKVNYNQSLFDAPLHYNFYAASTGGGYYDMRNILNNTLVASFPTKAVTLVENHDTQPGQSLESTVQPWFKPLAYAFILTRSGGYPSVFYGDMYGTKGTTTREIPALKSKIEPLLKARKDYAYGTQRDYIDNPDVIGWTREGDSTKAKSGLATVITDGPGGSKRMYVGTSNAGEIWYDLTGNRTDKITIGSDGYATFPVNGGSVSVWVQQ

SEQ ID NO: 34698 - protein, 482 aa, Cytophaga sp.
NGTMMQYFEWYVPNDGQQWNRLRTDAPYLSSVGITAVWTPPAYKGTSQADVGYGPYDLYDLGEFNQKGTVRTKYGTKGELKSAVNTLHSNGIQVYGDVVMNHKAGADYTENVTAVEVNPSNRNQETSGEYNIQAWTGFNFPGRGTTYSNFKWQWFHFDGTDWDQSRSLSRIFKFRGTGKAWDWEVSSENGNYDYLMYADIDYDHPDVVNEMKKWGVWYANEVGLDGYRLDAVKHIKFSFLKDWVDNARDATGKEMFTVGEYWQNDLGALNNYLAKVNYNQSLFDAPLHYNFYAASTGGGYYDMRNILNNTLVASNPTKAVTLVENHDTQPGQSLESTVQPWFKPLAYAFILTRSGGYPSVFYGDMYGTKGTTTREIPALKSKIEPLLKARKDYAYGTQRDYIDNPDVIGWTREGDSTKAKSGLATVITDGPGGSKRMYVGTSNAGEIWYDLTGNRTDKITIGSDGYATFPVNGGSVSVWVQQ

SEQ ID NO: 34699 - protein, 482 aa, Cytophaga sp.
NGTMMQYFEWYVPNDGQQWNRLRTDAPYLSSVGITAVWTPPAYKGTSQADVGYGPYDLYDLGEFNQKGTVRTKYGTKGELKSAVNTLHSNGIQVYGDVVMNHKAGADYTENVTAVEVNPSNRNQETSGEYNIQAWTGFNFPGRGTTYSNFKWQWFHFDGTDWDQSRSLSRIFKFRGTGKAWDWEVSSENGNYDYLMYADIDYDHPDVVNEMKKWGVWYANEVGLDGYRLDAVKHIKFSFLKDWVDNARAATGKEMFTVGEYWQNDLGALNNYLAKVNYNQSLFDAPLHYNFYAASTGGGYYDMRNILNNTLVASNPTKAVTLVENHDTQPGQSLESTVQPWFKPLAYAFILTRSGGYPSVFYGDMYGTKGTTTREIPALKSKIEPLLKARKDYAYGTQRDYIDNPDVIGWTREGDSTKAKSGLATVITDGPGGSKRMYVGTSNAGEIWYDLTGNRTDKITIGSDGYATFPVNGGSVSVWVQQ

SEQ ID NO: 34700 - protein, 482 aa, Cytophaga sp.
NGTMMQYFEWYVPNDGQQWNRLRTDAPYLSSVGITAVWTPPAYKGTSQADVGYGPYDLYDLGEFNQKGTVRTKYGTKGELKSAVNTLHSNGIQVYGDVVMNHKAGADYTENVTAVEVNPSNRNQETSGEYNIQAWTGFNFPGRGTTYSNFKWQWFHFDGTDWDQSRSLSRIFKFRGTGKAWDWEVSSENGNYDYLMYADIDYDHPDVVNEMKKWGVWYANEVGLDGYRLDAVKHIKFSFLKDWVDNARAATGKEMFTVGEYWQNDLGALNNYLAKVNYNQSLFDAPLHYNFYAASTGGGYYDMRNILNNTLVMSNPTKAVTLVENHDTQPGQSLESTVQPWFKPLAYAFILTRSGGYPSVFYGDMYGTKGTTTREIPALKSKIEPLLKARKDYAYGTQRDYIDNPDVIGWTREGDSTKAKSGLATVITDGPGGSKRMYVGTSNAGEIWYDLTGNRTDKITIGSDGYATFPVNGGSVSVWVQQ

SEQ ID NO: 34701 - protein, 482 aa, Cytophaga sp.
NGTMMQYFEWYVPNDGQQWNRLRTDAPYLSSVGITAVWTPPAYKGTSQADVGYGPYDLYDLGEFNQKGTVRTKYGTKGELKSAVNTLHSNGIQVYGDVVMNHKAGADYTENVTAVEVNPSNRNQETSGEYNIQAWTGFNFPGRGTTYSNFKWQWFHFDGTDWDQSRSLSRIFKFRGTGKAWDWEVSSENGNYDYLMYADIDYDHPDVVNEMKKWGVWYANEVGLDGYRLDAVKHIKFSFLKDWVDNARAATGKEMFTVGEYWQNDLGALNNYLAKVNYNQSLFDAPLHYNFYAASTGGGYYDMRNILNNTLVASQPTKAVTLVENHDTQPGQSLESTVQPWFKPLAYAFILTRSGGYPSVFYGDMYGTKGTTTREIPALKSKIEPLLKARKDYAYGTQRDYIDNPDVIGWTREGDSTKAKSGLATVITDGPGGSKRMYVGTSNAGEIWYDLTGNRTDKITIGSDGYATFPVNGGSVSVWVQQ

SEQ ID NO: 34702 - protein, 482 aa, Cytophaga sp.
NGTMMQYFEWYVPNDGQQWNRLRTDAPYLSSVGITAVWTPPAYKGTSQADVGYGPYDLYDLGEFNQKGTVRTKYGTKGELKSAVNTLHSNGIQVYGDVVMNHKAGADYTENVTAVEVNPSNRNQETSGEYNIQAWTGFNFPGRGTTYSNFKWQWFHFDGTDWDQSRSLSRIFKFRGTGKAWDWEVSSENGNYDYLMYADIDYDHPDVVNEMKKWGVWYANEVGLDGYRLDAVKHIKFSFLKDWVDNARAATGKEMFTVGEYWQNDLGALNNYLAKVNYNQSLFDAPLHYNFYAASTGGGYYDMRNILNNTLVASNPTKAVTLVENHDTQPGQSLESTVQPWFKPLAYAFILTRTGGYPSVFYGDMYGTKGTTTREIPALKSKIEPLLKARKDYAYGTQRDYIDNPDVIGWTREGDSTKAKSGLATVITDGPGGSKRMYVGTSNAGEIWYDLTGNRTDKITIGSDGYATFPVNGGSVSVWVQQ

SEQ ID NO: 34703 - protein, 482 aa, Cytophaga sp.
NGTMMQYFEWYVPNDGQQWNRLRTDAPYLSSVGITAVWTPPAYKGTSQADVGYGPYDLYDLGEFNQKGTVRTKYGTKGELKSAVNTLHSNGIQVYGDVVMNHKAGADYTENVTAVEVNPSNRNQETSGEYNIQAWTGFNFPGRGTTYSNFKWQWFHFDGTDWDQSRSLSRIFKFRGTGKAWDWEVSSENGNYDYLMYADIDYDHPDVVNEMKKWGVWYANEVGLDGYRLDAVKHIKFSFLKDWVDNARAATGKEMFTVGEYWQNDLGALNNYLAKVNYNQSLFDAPLHYNFYAASTGGGYYDMRNILNNTLVASCPTKAVTLVENHDTQPGQSLESTVQPWFKPLAYAFILTRSGGYPSVFYGDMYGTKGTTTREIPALKSKIEPLLKARKDYAYGTQRDYIDNPDVIGWTREGDSTKAKSGLATVITDGPGGSKRMYVGTSNAGEIWYDLTGNRTDKITIGSDGYATFPVNGGSVSVWVQQ

SEQ ID NO: 34704 - protein, 482 aa, Cytophaga sp.
NGTMMQYFEWYVPNDGQQWNRLRTDAPYLSSVGITAVWTPPAYKGTSQADVGYGPYDLYDLGEFNQKGTVRTKYGTKGELKSAVNTLHSNGIQVYGDVVMNHKAGADYTENVTAVEVNPSNRNQETSGEYNIQAWTGFNFPGRGTTYSNFKWQWFHFDGTDWDQSRSLSRIFKFRGTGKAWDWEVSSENGNYDYLMYADIDYDHPDVVNEMKKWGVWYANEVGLDGYRLDAVKHIKFSFLKDWVDNARAATGKEMFTVGEYWQNDLGALNNYLAKVNYNQSLFDAPLHYNFYAASTGGGYYDMRNILNNTLVASNPMKAVTLVENHDTQPGQSLESTVQPWFKPLAYAFILTRSGGYPSVFYGDMYGTKGTTTREIPALKSKIEPLLKARKDYAYGTQRDYIDNPDVIGWTREGDSTKAKSGLATVITDGPGGSKRMYVGTSNAGEIWYDLTGNRTDKITIGSDGYATFPVNGGSVSVWVQQ

SEQ ID NO: 34705 - protein, 482 aa, Cytophaga sp.
NGTMMQYFEWYVPNDGQQWNRLRTDAPYLSSVGITAVWTPPAYKGTSQADVGYGPYDLYDLGEFNQKGTVRTKYGTKGELKSAVNTLHSNGIQVYGDVVMNHKAGADYTENVTAVEVNPSNRNQETSGEYNIQAWTGFNFPGRGTTYSNFKWQWFHFDGTDWDQSRSLSRIFKFRGTGKAWDWEVSSENGNYDYLMYADIDYDHPDVVNEMKKWGVWYANEVGLDGYRLDAVKHIKFSFLKDWVDNARAATGKEMFTVGEYWQNDLGALNNYLAKVNYNQSLFDAPLHYNFYAASTGGGYYDMRNILNNTLVASNPNKAVTLVENHDTQPGQSLESTVQPWFKPLAYAFILTRSGGYPSVFYGDMYGTKGTTTREIPALKSKIEPLLKARKDYAYGTQRDYIDNPDVIGWTREGDSTKAKSGLATVITDGPGGSKRMYVGTSNAGEIWYDLTGNRTDKITIGSDGYATFPVNGGSVSVWVQQ

SEQ ID NO: 34706 - protein, 482 aa, Cytophaga sp.
NGTMMQYFEWYVPNDGQQWNRLRTDAPYLSSVGITAVWTPPAYKGTSQADVGYGPYDLYDLGEFNQKGTVRTKYGTKGELKSAVNTLHSNGIQVYGDVVMNHKAGADYTENVTAVEVNPSNRNQETSGEYNIQAWTGFNFPGRGTTYSNFKWQWFHFDGTDWDQSRSLSRIFKFRGTGKAWDWEVSSENGNYDYLMYADIDYDHPDVVNEMKKWGVWYANEVGLDGYRLDAVKHIKFSFLKDWVDNARAATGKEMFTVGEYWQNDLGALNNYLAKVNYNQSLFDAPLHYNFYAASTGGGYYDMRNILNNTLVASRPTKAVTLVENHDTQPGQSLESTVQPWFKPLAYAFILTRSGGYPSVFYGDMYGTKGTTTREIPALKSKIEPLLKARKDYAYGTQRDYIDNPDVIGWTREGDSTKAKSGLATVITDGPGGSKRMYVGTSNAGEIWYDLTGNRTDKITIGSDGYATFPVNGGSVSVWVQQ

SEQ ID NO: 34707 - protein, 482 aa, Cytophaga sp.
NGTMMQYFEWYVPNDGQQWNRLRTDAPYLSSVGITAVWTPPAYKGTSQADVGYGPYDLYDLGEFNQKGTVRTKYGTKGELKSAVNTLHSNGIQVYGDVVMNHKAGADYTENVTAVEVNPSNRNQETSGEYNIQAWTGFNFPGRGTTYSNFKWQWFHFDGTDWDQSRSLSRIFKFRGTGKAWDWEVSSENGNYDYLMYADIDYDHPDVVNEMKKWGVWYANEVGLDGYRLDAVKHIKFSFLKDWVDNARAATGKEMFTVGEYWQNDLGALNNYLAKVNYNQSLFDAPLHYNFYAASTGGGYYDMRNILNNTLVASMPTKAVTLVENHDTQPGQSLESTVQPWFKPLAYAFILTRSGGYPSVFYGDMYGTKGTTTREIPALKSKIEPLLKARKDYAYGTQRDYIDNPDVIGWTREGDSTKAKSGLATVITDGPGGSKRMYVGTSNAGEIWYDLTGNRTDKITIGSDGYATFPVNGGSVSVWVQQ

SEQ ID NO: 34708 - protein, 482 aa, Cytophaga sp.
NGTMMQYFEWYVPNDGQQWNRLRTDAPYLSSVGITAVWTPPAYKGTSQADVGYGPYDLYDLGEFNQKGTVRTKYGTKGELKSAVNTLHSNGIQVYGDVVMNHKAGADYTENVTAVEVNPSNRNQETSGEYNIQAWTGFNFPGRGTTYSNFKWQWFHFDGTDWDQSRSLSRIFKFRGTGKAWDWEVSSENGNYDYLMYADIDYDHPDVVNEMKKWGVWYANEVGLDGYRLDAVKHIKFSFLKDWVDNARAATGKEMFTVGEYWQNDLGALNNYLAKVNYNQSLFDAPLHYNFYAASTGGGYYDMRNILNNTLVAGNPTKAVTLVENHDTQPGQSLESTVQPWFKPLAYAFILTRSGGYPSVFYGDMYGTKGTTTREIPALKSKIEPLLKARKDYAYGTQRDYIDNPDVIGWTREGDSTKAKSGLATVITDGPGGSKRMYVGTSNAGEIWYDLTGNRTDKITIGSDGYATFPVNGGSVSVWVQQ

SEQ ID NO: 34709 - protein, 482 aa, Cytophaga sp.
NGTMMQYFEWYVPNDGQQWNRLRTDAPYLSSVGITAVWTPPAYKGTSQADVGYGPYDLYDLGEFNQKGTVRTKYGTKGELKSAVNTLHSNGIQVYGDVVMNHKAGADYTENVTAVEVNPSNRNQETSGEYNIQAWTGFNFPGRGTTYSNFKWQWFHFDGTDWDQSRSLSRIFKFRGTGKAWDWEVSSENGNYDYLMYADIDYDHPDVVNEMKKWGVWYANEVGLDGYRLDAVKHIKFSFLKDWVDNARAATGKEMFTVGEYWQNDLGALNNYLAKVNYNQSLFDAPLHYNFYAASTGGGYYDMRNILNNTLVASIPTKAVTLVENHDTQPGQSLESTVQPWFKPLAYAFILTRSGGYPSVFYGDMYGTKGTTTREIPALKSKIEPLLKARKDYAYGTQRDYIDNPDVIGWTREGDSTKAKSGLATVITDGPGGSKRMYVGTSNAGEIWYDLTGNRTDKITIGSDGYATFPVNGGSVSVWVQQ

SEQ ID NO: 34710 - protein, 482 aa, Cytophaga sp.
NGTMMQYFEWYVPNDGQQWNRLRTDAPYLSSVGITAVWTPPAYKGTSQADVGYGPYDLYDLGEFNQKGTVRTKYGTKGELKSAVNTLHSNGIQVYGDVVMNHKAGADYTENVTAVEVNPSNRNQETSGEYNIQAWTGFNFPGRGTTYSNFKWQWFHFDGTDWDQSRSLSRIFKFRGTGKAWDWEVSSENGNYDYLMYADIDYDHPDVVNEMKKWGVWYANEVGLDGYRLDAVKHIKFSFLKDWVDNARAATGKEMFTVGEYWQNDLGALNNYLAKVNYNQSLFDAPLHYNFYAASTGGGYYDMRNILNNTLVASNPAKAVTLVENHDTQPGQSLESTVQPWFKPLAYAFILTRSGGYPSVFYGDMYGTKGTTTREIPALKSKIEPLLKARKDYAYGTQRDYIDNPDVIGWTREGDSTKAKSGLATVITDGPGGSKRMYVGTSNAGEIWYDLTGNRTDKITIGSDGYATFPVNGGSVSVWVQQ

SEQ ID NO: 34711 - protein, 482 aa, Cytophaga sp.
NGTMMQYFEWYVPNDGQQWNRLRTDAPYLSSVGITAVWTPPAYKGTSQADVGYGPYDLYDLGEFNQKGTVRTKYGTKGELKSAVNTLHSNGIQVYGDVVMNHKAGADYTENVTAVEVNPSNRNQETSGEYNIQAWTGFNFPGRGTTYSNFKWQWFHFDGTDWDQSRSLSRIFKFRGTGKAWDWEVSSENGNYDYLMYADIDYDHPDVVNEMKKWGVWYANEVGLDGYRLDAVKHIKFSFLKDWVDNARAATGKEMFTVGEYWQNDLGALNNYLAKVNYNQSLFDAPLHYNFYAASTGGGYYDMRNILNNTLVAANPTKAVTLVENHDTQPGQSLESTVQPWFKPLAYAFILTRSGGYPSVFYGDMYGTKGTTTREIPALKSKIEPLLKARKDYAYGTQRDYIDNPDVIGWTREGDSTKAKSGLATVITDGPGGSKRMYVGTSNAGEIWYDLTGNRTDKITIGSDGYATFPVNGGSVSVWVQQ

SEQ ID NO: 34712 - protein, 482 aa, Cytophaga sp.
NGTMMQYFEWYVPNDGQQWNRLRTDAPYLSSVGITAVWTPPAYKGTSQADVGYGPYDLYDLGEFNQKGTVRTKYGTKGELKSAVNTLHSNGIQVYGDVVMNHKAGADYTENVTAVEVNPSNRNQETSGEYNIQAWTGFNFPGRGTTYSNFKWQWFHFDGTDWDQSRSLSRIFKFRGTGKAWDWEVSSENGNYDYLMYADIDYDHPDVVNEMKKWGVWYANEVGLDGYRLDAVKHIKFSFLKDWVDNARAATGKEMFTVGEYWQNDLGALNNYLAKVNYNQSLFDAPLHYNFYAASTGGGYYDMRNILNNTLVASNPGKAVTLVENHDTQPGQSLESTVQPWFKPLAYAFILTRSGGYPSVFYGDMYGTKGTTTREIPALKSKIEPLLKARKDYAYGTQRDYIDNPDVIGWTREGDSTKAKSGLATVITDGPGGSKRMYVGTSNAGEIWYDLTGNRTDKITIGSDGYATFPVNGGSVSVWVQQ

SEQ ID NO: 34713 - protein, 482 aa, Cytophaga sp.
NGTMMQYFEWYVPNDGQQWNRLRTDAPYLSSVGITAVWTPPAYKGTSQADVGYGPYDLYDLGEFNQKGTVRTKYGTKGELKSAVNTLHSNGIQVYGDVVMNHKAGADYTENVTAVEVNPSNRNQETSGEYNIQAWTGFNFPGRGTTYSNFKWQWFHFDGTDWDQSRSLSRIFKFRGTGKAWDWEVSSENGNYDYLMYADIDYDHPDVVNEMKKWGVWYANEVGLDGYRLDAVKHIKFSFLKDWVDNARAATGKEMFTVGEYWQNDLGALNNYLAKVNYNQSLFDAPLHYNFYAASTGGGYYDMRNILNNTLVASNPTKAVTLVENHDTQPGQSLESTVQPWFKPLAYAFILTRSGGYPSVFYGDMYGTKGTTTREIPALKSKIEPLLKARKDYAYGTQGDYIDNPDVIGWTREGDSTKAKSGLATVITDGPGGSKRMYVGTSNAGEIWYDLTGNRTDKITIGSDGYATFPVNGGSVSVWVQQ

SEQ ID NO: 34714 - protein, 482 aa, Cytophaga sp.
NGTMMQYFEWYVPNDGQQWNRLRTDAPYLSSVGITAVWTPPAYKGTSQADVGYGPYDLYDLGEFNQKGTVRTKYGTKGELKSAVNTLHSNGIQVYGDVVMNHKAGADYTENVTAVEVNPSNRNQETSGEYNIQAWTGFNFPGRGTTYSNFKWQWFHFDGTDWDQSRSLSRIFKFRGTGKAWDWEVSSENGNYDYLMYADIDYDHPDVVNEMKKWGVWYANEVGLDGYRLDAVKHIKFSFLKDWVDNARAATGKEMFTVGEYWQNDLGALNNYLAKVNYNQSLFDAPLHYNFYAASTGGGYYDMRNILNNTLVAKNPTKAVTLVENHDTQPGQSLESTVQPWFKPLAYAFILTRSGGYPSVFYGDMYGTKGTTTREIPALKSKIEPLLKARKDYAYGTQRDYIDNPDVIGWTREGDSTKAKSGLATVITDGPGGSKRMYVGTSNAGEIWYDLTGNRTDKITIGSDGYATFPVNGGSVSVWVQQ

SEQ ID NO: 34715 - protein, 482 aa, Cytophaga sp.
NGTMMQYFEWYVPNDGQQWNRLRTDAPYLSSVGITAVWTPPAYKGTSQADVGYGPYDLYDLGEFNQKGTVRTKYGTKGELKSAVNTLHSNGIQVYGDVVMNHKAGADYTENVTAVEVNPSNRNQETSGEYNIQAWTGFNFPGRGTTYSNFKWQWFHFDGTDWDQSRSLSRIFKFRGTGKAWDWEVSSENGNYDYLMYADIDYDHPDVVNEMKKWGVWYANEVGLDGYRLDAVKHIKFSFLKDWVDNARMATGKEMFTVGEYWQNDLGALNNYLAKVNYNQSLFDAPLHYNFYAASTGGGYYDMRNILNNTLVASNPTKAVTLVENHDTQPGQSLESTVQPWFKPLAYAFILTRSGGYPSVFYGDMYGTKGTTTREIPALKSKIEPLLKARKDYAYGTQRDYIDNPDVIGWTREGDSTKAKSGLATVITDGPGGSKRMYVGTSNAGEIWYDLTGNRTDKITIGSDGYATFPVNGGSVSVWVQQ

SEQ ID NO: 34716 - protein, 482 aa, Cytophaga sp.
NGTMMQYFEWYVPNDGQQWNRLRTDAPYLSSVGITAVWTPPAYKGTSQADVGYGPYDLYDLGEFNQKGTVRTKYGTKGELKSAVNTLHSNGIQVYGDVVMNHKAGADYTENVTAVEVNPSNRNQETSGEYNIQAWTGFNFPGRGTTYSNFKWQWFHFDGTDWDQSRSLSRIFKFRGTGKAWDWEVSSENGNYDYLMYADIDYDHPDVVNEMKKWGVWYANEVGLDGYRLDAVKHIKFSFLKDWVDNARAATGKEMFTVGEYWQNDLGALNNYLAKVNYNQSLFDAPLHYNFYAASTGGGYYDMRNILNNTLVASKPTKAVTLVENHDTQPGQSLESTVQPWFKPLAYAFILTRSGGYPSVFYGDMYGTKGTTTREIPALKSKIEPLLKARKDYAYGTQRDYIDNPDVIGWTREGDSTKAKSGLATVITDGPGGSKRMYVGTSNAGEIWYDLTGNRTDKITIGSDGYATFPVNGGSVSVWVQQ

SEQ ID NO: 34717 - protein, 482 aa, Cytophaga sp.
NGTMMQYFEWYVPNDGQQWNRLRTDAPYLSSVGITAVWTPPAYKGTSQADVGYGPYDLYDLGEFNQKGTVRTKYGTKGELKSAVNTLHSNGIQVYGDVVMNHKAGADYTENVTAVEVNPSNRNQETSGEYNIQAWTGFNFPGRGTTYSNFKWQWFHFDGTDWDQSRSLSRIFKFRGTGKAWDWEVSSENGNYDYLMYADIDYDHPDVVNEMKKWGVWYANEVGLDGYRLDAVKHIKFSFLKDWVDNARAATGKEMFTVGEYWQNDLGALNNYLAKVNYNQSLFDAPLHYNFYAASTGGGYYDMRNILNNTLVASSPTKAVTLVENHDTQPGQSLESTVQPWFKPLAYAFILTRSGGYPSVFYGDMYGTKGTTTREIPALKSKIEPLLKARKDYAYGTQRDYIDNPDVIGWTREGDSTKAKSGLATVITDGPGGSKRMYVGTSNAGEIWYDLTGNRTDKITIGSDGYATFPVNGGSVSVWVQQ

SEQ ID NO: 34718 - protein, 482 aa, Cytophaga sp.
NGTMMQYFEWYVPNDGQQWNRLRTDAPYLSSVGITAVWTPPAYKGTSQADVGYGPYDLYDLGEFNQKGTVRTKYGTKGELKSAVNTLHSNGIQVYGDVVMNHKAGADYTENVTAVEVNPSNRNQETSGEYNIQAWTGFNFPGRGTTYSNFKWQWFHFDGTDWDQSRSLSRIFKFRGTGKAWDWEVSSENGNYDYLMYADTDYDHPDVVNEMKKWGVWYANEVGLDGYRLDAVKHIKFSFLKDWVDNARAATGKEMFTVGEYWQNDLGALNNYLAKVNYNQSLFDAPLHYNFYAASTGGGYYDMRNILNNTLVASNPTKAVTLVENHDTQPGQSLESTVQPWFKPLAYAFILTRSGGYPSVFYGDMYGTKGTTTREIPALKSKIEPLLKARKDYAYGTQRDYIDNPDVIGWTREGDSTKAKSGLATVITDGPGGSKRMYVGTSNAGEIWYDLTGNRTDKITIGSDGYATFPVNGGSVSVWVQQ

SEQ ID NO: 34719 - protein, 482 aa, Cytophaga sp.
NGTMMQYFEWYVPNDGQQWNRLRTDAPYLSSVGITAVWTPPAYKGTSQADVGYGPYDLYDLGEFNQKGTVRTKYGTKGELKSAVNTLHSNGIQVYGDVVMNHKAGADYTENVTAVEVNPSNRNQETSGEYNIQAWTGFNFPGRGTTYSNFKWQWFHFDGTDWDQSRSLSRIFKFRGTGKAWDWEVSSENGNYDYLMYADIDYDHPDVVNEMKKWGVWYANEVGLDGYRLDAVKHIKFSFLKDWVDNARAATGKEMFTVGEYWQNDLGALNNYLAKVNYNQSLFDAPLHYNFYAASTGGGYYDMRNILNNTLVANNPTKAVTLVENHDTQPGQSLESTVQPWFKPLAYAFILTRSGGYPSVFYGDMYGTKGTTTREIPALKSKIEPLLKARKDYAYGTQRDYIDNPDVIGWTREGDSTKAKSGLATVITDGPGGSKRMYVGTSNAGEIWYDLTGNRTDKITIGSDGYATFPVNGGSVSVWVQQ

SEQ ID NO: 34720 - protein, 482 aa, Cytophaga sp.
NGTMMQYFEWYVPNDGQQWNRLRTDAPYLSSVGITAVWTPPAYKGTSQADVGYGPYDLYDLGEFNQKGTVRTKYGTKGELKSAVNTLHSNGIQVYGDVVMNHKAGADYTENVTAVEVNPSNRNQETSGEYNIQAWTGFNFPGRGTTYSNFKWQWFHFDGTDWDQSRSLSRIFKFRGTGKAWDWEVSSENGNYDYLMYADIDYDHPDVVNEMKKWGVWYANEVGLDGYRLDAVKHIKFSFLKDWVDNARAATGKEMFTVGEYWQNDLGALNNYLAKVNYNQSLFDAPLHYNFYAASTGGGYYDMRNILNNTLVASNPTKAVTLVENHDTQPGQSLESTVQPWFKPLAYAFILTRGGGYPSVFYGDMYGTKGTTTREIPALKSKIEPLLKARKDYAYGTQRDYIDNPDVIGWTREGDSTKAKSGLATVITDGPGGSKRMYVGTSNAGEIWYDLTGNRTDKITIGSDGYATFPVNGGSVSVWVQQ

SEQ ID NO: 34721 - protein, 482 aa, Cytophaga sp.
NGTMMQYFEWYVPNDGQQWNRLRTDAPYLSSVGITAVWTPPAYKGTSQADVGYGPYDLYDLGEFNQKGTVRTKYGTKGELKSAVNTLHSNGIQVYGDVVMNHKAGADYTENVTAVEVNPSNRNQETSGEYNIQAWTGFNFPGRGTTYSNFKWQWFHFDGTDWDQSRSLSRIFKFRGTGKAWDWEVSSENGNYDYLMYADYDYDHPDVVNEMKKWGVWYANEVGLDGYRLDAVKHIKFSFLKDWVDNARAATGKEMFTVGEYWQNDLGALNNYLAKVNYNQSLFDAPLHYNFYAASTGGGYYDMRNILNNTLVASNPTKAVTLVENHDTQPGQSLESTVQPWFKPLAYAFILTRSGGYPSVFYGDMYGTKGTTTREIPALKSKIEPLLKARKDYAYGTQRDYIDNPDVIGWTREGDSTKAKSGLATVITDGPGGSKRMYVGTSNAGEIWYDLTGNRTDKITIGSDGYATFPVNGGSVSVWVQQ

SEQ ID NO: 34722 - protein, 482 aa, Cytophaga sp.
NGTMMQYFEWYVPNDGQQWNRLRTDAPYLSSVGITAVWTPPAYKGTSQADVGYGPYDLYDLGEFNQKGTVRTKYGTKGELKSAVNTLHSNGIQVYGDVVMNHKAGADYTENVTAVEVNPSNRNQETSGEYNIQAWTGFNFPGRGTTYSNFKWQWFHFDGTDWDQSRSLSRIFKFRGTGKAWDWEVSSENGNYDYLMYADIDYDHPDVVNEMKKWGVWYANEVGLDGYRLDAVKHIKFSFLKDWVDNARAATGKEMFTVGEYWQNDLGALNNYLAKVNYNQSLFDAPLHYNFYAASTGGGYYDMRNILNNTLVADNPTKAVTLVENHDTQPGQSLESTVQPWFKPLAYAFILTRSGGYPSVFYGDMYGTKGTTTREIPALKSKIEPLLKARKDYAYGTQRDYIDNPDVIGWTREGDSTKAKSGLATVITDGPGGSKRMYVGTSNAGEIWYDLTGNRTDKITIGSDGYATFPVNGGSVSVWVQQ

SEQ ID NO: 34723 - protein, 482 aa, Cytophaga sp.
NGTMMQYFEWYVPNDGQQWNRLRTDAPYLSSVGITAVWTPPAYKGTSQADVGYGPYDLYDLGEFNQKGTVRTKYGTKGELKSAVNTLHSNGIQVYGDVVMNHKAGADYTENVTAVEVNPSNRNQETSGEYNIQAWTGFNFPGRGTTYSNFKWQWFHFDGTDWDQSRSLSRIFKFRGTGKAWDWEVSSENGNYDYLMYADIDYDHPDVVNEMKKWGVWYANEVGLDGYRLDAVKHIKFSFLKDWVDNARAATGKEMFTVGEYWQNDLGALNNYLAKVNYNQSLFDAPLHYNFYAASTGGGYYDMRNILNNTLVASWPTKAVTLVENHDTQPGQSLESTVQPWFKPLAYAFILTRSGGYPSVFYGDMYGTKGTTTREIPALKSKIEPLLKARKDYAYGTQRDYIDNPDVIGWTREGDSTKAKSGLATVITDGPGGSKRMYVGTSNAGEIWYDLTGNRTDKITIGSDGYATFPVNGGSVSVWVQQ

SEQ ID NO: 34724 - protein, 482 aa, Cytophaga sp.
NGTMMQYFEWYVPNDGQQWNRLRTDAPYLSSVGITAVWTPPAYKGTSQADVGYGPYDLYDLGEFNQKGTVRTKYGTKGELKSAVNTLHSNGIQVYGDVVMNHKAGADYTENVTAVEVNPSNRNQETSGEYNIQAWTGFNFPGRGTTYSNFKWQWFHFDGTDWDQSRSLSRIFKFRGTGKAWDWEVSSENGNYDYLMYADIDYDHPDVVNEMKKWGVWYANEVGLDGYRLDAVKHIKFSFLKDWVDNARAATGKEMFTVGEYWQNDLGALNNYLAKVNYNQSLFDAPLHYNFYAASTGGGYYDMRNILNNTLVASNPTKAVTLVENHDTQPGQSLESTVQPWFKPLAYAFILTRKGGYPSVFYGDMYGTKGTTTREIPALKSKIEPLLKARKDYAYGTQRDYIDNPDVIGWTREGDSTKAKSGLATVITDGPGGSKRMYVGTSNAGEIWYDLTGNRTDKITIGSDGYATFPVNGGSVSVWVQQ

SEQ ID NO: 34725 - protein, 482 aa, Cytophaga sp.
NGTMMQYFEWYVPNDGQQWNRLRTDAPYLSSVGITAVWTPPAYKGTSQADVGYGPYDLYDLGEFNQKGTVRTKYGTKGELKSAVNTLHSNGIQVYGDVVMNHKAGADYTENVTAVEVNPSNRNQETSGEYNIQAWTGFNFPGRGTTYSNFKWQWFHFDGTDWDQSRSLSRIFKFRGTGKAWDWEVSSENGNYDYLMYADIDYDHPDVVNEMKKWGVWYANEVGLDGYRLDAVKHIKFSFLKDWVDNARAATGKEMFTVGEYWQNDLGALNNYLAKVNYNQSLFDAPLHYNFYAASTGGGYYDMRNILNNTLVASNPTKAVTLVENHDTQPGQSLESTVQPWFKPLAYAFILTRSGGYPSVFYGDMYGTKGTTTREIPALKSKIEPLLKARKDYAYGTQTDYIDNPDVIGWTREGDSTKAKSGLATVITDGPGGSKRMYVGTSNAGEIWYDLTGNRTDKITIGSDGYATFPVNGGSVSVWVQQ

SEQ ID NO: 34726 - protein, 482 aa, Cytophaga sp.
NGTMMQYFEWYVPNDGQQWNRLRTDAPYLSSVGITAVWTPPAYKGTSQADVGYGPYDLYDLGEFNQKGTVRTKYGTKGELKSAVNTLHSNGIQVYGDVVMNHKAGADYTENVTAVEVNPSNRNQETSGEYNIQAWTGFNFPGRGTTYSNFKWQWFHFDGTDWDQSRSLSRIFKFRGTGKAWDWEVSSENGNYDYLMYADIDYDHPDVVNEMKKWGVWYANEVGLDGYRLDAVKHIKFSFLKDWVDNARAATGKEMFTVGEYWQNDLGALNNYLAKVNYNQSLFDAPLHYNFYAASTGGGYYDMRNILNNTLVASLPTKAVTLVENHDTQPGQSLESTVQPWFKPLAYAFILTRSGGYPSVFYGDMYGTKGTTTREIPALKSKIEPLLKARKDYAYGTQRDYIDNPDVIGWTREGDSTKAKSGLATVITDGPGGSKRMYVGTSNAGEIWYDLTGNRTDKITIGSDGYATFPVNGGSVSVWVQQ

SEQ ID NO: 34727 - protein, 482 aa, Cytophaga sp.
NGTMMQYFEWYVPNDGQQWNRLRTDAPYLSSVGITAVWTPPAYKGTSQADVGYGPYDLYDLGEFNQKGTVRTKYGTKGELKSAVNTLHSNGIQVYGDVVMNHKAGADYTENVTAVEVNPSNRNQETSGEYNIQAWTGFNFPGRGTTYSNFKWQWFHFDGTDWDQSRSLSRIFKFRGTGKAWDWEVSSENGNYDYLMYADIDYDHPDVVNEMKKWGVWYANEVGLDGYRLDAVKHIKFSFLKDWVDNARAATGKEMFTVGEYWQNDLGALNNYLAKVNYNQSLFDAPLHYNFYAASTGGGYYDMRNILNNTLVASNPTKAVTLVENHDTQPGQSLESTVQPWFKPLAYAFILTRHGGYPSVFYGDMYGTKGTTTREIPALKSKIEPLLKARKDYAYGTQRDYIDNPDVIGWTREGDSTKAKSGLATVITDGPGGSKRMYVGTSNAGEIWYDLTGNRTDKITIGSDGYATFPVNGGSVSVWVQQ

SEQ ID NO: 34728 - protein, 482 aa, Cytophaga sp.
NGTMMQYFEWYVPNDGQQWNRLRTDAPYLSSVGITAVWTPPAYKGTSQADVGYGPYDLYDLGEFNQKGTVRTKYGTKGELKSAVNTLHSNGIQVYGDVVMNHKAGADYTENVTAVEVNPSNRNQETSGEYNIQAWTGFNFPGRGTTYSNFKWQWFHFDGTDWDQSRSLSRIFKFRGTGKAWDWEVSSENGNYDYLMYADIDYDHPDVVNEMKKWGVWYANEVGLDGYRLDAVKHIKFSFLKDWVDNARAATGKEMFTVGEYWQNDLGALNNYLAKVNYNQSLFDAPLHYNFYAASTGGGYYDMRNILNNTLVACNPTKAVTLVENHDTQPGQSLESTVQPWFKPLAYAFILTRSGGYPSVFYGDMYGTKGTTTREIPALKSKIEPLLKARKDYAYGTQRDYIDNPDVIGWTREGDSTKAKSGLATVITDGPGGSKRMYVGTSNAGEIWYDLTGNRTDKITIGSDGYATFPVNGGSVSVWVQQ

SEQ ID NO: 34729 - protein, 482 aa, Cytophaga sp.
NGTMMQYFEWYVPNDGQQWNRLRTDAPYLSSVGITAVWTPPAYKGTSQADVGYGPYDLYDLGEFNQKGTVRTKYGTKGELKSAVNTLHSNGIQVYGDVVMNHKAGADYTENVTAVEVNPSNRNQETSGEYNIQAWTGFNFPGRGTTYSNFKWQWFHFDGTDWDQSRSLSRIFKFRGTGKAWDWEVSSENGNYDYLMYADIDYDHPDVVNEMKKWGVWYANEVGLDGYRLDAVKHIKFSFLKDWVDNARAATGKEMFTVGEYWQNDLGALNNYLAKVNYNQSLFDAPLHYNFYAASTGGGYYDMRNILNNTLVASNPPKAVTLVENHDTQPGQSLESTVQPWFKPLAYAFILTRSGGYPSVFYGDMYGTKGTTTREIPALKSKIEPLLKARKDYAYGTQRDYIDNPDVIGWTREGDSTKAKSGLATVITDGPGGSKRMYVGTSNAGEIWYDLTGNRTDKITIGSDGYATFPVNGGSVSVWVQQ

SEQ ID NO: 34730 - protein, 482 aa, Cytophaga sp.
NGTMMQYFEWYVPNDGQQWNRLRTDAPYLSSVGITAVWTPPAYKGTSQADVGYGPYDLYDLGEFNQKGTVRTKYGTKGELKSAVNTLHSNGIQVYGDVVMNHKAGADYTENVTAVEVNPSNRNQETSGEYNIQAWTGFNFPGRGTTYSNFKWQWFHFDGTDWDQSRSLSRIFKFRGTGKAWDWEVSSENGNYDYLMYADIDYDHPDVVNEMKKWGVWYANEVGLDGYRLDAVKHIKFSFLKDWVDNARAATGKEMFTVGEYWQNDLGALNNYLAKVNYNQSLFDAPLHYNFYAASTGGGYYDMRNILNNTLVASNPKKAVTLVENHDTQPGQSLESTVQPWFKPLAYAFILTRSGGYPSVFYGDMYGTKGTTTREIPALKSKIEPLLKARKDYAYGTQRDYIDNPDVIGWTREGDSTKAKSGLATVITDGPGGSKRMYVGTSNAGEIWYDLTGNRTDKITIGSDGYATFPVNGGSVSVWVQQ

SEQ ID NO: 34731 - protein, 482 aa, Cytophaga sp.
NGTMMQYFEWYVPNDGQQWNRLRTDAPYLSSVGITAVWTPPAYKGTSQADVGYGPYDLYDLGEFNQKGTVRTKYGTKGELKSAVNTLHSNGIQVYGDVVMNHKAGADYTENVTAVEVNPSNRNQETSGEYNIQAWTGFNFPGRGTTYSNFKWQWFHFDGTDWDQSRSLSRIFKFRGTGKAWDWEVSSENGNYDYLMYADIDYDHPDVVNEMKKWGVWYANEVGLDGYRLDAVKHIKFSFLKDWVDNARAATGKEMFTVGEYWQNDLGALNNYLAKVNYNQSLFDAPLHYNFYAASTGGGYYDMRNILNNTLVASEPTKAVTLVENHDTQPGQSLESTVQPWFKPLAYAFILTRSGGYPSVFYGDMYGTKGTTTREIPALKSKIEPLLKARKDYAYGTQRDYIDNPDVIGWTREGDSTKAKSGLATVITDGPGGSKRMYVGTSNAGEIWYDLTGNRTDKITIGSDGYATFPVNGGSVSVWVQQ

SEQ ID NO: 34732 - protein, 482 aa, Cytophaga sp.
NGTMMQYFEWYVPNDGQQWNRLRTDAPYLSSVGITAVWTPPAYKGTSQADVGYGPYDLYDLGEFNQKGTVRTKYGTKGELKSAVNTLHSNGIQVYGDVVMNHKAGADYTENVTAVEVNPSNRNQETSGEYNIQAWTGFNFPGRGTTYSNFKWQWFHFDGTDWDQSRSLSRIFKFRGTGKAWDWEVSSENGNYDYLMYADIDYDHPDVVNEMKKWGVWYANEVGLDGYRLDAVKHIKFSFLKDWVDNARAATGKEMFTVGEYWQNDLGALNNYLAKVNYNQSLFDAPLHYNFYAASTGGGYYDMRNILNNTLVASNPYKAVTLVENHDTQPGQSLESTVQPWFKPLAYAFILTRSGGYPSVFYGDMYGTKGTTTREIPALKSKIEPLLKARKDYAYGTQRDYIDNPDVIGWTREGDSTKAKSGLATVITDGPGGSKRMYVGTSNAGEIWYDLTGNRTDKITIGSDGYATFPVNGGSVSVWVQQ

SEQ ID NO: 34733 - protein, 478 aa, Bacillus sp.
NGTIMQYFEWNVPNDGQHWNRLHNNAQNLKNAGITAIWIPPAWKGTSQSDTGYGAYDLYDLGEFNQKGTVRTKYGTKAELERAIRSLKANGIQVYGDVVMNHKAGADQTERVQAVEVNPQNRNQEVSGTYQIEAWTGFNFPGRGNQHSSFKWRWYHFDGTDWDQSRNLSNRIYKFRGKAWDWEVDTEFGNYDYLMYADLDMDHPEVINELNRWGVWYANTLNLDGFRLDAVKHIKFSFMRDWLGHVRGQTGKNLFAVAEYWKNDLGALENYLSKTNWTMSAFDVPLHYNLYQASNSSGNYDMRNLLNGTLVQRHPSHAVTFVDNHDTQPGEALESFVQGWFKPLAYATILTREQGYPQVFYGDYYGIPSDGVPSYRQQIDPLLKARQQYAYGPQHDYLDHPDVIGWTREGDSSHAKSGLAALITDGPGGSKRMYAGLKNAGETWYDITGNRSDTVKIGSDGWGEFHVNDGSVSIYVQK

SEQ ID NO: 34734 - protein, 478 aa, Bacillus sp.
NGTIMQYFEWNVPNDGQHWNRLHNNAQNLKNAGITAIWIPPAWKGTSQNDVGYGAYDLYDLGEFNQKGTVRTKYGTKAELERAIRSLKANGIQVYGDVVMNHKGGADFTERVQAVEVNPQNRNQEVSGTYQIEAWTGFNFPGRGNQHSSFKWRWYHFDGTDWDQSRQLANRIYKFRGKAWDWEVDTEFGNYDYLMYADVDMDHPEVINELNRWGVWYANTLNLDGFRLDAVKHIKFSFMRDWLGHVRGQTGKNLFAVAEYWKNDLGALENYLSKTNWTMSAFDVPLHYNLYQASNSSGNYDMRNLLNGTLVQRHPSHAVTFVDNHDTQPGEALESFVQGWFKPLAYATILTREQGYPQVFYGDYYGIPSDGVPSYRQQIDPLLKARQQYAYGPQHDYIDHPDVIGWTREGDSSAAKSGLAALITDGPGGSKRMYAGLKNAGETWYDITGNRSDTVKIGSDGWGEFHVNDGSVSIYVQK

SEQ ID NO: 34735 - protein, 478 aa, Bacillus sp.
NGTIMQYFEWNVPNDGQHWNRLHNNAQNLKNAGITAIWIPPAWKGTSQSDTGYGAYDLYDLGEFNQKGTVRTKYGTKAELERAIRSLKANGIQVYGDVVMNHKAGADQTERVQAVEVNPQNRNQEVSGTYQIEAWTGFNFPGRGNQHSSFKWRWYHFDGTDFDQSRGLSNRIYKFRGKAWDWEVDTENGNYDYLMYADVDMDHPEVINELNRWGVWYANTLNLDGFRLDAVKHIKFSFMRDWLGHVRGQTGKNLFAVAEYWKNDLGALENYLSKTNWTMSAFDVPLHYNLYQASNSSGNYDMRNLLNGTLVQRHPSHAVTFVDNHDTQPGEALESFVQGWFKPLAYATILTREQGYPQVFYGDYYGIPSDGVPSYRQQIDPLLKARQQYAYGPQHDYIDHPDVIGWTREGDSSHPKSGLATLITDGPGGSKRMYAGLKNAGETWYDITGNRSDTVKIGSDGWGEFHVNDGSVSIYVQK

SEQ ID NO: 34736 - protein, 477 aa, Synthetic construct
NGTMMQYFEWYLPNDGQHWKRLQNDASNLKSKGITAVWIPPAWKGTSQADVGYGAYDLYDLGEFHQKGTVRTKYGTRSDLQAAIKSLHNNGINVYGDVVMNHKGGADATEDVQAVEVNPNNRNQVETGEYLIKAWTRFDFPGRGNTHSSFKWRWYHFDGVDWDQSRRLNRIYKFQGKAWDWEVDTENGNYDYLMYADLDMDHPEVVNELRNWGVWYTNTLQLDGFRIDAVKHIKYSFTRDWINHVRSATGKNMFAVAEFWKNDLGAIENYLQKTNWNHSVFDVPLHYNLYNASKSGGNYDMRNIFNGTVVSKHPSHAVTFVDNHDSQPEEALESTVETWFKPLAYALTLTREQGYPSVFYGDYYGTPTHGIPALKSKIDPILEARQKYAYGAQHDYLDHPDVIGWTREGDSSHPNSGLATLITDGPGGSKRMYAGAKNAGETWYDITGNRSDTVVIGSDGWGEFHVNDGSVSIYVQK

SEQ ID NO: 34737 - protein, 480 aa, Bacillus sp.
NGTMMQYFEWYLPNDGNHWNRLNSDASNLKSKGITAVWIPPAWKGASQNDVGYGAYDLYDLGEFNQKGTVRTKYGTRSQLQAAVTSLKNNGIQVYGDVVMNHKGGADATEMVRAVEVNPNNRNQEVTGEYTIEAWTRFDFPGRGNTHSSFKWRWYHFDGVDWDQSRRLNNRIYKFRGHGKAWDWEVDTENGNYDYLMYADIDMDHPEVVNELRNWGVWYTNTLGLDGFRIDAVKHIKYSFTRDWINHVRSATGKNMFAVAEFWKNDLGAIENYLQKTNWNHSVFDVPLHYNLYNASKSGGNYDMRNIFNGTVVQRHPSHAVTFVDNHDSQPEEALESFVEEWFKPLAYALTLTREQGYPSVFYGDYYGIPTHGVPAMRSKIDPILEARQKYAYGPQHDYIDHPDVIGWTREGDSSAAKSGLAALITDGPGGSKRMYAGLKNAGETWYDITGNRSDTVKIGSDGWGEFHVNDGSVSIYVQK

SEQ ID NO: 34738 - protein, 478 aa, Bacillus sp.
NGTIMQYFEWNVPNDGQHWNRLHNNAQNLKNAGITAIWIPPAWKGTSQNDTGYGAYDLYDLGEFNQKGTVRTKYGTKAELERAIRSLKANGIQVYGDVVMNHKGGADFTERVQAVEVNPQNRNQEVSGTYQIEAWTGFNFPGRGNQHSSFKWRWYHFDGTDWDQSRQLANRIYKFRGKAWDWEVDTEFGNYDYLMYADVDMDHPEVINELNRWGVWYANTLNLDGFRLDAVKHIKFSFMRDWLGHVRGQTGKNLFAVAEYWKNDLGALENYLSKTNWTMSAFDVPLHYNLYQASNSSGNYDMRNLLNGTLVQRHPSHAVTFVDNHDTQPGEALESFVQGWFKPLAYATILTREQGYPQVFYGDYYGIPSDGVPSYRQQIDPLLKARQQYAYGPQHDYIDHPDVIGWTREGDSSAAKSGLAALITDGPGGSKRMYAGLKNAGETWYDITGNRSDTVKIGSDGWGEFHVNDGSVSIYVQK

SEQ ID NO: 34739 - protein, 481 aa, Cytophaga sp.
NGTMMQYFEWYVPNDGQQWNRLRTDAPYLSSVGITAVWTPPAYKGTSQADVGYGPYDLYDLGEFNQKGTVRTKYGTKGELKSAVNTLHSNGIQVYGDVVMNHKAGADYTENVTAVEVNPSNRNQETSGEYNIQAWTGFNFPGRGTTYSNFKWQWFHFDGTDWDQSRSLSRIFKFRGTKAWDWEVSSENGNYDYLMYADIDYDHPDVVNEMKKWGVWYANEVGLDGYRLDAVKHIKFSFLKDWVDNARAATGKEMFTVGEYWQNDLGALNNYLAKVNYNQSLFDAPLHYNFYAASTGGGYYDMRNILNNTLVASNPTKAVTLVENHDTQPGQSLESTVQPWFKPLAYAFILTRSGGYPSVFYGDMYGTKGTTTREIPALKSKIEPLLKARKDYAYGTQRDYIDNPDVIGWTREGDSTKAKSGLATVITDGPGGSKRMYVGTSNAGEIWYDLTGNRTDKITIGSDGYATFPVNGGSVSVWVQQ

SEQ ID NO: 34740 - protein, 481 aa, Cytophaga sp.
NGTMMQYFEWYVPNDGQQWNRLRTDAPYLSSVGITAVWTPPAYKGTSQADVGYGPYDLYDLGEFNQKGTVRTKYGTKGELKSAVNTLHSNGIQVYGDVVMNHKAGADYTENVTAVEVNPSNRNQETSGEYNIQAWTGFNFPGRGTTYSNFKWQWFHFDGTDWDQSRSLSRIFKFRTGKAWDWEVSSENGNYDYLMYADIDYDHPDVVNEMKKWGVWYANEVGLDGYRLDAVKHIKFSFLKDWVDNARAATGKEMFTVGEYWQNDLGALNNYLAKVNYNQSLFDAPLHYNFYAASTGGGYYDMRNILNNTLVASNPTKAVTLVENHDTQPGQSLESTVQPWFKPLAYAFILTRSGGYPSVFYGDMYGTKGTTTREIPALKSKIEPLLKARKDYAYGTQRDYIDNPDVIGWTREGDSTKAKSGLATVITDGPGGSKRMYVGTSNAGEIWYDLTGNRTDKITIGSDGYATFPVNGGSVSVWVQQ

SEQ ID NO: 34741 - protein, 481 aa, Cytophaga sp.
NGTMMQYFEWYVPNDGQQWNRLRTDAPYLSSVGITAVWTPPAYKGTSQADVGYGPYDLYDLGEFNQKGTVRTKYGTKGELKSAVNTLHSNGIQVYGDVVMNHKAGADYTENVTAVEVNPSNRNQETSGEYNIQAWTGFNFPGRGTTYSNFKWQWFHFDGTDWDQSRSLSRIFKFGTGKAWDWEVSSENGNYDYLMYADIDYDHPDVVNEMKKWGVWYANEVGLDGYRLDAVKHIKFSFLKDWVDNARAATGKEMFTVGEYWQNDLGALNNYLAKVNYNQSLFDAPLHYNFYAASTGGGYYDMRNILNNTLVASNPTKAVTLVENHDTQPGQSLESTVQPWFKPLAYAFILTRSGGYPSVFYGDMYGTKGTTTREIPALKSKIEPLLKARKDYAYGTQRDYIDNPDVIGWTREGDSTKAKSGLATVITDGPGGSKRMYVGTSNAGEIWYDLTGNRTDKITIGSDGYATFPVNGGSVSVWVQQ

SEQ ID NO: 34742 - protein, 481 aa, Bacillus sp.
NGTMMQYFEWYLPNDGQHWTRLANDANNLSSLGITALWIPPAYKGTSQSDVGYGAYDLYDLGEFNQKGTVRTKYGTKAQLLQAIQALHAAGIQVYGDVVMNHKGGADGTEWVDAVEVNPSDRNQEISGTYQIQAWTKFDFPGRGNTYSSFKWRWYHFDGVDWDESRKLNNRIYKFRGIGKAWDWEVDTENGNYDYLMYADIDMDHPEVVTELKNWGKWYVNTLNLDGFRLDAVKHIKFSFFRDWLSHVRSQTGKPLFTVGEYWSNDIGALENYLTKTNWNMSLFDVPLHYNFYTASKSGGAYDMRTLLTGTLVKDHPTLAVTFVDNHDTQPGQALESWVDPWFKPLAYAFILTREEGYPCVFYGDYYGIPQYNQREIPSLKSKIDPLLIARRDYAYGTQHDYLDHSDIIGWTREGVTSKPNSGLAALITDGPGGSKWMYVGKQHAGKVWYDLTGNRSDTVTINSDGWGEFKVNGGSVSVWV

SEQ ID NO: 34743 - protein, 480 aa, Cytophaga sp.
NGTMMQYFEWYVPNDGQQWNRLRTDAPYLSSVGITAVWTPPAYKGTSQADVGYGPYDLYDLGEFNQKGTVRTKYGTKGELKSAVNTLHSNGIQVYGDVVMNHKAGADYTENVTAVEVNPSNRNQETSGEYNIQAWTGFNFPGRGTTYSNFKWQWFHFDGTDWDQSRSLSRIFKFTGKAWDWEVSSENGNYDYLMYADIDYDHPDVVNEMKKWGVWYANEVGLDGYRLDAVKHIKFSFLKDWVDNARAATGKEMFTVGEYWQNDLGALNNYLAKVNYNQSLFDAPLHYNFYAASTGGGYYDMRNILNNTLVASNPTKAVTLVENHDTQPGQSLESTVQPWFKPLAYAFILTRSGGYPSVFYGDMYGTKGTTTREIPALKSKIEPLLKARKDYAYGTQRDYIDNPDVIGWTREGDSTKAKSGLATVITDGPGGSKRMYIGTSNAGEIWYDLTGNRTDKITIGSDGYATFPVNGGSVSVWVQQ

SEQ ID NO: 34744 - protein, 480 aa, Cytophaga sp.
NGTMMQYFEWYVPNDGQQWNRLRTDAPYLSSVGITAVWTPPAYKGTSQADVGYGPYDLYDLGEFNQKGTVRTKYGTKGELKSAVNTLHSNGIQVYGDVVMNHKAGADYTENVTAVEVNPSNRNQETSGEYNIQAWTGFNFPGRGTTYSNFKWQWFHFDGTDWDQSRSLSRIFKFTGKAWDWEVSSENGNYDYLMYADIDYDHPDVVNEMKKWGVWYANEVGLDGYRLDAVKHIKFSFLKDWVDNARAATGKEMFTVGEYWQNDLGALNNYLAKVNYNQSLFDAPLHYNFYAASTGGGYYDMRNILNNTLVASNPTKAVTLVENHDTQPGQSLESTVQPWFKPLAYAFILTRSGGYPSVFYGDMYGTKGTTTREIPALKSKIEPLLKARKDYAYGTQRDYIDNPDVIGWTREGDSTKAKSGLATVITDGPGGSKRMYLGTSNAGEIWYDLTGNRTDKITIGSDGYATFPVNGGSVSVWVQQ

SEQ ID NO: 34745 - protein, 480 aa, Cytophaga sp.
NGTMMQYFEWYVPNDGQQWNRLRTDAPYLSSVGITAVWTPPAYKGTSQADVGYGPYDLYDLGEFNQKGTVRTKYGTKGELKSAVNTLHSNGIQVYGDVVMNHKAGADYTENVTAVEVNPSNRNQETSGEYNIQAWTGFNFPGRGTTYSNFKWQWFHFDGTDWDQSRSLSRIFKFTGKAWDWEVSSENGNYDYLMYADIDYDHPDVVNEMKKWGVWYANEVGLDGYRLDAVKHIKFSFLKDWVDNARAATGKEMFTVGEYWQNDLGALNNYLAKVNYNQSLFDAPLHYNFYAASTGGGYYDMRNILNNTLVASNPTKAVTLVENHDTQPGQSLESTVQPWFKPLAYAFILTRSGGYPSVFYGDMYGTKGTTTREIPALKSKIEPLLKARKDYAYGTQRDYIDNPDVIGWTREGDSTFAKSGLATVITDGPGGSKRMYVGTSNAGEIWYDLTGNRTDKITIGSDGYATFPVNGGSVSVWVQQ

SEQ ID NO: 34746 - protein, 480 aa, Cytophaga sp.
NGTMMQYFEWYVPNDGQQWNRLRTDAPYLSSVGITAVWTPPAYKGTSQADVGYGPYDLYDLGEFNQKGTVRTKYGTKGELKSAVNTLHSNGIQVYGDVVMNHKAGADYTENVTAVEVNPSNRNQETSTEYNIQAWTGFNFPGRGTTYSNFKWQWFHFDGTDWDQSRSLSRIFKFTGKAWDWEVSSENGNYDYLMYADIDYDHPDVVNEMKKWGVWYANEVGLDGYRLDAVKHIKFSFLKDWVDNARAATGKEMFTVGEYWQNDLGALNNYLAKVNYNQSLFDAPLHYNFYAASTGGGYYDMRNILNNTLVASNPTKAVTLVENHDTQPGQSLESTVQPWFKPLAYAFILTRSGGYPSVFYGDMYGTKGTTTREIPALKSKIEPLLKARKDYAYGTQRDYIDNPDVIGWTREGDSTKAKSGLATVITDGPGGSKRMYVGTSNAGEIWYDLTGNRTDKITIGSDGYATFPVNGGSVSVWVQQ

SEQ ID NO: 34747 - protein, 480 aa, Cytophaga sp.
NGTMMQYFEWYVPNDGQQWNRLRTDAPYLSSVGITAVWTPPAYKGTSQADVGYGPYDLYDLGEFNQKGTVRTKYGTKGELKSAVNTLHSNGIQVYGDVVMNHKAGADYTENVTAVEVNPSNRNQETSGEYNIQAWTGFNFPGRGTTYSNFKWQWFHFDGTDWDQSRSLSRIFKFTGKAWDWEVSSENGNYDYLMYADIDYDHPDVVNEMKKWGVWYANEVGLDGYRLDAVKHIKFSFLKDWVDNARAATGKEMFTVGEYWQNDLGALDNYLAKVNYNQSLFDAPLHYNFYAASTGGGYYDMRNILNNTLVASNPTKAVTLVENHDTQPGQSLESTVQPWFKPLAYAFILTRSGGYPSVFYGDMYGTKGTTTREIPALKSKIEPLLKARKDYAYGTQRDYIDNPDVIGWTREGDSTKAKSGLATVITDGPGGSKRMYVGTSNAGEIWYDLTGNRTDKITIGSDGYATFPVNGGSVSVWVQQ

SEQ ID NO: 34748 - protein, 480 aa, Cytophaga sp.
NGTMMQYFEWYVPNDGQQWNRLRTDAPRLSSVGITAVWTPPAYKGTSQADVGYGPYDLYDLGEFNQKGTVRTKYGTKGELKSAVNTLHSNGIQVYGDVVMNHKAGADYTENVTAVEVNPSNRNQETSGEYNIQAWTGFNFPGRGTTYSNFKWQWFHFDGTDWDQSRSLSRIFKFTGKAWDWEVSSENGNYDYLMYADIDYDHPDVVNEMKKWGVWYANEVGLDGYRLDAVKHIKFSFLKDWVDNARAATGKEMFTVGEYWQNDLGALNNYLAKVNYNQSLFDAPLHYNFYAASTGGGYYDMRNILNNTLVASNPTKAVTLVENHDTQPGQSLESTVQPWFKPLAYAFILTRSGGYPSVFYGDMYGTKGTTTREIPALKSKIEPLLKARKDYAYGTQRDYIDNPDVIGWTREGDSTKAKSGLATVITDGPGGSKRMYVGTSNAGEIWYDLTGNRTDKITIGSDGYATFPVNGGSVSVWVQQ

SEQ ID NO: 34749 - protein, 480 aa, Cytophaga sp.
NGTMMQYFEWYVPNDGQQWNRLRTDAPYLSSVGITAVWTPPAYKGTSQADVGYGPYDLYDLGEFNQKGTVRTKYGTKGELKSAVNTLHSNGIQVYGDVVMNHKAGADYTENVTAVEVNPSNRNQETSGEYNIQAWTGFNFPGRGTTYSNFKWQWFHFDGTDWDQSRSLSRIFKFTGKAWDWEVSSENGNYDYLMYADIDYDHPDVVNEMKKWGVWYANEVGLDGYRLDAVKHIKFSFLKDWVDNARAATGKEMFTVGEYWQNDLGALNNYLAKVNYNQSLFDAPLHYNFYAASTGGGYYDMRNILNNTLVASNPTKAVTLVENHDTQPGQSLESTVQPWFKPLAYAFILTRSGGYPSVFYGDMYGTKGTTTREIPALKSKIEPLLKARKDYAYGTQRDYIDNPDVIGWTREGDSTKAKSGLATVITDGPGGSKRMYVGTSNAGEIWYDLTGNRTDNITIGSDGYATFPVNGGSVSVWVQQ

SEQ ID NO: 34750 - protein, 480 aa, Cytophaga sp.
NGTMMQYFEWYVPNDGQQWNRLRTDAPYLSSVGITAVWTPPAYKGTSQADVGYGPYDLYDLGEFNQKGTVRTKYGTKGELKSAVNTLHSNGIQVYGDVVMNHKAGADYTENVTAVEVNPSNRNQETSGEYNIQAWTGFNFPGRGTTYSNFKWQWFHFDGTDWDQSRSLSRIFKFTGKAWDWEVSSENGNYDYLMYADIDYDHPDVVNEMKKWGVWYANEVGLDGYRLDAVKHIKFSFLKDWVDNARAATGKEMFTVGEYWQNDLGALNNYLAKVNYNQSLFDAPLHYNFYAASTGGGYYDMRNILNNTLVASNPTKAVTLVENHDTQPGQSLESTVQPWFKPLAYAFILTRSGGYPSVFYGDMYGTKGTTTREIPALKSKIEPLLKARKDYAYGHQRDYIDNPDVIGWTREGDSTKAKSGLATVITDGPGGSKRMYVGTSNAGEIWYDLTGNRTDKITIGSDGYATFPVNGGSVSVWVQQ

SEQ ID NO: 34751 - protein, 480 aa, Cytophaga sp.
NGTMMQYFEWYVPNDGQQWNRLRTDAPYLSSVGITAVWTPPAYKGTSQADVGYGPYDLYDLGEFNQKGTVRTKYGTKGELKSAVNTLHSNGIQVYGDVVMNHKAGADYTENVTAVEVNPSNRNQETSGEYNIQAWTGFNFPGRGTTYSNFKWQWTHFDGTDWDQSRSLSRIFKFTGKAWDWEVSSENGNYDYLMYADIDYDHPDVVNEMKKWGVWYANEVGLDGYRLDAVKHIKFSFLKDWVDNARAATGKEMFTVGEYWQNDLGALNNYLAKVNYNQSLFDAPLHYNFYAASTGGGYYDMRNILNNTLVASNPTKAVTLVENHDTQPGQSLESTVQPWFKPLAYAFILTRSGGYPSVFYGDMYGTKGTTTREIPALKSKIEPLLKARKDYAYGTQRDYIDNPDVIGWTREGDSTKAKSGLATVITDGPGGSKRMYVGTSNAGEIWYDLTGNRTDKITIGSDGYATFPVNGGSVSVWVQQ

SEQ ID NO: 34752 - protein, 480 aa, Cytophaga sp.
NGTMMQYFEWYVPNDGQQWNRLRTDAPYLSSVGITAVWTPPAYKGTSQADVGYGPYDLYDLGEFNQKGTVRTKYGTKGELKSAVNTLHSNGIQVYGDVVMNHKAGADYTENVTAVEVNPSNRNQETSGEYNIQAWTGFNFPGRGTTYSNFKWQWFHFDGTDWDQSRSLSRIFKFTGKAWDWEVSSENGNYDYLMYADIDYDHPDVVNEMKKWGVWYANEVGLDGYRLDAVKHIKFSFLKDWVDNARAATGKEMFTVGEYWQNDLGALNNYLAKVLYNQSLFDAPLHYNFYAASTGGGYYDMRNILNNTLVASNPTKAVTLVENHDTQPGQSLESTVQPWFKPLAYAFILTRSGGYPSVFYGDMYGTKGTTTREIPALKSKIEPLLKARKDYAYGTQRDYIDNPDVIGWTREGDSTKAKSGLATVITDGPGGSKRMYVGTSNAGEIWYDLTGNRTDKITIGSDGYATFPVNGGSVSVWVQQ

SEQ ID NO: 34753 - protein, 480 aa, Cytophaga sp.
NGTMMQYFEWYVPNDGQQWNRLRTDAPYLSSVGITAVWTPPAYKGTSQADVGYGPYDLYDLGEFNQKGTVRTKYGTKGELKSAVNTLHSNGIQVYGDVVMNHKAGADYTENVTAVEVNPSNRNQETSGEYNIQAWTGFNFPGRGTTYSNFKWQWFHFDGTDWDQSRSLSRIFKFTGKAWDWEVSSENGNYDYLMYADIDYDHPDVVNEMKKWGVWYANEVGLDGYRLDAVKHIKFSFLKDWVDNARAATGKEMFTVGEYWQNDLGCLNNYLAKVNYNQSLFDAPLHYNFYAASTGGGYYDMRNILNNTLVASNPTKAVTLVENHDTQPGQSLESTVQPWFKPLAYAFILTRSGGYPSVFYGDMYGTKGTTTREIPALKSKIEPLLKARKDYAYGTQRDYIDNPDVIGWTREGDSTKAKSGLATVITDGPGGSKRMYVGTSNAGEIWYDLTGNRTDKITIGSDGYATFPVNGGSVSVWVQQ

SEQ ID NO: 34754 - protein, 480 aa, Cytophaga sp.
NGTMMQYFEWYVPNDGQQWNRLRTDAPYLSSVGITAVWTPPAYKGDSQADVGYGPYDLYDLGEFNQKGTVRTKYGTKGELKSAVNTLHSNGIQVYGDVVMNHKAGADYTENVTAVEVNPSNRNQETSGEYNIQAWTGFNFPGRGTTYSNFKWQWFHFDGTDWDQSRSLSRIFKFTGKAWDWEVSSENGNYDYLMYADIDYDHPDVVNEMKKWGVWYANEVGLDGYRLDAVKHIKFSFLKDWVDNARAATGKEMFTVGEYWQNDLGALNNYLAKVNYNQSLFDAPLHYNFYAASTGGGYYDMRNILNNTLVASNPTKAVTLVENHDTQPGQSLESTVQPWFKPLAYAFILTRSGGYPSVFYGDMYGTKGTTTREIPALKSKIEPLLKARKDYAYGTQRDYIDNPDVIGWTREGDSTKAKSGLATVITDGPGGSKRMYVGTSNAGEIWYDLTGNRTDKITIGSDGYATFPVNGGSVSVWVQQ

SEQ ID NO: 34755 - protein, 480 aa, Cytophaga sp.
NGTMMQYFEWYVPNDGQQWNRLRTDAPYLSSVGITAVWTPPAYKGTSQADVGYGPYDLYDLGEFNQKGTVRTKYGTKGELKSAVNTLHSNGIQVYGDVVMNHKAGADYTENVTAVEVNPSNRNQETSGEYNIQAWTGFHFPGRGTTYSNFKWQWFHFDGTDWDQSRSLSRIFKFTGKAWDWEVSSENGNYDYLMYADIDYDHPDVVNEMKKWGVWYANEVGLDGYRLDAVKHIKFSFLKDWVDNARAATGKEMFTVGEYWQNDLGALNNYLAKVNYNQSLFDAPLHYNFYAASTGGGYYDMRNILNNTLVASNPTKAVTLVENHDTQPGQSLESTVQPWFKPLAYAFILTRSGGYPSVFYGDMYGTKGTTTREIPALKSKIEPLLKARKDYAYGTQRDYIDNPDVIGWTREGDSTKAKSGLATVITDGPGGSKRMYVGTSNAGEIWYDLTGNRTDKITIGSDGYATFPVNGGSVSVWVQQ

SEQ ID NO: 34756 - protein, 480 aa, Cytophaga sp.
NGTMMQYFEWYVPNDGQQWNRLRTDAPYLSSVGITAVWTPPAYKGTSQADVGYGPYDLYDLGEFNQKGTVRTKYGTKGELKSAVRTLHSNGIQVYGDVVMNHKAGADYTENVTAVEVNPSNRNQETSGEYNIQAWTGFNFPGRGTTYSNFKWQWFHFDGTDWDQSRSLSRIFKFTGKAWDWEVSSENGNYDYLMYADIDYDHPDVVNEMKKWGVWYANEVGLDGYRLDAVKHIKFSFLKDWVDNARAATGKEMFTVGEYWQNDLGALNNYLAKVNYNQSLFDAPLHYNFYAASTGGGYYDMRNILNNTLVASNPTKAVTLVENHDTQPGQSLESTVQPWFKPLAYAFILTRSGGYPSVFYGDMYGTKGTTTREIPALKSKIEPLLKARKDYAYGTQRDYIDNPDVIGWTREGDSTKAKSGLATVITDGPGGSKRMYVGTSNAGEIWYDLTGNRTDKITIGSDGYATFPVNGGSVSVWVQQ

SEQ ID NO: 34757 - protein, 480 aa, Cytophaga sp.
NGTMMQYFEWYVPNDGQQWNRLRTDAPYLSSVGITAVWTPPAYKGTSQADVGYGPYDLYDLGEFNQKGTVRTKYGTKGELKSAVNTLHSNGIQVYGDVVMNHKAGADYTENVTAVEVNPSNRNQETSGEYNIQAWTGFNFPGRGTTYSMFKWQWFHFDGTDWDQSRSLSRIFKFTGKAWDWEVSSENGNYDYLMYADIDYDHPDVVNEMKKWGVWYANEVGLDGYRLDAVKHIKFSFLKDWVDNARAATGKEMFTVGEYWQNDLGALNNYLAKVNYNQSLFDAPLHYNFYAASTGGGYYDMRNILNNTLVASNPTKAVTLVENHDTQPGQSLESTVQPWFKPLAYAFILTRSGGYPSVFYGDMYGTKGTTTREIPALKSKIEPLLKARKDYAYGTQRDYIDNPDVIGWTREGDSTKAKSGLATVITDGPGGSKRMYVGTSNAGEIWYDLTGNRTDKITIGSDGYATFPVNGGSVSVWVQQ

SEQ ID NO: 34758 - protein, 480 aa, Cytophaga sp.
NGTMMQYFEWYVPNDGQQWNRLRTDAPYLSSVGITAVWTPPAYKGTSQADVGYGPYDLYDLGEFNQKGTVRTKYGTKGELKSAVNTLHSNGIQVYGDVVMNHKAGADYTENVTAVEVNPSNRNQETSGEYNIQAWTGFNFPGRGTTYSNFKWQWFHFDGTDWDQSRSLSRIFKFTGKAWDWEVSSENGNYDYLMYADIDYDHPDVVNEMKKWGVWYANEVGLDGYRLDAVKHIKFSFLKDWVDNARAATGKEMFTVGEYWQNDLGALNNYLAKVNYNQSLFDAPLHYNFYAASTGGGYYDMRNILNNTLVASSPTKAVTLVENHDTQPGQSLESTVQPWFKPLAYAFILTRSGGYPSVFYGDMYGTKGTTTREIPALKSKIEPLLKARKDYAYGTQRDYIDNPDVIGWTREGDSTKAKSGLATVITDGPGGSKRMYVGTSNAGEIWYDLTGNRTDKITIGSDGYATFPVNGGSVSVWVQQ

SEQ ID NO: 34759 - protein, 480 aa, Cytophaga sp.
NGTMMQYFEWYVPNDGQQWNRLRTDAPYLSSVGITAVWTPPAYKGTSQADVGYGPYDLYDLGEFNQKGTVRTKYGTKGELKSAVNTLHSNGIQVYGDVVMNHKAGADYTENVTAVEVNPSNRNQETSGEYNIQAWTGFNFPGRGKTYSNFKWQWFHFDGTDWDQSRSLSRIFKFTGKAWDWEVSSENGNYDYLMYADIDYDHPDVVNEMKKWGVWYANEVGLDGYRLDAVKHIKFSFLKDWVDNARAATGKEMFTVGEYWQNDLGALNNYLAKVNYNQSLFDAPLHYNFYAASTGGGYYDMRNILNNTLVASNPTKAVTLVENHDTQPGQSLESTVQPWFKPLAYAFILTRSGGYPSVFYGDMYGTKGTTTREIPALKSKIEPLLKARKDYAYGTQRDYIDNPDVIGWTREGDSTKAKSGLATVITDGPGGSKRMYVGTSNAGEIWYDLTGNRTDKITIGSDGYATFPVNGGSVSVWVQQ

SEQ ID NO: 34760 - protein, 480 aa, Cytophaga sp.
NGTMMQYFEWYVPNDGQQWNRLRTDAPYLSSVGITAVWTPPAYKGTSQADVGYGPYDLYDLGEFNQKGTVRTKYGTKGELKSAVNTLHSNGIQVYGDVVMNHKAGADYTENVTAVEVNPSNRNQETSGEYNIQAWTGFNFPGRGTTYSNFKWQWFHFDGTDWDQSRSLSRIFKFTGKAWDWEVSSENGNYDYLMYADIDYDHPDVVNEMKKWGVWYANEVGLDGYRLDAVKHIKFSFLKDWVDNARAATGKEMFTVGEYWQNDLGALNNYLAKVNYNQSLFDAPLHYNFYAASTGGGYYDMRNILNNTLVAHNPTKAVTLVENHDTQPGQSLESTVQPWFKPLAYAFILTRSGGYPSVFYGDMYGTKGTTTREIPALKSKIEPLLKARKDYAYGTQRDYIDNPDVIGWTREGDSTKAKSGLATVITDGPGGSKRMYVGTSNAGEIWYDLTGNRTDKITIGSDGYATFPVNGGSVSVWVQQ

SEQ ID NO: 34761 - protein, 480 aa, Cytophaga sp.
NGTMMQYFEWYVPNDGQQWNRLRTDAPYLSSVGITAVWTPPAYKGTSQADVGYGPYDLYDLGEFNQKGTVRTKYGTKGELKSAVNTLHSNGIQVYGDVVMNHKAGADYTENVTAVEVNPSNRNQETSGEYNIQAWTGFNFPGRGTTYSNFKWQWFHFDGTDWDQSRSLSRIFKFTGKAWDWEVSSENGNYDYLMYADIDYDHPDVVNEMKKWGVWYANEVGLDGYRLDAVKHIKFSFLKDWVDNARAATGKEMFTVGEYWQNDLGALNNYLAKVNYNQSLFDAPLHYNFYAASTGGGYYDMRNILNNTLVASNPTKAVTLVENHDTQPGQSLESTVQPWFKPLAYAFILTRSGGYPSVFYGDMYGTKGTTTREIPALKSKIEPLLKARKDYAYGTQRDYIDNPDVIGWTREGDSTKAKSGLATVITDGPGGSKRMYVGTSNAGEIWYDLTGNRTDKITIGSDGYATFPVNGGSVSLWVQQ

SEQ ID NO: 34762 - protein, 480 aa, Cytophaga sp.
NGTMMQYFEWYVPNDGQQWNRLRTDAPYLSSVGITAVWTPPAYKGTSQADVGYGPYDLYDLGEFNQKGTVRTKYGTKGELKSAVNTLHSNGIQVYGDVVMNHKAGADYTENVTAVEVNPSNRNQETSGEYNIQAWTGFNFPGRGLTYSNFKWQWFHFDGTDWDQSRSLSRIFKFTGKAWDWEVSSENGNYDYLMYADIDYDHPDVVNEMKKWGVWYANEVGLDGYRLDAVKHIKFSFLKDWVDNARAATGKEMFTVGEYWQNDLGALNNYLAKVNYNQSLFDAPLHYNFYAASTGGGYYDMRNILNNTLVASNPTKAVTLVENHDTQPGQSLESTVQPWFKPLAYAFILTRSGGYPSVFYGDMYGTKGTTTREIPALKSKIEPLLKARKDYAYGTQRDYIDNPDVIGWTREGDSTKAKSGLATVITDGPGGSKRMYVGTSNAGEIWYDLTGNRTDKITIGSDGYATFPVNGGSVSVWVQQ

SEQ ID NO: 34763 - protein, 480 aa, Cytophaga sp.
NGTMMQYFEWYVPNDGQQWNRLRTDAPYLSSVGITAVWTPPAYKGTSQHDVGYGPYDLYDLGEFNQKGTVRTKYGTKGELKSAVNTLHSNGIQVYGDVVMNHKAGADYTENVTAVEVNPSNRNQETSGEYNIQAWTGFNFPGRGTTYSNFKWQWFHFDGTDWDQSRSLSRIFKFTGKAWDWEVSSENGNYDYLMYADIDYDHPDVVNEMKKWGVWYANEVGLDGYRLDAVKHIKFSFLKDWVDNARAATGKEMFTVGEYWQNDLGALNNYLAKVNYNQSLFDAPLHYNFYAASTGGGYYDMRNILNNTLVASNPTKAVTLVENHDTQPGQSLESTVQPWFKPLAYAFILTRSGGYPSVFYGDMYGTKGTTTREIPALKSKIEPLLKARKDYAYGTQRDYIDNPDVIGWTREGDSTKAKSGLATVITDGPGGSKRMYVGTSNAGEIWYDLTGNRTDKITIGSDGYATFPVNGGSVSVWVQQ

SEQ ID NO: 34764 - protein, 480 aa, Cytophaga sp.
NGTMMQYFEWYVPNDGQLWNRLRTDAPYLSSVGITAVWTPPAYKGTSQADVGYGPYDLYDLGEFNQKGTVRTKYGTKGELKSAVNTLHSNGIQVYGDVVMNHKAGADYTENVTAVEVNPSNRNQETSGEYNIQAWTGFNFPGRGTTYSNFKWQWFHFDGTDWDQSRSLSRIFKFTGKAWDWEVSSENGNYDYLMYADIDYDHPDVVNEMKKWGVWYANEVGLDGYRLDAVKHIKFSFLKDWVDNARAATGKEMFTVGEYWQNDLGALNNYLAKVNYNQSLFDAPLHYNFYAASTGGGYYDMRNILNNTLVASNPTKAVTLVENHDTQPGQSLESTVQPWFKPLAYAFILTRSGGYPSVFYGDMYGTKGTTTREIPALKSKIEPLLKARKDYAYGTQRDYIDNPDVIGWTREGDSTKAKSGLATVITDGPGGSKRMYVGTSNAGEIWYDLTGNRTDKITIGSDGYATFPVNGGSVSVWVQQ

SEQ ID NO: 34765 - protein, 480 aa, Cytophaga sp.
NGTMMQYFEWYVPNDGQQWNRLRTDAPYLSSVGITAVWTPPAYKGTSQADVGYGPYDLYDLGEFNQKGTVRTKYGTKGELKSAVNTLHSNGIQVYGDVVMNHKAGADYTENVTAVEVNPSNRNQETSGEYNIQAWTGFNFPGRGTTYSNFKWQWFHFDGTDWDQSRSLSRIFKFTGKAWDWEVSSENGNYDYLMYADIDYDHPDVVNEMKKWGVWYANEVGLDGYRLDAVKHIKFSFLKDWVDNARAATGKEMFTVGEYWQNDLGALNNYLAKVNYNQSLFDAPLHYNFYAASTGGGYYDMRNILNNTLVASNPTKAVTLVENHDTQPGQSLESTVQPWFKPLAYAFILTRSGGYPSVFYGDMYGTKGTTTREIPALKSKIEPLLKARKDYAYGTQRDYIDNPDVIGWTREGDSTKAKSGLATVITDGPGGSKRMYVGTSNAGEIWYDLTGNRTDKITIGSDGYADFPVNGGSVSVWVQQ

SEQ ID NO: 34766 - protein, 480 aa, Cytophaga sp.
NGTMMQYFEWYVPNDGQQWNRLRTDAPYLSSVGITAVWTPPAYKGTSQADVGYGPYDLYDLGEFNQKGTVRTKYGTKGELKSAVNTLHSNGIQVYGDVVMNHKAGADYTENVTAVEVNPSNRNQETSGEYNIQAWTGFNFPGRGTTYSNFKWQWFHFDGTDWDQSRSLSRIFKFTGKAWDWEVSSENGNYDYLMYADIDYDHPDVVNEMKKWGVWYANEVGLDGYRLDAVKHIKFSFLKDWVDNARAATGKEMFTVGEYWQNDLGALNNYLAKVYYNQSLFDAPLHYNFYAASTGGGYYDMRNILNNTLVASNPTKAVTLVENHDTQPGQSLESTVQPWFKPLAYAFILTRSGGYPSVFYGDMYGTKGTTTREIPALKSKIEPLLKARKDYAYGTQRDYIDNPDVIGWTREGDSTKAKSGLATVITDGPGGSKRMYVGTSNAGEIWYDLTGNRTDKITIGSDGYATFPVNGGSVSVWVQQ

SEQ ID NO: 34767 - protein, 480 aa, Cytophaga sp.
NGTMMQYFEWYVPNDGQQWNRLRTDAPYLSSVGITAVWTPPAYKGTSQKDVGYGPYDLYDLGEFNQKGTVRTKYGTKGELKSAVNTLHSNGIQVYGDVVMNHKAGADYTENVTAVEVNPSNRNQETSGEYNIQAWTGFNFPGRGTTYSNFKWQWFHFDGTDWDQSRSLSRIFKFTGKAWDWEVSSENGNYDYLMYADIDYDHPDVVNEMKKWGVWYANEVGLDGYRLDAVKHIKFSFLKDWVDNARAATGKEMFTVGEYWQNDLGALNNYLAKVNYNQSLFDAPLHYNFYAASTGGGYYDMRNILNNTLVASNPTKAVTLVENHDTQPGQSLESTVQPWFKPLAYAFILTRSGGYPSVFYGDMYGTKGTTTREIPALKSKIEPLLKARKDYAYGTQRDYIDNPDVIGWTREGDSTKAKSGLATVITDGPGGSKRMYVGTSNAGEIWYDLTGNRTDKITIGSDGYATFPVNGGSVSVWVQQ

SEQ ID NO: 34768 - protein, 480 aa, Cytophaga sp.
NGTMMQYFEWYVPNDGQQWNRLRDDAPYLSSVGITAVWTPPAYKGTSQADVGYGPYDLYDLGEFNQKGTVRTKYGTKGELKSAVNTLHSNGIQVYGDVVMNHKAGADYTENVTAVEVNPSNRNQETSGEYNIQAWTGFNFPGRGTTYSNFKWQWFHFDGTDWDQSRSLSRIFKFTGKAWDWEVSSENGNYDYLMYADIDYDHPDVVNEMKKWGVWYANEVGLDGYRLDAVKHIKFSFLKDWVDNARAATGKEMFTVGEYWQNDLGALNNYLAKVNYNQSLFDAPLHYNFYAASTGGGYYDMRNILNNTLVASNPTKAVTLVENHDTQPGQSLESTVQPWFKPLAYAFILTRSGGYPSVFYGDMYGTKGTTTREIPALKSKIEPLLKARKDYAYGTQRDYIDNPDVIGWTREGDSTKAKSGLATVITDGPGGSKRMYVGTSNAGEIWYDLTGNRTDKITIGSDGYATFPVNGGSVSVWVQQ

SEQ ID NO: 34769 - protein, 480 aa, Cytophaga sp.
NGTMMQYFEWYVPNDGQQWNRLRTDAPYLSSVGITAVWTPPAYKGTSQADVGYGPYDLYDLGEFNQKGTVRTKYGTKGELKSAVNTLHSNGIQVYGDVVMNHKAGADYTENVTAVEVNPSNRNQETSGEYNIQAWTGFNFPGRGTTYSNFKWQWFHFDGTDWDNSRSLSRIFKFTGKAWDWEVSSENGNYDYLMYADIDYDHPDVVNEMKKWGVWYANEVGLDGYRLDAVKHIKFSFLKDWVDNARAATGKEMFTVGEYWQNDLGALNNYLAKVNYNQSLFDAPLHYNFYAASTGGGYYDMRNILNNTLVASNPTKAVTLVENHDTQPGQSLESTVQPWFKPLAYAFILTRSGGYPSVFYGDMYGTKGTTTREIPALKSKIEPLLKARKDYAYGTQRDYIDNPDVIGWTREGDSTKAKSGLATVITDGPGGSKRMYVGTSNAGEIWYDLTGNRTDKITIGSDGYATFPVNGGSVSVWVQQ

SEQ ID NO: 34770 - protein, 480 aa, Cytophaga sp.
NGTMMQYFEWYVPNDGQQWNRLRTDAPYLSSVGITAVWTPPAYKGTSQADVGYGPYDLYDLGEFNQKGTVRTKYGTKGELKSAVNTLHSNGIQVYGDVVMNHKAGADYTENVTAVEVNPSNRNQETSGEYNIQAWTGFNFPGRGTTYSNFKWQWFHFDGTDWDQSRSLSRIFKFTGKAWDWEVSSENGNYDYLMYADIDYDHPDVVNEMKKWGVWYANEVGLDGYRLDAVKHIKFSFLKDWVDRARAATGKEMFTVGEYWQNDLGALNNYLAKVNYNQSLFDAPLHYNFYAASTGGGYYDMRNILNNTLVASNPTKAVTLVENHDTQPGQSLESTVQPWFKPLAYAFILTRSGGYPSVFYGDMYGTKGTTTREIPALKSKIEPLLKARKDYAYGTQRDYIDNPDVIGWTREGDSTKAKSGLATVITDGPGGSKRMYVGTSNAGEIWYDLTGNRTDKITIGSDGYATFPVNGGSVSVWVQQ

SEQ ID NO: 34771 - protein, 480 aa, Cytophaga sp.
NGTMMQYFEWYVPNDGQQWNRLRTDAPYLSSVGITAVWTPPAYKGTSQADVGYGPYDLYDLGEFNQKGTVRTKYGTKGELKSAVNTLHSNGIQVYGDVVMNHKAGADYTENVTAVEVNPSNRNQETSGEYNIQAWTGFNFPGRGTTYSNFKWQWFHFDGTDWDQSRSLSRIFKFTGKAWDWEVSSENGNYDYLMYADIDYDHPDVVNEMKKWGVWYANEVGLDGYRLDAVKHIKFSFLKDWVDNARAATGKEMFTVGEYWQNDLGALNNYLAKVNYNQSLFDAPLHYNFYAASTGGGFYDMRNILNNTLVASNPTKAVTLVENHDTQPGQSLESTVQPWFKPLAYAFILTRSGGYPSVFYGDMYGTKGTTTREIPALKSKIEPLLKARKDYAYGTQRDYIDNPDVIGWTREGDSTKAKSGLATVITDGPGGSKRMYVGTSNAGEIWYDLTGNRTDKITIGSDGYATFPVNGGSVSVWVQQ

SEQ ID NO: 34772 - protein, 480 aa, Cytophaga sp.
NGTMMQYFEWYVPNDGQQWNRLRTDAPYLSSVGITAVWTPPAYKGTSQADVGYGPYDLYDLGEFNQKGTVRTKYGTKGELKSAVNTLHSNGIQVYGDVVMNHKAGADYTENVTAVEVNPSNRNQETSGEYNIQAWTGFNFPGRGTTYSNFKWQWFHFDGTDWDQSRSLSRIFKFTGKAWDWEVSSENGNYDYLMYADADYDHPDVVNEMKKWGVWYANEVGLDGYRLDAVKHIKFSFLKDWVDNARAATGKEMFTVGEYWQNDLGALNNYLAKVNYNQSLFDAPLHYNFYAASTGGGYYDMRNILNNTLVASNPTKAVTLVENHDTQPGQSLESTVQPWFKPLAYAFILTRSGGYPSVFYGDMYGTKGTTTREIPALKSKIEPLLKARKDYAYGTQRDYIDNPDVIGWTREGDSTKAKSGLATVITDGPGGSKRMYVGTSNAGEIWYDLTGNRTDKITIGSDGYATFPVNGGSVSVWVQQ

SEQ ID NO: 34773 - protein, 480 aa, Cytophaga sp.
NGTMMQYFEWYVPNDGQQWNRLRTDAPYLSSVGITAVWTPPAYKGTSQADVGYGPYDLYDLGEFNQKGTVRTKYGTKGELKSAVNTLHSNGIQVYGDVVMNHKAGADYTENVTAVEVNPSNRNQETSGEYNIQAWTGFNFPGRGTTYSNFKWQWFHFDGTDWDQSRSLSRIFKFTGKAWDWEVSSENGNYDYLMYADNDYDHPDVVNEMKKWGVWYANEVGLDGYRLDAVKHIKFSFLKDWVDNARAATGKEMFTVGEYWQNDLGALNNYLAKVNYNQSLFDAPLHYNFYAASTGGGYYDMRNILNNTLVASNPTKAVTLVENHDTQPGQSLESTVQPWFKPLAYAFILTRSGGYPSVFYGDMYGTKGTTTREIPALKSKIEPLLKARKDYAYGTQRDYIDNPDVIGWTREGDSTKAKSGLATVITDGPGGSKRMYVGTSNAGEIWYDLTGNRTDKITIGSDGYATFPVNGGSVSVWVQQ

SEQ ID NO: 34774 - protein, 480 aa, Cytophaga sp.
NGTMMQYFEWYVPNDGQQWNRLRTDAPWLSSVGITAVWTPPAYKGTSQADVGYGPYDLYDLGEFNQKGTVRTKYGTKGELKSAVNTLHSNGIQVYGDVVMNHKAGADYTENVTAVEVNPSNRNQETSGEYNIQAWTGFNFPGRGTTYSNFKWQWFHFDGTDWDQSRSLSRIFKFTGKAWDWEVSSENGNYDYLMYADIDYDHPDVVNEMKKWGVWYANEVGLDGYRLDAVKHIKFSFLKDWVDNARAATGKEMFTVGEYWQNDLGALNNYLAKVNYNQSLFDAPLHYNFYAASTGGGYYDMRNILNNTLVASNPTKAVTLVENHDTQPGQSLESTVQPWFKPLAYAFILTRSGGYPSVFYGDMYGTKGTTTREIPALKSKIEPLLKARKDYAYGTQRDYIDNPDVIGWTREGDSTKAKSGLATVITDGPGGSKRMYVGTSNAGEIWYDLTGNRTDKITIGSDGYATFPVNGGSVSVWVQQ

SEQ ID NO: 34775 - protein, 480 aa, Cytophaga sp.
NGTMMQYFEWYVPNDGQQWNRLRTDAPYLSSVGITAVWTPPAYKGTSQADVGYGPYDLYDLGEFNQKGTVRTKYGTKGELKSAVNTLHSNGIQVYGDVVMNHKAGADYTENVTAVEVNPSNRNQETSGEYFIQAWTGFNFPGRGTTYSNFKWQWFHFDGTDWDQSRSLSRIFKFTGKAWDWEVSSENGNYDYLMYADIDYDHPDVVNEMKKWGVWYANEVGLDGYRLDAVKHIKFSFLKDWVDNARAATGKEMFTVGEYWQNDLGALNNYLAKVNYNQSLFDAPLHYNFYAASTGGGYYDMRNILNNTLVASNPTKAVTLVENHDTQPGQSLESTVQPWFKPLAYAFILTRSGGYPSVFYGDMYGTKGTTTREIPALKSKIEPLLKARKDYAYGTQRDYIDNPDVIGWTREGDSTKAKSGLATVITDGPGGSKRMYVGTSNAGEIWYDLTGNRTDKITIGSDGYATFPVNGGSVSVWVQQ

SEQ ID NO: 34776 - protein, 480 aa, Cytophaga sp.
NGTMMQYFEWYVPNDGQQWNRLRTDAPYLSSVGITAVWTPPAYKGTSQADVGYGPYDLYDLGEFNQKGTVRTKYGTKGELKSAVNTLHSNGIQVYGDVVMNHKAGADYTENVTAVEVNPSNRNQETSGEYNIQAWTGFNFPGRGTTYSNFKWQWFHFDGTDWDQSRSLSRIFKFTGKAWDWEVSSENGNYDYLMYADIDYDHPDVVNEMKKWGVWYANEVGLDGYRLDAVKHIKFSFLKDWVDNARAATGKEMFTVGEYWQNDLGALNNYLAKVNYNQSLFDAPLHYNFYAASTGGGYYDMRYILNNTLVASNPTKAVTLVENHDTQPGQSLESTVQPWFKPLAYAFILTRSGGYPSVFYGDMYGTKGTTTREIPALKSKIEPLLKARKDYAYGTQRDYIDNPDVIGWTREGDSTKAKSGLATVITDGPGGSKRMYVGTSNAGEIWYDLTGNRTDKITIGSDGYATFPVNGGSVSVWVQQ

SEQ ID NO: 34777 - protein, 480 aa, Cytophaga sp.
NGTMMQYFEWYVPNDGQQWNRLRTDAPYLSSVGITAVWTPPAYKGTSQADVGYGPYDLYDLGEFNQKGTVRTKYGTKGELKSAVNTLHSNGIQVYGDVVMNHKAGADYTENVTAVEVNPSNRNQETSGEYNIQAWTGFNFPGRGTTYSNFKWQWFHFDGTDWDQSRSLSRIFKFTGKAWDWEVSSENGNYDYLMYADIDYDHPDVVNEMKKWGVWYANEVGLDGYRLDAVKHIKFSFLKDWVDNARAATGKEMFTVGEYWQNDLGALNNYLAKVNYNQSLFDAPLHYNFYAASTGGGYYDMRLILNNTLVASNPTKAVTLVENHDTQPGQSLESTVQPWFKPLAYAFILTRSGGYPSVFYGDMYGTKGTTTREIPALKSKIEPLLKARKDYAYGTQRDYIDNPDVIGWTREGDSTKAKSGLATVITDGPGGSKRMYVGTSNAGEIWYDLTGNRTDKITIGSDGYATFPVNGGSVSVWVQQ

SEQ ID NO: 34778 - protein, 480 aa, Cytophaga sp.
NGTMMQYFEWYVPNDGQQWNRLRTDAPYLSSVGITAVWTPPAYKGTSQADVGYGPYDLYDLGEFNQKGTVRTKYGTKGELKSAVNTLHSNGIQVYGDVVMNHKAGADYTENVTAVEVNPSNRNQETSGEYNIQAWTGFNFPGRGTTYSNFKWQWFHFDGTDWDQSRSLSRIFKFTGKAWDWEVSSENGNYDYLMYADIDYDHPDVVNEMKKWGVWYANEVGLDGYRLDAVKHIKFSFLKDWVDNARAATGKEMFTVGEYWQNDLGALNNYLAKVNYNQSLFDAPLHYNFYAASTGGGYYDMRHILNNTLVASNPTKAVTLVENHDTQPGQSLESTVQPWFKPLAYAFILTRSGGYPSVFYGDMYGTKGTTTREIPALKSKIEPLLKARKDYAYGTQRDYIDNPDVIGWTREGDSTKAKSGLATVITDGPGGSKRMYVGTSNAGEIWYDLTGNRTDKITIGSDGYATFPVNGGSVSVWVQQ

SEQ ID NO: 34779 - protein, 480 aa, Cytophaga sp.
NGTMMQYFEWYVPNDGQQWNRLRTDAPYLSSVGITAVWTPPAYKGTSQADVGYGPYDLYDLGEFNQKGTVRTKYGTKGELKSAVNTLHSNGIQVYGDVVMNHKAGADYTENVTAVEVNPSNRNQETSGEYNIQAWTGFNFPGRGTTYSNFKWQWFHFDGTDWDQSRSLSRIFKFTGKAWDWEVSSENGNYDYLMYADIDYDHPDVVNEMKKWGVWYANEVELDGYRLDAVKHIKFSFLKDWVDNARAATGKEMFTVGEYWQNDLGALNNYLAKVNYNQSLFDAPLHYNFYAASTGGGYYDMRNILNNTLVASNPTKAVTLVENHDTQPGQSLESTVQPWFKPLAYAFILTRSGGYPSVFYGDMYGTKGTTTREIPALKSKIEPLLKARKDYAYGTQRDYIDNPDVIGWTREGDSTKAKSGLATVITDGPGGSKRMYVGTSNAGEIWYDLTGNRTDKITIGSDGYATFPVNGGSVSVWVQQ

SEQ ID NO: 34780 - protein, 480 aa, Cytophaga sp.
NGTMMQYFEWYVPNDGQQWNRLRTDAPYLSSVGITAVWTPPAYKGTSQADVGYGPYDLYDLGEFNQKGTVRTKYGTKGELKSAVNTLHSNGIQVYGDVVMNHKAGADYTENVTAVEVNPSNRNQETSGEYNIQAWTGFNFPGRGTTYSNFKWQWFHFDGTDWDQSRSLSRIFKFTGKAWDWEVSSENGNYDYLMYADIDYDHPDVVNEMKKWGVWYANEVGLDGYRLDAVKHIKFSFLKDWVDNARAATGKEMFTVGEYWQNDLGALNNYLAKVNYNQSLFDAPLHYNFYAASTAGGYYDMRNILNNTLVASNPTKAVTLVENHDTQPGQSLESTVQPWFKPLAYAFILTRSGGYPSVFYGDMYGTKGTTTREIPALKSKIEPLLKARKDYAYGTQRDYIDNPDVIGWTREGDSTKAKSGLATVITDGPGGSKRMYVGTSNAGEIWYDLTGNRTDKITIGSDGYATFPVNGGSVSVWVQQ

SEQ ID NO: 34781 - protein, 480 aa, Cytophaga sp.
NGTMMQYFEWYVPNDGQQWNRLRTDAPYLSSVGITAVWTPPAYKGTSQADVGYGPYDLYDLGEFNQKGTVRTKYGTKGELKSAVNTLHSNGIQVYGDVVMNHKAGADYTENVTAVEVNPSNRNQETSGEYNIQAWTGFNFPGRGTTYSNFKWQWFHFDGTDWDQSRSLSRIFKFTGKAWDWEVSSENGNYDYLMYADIDYDHPDVVNEMKKWGVWYANEVGLDGYRLDAVKHIKFSFLKDWVDNARAATGKEMFTVGEYWQNDLGALNNYLAKVNYNQSLFDAPLHYNFYAASTGGGYYDMRNILNNTLVASNPTKAVTLVENHDTQPGQSLESTVQPWFKPLAYAFILTRSGGYPSVFYGDMYGTKGTTTREIPALKSKIEPLLKARKDYAYGTQKDYIDNPDVIGWTREGDSTKAKSGLATVITDGPGGSKRMYVGTSNAGEIWYDLTGNRTDKITIGSDGYATFPVNGGSVSVWVQQ

SEQ ID NO: 34782 - protein, 480 aa, Cytophaga sp.
NGTMMQYFEWYVPNDGQQWNRLRTDAPYLSSVGITAVWTPPAYKGTSQADVGYGPYDLYDLGEFNQKGTVRTKYGTKGELKSAVNTLHSNGIQVYGDVVMNHKAGADYTENVTAVEVNPSNRNQETSGEYNIQAWTGFNFPGRGTTYSNFKWQWFHFDGTDWDSSRSLSRIFKFTGKAWDWEVSSENGNYDYLMYADIDYDHPDVVNEMKKWGVWYANEVGLDGYRLDAVKHIKFSFLKDWVDNARAATGKEMFTVGEYWQNDLGALNNYLAKVNYNQSLFDAPLHYNFYAASTGGGYYDMRNILNNTLVASNPTKAVTLVENHDTQPGQSLESTVQPWFKPLAYAFILTRSGGYPSVFYGDMYGTKGTTTREIPALKSKIEPLLKARKDYAYGTQRDYIDNPDVIGWTREGDSTKAKSGLATVITDGPGGSKRMYVGTSNAGEIWYDLTGNRTDKITIGSDGYATFPVNGGSVSVWVQQ

SEQ ID NO: 34783 - protein, 480 aa, Cytophaga sp.
NGTMMQYFEWYVPNDGQQWNRLRTDAPYLSSVGITAVWTPPAYKGTSQADVGYGPYDLYDLGEFNQKGTVRTKYGTKGELKSAVNTLHSNGIQVYGDVVMNHKAGADWTENVTAVEVNPSNRNQETSGEYNIQAWTGFNFPGRGTTYSNFKWQWFHFDGTDWDQSRSLSRIFKFTGKAWDWEVSSENGNYDYLMYADIDYDHPDVVNEMKKWGVWYANEVGLDGYRLDAVKHIKFSFLKDWVDNARAATGKEMFTVGEYWQNDLGALNNYLAKVNYNQSLFDAPLHYNFYAASTGGGYYDMRNILNNTLVASNPTKAVTLVENHDTQPGQSLESTVQPWFKPLAYAFILTRSGGYPSVFYGDMYGTKGTTTREIPALKSKIEPLLKARKDYAYGTQRDYIDNPDVIGWTREGDSTKAKSGLATVITDGPGGSKRMYVGTSNAGEIWYDLTGNRTDKITIGSDGYATFPVNGGSVSVWVQQ

SEQ ID NO: 34784 - protein, 480 aa, Cytophaga sp.
NGTMMQYFEWYVPNDGQQWNRLRTDAPYLSSVGITAVWTPPAYKGTSQADVGYGPYDLYDLGEFNQKGTVRTKYGTKGELKSAVNTLHSNGIQVYGDVVMNHKAGADYTENVTAVEVNPSNRNQETSGEYNIQAWTGFNFPGRGTTYSNFKWQWFHFDGTDWDQSRSLSRIFKFTGKAWDWEVSSENGNYDYLMYADIDYDHPDVVNEMKKWGVWYANEVGLDGYRLDAVKHIKFSFLKDWVDNARAATGKEMFTVGEYWQNDLGALNNYLAKVNYNQSLFDAPLHYNFYAASTGGGYYDMRNILNNTLVASRPTKAVTLVENHDTQPGQSLESTVQPWFKPLAYAFILTRSGGYPSVFYGDMYGTKGTTTREIPALKSKIEPLLKARKDYAYGTQRDYIDNPDVIGWTREGDSTKAKSGLATVITDGPGGSKRMYVGTSNAGEIWYDLTGNRTDKITIGSDGYATFPVNGGSVSVWVQQ

SEQ ID NO: 34785 - protein, 480 aa, Cytophaga sp.
NGTMMQYFEWYVPNDGQQWNRLRTDAPYLSSVGITAVWTPPAYKGTSQADVGYGPYDLYDLGEFNQKGTVRTKYGTKGELKSAVNTLHSNGIQVYGDVVMNHKAGADYTENVTAVEVNPSNRNQETSGEYNIQAWTGFNFPGRGTTYSNFKWQWFHFDGTDWDQSRSLSRIFKFTGKAWDWEVSSENGNYDYLMYADIDYDHPDVVNEMKKWGVWYANEVGLDGYRLDAVKHIKFSFLKDWVDNARAATGKEMFTVGEYWQNDLGALNNYLAKVNYNQSLFDAPLHYNFYAASTGGGYYDMRNILNNTLVASNPTKAVTLVENHDTQPGQSLESTVQPWFKPLAYAFILTRSGGYPSVFYGDMYGTKGTTTREIPALKHKIEPLLKARKDYAYGTQRDYIDNPDVIGWTREGDSTKAKSGLATVITDGPGGSKRMYVGTSNAGEIWYDLTGNRTDKITIGSDGYATFPVNGGSVSVWVQQ

SEQ ID NO: 34786 - protein, 480 aa, Cytophaga sp.
NGTMMQYFEWYVPNDGQQWNRLRTDAPYLSSVGITAVWTPPAYKGTSQADVGYGPYDLYDLGEFNQKGTVRTKYGTKGELKLAVNTLHSNGIQVYGDVVMNHKAGADYTENVTAVEVNPSNRNQETSGEYNIQAWTGFNFPGRGTTYSNFKWQWFHFDGTDWDQSRSLSRIFKFTGKAWDWEVSSENGNYDYLMYADIDYDHPDVVNEMKKWGVWYANEVGLDGYRLDAVKHIKFSFLKDWVDNARAATGKEMFTVGEYWQNDLGALNNYLAKVNYNQSLFDAPLHYNFYAASTGGGYYDMRNILNNTLVASNPTKAVTLVENHDTQPGQSLESTVQPWFKPLAYAFILTRSGGYPSVFYGDMYGTKGTTTREIPALKSKIEPLLKARKDYAYGTQRDYIDNPDVIGWTREGDSTKAKSGLATVITDGPGGSKRMYVGTSNAGEIWYDLTGNRTDKITIGSDGYATFPVNGGSVSVWVQQ

SEQ ID NO: 34787 - protein, 480 aa, Cytophaga sp.
NGTMMQYFEWYVPNDGQQWNRLRTDAPYLSSVGITAVWTPPAYKGTSQADVGYGPYDLYDLGEFNQKGTVRTKYGTKGELKSAVNTLHSNGIQVYGDVVMNHKAGADYTENVTAVEVNPSNRNQETSGEYNIQAWTGFNFPGRGTTYSNFKWQWFHFDGTDWDQSRSLSRIFKFTGKAWDWEVSSENGNYDYLMYADIDYDHPDVVNEMKKWGVWYANEVGLDGYRLDAVKHIKFSFLKDWVDNARAATGKEMFTVGEYWQNDLGALNNYLAKVNYNQSLFDAPLHYNFYAASTGGGYYDMRNILNNTLVASNPTKAVTLVENHDTQPGQSLESTVQPWFKPLAYAFILTRSGGYPSVFYGDMYGTKGTTTREIPALKSKIEPLLKARKDYAYGTQRDYIDNPDVIGWTREGDSTKAKSGLATVITDGPGGSKRMYVGTSNAGEIWYDMTGNRTDKITIGSDGYATFPVNGGSVSVWVQQ

SEQ ID NO: 34788 - protein, 480 aa, Cytophaga sp.
NGTMMQYFEWYSPNDGQQWNRLRTDAPYLSSVGITAVWTPPAYKGTSQADVGYGPYDLYDLGEFNQKGTVRTKYGTKGELKSAVNTLHSNGIQVYGDVVMNHKAGADYTENVTAVEVNPSNRNQETSGEYNIQAWTGFNFPGRGTTYSNFKWQWFHFDGTDWDQSRSLSRIFKFTGKAWDWEVSSENGNYDYLMYADIDYDHPDVVNEMKKWGVWYANEVGLDGYRLDAVKHIKFSFLKDWVDNARAATGKEMFTVGEYWQNDLGALNNYLAKVNYNQSLFDAPLHYNFYAASTGGGYYDMRNILNNTLVASNPTKAVTLVENHDTQPGQSLESTVQPWFKPLAYAFILTRSGGYPSVFYGDMYGTKGTTTREIPALKSKIEPLLKARKDYAYGTQRDYIDNPDVIGWTREGDSTKAKSGLATVITDGPGGSKRMYVGTSNAGEIWYDLTGNRTDKITIGSDGYATFPVNGGSVSVWVQQ

SEQ ID NO: 34789 - protein, 480 aa, Cytophaga sp.
NGTMMQYFEWYVPNDGQQWNRLRTDAPYLSSVGITAVWTPPAYKGTSQADVGYGPYDLYDLGEFNQKGTVRTKYGTKGELKSAVNTLHSNGIQVYGDVVMNHKAGADYTENVTAVEVNPCNRNQETSGEYNIQAWTGFNFPGRGTTYSNFKWQWFHFDGTDWDQSRSLSRIFKFTGKAWDWEVSSENGNYDYLMYADIDYDHPDVVNEMKKWGVWYANEVGLDGYRLDAVKHIKFSFLKDWVDNARAATGKEMFTVGEYWQNDLGALNNYLAKVNYNQSLFDAPLHYNFYAASTGGGYYDMRNILNNTLVASNPTKAVTLVENHDTQPGQSLESTVQPWFKPLAYAFILTRSGGYPSVFYGDMYGTKGTTTREIPALKSKIEPLLKARKDYAYGTQRDYIDNPDVIGWTREGDSTKAKSGLATVITDGPGGSKRMYVGTSNAGEIWYDLTGNRTDKITIGSDGYATFPVNGGSVSVWVQQ

SEQ ID NO: 34790 - protein, 480 aa, Cytophaga sp.
NGTMMQYFEWYVPNDGQQWNRLRTDAPYLSSVGITAVWTPPAYKGTSQADVGYGPYDLYDLGEFNQKGTVRTKYGTKGELKSAVNTLHSNGIQVYGDVVMNHKAGADYTENVTAVEVNPSNRNQETSGEYNIQAWTGFNFPGRGTTYSNFKWDWFHFDGTDWDQSRSLSRIFKFTGKAWDWEVSSENGNYDYLMYADIDYDHPDVVNEMKKWGVWYANEVGLDGYRLDAVKHIKFSFLKDWVDNARAATGKEMFTVGEYWQNDLGALNNYLAKVNYNQSLFDAPLHYNFYAASTGGGYYDMRNILNNTLVASNPTKAVTLVENHDTQPGQSLESTVQPWFKPLAYAFILTRSGGYPSVFYGDMYGTKGTTTREIPALKSKIEPLLKARKDYAYGTQRDYIDNPDVIGWTREGDSTKAKSGLATVITDGPGGSKRMYVGTSNAGEIWYDLTGNRTDKITIGSDGYATFPVNGGSVSVWVQQ

SEQ ID NO: 34791 - protein, 480 aa, Cytophaga sp.
NGTMMQYFEWYVPNDGQQWNRLRTDAPYLSSVGITAVWTPPAYKGTSQADVGYGPYDLYDLGEFNQKGTVRTKYGTKGELKSAVNTLHSNGIQVYGDVVMNHKAGADYTENVTAVEVNPSNRNQETSGEYNIQAWTGFNFPGRGTTYSNFKWQWFHFDGTDWDQSRCLSRIFKFTGKAWDWEVSSENGNYDYLMYADIDYDHPDVVNEMKKWGVWYANEVGLDGYRLDAVKHIKFSFLKDWVDNARAATGKEMFTVGEYWQNDLGALNNYLAKVNYNQSLFDAPLHYNFYAASTGGGYYDMRNILNNTLVASNPTKAVTLVENHDTQPGQSLESTVQPWFKPLAYAFILTRSGGYPSVFYGDMYGTKGTTTREIPALKSKIEPLLKARKDYAYGTQRDYIDNPDVIGWTREGDSTKAKSGLATVITDGPGGSKRMYVGTSNAGEIWYDLTGNRTDKITIGSDGYATFPVNGGSVSVWVQQ

SEQ ID NO: 34792 - protein, 480 aa, Cytophaga sp.
NGTMMQYFEWYVPNDGQQWNRLRTDAPYLSSVGITAVWTPPAYKGGSQADVGYGPYDLYDLGEFNQKGTVRTKYGTKGELKSAVNTLHSNGIQVYGDVVMNHKAGADYTENVTAVEVNPSNRNQETSGEYNIQAWTGFNFPGRGTTYSNFKWQWFHFDGTDWDQSRSLSRIFKFTGKAWDWEVSSENGNYDYLMYADIDYDHPDVVNEMKKWGVWYANEVGLDGYRLDAVKHIKFSFLKDWVDNARAATGKEMFTVGEYWQNDLGALNNYLAKVNYNQSLFDAPLHYNFYAASTGGGYYDMRNILNNTLVASNPTKAVTLVENHDTQPGQSLESTVQPWFKPLAYAFILTRSGGYPSVFYGDMYGTKGTTTREIPALKSKIEPLLKARKDYAYGTQRDYIDNPDVIGWTREGDSTKAKSGLATVITDGPGGSKRMYVGTSNAGEIWYDLTGNRTDKITIGSDGYATFPVNGGSVSVWVQQ

SEQ ID NO: 34793 - protein, 480 aa, Cytophaga sp.
NGTMMQYFEWYVPNDGQQWNRLRTDAPYLSSVGITAVWTPPAYKGTSQADVGYGPYDLYDLGEFNQKGTVRTKYGTKGELKSAVNTLHSNGIQVYGDVVMNHKAGADYTENVTAVEVNPYNRNQETSGEYNIQAWTGFNFPGRGTTYSNFKWQWFHFDGTDWDQSRSLSRIFKFTGKAWDWEVSSENGNYDYLMYADIDYDHPDVVNEMKKWGVWYANEVGLDGYRLDAVKHIKFSFLKDWVDNARAATGKEMFTVGEYWQNDLGALNNYLAKVNYNQSLFDAPLHYNFYAASTGGGYYDMRNILNNTLVASNPTKAVTLVENHDTQPGQSLESTVQPWFKPLAYAFILTRSGGYPSVFYGDMYGTKGTTTREIPALKSKIEPLLKARKDYAYGTQRDYIDNPDVIGWTREGDSTKAKSGLATVITDGPGGSKRMYVGTSNAGEIWYDLTGNRTDKITIGSDGYATFPVNGGSVSVWVQQ

SEQ ID NO: 34794 - protein, 480 aa, Cytophaga sp.
NGTMMQYFEWYVPNDGQQWNRLRTDAPYLSSVGITAVWTPPAYKGTSQADVGYGPYDLYDLGEFNQKGTVRTKYGTKGELKSAVNTLHSNGIQVYGDVVMNHKAGADYTENVTAVEVNPSNRNQETSGEYNIQAWTGFNFPGRGTTYSNFKWQWFHFDGTDWDQSRSLSRIFKFTGKAWDWEVSSENGNYDYLMYADIDYDHPDVVNEMKKWGVWYANEVGLDGYRLDAVKHIKFSFLKDWVDNARAATGKEMFTVGEYWQNDLGALNNYLAKVNYNQSLFDAPLHYNFYAASTGGGYYDMRNILNNTLVASNPTKAVTLVENHDTQPGQSLESTVQPWFKPLAYAFILTRAGGYPSVFYGDMYGTKGTTTREIPALKSKIEPLLKARKDYAYGTQRDYIDNPDVIGWTREGDSTKAKSGLATVITDGPGGSKRMYVGTSNAGEIWYDLTGNRTDKITIGSDGYATFPVNGGSVSVWVQQ

SEQ ID NO: 34795 - protein, 480 aa, Cytophaga sp.
NGTMMQYFEWYVPNDGQQWNRLRTDAPYLSSVGITAVWTPPAYKGTSQADVGYGPYDLYDLGEFNQKGTVRTKYGTKGELKSAVNTLHSNGIQVYGDVVMNHKAGADYTENVTAVEVNPSNRNQETSGEYNIQAWTGFNFPGRGTTYSNFKWQWFHFDGTDWDQSRSLSRIFKFTGKAWDWEVSSENGNYDYLMYADIDYDHPDVVNEMKKWGVWYANEVGLDGYRLDAVKHIKFSFLKDWVDKARAATGKEMFTVGEYWQNDLGALNNYLAKVNYNQSLFDAPLHYNFYAASTGGGYYDMRNILNNTLVASNPTKAVTLVENHDTQPGQSLESTVQPWFKPLAYAFILTRSGGYPSVFYGDMYGTKGTTTREIPALKSKIEPLLKARKDYAYGTQRDYIDNPDVIGWTREGDSTKAKSGLATVITDGPGGSKRMYVGTSNAGEIWYDLTGNRTDKITIGSDGYATFPVNGGSVSVWVQQ

SEQ ID NO: 34796 - protein, 480 aa, Cytophaga sp.
NGTMMQYFEWYVPNDGQQWNRLRTDAPYLSSVGITAVWTPPAYKGTSQADVGYGPYDLYDLGEFNQKGTVRTKYGTKGELKSAVNTLHSNGIQVYGDVVMNHKAGADYTENVTAVEVNPSNRNQETSGEYNIQAWTGFNFPGRGTTYSNFKWQWFHFDGTDWDQSRSLSRIFKFTGKAWDWEVSSENGNYDYLMYADIDYDHPDVVNEMKKWGVWYANEVGLDGYRLDAVKHIKFSFLKDWVDNARAATGKEMFTVGEYWQNDLGALNNYLAKVNYNQSLFDAPLHYNFYAASTGGGYYDMRNILNNTLVASNPTKAVTLVENHDTQPGQSLESTVQPWFKPLAYAFILTRSGGYPSVFYGDMYGTKGTTTREIPALKSKIEPLLKARKDYAYGTQRDYIDNPDVIGWTREGDSTKAKSGLATVITDGPGGSKRMYVGTSNAGEIWYDLTGNRTDKITIGSDGYAGFPVNGGSVSVWVQQ

SEQ ID NO: 34797 - protein, 480 aa, Cytophaga sp.
NGTMMQYFEWYVPNDGQQWNRLRTDAPYLSSVGITAVWTPPAYKGTSQADVGYGPYDLYDLGEFNQKGTVRTKYGTKGELKSAVNTLHSNGIQVYGDVVMNHKAGADYTENVTAVEVNPSNRNQETSGEYNIQAWTGFNFPGRGTTYSNFKWQWFHFDGTDWDQSRSLSRIFKFTGKAWDWEVSSENGNYDYLMYADIDYDHPDVVNEMKKWGVWYANEVGLDGYRVDAVKHIKFSFLKDWVDNARAATGKEMFTVGEYWQNDLGALNNYLAKVNYNQSLFDAPLHYNFYAASTGGGYYDMRNILNNTLVASNPTKAVTLVENHDTQPGQSLESTVQPWFKPLAYAFILTRSGGYPSVFYGDMYGTKGTTTREIPALKSKIEPLLKARKDYAYGTQRDYIDNPDVIGWTREGDSTKAKSGLATVITDGPGGSKRMYVGTSNAGEIWYDLTGNRTDKITIGSDGYATFPVNGGSVSVWVQQ

SEQ ID NO: 34798 - protein, 480 aa, Cytophaga sp.
NGTMMQYFEWYVPNDGQQWNRLRTDAPYLSSVGITAVWTPPAYKGTSQADVGYGPYDLYDLGEFNQKGTVRTKYGTKGELKSAVNTLHSNGIQVYGDVVMNHKAGADYTENVTAVEVNPSNRNQETSGEYNIQAWTGFNFPGRGTTYSNFKWQWFHFDGTDWDQSRSLSRIFKFTGKAWDWEVSSENGNYDYLMYADIDYDHPDVVNEMKKWGVWYANEVGLDGYRLDAVKHIKFSFLKDWVDNARAATGKEMFTVGEYWQNDLGALNNYLAKVNYNQSLFDAPLHYNFYAASTGGGYYDMRNILNNTLVASNPTKAVTLVENHDTQPGQSLESTVQPWFKPLAYAFILTRSGGYPSVFYGDMYGTKGTTTMEIPALKSKIEPLLKARKDYAYGTQRDYIDNPDVIGWTREGDSTKAKSGLATVITDGPGGSKRMYVGTSNAGEIWYDLTGNRTDKITIGSDGYATFPVNGGSVSVWVQQ

SEQ ID NO: 34799 - protein, 480 aa, Cytophaga sp.
NGTMMQYFEWYVPNDGQQWNRLRTDAPYLSSVGITAVWTPPAYKGTSQADVGYGPYDLYDLGEFNQKGTVRTKYGTKGELKSAVNTLHSNGIQVYGDVVMNHKAGADYTENVTAVEVNPSNRNQETSGEYNIQAWTGFNFPGRGTTYSNFKWQWFHFDGTDWDQSRSLSRIFKFTGKAWDWEVSSENGNYDYLMYADIDYDHPDVVNEMKKWGVWYANEVGLDGYRLDAVKHIKFSFLKDWVDNARAATGKEMFTVGEYWQNDLGALNNYLAKVNYNQSLFDAPLHYNFYAASTGGGYYDMRNILNNTLVASNPTKAVTLVENHDTQPGQSLESTVQPWFKPLAYAFILTRSGGYPSVFYGDMYGTKGTTTREIPALKSKIEPLLKARKDYAYGTQRDYIDNPDVIGWTREGDSTKAKSGLATVITDGPGGSKRMYVGTSNAGEIWYDLTGNRTDKITIGSDGYAAFPVNGGSVSVWVQQ

SEQ ID NO: 34800 - protein, 480 aa, Cytophaga sp.
NGTMMQYFEWYVPNDGQQWNRLRTDAPYLSSVGITAVWTPPAYKGTSQADVGYGPYDLYDLGEFNQKGTVRTKYGTKGELKSAVNTLHSNGIQVYGDVVMNHKAGADYTENVTAVEVNPSNRNQETSGEYNIQAWTGFNFPGRGTTYSNFKWQWFHFDGTDWDQSRSLSRIFKFTGKAWDWEVSSENGNYDYLMYADIDYDHPDVVNEMKKWGVWYANEVGLDGYRLDAVKHIKFSFLKDWVDNARAATGKEMFTVGEYWQNDLGALNNYLAKVNYNQSLFDAPLHYNFYAASTGGGYYDMRNILNNTLVASNPTKAVTLVENHDTQPGQSLESTVQPWFKPLAYAFILTRSGGYPSVFYGDMYGTKGTTTREIPALKSKIEPLLKARKDYAYGTQRDYIDNPDVIGWTREGDSAKAKSGLATVITDGPGGSKRMYVGTSNAGEIWYDLTGNRTDKITIGSDGYATFPVNGGSVSVWVQQ

SEQ ID NO: 34801 - protein, 480 aa, Cytophaga sp.
NGTMMQYFEWYVPNDGQWWNRLRTDAPYLSSVGITAVWTPPAYKGTSQADVGYGPYDLYDLGEFNQKGTVRTKYGTKGELKSAVNTLHSNGIQVYGDVVMNHKAGADYTENVTAVEVNPSNRNQETSGEYNIQAWTGFNFPGRGTTYSNFKWQWFHFDGTDWDQSRSLSRIFKFTGKAWDWEVSSENGNYDYLMYADIDYDHPDVVNEMKKWGVWYANEVGLDGYRLDAVKHIKFSFLKDWVDNARAATGKEMFTVGEYWQNDLGALNNYLAKVNYNQSLFDAPLHYNFYAASTGGGYYDMRNILNNTLVASNPTKAVTLVENHDTQPGQSLESTVQPWFKPLAYAFILTRSGGYPSVFYGDMYGTKGTTTREIPALKSKIEPLLKARKDYAYGTQRDYIDNPDVIGWTREGDSTKAKSGLATVITDGPGGSKRMYVGTSNAGEIWYDLTGNRTDKITIGSDGYATFPVNGGSVSVWVQQ

SEQ ID NO: 34802 - protein, 480 aa, Cytophaga sp.
NGTMMQYFEWYVPNDGQQWNRLRTDAPYLSSVGITAVWTPPAYKGTSQADVGYGPYDLYDLGEFNQKGTVRTKYGTKGELKSAVNTLHSNGIQVYGDVVMNHKAGADYTENVTAVEVNPSNRNQETSGEYNIQAWTGFNFPGRGTTYSNFKWQWFHFDGTDWDQSRSLSRIFKFTGKAWDWEVSSENGNYDYLMYADIDYDHPDVVNEMKKWGVWYANEVGLDGYRLDAVKHIKFSFLKDWVDNARAATGKEMFTVGEYWQNDLGALNNYLAKVNYNQSLFDAPLHYNFYAASTGGGYYDMRNILNNTLVASNPTKAVTLVENHDTQPGQSLESTVQPWFKPLAYAFILTRNGGYPSVFYGDMYGTKGTTTREIPALKSKIEPLLKARKDYAYGTQRDYIDNPDVIGWTREGDSTKAKSGLATVITDGPGGSKRMYVGTSNAGEIWYDLTGNRTDKITIGSDGYATFPVNGGSVSVWVQQ

SEQ ID NO: 34803 - protein, 480 aa, Cytophaga sp.
NGTMMQYFEWYVPNDGQQWNRLRTDAPYLSSVGITAVWTPPAYKGTSQADVGYGPYDLYDLGEFNQKGTVRTKYGTKGELKSAVNTLHSNGIQVYGDVVMNHKAGADYTENVTAVEVNPSNRNQETSGEYNIQAWTGFNFPGRGTTYSNFKWQWFHFDGTDWDQSRSLSRIFKFTGKAWDWEVSSENGNYDYLMYADIDYDHPDVVNEMKKWGVWYANEVGLDGYRLDAVKHIKFSFLKDWVDNARAATGKEMFTVGEYWQNDLGALNNYLAKVNYNQSLFDAPLHYNFYAASTGGGYYDMRNILNNTLVASNPTKAVTLVENHDTQPGQSLESTVQPWFKPLAYAFILTRSGGYPSVFYGDMYGTKGTTTREIPALKSKIEPLLKARKDYAYGTQRDYIDNPDVIGWTREGDSTKAKSGLATVITDGPGGSKRMYVGTSNAGEIWYDLTGNRTDKITIGSDGYATFPVNAGSVSVWVQQ

SEQ ID NO: 34804 - protein, 480 aa, Cytophaga sp.
NGTMMQYFEWYVPNDGQQWNRLRTDAPYLSSVGITAVWTPPAYKGTSQADVGYGPYDLYDLGEFNQKGTVRTKYGTKGELKSAVNTLHSNGIQVYGDVVMNHKAGADYTENVTAVEVNPSNRNQETSGEYNIQAWTGFNFPGRGTTYSNFKWQWPHFDGTDWDQSRSLSRIFKFTGKAWDWEVSSENGNYDYLMYADIDYDHPDVVNEMKKWGVWYANEVGLDGYRLDAVKHIKFSFLKDWVDNARAATGKEMFTVGEYWQNDLGALNNYLAKVNYNQSLFDAPLHYNFYAASTGGGYYDMRNILNNTLVASNPTKAVTLVENHDTQPGQSLESTVQPWFKPLAYAFILTRSGGYPSVFYGDMYGTKGTTTREIPALKSKIEPLLKARKDYAYGTQRDYIDNPDVIGWTREGDSTKAKSGLATVITDGPGGSKRMYVGTSNAGEIWYDLTGNRTDKITIGSDGYATFPVNGGSVSVWVQQ

SEQ ID NO: 34805 - protein, 480 aa, Cytophaga sp.
NGTMMQYFEWYVPNDGQQWNRLRTDAPYLSSVGITAVWTPPAYKGTSQADVGYGPYDLYDLGEFNQKGTVRTKYGTKGELKSAVNTLHSNGIQVYGDVVMNHKAGADYTENVTAVEVNPSNRNQETSGEYNIQAWTGFNFPGRGTTYSNFKWQWFHFDGTDWDQSRSLSRIFKFTGKAWDWEVSSENGNYDYLMYADIDYDHPDVVNEMKKWGVWYANEVGLDGYRLDAVKHIKFSFLKDWVDNARAATGKEMFTVGEYWQNDLGALNNYLAKVNYNQSLFDAPLHYNFYAASTGGGYYDMRNILNNTLVASNPTKAVTLVENHDTQPGQSLESTVQPWFKPLAYAFILTRSGGYPSVFYGDMYGTKGTTTREIPALKSKIEPLLKARKYYAYGTQRDYIDNPDVIGWTREGDSTKAKSGLATVITDGPGGSKRMYVGTSNAGEIWYDLTGNRTDKITIGSDGYATFPVNGGSVSVWVQQ

SEQ ID NO: 34806 - protein, 480 aa, Cytophaga sp.
NGTMMQYFEWYVPNDGQQWNRLRTDAPYLSSVGITAVWTPPAYKGTSQADVGYGPYDLYDLGEFNQKGTVRTKYGTKGELKSAVNTLHSNGIQVYGDVVMNHKAGADYTENVTAVEVNPSNRNQETSGEYNIQAWTGFNFPGRGATYSNFKWQWFHFDGTDWDQSRSLSRIFKFTGKAWDWEVSSENGNYDYLMYADIDYDHPDVVNEMKKWGVWYANEVGLDGYRLDAVKHIKFSFLKDWVDNARAATGKEMFTVGEYWQNDLGALNNYLAKVNYNQSLFDAPLHYNFYAASTGGGYYDMRNILNNTLVASNPTKAVTLVENHDTQPGQSLESTVQPWFKPLAYAFILTRSGGYPSVFYGDMYGTKGTTTREIPALKSKIEPLLKARKDYAYGTQRDYIDNPDVIGWTREGDSTKAKSGLATVITDGPGGSKRMYVGTSNAGEIWYDLTGNRTDKITIGSDGYATFPVNGGSVSVWVQQ

SEQ ID NO: 34807 - protein, 480 aa, Cytophaga sp.
NGTMMQYFEWYVPNDGQQWNRLRTDAPYLSSVGITAVWTPPAYKGTSQADVGYGPYDLYDLGEFNQKGTVRTKYGTKGELKSAVNTLHSNGIQVYGDVVMNHKAGADYTENVTAVEVNPSNRNQETSGEYNIQAWTGFNFPGRGTTYSNFKWQWFHFDGTDWDQSRSLSRIFKFTGKAWDWEVSSENGNYDYLMYADIDYDHPDVVNEMKKWGVWYANEVGLDGYRLDAVKHIKFSFLQDWVDNARAATGKEMFTVGEYWQNDLGALNNYLAKVNYNQSLFDAPLHYNFYAASTGGGYYDMRNILNNTLVASNPTKAVTLVENHDTQPGQSLESTVQPWFKPLAYAFILTRSGGYPSVFYGDMYGTKGTTTREIPALKSKIEPLLKARKDYAYGTQRDYIDNPDVIGWTREGDSTKAKSGLATVITDGPGGSKRMYVGTSNAGEIWYDLTGNRTDKITIGSDGYATFPVNGGSVSVWVQQ

SEQ ID NO: 34808 - protein, 480 aa, Cytophaga sp.
NGTMMQYFEWYVPNDGQQWNRLRMDAPYLSSVGITAVWTPPAYKGTSQADVGYGPYDLYDLGEFNQKGTVRTKYGTKGELKSAVNTLHSNGIQVYGDVVMNHKAGADYTENVTAVEVNPSNRNQETSGEYNIQAWTGFNFPGRGTTYSNFKWQWFHFDGTDWDQSRSLSRIFKFTGKAWDWEVSSENGNYDYLMYADIDYDHPDVVNEMKKWGVWYANEVGLDGYRLDAVKHIKFSFLKDWVDNARAATGKEMFTVGEYWQNDLGALNNYLAKVNYNQSLFDAPLHYNFYAASTGGGYYDMRNILNNTLVASNPTKAVTLVENHDTQPGQSLESTVQPWFKPLAYAFILTRSGGYPSVFYGDMYGTKGTTTREIPALKSKIEPLLKARKDYAYGTQRDYIDNPDVIGWTREGDSTKAKSGLATVITDGPGGSKRMYVGTSNAGEIWYDLTGNRTDKITIGSDGYATFPVNGGSVSVWVQQ

SEQ ID NO: 34809 - protein, 480 aa, Cytophaga sp.
NGTMMQYFEWYVPNDGQQWNRLRTDAPYLSSVGITAVWTPPAYKGTSQADVGYGPYDLYDLGEFNQKGTVRTKYGTKGELKSAVNTLHSNGIQVYGDVVMNHKAGADVTENVTAVEVNPSNRNQETSGEYNIQAWTGFNFPGRGTTYSNFKWQWFHFDGTDWDQSRSLSRIFKFTGKAWDWEVSSENGNYDYLMYADIDYDHPDVVNEMKKWGVWYANEVGLDGYRLDAVKHIKFSFLKDWVDNARAATGKEMFTVGEYWQNDLGALNNYLAKVNYNQSLFDAPLHYNFYAASTGGGYYDMRNILNNTLVASNPTKAVTLVENHDTQPGQSLESTVQPWFKPLAYAFILTRSGGYPSVFYGDMYGTKGTTTREIPALKSKIEPLLKARKDYAYGTQRDYIDNPDVIGWTREGDSTKAKSGLATVITDGPGGSKRMYVGTSNAGEIWYDLTGNRTDKITIGSDGYATFPVNGGSVSVWVQQ

SEQ ID NO: 34810 - protein, 480 aa, Cytophaga sp.
NGTMMQYFEWYVPNDGQQWNRLRTDAPYLSSVGITAVWTPPAYKGTSQADVGYGPYDLYDLGEFNQKGTVRTKYGTKGELKSAVNTLHSNGIQVYGDVVMNHKAGADYTENVTAVEVNPSNRNQETSGEYNIQAWTGFNFPGRGTTYSNFKWQWFHFDGTDWDQSRSLSRIFKFTGKAWDWEVSSENGNYDYLMYADIDYDHPDVVNEMKKWGVWYANEVGLDGYRLDAVKHIKFSFLKDWVDNARAATGKEMFTVGEYWQNDLGALNNYLAKVNYNQSLFDAPLHYNFYAASTGGGYYDMRNILNNTLVASNPTKAVTLVENHDTQPGQSLESTVQPWFKPLAYAFILTRSGGYPSVFYGDMYGTKGTTTREIPALKSKIEPLLKARKDYAYGTQSDYIDNPDVIGWTREGDSTKAKSGLATVITDGPGGSKRMYVGTSNAGEIWYDLTGNRTDKITIGSDGYATFPVNGGSVSVWVQQ

SEQ ID NO: 34811 - protein, 480 aa, Cytophaga sp.
NGTMMQYFEWYVPNDGQQWNRLRTDAPYLSSVGITAVWTPPAYKGTSQADVGYGPYDLYDLGEFNQKGTVRTKYGTKGELKSAVNTLHSNGIQVYGDVVMNHKAGADYTENVTAVEVNPSNRNQETSWEYNIQAWTGFNFPGRGTTYSNFKWQWFHFDGTDWDQSRSLSRIFKFTGKAWDWEVSSENGNYDYLMYADIDYDHPDVVNEMKKWGVWYANEVGLDGYRLDAVKHIKFSFLKDWVDNARAATGKEMFTVGEYWQNDLGALNNYLAKVNYNQSLFDAPLHYNFYAASTGGGYYDMRNILNNTLVASNPTKAVTLVENHDTQPGQSLESTVQPWFKPLAYAFILTRSGGYPSVFYGDMYGTKGTTTREIPALKSKIEPLLKARKDYAYGTQRDYIDNPDVIGWTREGDSTKAKSGLATVITDGPGGSKRMYVGTSNAGEIWYDLTGNRTDKITIGSDGYATFPVNGGSVSVWVQQ

SEQ ID NO: 34812 - protein, 480 aa, Cytophaga sp.
NGTMMQYFEWYVPNDGQQWNRLRTDAPYLSSVGITAVWTPPAYKGTSQTDVGYGPYDLYDLGEFNQKGTVRTKYGTKGELKSAVNTLHSNGIQVYGDVVMNHKAGADYTENVTAVEVNPSNRNQETSGEYNIQAWTGFNFPGRGTTYSNFKWQWFHFDGTDWDQSRSLSRIFKFTGKAWDWEVSSENGNYDYLMYADIDYDHPDVVNEMKKWGVWYANEVGLDGYRLDAVKHIKFSFLKDWVDNARAATGKEMFTVGEYWQNDLGALNNYLAKVNYNQSLFDAPLHYNFYAASTGGGYYDMRNILNNTLVASNPTKAVTLVENHDTQPGQSLESTVQPWFKPLAYAFILTRSGGYPSVFYGDMYGTKGTTTREIPALKSKIEPLLKARKDYAYGTQRDYIDNPDVIGWTREGDSTKAKSGLATVITDGPGGSKRMYVGTSNAGEIWYDLTGNRTDKITIGSDGYATFPVNGGSVSVWVQQ

SEQ ID NO: 34813 - protein, 480 aa, Cytophaga sp.
NGTMMQYFEWYVPNDGQQWNRLRTDAPYLSSVGITAVWTPPAYKGTSQADVGYGPYDLYDLGEFNQKGTVRTKYGTKGELKSAVNTLHSNGIQVYGDVVMNHKAGADYTENVTAVEVNPSNRNQETSGEYNIQAWTGFNFPGRGTTYSNFKWQWFHFDGTDWDQSRSLSRIFKFTGKAWDWEVSSENGNYDYLMYADIDYDHPDVVNEMKKWGVWYANEVGLDGYRLDAVKHIKFSFLKDWVDNARAATGKEMFTVGEYWQNDLGALNNYLAKVNYNQSLFDAPLHYNFYAASTGGGYYDMRNILNNTLVASNPTKAVTLVENHDTQPGQSLESTVQPWFKPLAYAFILTRSGGYPSVFYGDMYGTKGTTTREIPALKSKIEPLLKARKDYAYGTQRDYIDNPDVIGWTREGDSTKAKSGLATVITDGPGGSKRMYVGTSNAGEIWYDTTGNRTDKITIGSDGYATFPVNGGSVSVWVQQ

SEQ ID NO: 34814 - protein, 480 aa, Cytophaga sp.
NGTMMQYFEWYVPNDGQQWNRLRTDAPYLSSVGITAVWTPPAYKGTSQADVGYGPYDLYDLGEFNQKGTVRTKYGTKHELKSAVNTLHSNGIQVYGDVVMNHKAGADYTENVTAVEVNPSNRNQETSGEYNIQAWTGFNFPGRGTTYSNFKWQWFHFDGTDWDQSRSLSRIFKFTGKAWDWEVSSENGNYDYLMYADIDYDHPDVVNEMKKWGVWYANEVGLDGYRLDAVKHIKFSFLKDWVDNARAATGKEMFTVGEYWQNDLGALNNYLAKVNYNQSLFDAPLHYNFYAASTGGGYYDMRNILNNTLVASNPTKAVTLVENHDTQPGQSLESTVQPWFKPLAYAFILTRSGGYPSVFYGDMYGTKGTTTREIPALKSKIEPLLKARKDYAYGTQRDYIDNPDVIGWTREGDSTKAKSGLATVITDGPGGSKRMYVGTSNAGEIWYDLTGNRTDKITIGSDGYATFPVNGGSVSVWVQQ

SEQ ID NO: 34815 - protein, 480 aa, Cytophaga sp.
NGTMMQYFEWYVPNDGQQWNRLRTDAPYLSSVGITAVWTPPAYKGTSQADVGYGPYDLYDLGEFNQKGTVRTKYGTKGELKSAVNTLHSNGIQVYGDVVMNHKAGADYTENVTAVEVNPSNRNQETSGEYNIYAWTGFNFPGRGTTYSNFKWQWFHFDGTDWDQSRSLSRIFKFTGKAWDWEVSSENGNYDYLMYADIDYDHPDVVNEMKKWGVWYANEVGLDGYRLDAVKHIKFSFLKDWVDNARAATGKEMFTVGEYWQNDLGALNNYLAKVNYNQSLFDAPLHYNFYAASTGGGYYDMRNILNNTLVASNPTKAVTLVENHDTQPGQSLESTVQPWFKPLAYAFILTRSGGYPSVFYGDMYGTKGTTTREIPALKSKIEPLLKARKDYAYGTQRDYIDNPDVIGWTREGDSTKAKSGLATVITDGPGGSKRMYVGTSNAGEIWYDLTGNRTDKITIGSDGYATFPVNGGSVSVWVQQ

SEQ ID NO: 34816 - protein, 480 aa, Cytophaga sp.
NGTMMQYFEWYVPNDGQQWNRLRTDAPYLSSVGITAVWTPPAYKGTSQADVGYGPYDLYDLGEFNQKGTVRTKYGTKEELKSAVNTLHSNGIQVYGDVVMNHKAGADYTENVTAVEVNPSNRNQETSGEYNIQAWTGFNFPGRGTTYSNFKWQWFHFDGTDWDQSRSLSRIFKFTGKAWDWEVSSENGNYDYLMYADIDYDHPDVVNEMKKWGVWYANEVGLDGYRLDAVKHIKFSFLKDWVDNARAATGKEMFTVGEYWQNDLGALNNYLAKVNYNQSLFDAPLHYNFYAASTGGGYYDMRNILNNTLVASNPTKAVTLVENHDTQPGQSLESTVQPWFKPLAYAFILTRSGGYPSVFYGDMYGTKGTTTREIPALKSKIEPLLKARKDYAYGTQRDYIDNPDVIGWTREGDSTKAKSGLATVITDGPGGSKRMYVGTSNAGEIWYDLTGNRTDKITIGSDGYATFPVNGGSVSVWVQQ

SEQ ID NO: 34817 - protein, 480 aa, Cytophaga sp.
NGTMMQYFEWYVPNDGQQWNRLRTDAPYLSSVGITAVWTPPAYKGTSQADVGYGPYDLYDLGEFNQKGTVRTKYGTKGELKSAVNTLHSNGIQVYGDVVMNHKAGADYTENVTAVEVNPSNRNQETSGEYNIQAWTGFNFPGRGTTYSNFKWQWFHFDGTDWDQSRSLSRIFKFTGKAWDWEVSSENGNYDYLMYADIDYDHPDVVNEMKKWGVWYANEVGLDGYRLDAVKHIKFSFLKDWVDNARAATGKEMFTVGEYWQNDLGALNNYLAKVNYNQSLFDAPLHYNFYAASTGGGYYDMRNILNNTLVASNPTKAVTLVENHDTQPGQSLESTVQPWFKPLAYAFILTRSGGYPSVFYGDMYGTKGTTTREIPALKSKIEPLLKARKDYAYGTQRDYIDNPDVIGWTREGDSTKAKSGLATVITDGPGGSKRMYVGTSNAGEIWYDLTGNRTDGITIGSDGYATFPVNGGSVSVWVQQ

SEQ ID NO: 34818 - protein, 480 aa, Cytophaga sp.
NGTMMQYFEWYVPNDGQQWNRLRTDAPYLSSVGITAVWTPPAYKGTSQADVGYGPYDLYDLGEFNQKGTVRTKYGTKGELKSAVNTLHSNGIQVYGDVVMNHKAGADYTENVTAVEVNPSNRNQETSGEYNIQAWTGFNFPGRGTTYSNFKWQWFHFDGTDWDQSRSLSRIFKFTGKAWDWEVSSENGNYDYLMYADIDYDHPDVVNEMKKWGVWYANEVGLDGYRLDAVKHIKFSFLKDWVDNARAATGKEMFTVGEYWQNDLGALNNYLAKVNYNQSLFDAPLHYNFYAASTGGGYYDMRNILNNTLVASNPTKAVTLVENHDTQPGQSLESTVQPWFKPLAYAFILTRSGGYPSVFYGDMYGTKGTTTREIPALKSKIEPLLKARKDYAYGTQRDYIDNPDVIGWTREGDSTKAKSGLATVITDGPGGSKRMYVGESNAGEIWYDLTGNRTDKITIGSDGYATFPVNGGSVSVWVQQ

SEQ ID NO: 34819 - protein, 480 aa, Cytophaga sp.
NGTMMQYFEWYVPNDGQQWNRLRTDAPYLSSVGITAVWTPPAYKGTSQADVGYGPYDLYDLGEFNQKGTVRTKYGTKGELKSAVNTLHSNGIQVYGDVVMNHKAGADYTENVTAVEVNPSNRNQETSGEYNIQAWTGFNFPGRGTTYSNFKWQWFHFDGTDWDQSRSLSRIFKFTGKAWDWEVSSENGNYDYLMYADIDYDHPDVVNEMKKWGVWYANEVGLDGYRLDAVKHIKFSFLKDWVDNARAATGKEMFTVGEYWQNDLGALNNYLAKVNYNQSLFDAPLHYNFYAASTGGGYYDMRNILNNTLVASNPTKAVTLVENHDTQPGQSLESTVQPWFKPLAYAFILTRSGGYPSVFYGDMYGTKGTTTREIPALKSKIEPLLKARKDYAYGTQFDYIDNPDVIGWTREGDSTKAKSGLATVITDGPGGSKRMYVGTSNAGEIWYDLTGNRTDKITIGSDGYATFPVNGGSVSVWVQQ

SEQ ID NO: 34820 - protein, 480 aa, Cytophaga sp.
NGTMMQYFEWYVPNDGQQWNRLRTDAPYLSSVGITAVWTPPAYKGTSQADVGYGPYDLYDLGEFNQKGTVRTKYGTKGELKSAVNTLHSNGIQVYGDVVMNHKAGADYTENVTAVEVNPSNRNQETSGEYNIQAWTGFNFPGRGTTYSNFKWQWRHFDGTDWDQSRSLSRIFKFTGKAWDWEVSSENGNYDYLMYADIDYDHPDVVNEMKKWGVWYANEVGLDGYRLDAVKHIKFSFLKDWVDNARAATGKEMFTVGEYWQNDLGALNNYLAKVNYNQSLFDAPLHYNFYAASTGGGYYDMRNILNNTLVASNPTKAVTLVENHDTQPGQSLESTVQPWFKPLAYAFILTRSGGYPSVFYGDMYGTKGTTTREIPALKSKIEPLLKARKDYAYGTQRDYIDNPDVIGWTREGDSTKAKSGLATVITDGPGGSKRMYVGTSNAGEIWYDLTGNRTDKITIGSDGYATFPVNGGSVSVWVQQ

SEQ ID NO: 34821 - protein, 480 aa, Cytophaga sp.
NGTMMQYFEWYVPNDGQQWNRLRTDAPYLSSVGITAVWTPPAYKGTSQADVGYGPYDLYDLGEFNQKGTVRTKYGTKGELKSAVNTLHSNGIQVYGDVVMNHKAGADYTENVTAVEVNPSNRNQETSGEYNIQAWTGFNFPGRGTTYSNFKWQWFHFDGTDWDQSRSLSRIFKFTGKAWDWEVSSENGNYDYLMYADIDYDHPDVVNEMKKWGVWYANEVGLDGYRLDAVKHIKFSFLKDWVDMARAATGKEMFTVGEYWQNDLGALNNYLAKVNYNQSLFDAPLHYNFYAASTGGGYYDMRNILNNTLVASNPTKAVTLVENHDTQPGQSLESTVQPWFKPLAYAFILTRSGGYPSVFYGDMYGTKGTTTREIPALKSKIEPLLKARKDYAYGTQRDYIDNPDVIGWTREGDSTKAKSGLATVITDGPGGSKRMYVGTSNAGEIWYDLTGNRTDKITIGSDGYATFPVNGGSVSVWVQQ

SEQ ID NO: 34822 - protein, 480 aa, Cytophaga sp.
NGTMMQYFEWYVPNDGQQWNRLRTDAPYLSSVGITAVWTPPAYKGTSQADAGYGPYDLYDLGEFNQKGTVRTKYGTKGELKSAVNTLHSNGIQVYGDVVMNHKAGADYTENVTAVEVNPSNRNQETSGEYNIQAWTGFNFPGRGTTYSNFKWQWFHFDGTDWDQSRSLSRIFKFTGKAWDWEVSSENGNYDYLMYADIDYDHPDVVNEMKKWGVWYANEVGLDGYRLDAVKHIKFSFLKDWVDNARAATGKEMFTVGEYWQNDLGALNNYLAKVNYNQSLFDAPLHYNFYAASTGGGYYDMRNILNNTLVASNPTKAVTLVENHDTQPGQSLESTVQPWFKPLAYAFILTRSGGYPSVFYGDMYGTKGTTTREIPALKSKIEPLLKARKDYAYGTQRDYIDNPDVIGWTREGDSTKAKSGLATVITDGPGGSKRMYVGTSNAGEIWYDLTGNRTDKITIGSDGYATFPVNGGSVSVWVQQ

SEQ ID NO: 34823 - protein, 480 aa, Cytophaga sp.
NGTMMQYFEWYVPNDGQQWNRLRTDAPYLSSVGITAVWTPPAYKGTSQADVGYGPYDLYDLGEFNQKGTVRTKYGTKGELKSAVNTLHSNGIQVYGDVVMNHKAGADYTENVTAVEVNPSNRNQETSGEYNIQAWTGFNFPGRGTTYSNFKWQWFHFDGTDWDQSRSLSRIFKFTGKAWDWEVSSENGNYDYLMYADIDYDHPDVVNEMKKWGVWYANEVGLDGYRLDAVKHIKFSFLKDWVDNARCATGKEMFTVGEYWQNDLGALNNYLAKVNYNQSLFDAPLHYNFYAASTGGGYYDMRNILNNTLVASNPTKAVTLVENHDTQPGQSLESTVQPWFKPLAYAFILTRSGGYPSVFYGDMYGTKGTTTREIPALKSKIEPLLKARKDYAYGTQRDYIDNPDVIGWTREGDSTKAKSGLATVITDGPGGSKRMYVGTSNAGEIWYDLTGNRTDKITIGSDGYATFPVNGGSVSVWVQQ

SEQ ID NO: 34824 - protein, 480 aa, Cytophaga sp.
NGTMMQYFEWYVPNDGQQWNRLRTDAPYLSSVGITAVWTPPAYKGTSQADVGYGPYDLYDLGEFNQKGTVRTKYGTKGELKSAVNTLHSNGIQVYGDVVMNHKAGADYTENVTAVEVNPSNRNQETSGEYNIQAWTGFNFPGRGTTYSNFKWQWFHFDGTDWDQSRSLSRIFKFTGKAWDWEVSSENGNYDYLMYADIDYDHPDVVNEMKKWGVWYANEVGLDGYRLDAVKHIKFSFLKDWVDNARAATGKEMFTVGEYWQNDLGALNNYLAKVNYNQSLFDAPLHYNFYAASTGGGYYDMRNILNNTLVASNPTKAVTLVENHDTQPGQSLESTVQPWFKPLAYAFILTRSGGYPSVFYGDMYGTKGTTTREIPALKSKIEPLLKARKDYAYGTQRDYIDSPDVIGWTREGDSTKAKSGLATVITDGPGGSKRMYVGTSNAGEIWYDLTGNRTDKITIGSDGYATFPVNGGSVSVWVQQ

SEQ ID NO: 34825 - protein, 480 aa, Cytophaga sp.
NGTMMQYFEWYVPNDGQQWNRLRTDAPYLSSVGITAVWTPPAYKGTSQADVGYGPYDLYDLGEFNQKGTVRTKYGTKGELKSAVNTLHSNGIQVYGDVVMNHKAGADYTENVTAVEVNPSNRNQETSGEYNIQAWTGFNFPGRGTTYSNFKWQWFHFDGTDWDCSRSLSRIFKFTGKAWDWEVSSENGNYDYLMYADIDYDHPDVVNEMKKWGVWYANEVGLDGYRLDAVKHIKFSFLKDWVDNARAATGKEMFTVGEYWQNDLGALNNYLAKVNYNQSLFDAPLHYNFYAASTGGGYYDMRNILNNTLVASNPTKAVTLVENHDTQPGQSLESTVQPWFKPLAYAFILTRSGGYPSVFYGDMYGTKGTTTREIPALKSKIEPLLKARKDYAYGTQRDYIDNPDVIGWTREGDSTKAKSGLATVITDGPGGSKRMYVGTSNAGEIWYDLTGNRTDKITIGSDGYATFPVNGGSVSVWVQQ

SEQ ID NO: 34826 - protein, 480 aa, Cytophaga sp.
NGTMMQYFEWYVPNDGQQWNRLRTDAPYLSSVGITAVWTPPAYKGTSQADVGYGPYDLYDLGEFNQKGTVRTKYGTKGELKSAVNTLHSNGIQVYGDVVMNHKAGADYTENVTAVEVNPSNRNQETSGEYNIQAWTGFNFPGRGTTYSNFKWQWFHFDGTDWDQSRSLSRIFKFTGKAWDWEVSSENGNYDYLMYADIDYDHPDVVNEMKKWGVWYANEVGLDGYRLDAVKHIKFSFLKDWVDNARAATGKEMFTVGEYWQNDLGALNNYLAKVNYNQSLFDAPLHYNFYAASTGGGYYDMRNILNNTLVASNPMKAVTLVENHDTQPGQSLESTVQPWFKPLAYAFILTRSGGYPSVFYGDMYGTKGTTTREIPALKSKIEPLLKARKDYAYGTQRDYIDNPDVIGWTREGDSTKAKSGLATVITDGPGGSKRMYVGTSNAGEIWYDLTGNRTDKITIGSDGYATFPVNGGSVSVWVQQ

SEQ ID NO: 34827 - protein, 480 aa, Cytophaga sp.
NGTMMQYFEWYVPNDGQQWNRLRTDAPYLSSVGITAVWTPPAYKGTSQADVGYGPYDLYDLGEFNQKGTVRTKYGTKGELKSAVNTLHSNGIQVYGDVVMNHKAGADYTENVTAVEVNPSNRNQETSGEYNIQAWTGFNFPGRGTTYSNFKWQWFHFDGTDWDQSRSLSRIFKFTGKAWDWEVSSENGNYDYLMYADIDYDHPDVVNEMKKWGVWYANEVGLDGYRLDAVKHIKFSFLKDWVDSARAATGKEMFTVGEYWQNDLGALNNYLAKVNYNQSLFDAPLHYNFYAASTGGGYYDMRNILNNTLVASNPTKAVTLVENHDTQPGQSLESTVQPWFKPLAYAFILTRSGGYPSVFYGDMYGTKGTTTREIPALKSKIEPLLKARKDYAYGTQRDYIDNPDVIGWTREGDSTKAKSGLATVITDGPGGSKRMYVGTSNAGEIWYDLTGNRTDKITIGSDGYATFPVNGGSVSVWVQQ

SEQ ID NO: 34828 - protein, 480 aa, Cytophaga sp.
NGTMMQYFEWYVPNDGQQWNRLRTDAPYLSSVGITAVWTPPAYKGTSQADVGYGPYDLYDLGEFNQKGTVRTKYGTKGELKSAVNTLHSNGIQVYGDVVMNHKAGADYTENVTAVEVNPSNRNQETSGEYNIQAWTGFNFPGRGTTYSNFKWQWFHFDGTDWDQSRSLSRIFKFTGKAWDWEVSSENGNYDYLMYADIDYDHPDVVNEMKKWGVWYANEVGLDGYRLDAVKHIKFSFLKDWVDNARMATGKEMFTVGEYWQNDLGALNNYLAKVNYNQSLFDAPLHYNFYAASTGGGYYDMRNILNNTLVASNPTKAVTLVENHDTQPGQSLESTVQPWFKPLAYAFILTRSGGYPSVFYGDMYGTKGTTTREIPALKSKIEPLLKARKDYAYGTQRDYIDNPDVIGWTREGDSTKAKSGLATVITDGPGGSKRMYVGTSNAGEIWYDLTGNRTDKITIGSDGYATFPVNGGSVSVWVQQ

SEQ ID NO: 34829 - protein, 480 aa, Cytophaga sp.
NGTMMQYFEWYVPNDGQQWNRLRTDAPYLSSVGITAVWTPPAYKGTSQADVGYGPYDLYDLGEFNQKGTVRTKYGTKGELKSAVNTLHSNGIQVYGDVVMNHKAGADYTENVTAVEVNPSNRNQETSGEYNINAWTGFNFPGRGTTYSNFKWQWFHFDGTDWDQSRSLSRIFKFTGKAWDWEVSSENGNYDYLMYADIDYDHPDVVNEMKKWGVWYANEVGLDGYRLDAVKHIKFSFLKDWVDNARAATGKEMFTVGEYWQNDLGALNNYLAKVNYNQSLFDAPLHYNFYAASTGGGYYDMRNILNNTLVASNPTKAVTLVENHDTQPGQSLESTVQPWFKPLAYAFILTRSGGYPSVFYGDMYGTKGTTTREIPALKSKIEPLLKARKDYAYGTQRDYIDNPDVIGWTREGDSTKAKSGLATVITDGPGGSKRMYVGTSNAGEIWYDLTGNRTDKITIGSDGYATFPVNGGSVSVWVQQ

SEQ ID NO: 34830 - protein, 480 aa, Cytophaga sp.
NGTMMQYFEWYVPNDGQQWNRLRTDAPYLSSVGITAVWTPPAYKGTSQADVGYGPYDLYDLGEFNQKGTVRTKYGTKGELKSAVNTLHSNGIQVYGDVVMNHKAGADYTENVTAVEVNPSNRNQETSGEYNIQAWTGFNFPGRGTTYSNFKWQWFHFDGTDWDQSRSLSRIFKFTGKAWDWEVSSENGNYDYLMYADIDYDHPDVVNEMKKWGVWYANEVGLDGYRLDAVKHIKFSFLKDWVDNARAATGKEMFTVGEYWQNDLGALNNYLAKVNYNQSLFDAPLHYNFYAASTGGGYYDMRNILNNTLVASNPTKAVTLVENHDTQPGQSLESTVQPWFKPLAYAFILTRSGGYPSVFYGDMYGTKGTTTREIPALKSKIEPLLKARKDYAYGTQRDYIDNPDVIGWTREGDSTKAKSGLATVITDGPGGSKRMYVGTSNAGERWYDLTGNRTDKITIGSDGYATFPVNGGSVSVWVQQ

SEQ ID NO: 34831 - protein, 480 aa, Cytophaga sp.
NGTMMQYFEWYVPNDGQQWNRLRTDAPYLSSVGITAVWTPPAYKGTSQADVGYGPYDLYDLGEFNQKGTVRTKYGTKGELKSAVNTLHSNGIQVYGDVVMNHKAGADYTENVTAVEVNPSNRNQETSGEYNIQAWTGFNFPGRGSTYSNFKWQWFHFDGTDWDQSRSLSRIFKFTGKAWDWEVSSENGNYDYLMYADIDYDHPDVVNEMKKWGVWYANEVGLDGYRLDAVKHIKFSFLKDWVDNARAATGKEMFTVGEYWQNDLGALNNYLAKVNYNQSLFDAPLHYNFYAASTGGGYYDMRNILNNTLVASNPTKAVTLVENHDTQPGQSLESTVQPWFKPLAYAFILTRSGGYPSVFYGDMYGTKGTTTREIPALKSKIEPLLKARKDYAYGTQRDYIDNPDVIGWTREGDSTKAKSGLATVITDGPGGSKRMYVGTSNAGEIWYDLTGNRTDKITIGSDGYATFPVNGGSVSVWVQQ

SEQ ID NO: 34832 - protein, 480 aa, Cytophaga sp.
NGTMMQYFEWYVPNDGQQWNRLRTDAPYLSSVGITAVWTPPAYKGTSQADVGYGPYDLYDLGEFNQKGTVRTKYGTKGELKSAVNTLHSNGIQVYGDVVMNHKAGADYTENVTAVEVNPSNRNQETSGEYNIQAWTKFNFPGRGTTYSNFKWQWFHFDGTDWDQSRSLSRIFKFTGKAWDWEVSSENGNYDYLMYADIDYDHPDVVNEMKKWGVWYANEVGLDGYRLDAVKHIKFSFLKDWVDNARAATGKEMFTVGEYWQNDLGALNNYLAKVNYNQSLFDAPLHYNFYAASTGGGYYDMRNILNNTLVASNPTKAVTLVENHDTQPGQSLESTVQPWFKPLAYAFILTRSGGYPSVFYGDMYGTKGTTTREIPALKSKIEPLLKARKDYAYGTQRDYIDNPDVIGWTREGDSTKAKSGLATVITDGPGGSKRMYVGTSNAGEIWYDLTGNRTDKITIGSDGYATFPVNGGSVSVWVQQ

SEQ ID NO: 34833 - protein, 480 aa, Cytophaga sp.
NGTMMQYFEWYVPNDGQQWNRLRTDAPYLSSVGITAVWTPPAYKGTSQADVGYGPYDLYDLGEFNQKGTVRTKYGTKGELKSAVNTLHSNGIQVYGDVVMNHKAGADYTENVTAVEVNPSNRNQETSGEYNIQAWTGFWFPGRGTTYSNFKWQWFHFDGTDWDQSRSLSRIFKFTGKAWDWEVSSENGNYDYLMYADIDYDHPDVVNEMKKWGVWYANEVGLDGYRLDAVKHIKFSFLKDWVDNARAATGKEMFTVGEYWQNDLGALNNYLAKVNYNQSLFDAPLHYNFYAASTGGGYYDMRNILNNTLVASNPTKAVTLVENHDTQPGQSLESTVQPWFKPLAYAFILTRSGGYPSVFYGDMYGTKGTTTREIPALKSKIEPLLKARKDYAYGTQRDYIDNPDVIGWTREGDSTKAKSGLATVITDGPGGSKRMYVGTSNAGEIWYDLTGNRTDKITIGSDGYATFPVNGGSVSVWVQQ

SEQ ID NO: 34834 - protein, 480 aa, Cytophaga sp.
NGTMMQYFEWYVPNDGQQWNRLRTDAPYLSSVGITAVWTPPAYKGTSQADVGYGPYDLYDLGEFNQKGTVRTKYGTKGELKSAVNTLHSNGIQVYGDVVMNHKAGADYTENVTAVEVNPSNRNQETSGEYNIQAWTGFNFPGRGTTYSNFKWQWFHFDGTDWDQSRSLSRIFKFTGKAWDWEVSSENGNYDYLMYADIDYDHPDVVNEMKKWGVWYANEVGLDGYRLDAVKHIKFSFLHDWVDNARAATGKEMFTVGEYWQNDLGALNNYLAKVNYNQSLFDAPLHYNFYAASTGGGYYDMRNILNNTLVASNPTKAVTLVENHDTQPGQSLESTVQPWFKPLAYAFILTRSGGYPSVFYGDMYGTKGTTTREIPALKSKIEPLLKARKDYAYGTQRDYIDNPDVIGWTREGDSTKAKSGLATVITDGPGGSKRMYVGTSNAGEIWYDLTGNRTDKITIGSDGYATFPVNGGSVSVWVQQ

SEQ ID NO: 34835 - protein, 480 aa, Cytophaga sp.
NGTMMQYFEWYVPNDGQQWNRLRTDAPYLSSVGITAVWTPPAYKGTSQADVGYGPYDLYDLGEFNQKGTVRTKYGTKGELKKAVNTLHSNGIQVYGDVVMNHKAGADYTENVTAVEVNPSNRNQETSGEYNIQAWTGFNFPGRGTTYSNFKWQWFHFDGTDWDQSRSLSRIFKFTGKAWDWEVSSENGNYDYLMYADIDYDHPDVVNEMKKWGVWYANEVGLDGYRLDAVKHIKFSFLKDWVDNARAATGKEMFTVGEYWQNDLGALNNYLAKVNYNQSLFDAPLHYNFYAASTGGGYYDMRNILNNTLVASNPTKAVTLVENHDTQPGQSLESTVQPWFKPLAYAFILTRSGGYPSVFYGDMYGTKGTTTREIPALKSKIEPLLKARKDYAYGTQRDYIDNPDVIGWTREGDSTKAKSGLATVITDGPGGSKRMYVGTSNAGEIWYDLTGNRTDKITIGSDGYATFPVNGGSVSVWVQQ

SEQ ID NO: 34836 - protein, 480 aa, Cytophaga sp.
NGTMMQYFEWYVPNDGQQWNRLRTDAPYLSSVGITAVWTPPAYKGTSQADVGYGPYDLYDLGEFNQKGTVRTKYGTKGELKSAVNTLHSNGIQVYGDVVMNHKAGADYTENVTAVEVNPSNRNQETSMEYNIQAWTGFNFPGRGTTYSNFKWQWFHFDGTDWDQSRSLSRIFKFTGKAWDWEVSSENGNYDYLMYADIDYDHPDVVNEMKKWGVWYANEVGLDGYRLDAVKHIKFSFLKDWVDNARAATGKEMFTVGEYWQNDLGALNNYLAKVNYNQSLFDAPLHYNFYAASTGGGYYDMRNILNNTLVASNPTKAVTLVENHDTQPGQSLESTVQPWFKPLAYAFILTRSGGYPSVFYGDMYGTKGTTTREIPALKSKIEPLLKARKDYAYGTQRDYIDNPDVIGWTREGDSTKAKSGLATVITDGPGGSKRMYVGTSNAGEIWYDLTGNRTDKITIGSDGYATFPVNGGSVSVWVQQ

SEQ ID NO: 34837 - protein, 480 aa, Cytophaga sp.
NGTMMQYFEWYVPNDGQQWNRLRTDAPYLSSVGITAVWTPPAYKGTSQADVGYGPYDLYDLGEFNQKGTVRTKYGTKGELKSAVNTLHSNGIQVYGDVVMNHKAGADTTENVTAVEVNPSNRNQETSGEYNIQAWTGFNFPGRGTTYSNFKWQWFHFDGTDWDQSRSLSRIFKFTGKAWDWEVSSENGNYDYLMYADIDYDHPDVVNEMKKWGVWYANEVGLDGYRLDAVKHIKFSFLKDWVDNARAATGKEMFTVGEYWQNDLGALNNYLAKVNYNQSLFDAPLHYNFYAASTGGGYYDMRNILNNTLVASNPTKAVTLVENHDTQPGQSLESTVQPWFKPLAYAFILTRSGGYPSVFYGDMYGTKGTTTREIPALKSKIEPLLKARKDYAYGTQRDYIDNPDVIGWTREGDSTKAKSGLATVITDGPGGSKRMYVGTSNAGEIWYDLTGNRTDKITIGSDGYATFPVNGGSVSVWVQQ

SEQ ID NO: 34838 - protein, 480 aa, Cytophaga sp.
NGTMMQYFEWYVPNDGQQWNRLRTDAPYLSSVGITAVWTPPAYKGTSQADVGYGPYDLYDLGEFNQKGTVRTKYGTKGELKSAVNTLHSNGIQVYGDVVMNHKAGADYTENVTAVEVNPSNRNQETSGEYNIQAWTGFNFPGRGTTYSNFKWQWFHFDGTDWDQSRSLSRIFKFTGKAWDWEVSSENGNYDYLMYADIDYDHPDVVNEMKKWGVWYANEVGLDGYRLDAVKHIKFSFLKDWVDNARAATGKEMFTVGEYWQNDLGALNNYLAKVNYNQSLFDAPLHYNFYAASTGGGYYDMRNILNNTLVASNPTKAVTLVENHDTQPGQSLESTVQPWFKPLAYAFILTRSGGYPSVFYGDMYGTKGTTTREIPALKSEIEPLLKARKDYAYGTQRDYIDNPDVIGWTREGDSTKAKSGLATVITDGPGGSKRMYVGTSNAGEIWYDLTGNRTDKITIGSDGYATFPVNGGSVSVWVQQ

SEQ ID NO: 34839 - protein, 480 aa, Cytophaga sp.
NGTMMQYFEWYVPNDGQQWNRLRTDAPYLSSVGITAVWTPPAYKGTSQADVGYGPYDLYDLGEFNQKGTVRTKYGTKDELKSAVNTLHSNGIQVYGDVVMNHKAGADYTENVTAVEVNPSNRNQETSGEYNIQAWTGFNFPGRGTTYSNFKWQWFHFDGTDWDQSRSLSRIFKFTGKAWDWEVSSENGNYDYLMYADIDYDHPDVVNEMKKWGVWYANEVGLDGYRLDAVKHIKFSFLKDWVDNARAATGKEMFTVGEYWQNDLGALNNYLAKVNYNQSLFDAPLHYNFYAASTGGGYYDMRNILNNTLVASNPTKAVTLVENHDTQPGQSLESTVQPWFKPLAYAFILTRSGGYPSVFYGDMYGTKGTTTREIPALKSKIEPLLKARKDYAYGTQRDYIDNPDVIGWTREGDSTKAKSGLATVITDGPGGSKRMYVGTSNAGEIWYDLTGNRTDKITIGSDGYATFPVNGGSVSVWVQQ

SEQ ID NO: 34840 - protein, 480 aa, Cytophaga sp.
NGTMMQYFEWYVPNDGQQWNRLRTDAPYLSSVGITAVWTPPAYKGTSQADVGYGPYDLYDLGEFNQKGTVRTKYGTKGELKSAVNTLHSNGIQVYGDVVMNHKAGADYTENVTAVEVNPSNRNQETSGEYNIQAWTGFNFPGRGTTYSNFKWQWFHFDGTDWDQSRSLSRIFKFTGKAWDWEVSSENGNYDYLMYADIDYDHPDVVNEMKKWGVWYANEVGLDGYRLDAVKHIKFSFLKDWVDNARAATGKEMFTVGEYWQNDLGALNNYLAKVNYNQSLFDAPLHYNFYAASTGGGYYDMRNILNNTLVASNPTKAVTLVENHDTQPGQSLESTVQPWFKPLAYAFILTRSGGYPSVFYGDMYGTKGTTTREIPALKSKIEPLLKARKDYAYGTQRDYIDNPDVIGWTREGDSTKAKSGLATVITDGPGGSKRMYVGTVNAGEIWYDLTGNRTDKITIGSDGYATFPVNGGSVSVWVQQ

SEQ ID NO: 34841 - protein, 480 aa, Cytophaga sp.
NGTMMQYFEWYVPNDGQQWNRLRTDAPYLSSVGITAVWTPPAYKGTSQADVGYGPYDLYDLGEFNQKGTVRTKYGTKGELKSAVNTLHSNGIQVYGDVVMNHKAGADYTENVTAVEVNPSNRNQETSGEYNIQAWTGFNFPGRGTTYSNFKWQWFHFDGTDWDQSRSLSRIFKFTGKAWDWEVSSENGNYDYLMYADIDYDHPDVVNEMKKWGVWYANEVGLDGYRLDAVKHIKFSFLKDWVDNARAATGKEMFTVGEYWQNDLGALNNYLAKVNYNQSLFDAPLHYNFYAASTGGGYYDMRNILNNTLVASNPTKAVTLVENHDTQPGQSLESTVQPWFKPLAYAFILTRSGGYPSVFYGDMYGTKGTTTREIPALKSKIEPLLKARKDYAYGTQRDYIDCPDVIGWTREGDSTKAKSGLATVITDGPGGSKRMYVGTSNAGEIWYDLTGNRTDKITIGSDGYATFPVNGGSVSVWVQQ

SEQ ID NO: 34842 - protein, 480 aa, Cytophaga sp.
NGTMMQYFEWYVPNDGQQWNRLRTDAPYLSSVGITAVWTPPAYKGTSQADVGYGPYDLYDLGEFNQKGTVRTKYGTKGELKSAVNTLHSNGIQVYGDVVMNHKAGADYTENVTAVEVNPSNRNQETSGEYNIQAWTGFNFPGRGTTYSNFKWQWFHFDGTDWDQSRSLSRIFKFTGKAWDWEVSSENGNYDYLMYADIDYDHPDVVNEMKKWGVWYANEVGLDGYRLDAVKHIKFSFLKDWVDNARAATGKEMFTVGEYWQNDLGALNNYLAKVNYNQSLFDAPLHYNFYAASTGGGYYDMRNILNNTLVASNPTKAVTLVENHDTQPGQSLESTVQPWFKPLAYAFILTRSGGYPSVFYGDMYGTKGTTTREIPALKSKIEPLLKARKDYAYGYQRDYIDNPDVIGWTREGDSTKAKSGLATVITDGPGGSKRMYVGTSNAGEIWYDLTGNRTDKITIGSDGYATFPVNGGSVSVWVQQ

SEQ ID NO: 34843 - protein, 480 aa, Cytophaga sp.
NGTMMQYFEWYVPNDGQQWNRLRTDAPYLSSVGITAVWTPPAYKGTSQADVGYGPYDLYDLGEFNQKGTVRTKYGTKGELKSAVNTLHSNGIQVYGDVVMNHKAGADYTENVTAVEVNPSNRNQETSGEYNIQAWTGFNFPGRGTTYSNFKWQWFHFDGTDWDQSRSLSRIFKFTGKAWDWEVSSENGNYDYLMYADIDYDHPDVVNEMKKWGVWYANEVGLDGYRLDAVKHIKFSFLKDWVDNARAATGKEMFTVGEYWQNDLGALNNYLAKVNYNQSLFDAPLHYNFYAASTGGGYYDMRNILNNTLVASNPTKAVTLVENHDTQPGQSLESTVQPWFKPLAYAFILTRSGGYPSVFYGDMYGTKGTTTREIPALKSKIEPLLKARKDYAYGTQRDYIDNPDVIGWTREGDSTKAKSGLATVITDGPGGSKRMYVGTDNAGEIWYDLTGNRTDKITIGSDGYATFPVNGGSVSVWVQQ

SEQ ID NO: 34844 - protein, 480 aa, Cytophaga sp.
NGTMMQYFEWYVPNDGQQWNRLRTDAPYLSSVGITAVWTPPAYKGTSQADVGYGPYDLYDLGEFNQKGTVRTKYGTKGELKSAVNTLHSNGIQVYGDVVMNHKAGADYTENVTAVEVNPSNRNQETSGEYNIQAWTGFNFPGRGTTYSNFKWQWFHFDGTDWDQSRSLSRIFKFTGKAWDWEVSSENGNYDYLMYADIDYDHPDVVNEMKKWGVWYANEVGLDGYRLDAVKHIKFSFLKDWVDNARAATGKEMFTVGEYWQNDLGALNNYLAKVNYNQSLFDAPLHYNFYAASTGGGYYDMRNILNNTLVASNPHKAVTLVENHDTQPGQSLESTVQPWFKPLAYAFILTRSGGYPSVFYGDMYGTKGTTTREIPALKSKIEPLLKARKDYAYGTQRDYIDNPDVIGWTREGDSTKAKSGLATVITDGPGGSKRMYVGTSNAGEIWYDLTGNRTDKITIGSDGYATFPVNGGSVSVWVQQ

SEQ ID NO: 34845 - protein, 480 aa, Cytophaga sp.
NGTMMQYFEWYVPNDGQQWNRLRTDAPYLSSVGITAVWTPPAYKGTSQADVGYGPYDLYDLGEFNQKGTVRTKYGTKGELKSAVNTLHSNGIQVYGDVVMNHKAGADYTENVTAVEVNPSNRNQETSGEYNIQAWTGFNFPGRGTTYSNFKWQWFHFDGTDWDQSRSLSRIFKFTGKAWDWEVSSENGNYDYLMYADIDYDHPDVVNEMKKWGVWYANEVGLDGYRLDAVKHIKFSFLKDWVDNARAATGKEMFTVGEYWQNDLGALNNYLAKVNYNQSLFDAPLHYNFYAASTGGGYYDMRNILNNTLVASNPTKAVTLVENHDTQPGQSLESTVQPWFKPLAYAFILTRSGGYPSVFYGDMYGTKGTTTREIPALKSKIEPLLKARKDYAYGTQRDYIDNPDVIGWTREGDSTKAKSGLATVITDGPGGSKRMYVGTSNAGEIWYDLTGNRTDKINIGSDGYATFPVNGGSVSVWVQQ

SEQ ID NO: 34846 - protein, 480 aa, Cytophaga sp.
NGTMMQYFEWYVPNDGQQWNRLRTDAPYLSSVGITAVWTPPAYKGTSQADVGYGPYDLYDLGEFNQKGTVRTKYGTKGELKSAVNTLHSNGIQVYGDVVMNHKAGADYTENVTAVEVNPSNRNQETSGEYNIQAWTGFNFPGRGTTYSNFKWQWFHFDGTDWDQSRSLSRIFKFTGKAWDWEVSSENGNYDYLMYADIDYDHPDVVNEMKKWGVWYANEVGLDGYRLDAVKHIKFSFLKDWVDNARAATGKEMFTVGEYWQNDLGALNNYLAKVNYNQSLFDAPLHYNFYAASTGGGYYDMRNILNNTLVASNPTKAVTLVENHDTQPGQSLESTVQPWFKPLAYAFILTRSGGYPSVFYGDMYGTKGTTTREIPALKSKIEPLLKARKDYAYGTQRDYIDNPDVIGWTREGDSTKAKSGLATVITDGPGGSKRMYVGTSNAGEIWYDLTGNRGDKITIGSDGYATFPVNGGSVSVWVQQ

SEQ ID NO: 34847 - protein, 480 aa, Cytophaga sp.
NGTMMQYFEWYVPNDGQQWNRLRTDAPYLSSVGITAVWTPPAYKGTSQADVGYGPYDLYDLGEFNQKGTVRTKYGTKGELKSAVNTLHSNGIQVYGDVVMNHKAGADYTENVTAVEVNPSNRNQETSGEYNIQAWTGFNFPGRGTTYSNFKWQWFHFDGTDWDQSRSLSRIFKFTGKAWDWEVSSENGNYDYLMYADIDYDHPDVVNEMKKWGVWYANEVGLDGYRLDAVKHIKFSFLKDWVDNARAATGKEMFTVGEYWQNDLGALNNYLAKVNYNQSLFDAPLHYNFYAASTGGGYYDMRNILNNTLVASNPTKAVTLVENHDTQPGQSLESTVQPWFKPLAYAFILTRSGGYPAVFYGDMYGTKGTTTREIPALKSKIEPLLKARKDYAYGTQRDYIDNPDVIGWTREGDSTKAKSGLATVITDGPGGSKRMYVGTSNAGEIWYDLTGNRTDKITIGSDGYATFPVNGGSVSVWVQQ

SEQ ID NO: 34848 - protein, 480 aa, Cytophaga sp.
NGTMMQYFEWYVPNDGQQWNRLRTDAPYLSSVGITAVWTPPAYKGTSQADVGYGPYDLYDLGEFNQKGTVRTKYGTKGELKSAVNTLHSNGIQVYGDVVMNHKAGADYTENVTAVEVNPSNRNQETSGEYNIQAWTGFNFPGRGTTYSNFKWQWFHFDGTDWDQSRSLSRIFKFTGKAWDWEVSSENGNYDYLMYADIDYDHPDVVNEMKKWGVWYANEVGLDGYRLDAVKHIKFSFLKDWVDNARAATGKEMFTVGEYWQNDLGALNNYLAKVNYNQSLFDAPLHYNFYAASTGGGYYDMRNILNNTLVASNPPKAVTLVENHDTQPGQSLESTVQPWFKPLAYAFILTRSGGYPSVFYGDMYGTKGTTTREIPALKSKIEPLLKARKDYAYGTQRDYIDNPDVIGWTREGDSTKAKSGLATVITDGPGGSKRMYVGTSNAGEIWYDLTGNRTDKITIGSDGYATFPVNGGSVSVWVQQ

SEQ ID NO: 34849 - protein, 480 aa, Cytophaga sp.
NGTMMQYFEWYVPNDGQQWNRLRTDAPYLSSVGITAVWTPPAYKGTSQADVGYGPYDLYDLGEFNQKGTVRTKYGTKGELKSAVNTLHSNGIQVYGDVVMNHKAGADYTENVTAVEVNPSNRNQETSGEYNIQAWTGFNFPGRGTTYSSFKWQWFHFDGTDWDQSRSLSRIFKFTGKAWDWEVSSENGNYDYLMYADIDYDHPDVVNEMKKWGVWYANEVGLDGYRLDAVKHIKFSFLKDWVDNARAATGKEMFTVGEYWQNDLGALNNYLAKVNYNQSLFDAPLHYNFYAASTGGGYYDMRNILNNTLVASNPTKAVTLVENHDTQPGQSLESTVQPWFKPLAYAFILTRSGGYPSVFYGDMYGTKGTTTREIPALKSKIEPLLKARKDYAYGTQRDYIDNPDVIGWTREGDSTKAKSGLATVITDGPGGSKRMYVGTSNAGEIWYDLTGNRTDKITIGSDGYATFPVNGGSVSVWVQQ

SEQ ID NO: 34850 - protein, 480 aa, Cytophaga sp.
NGTMMQYFEWYVPNDGQQWNRLRTDAPYLSSVGITAVWTPPAYKGTSQADVGYGPYDLYDLGEFNQKGTVRTKYGTKGELKSAVNTLHSNGIQVYGDVVMNHKAGADYTENVTAVEVNPSNRNQETSGEYNIQAWTGFEFPGRGTTYSNFKWQWFHFDGTDWDQSRSLSRIFKFTGKAWDWEVSSENGNYDYLMYADIDYDHPDVVNEMKKWGVWYANEVGLDGYRLDAVKHIKFSFLKDWVDNARAATGKEMFTVGEYWQNDLGALNNYLAKVNYNQSLFDAPLHYNFYAASTGGGYYDMRNILNNTLVASNPTKAVTLVENHDTQPGQSLESTVQPWFKPLAYAFILTRSGGYPSVFYGDMYGTKGTTTREIPALKSKIEPLLKARKDYAYGTQRDYIDNPDVIGWTREGDSTKAKSGLATVITDGPGGSKRMYVGTSNAGEIWYDLTGNRTDKITIGSDGYATFPVNGGSVSVWVQQ

SEQ ID NO: 34851 - protein, 480 aa, Cytophaga sp.
NGTMMQYFEWYVPNDGQQWNRLRTDAPYLSSVGITAVWTPPAYKGTSQADVGYGPYDLYDLGEFNQKGTVRTKYGTKGELKSAVNTLHSNGIQVYGDVVMNHKAGADYTENVTAVEVNPSNRNQETSGDYNIQAWTGFNFPGRGTTYSNFKWQWFHFDGTDWDQSRSLSRIFKFRGKAWDWEVSSENGNYDYLMYADIDYDHPDVVNEMKKWGVWYANEVGLDGYRLDAVKHIKFSFLKDWVDNARAATGKEMFTVGEYWQNDLGALNNYLAKVNYNQSLFDAPLHYNFYAASTGGGYYDMRNILNNTLVASNPTKAVTLVENHDTQPGQSLESTVQPWFKPLAYAFILTRSGGYPSVFYGDMYGTKGTTTREIPALKSKIEPLLKARKDYAYGTQRDYIDNPDVIGWTREGDSTKAKSGLATVITDGPGGSKRMYVGTSNAGEIWYDLTGNRTDKITIGSDGYATFPVNGGSVSVWVQQ

SEQ ID NO: 34852 - protein, 480 aa, Cytophaga sp.
NGTMMQYFEWYVPNDGQQWNRLRTDAPYLSSVGITAVWTPPAYKGTSQADVGYGPYDLYDLGEFNQKGTVRTKYGTKGELKSAVNNLHSNGIQVYGDVVMNHKAGADYTENVTAVEVNPSNRNQETSGEYNIQAWTGFNFPGRGTTYSNFKWQWFHFDGTDWDQSRSLSRIFKFTGKAWDWEVSSENGNYDYLMYADIDYDHPDVVNEMKKWGVWYANEVGLDGYRLDAVKHIKFSFLKDWVDNARAATGKEMFTVGEYWQNDLGALNNYLAKVNYNQSLFDAPLHYNFYAASTGGGYYDMRNILNNTLVASNPTKAVTLVENHDTQPGQSLESTVQPWFKPLAYAFILTRSGGYPSVFYGDMYGTKGTTTREIPALKSKIEPLLKARKDYAYGTQRDYIDNPDVIGWTREGDSTKAKSGLATVITDGPGGSKRMYVGTSNAGEIWYDLTGNRTDKITIGSDGYATFPVNGGSVSVWVQQ

SEQ ID NO: 34853 - protein, 480 aa, Cytophaga sp.
NGTMMQYFEWYVPNDGQQWNRLRTDAPYLSSVGITAVWTPPAYKGTSQADVGYGPYDLYDLGEFNQKGTVRTKYGTKGELKSAVNTLHSNGIQVYGDVVMNHKAGADYTENVTAVEVNPSNRNQETSGEYNIQAWTGFNFPGRGTTYSNFKWQWFHFDGTDWDQSRSLSRIFKFTGKAWDWEVSSENGNYDYLMYADIDYDHPDVVNEMKKWGVWYANEVGLDGYRLDAVKHIKFSFLKDWVDNARAATGKEMFTVGEYWQNDLGALNNYLAKVQYNQSLFDAPLHYNFYAASTGGGYYDMRNILNNTLVASNPTKAVTLVENHDTQPGQSLESTVQPWFKPLAYAFILTRSGGYPSVFYGDMYGTKGTTTREIPALKSKIEPLLKARKDYAYGTQRDYIDNPDVIGWTREGDSTKAKSGLATVITDGPGGSKRMYVGTSNAGEIWYDLTGNRTDKITIGSDGYATFPVNGGSVSVWVQQ

SEQ ID NO: 34854 - protein, 480 aa, Cytophaga sp.
NGTMMQYFEWYVPNDGQQWNRLRTDAPYLSSVGITAVWTPPAYKGTSQADVGYGPYDLYDLGEFNQKGTVRTKYGTKGELKSAVNTLHSNGIQVYGDVVMNHKAGADYTENVTAVEVNPSNRNQETSGEYNIQAWTGFFFPGRGTTYSNFKWQWFHFDGTDWDQSRSLSRIFKFTGKAWDWEVSSENGNYDYLMYADIDYDHPDVVNEMKKWGVWYANEVGLDGYRLDAVKHIKFSFLKDWVDNARAATGKEMFTVGEYWQNDLGALNNYLAKVNYNQSLFDAPLHYNFYAASTGGGYYDMRNILNNTLVASNPTKAVTLVENHDTQPGQSLESTVQPWFKPLAYAFILTRSGGYPSVFYGDMYGTKGTTTREIPALKSKIEPLLKARKDYAYGTQRDYIDNPDVIGWTREGDSTKAKSGLATVITDGPGGSKRMYVGTSNAGEIWYDLTGNRTDKITIGSDGYATFPVNGGSVSVWVQQ

SEQ ID NO: 34855 - protein, 480 aa, Cytophaga sp.
NGTMMQYFEWYVPNDGQQWNRLRTDALYLSSVGITAVWTPPAYKGTSQADVGYGPYDLYDLGEFNQKGTVRTKYGTKGELKSAVNTLHSNGIQVYGDVVMNHKAGADYTENVTAVEVNPSNRNQETSGEYNIQAWTGFNFPGRGTTYSNFKWQWFHFDGTDWDQSRSLSRIFKFTGKAWDWEVSSENGNYDYLMYADIDYDHPDVVNEMKKWGVWYANEVGLDGYRLDAVKHIKFSFLKDWVDNARAATGKEMFTVGEYWQNDLGALNNYLAKVNYNQSLFDAPLHYNFYAASTGGGYYDMRNILNNTLVASNPTKAVTLVENHDTQPGQSLESTVQPWFKPLAYAFILTRSGGYPSVFYGDMYGTKGTTTREIPALKSKIEPLLKARKDYAYGTQRDYIDNPDVIGWTREGDSTKAKSGLATVITDGPGGSKRMYVGTSNAGEIWYDLTGNRTDKITIGSDGYATFPVNGGSVSVWVQQ

SEQ ID NO: 34856 - protein, 480 aa, Cytophaga sp.
NGTMMQYFEWYVPNDGQQWNRLRTDAPYLSSVGITAVWTPPAYKGTSQADVGYGPYDLYDLGEFNQKGTVRTKYGTKGELKSAVNTLHSNGIQVYGDVVMNHKAGADYTENVTAVEVNPSNRNQETSGEYNIQAWTGFNFPGRGTTYSNFKWQWFHFDGTDWDQSRSLSRIFKFTGKAWDWEVSSENGNYDYLMYADIDYDHPDVVNEMKKWGVWYANEVGLDGYRLDAVKHIKFSFLKDWVDNARAATGKEMFTVGEYWQNDLGALNNYLAKVNYNQSLFDAPLHYNFYAASTGGGYYDMRNILNNTLVASNPTKAVTLVENHDTQPGQSLESTVQPWFKPLAYAFILTRSGGYPSVFYGDMYGTKGTTTREIPALKSKIEPLLKARKDYAYGTQRDYIDNPDVIGWTREGDSTKAKSGLATMITDGPGGSKRMYVGTSNAGEIWYDLTGNRTDKITIGSDGYATFPVNGGSVSVWVQQ

SEQ ID NO: 34857 - protein, 480 aa, Cytophaga sp.
NGTMMQYFEWYVPNDGQQWNRLRTDAPYLSSVGITAVWTPPAYKGTSQADVGYGPYDLYDLGEFNQKGTVRTKYGTKGELKSAVNTLHSNGIQVYGDVVMNHKAGADYTENVTAVEVNPSNRNQETSGEYNIQAWTGFNFPGRGTTYSNFKWQWFHFDGFDWDQSRSLSRIFKFTGKAWDWEVSSENGNYDYLMYADIDYDHPDVVNEMKKWGVWYANEVGLDGYRLDAVKHIKFSFLKDWVDNARAATGKEMFTVGEYWQNDLGALNNYLAKVNYNQSLFDAPLHYNFYAASTGGGYYDMRNILNNTLVASNPTKAVTLVENHDTQPGQSLESTVQPWFKPLAYAFILTRSGGYPSVFYGDMYGTKGTTTREIPALKSKIEPLLKARKDYAYGTQRDYIDNPDVIGWTREGDSTKAKSGLATVITDGPGGSKRMYVGTSNAGEIWYDLTGNRTDKITIGSDGYATFPVNGGSVSVWVQQ

SEQ ID NO: 34858 - protein, 480 aa, Cytophaga sp.
NGTMMQYFEWYVPNDGQQWNRLRTDAPYLSSVGITAVWTPPAYKGTSQADVGYGPYDLYDLGEFNQKGTVRTKYGTKGELKSAVNTLHSNGIQVYGDVVMNHKAGADYTENVTAVEVNPSNRNQETSGEYNIQAWTGFNFPGRGTTYSNFKWQWFHFDGTDWDQSRSLSRIFKFTGKAWDWEVSSENGNYDYLMYADIDYDHPDVVNEMKKWGVWYANEVGLDGYRLDAVKHIKFSFLKDWVDNARAATGKEMFTVGEYWQNDLGALNNYLAKVNYNQSLFDAPLHYNFYAASTGGGYYDMRNILNNTLVASKPTKAVTLVENHDTQPGQSLESTVQPWFKPLAYAFILTRSGGYPSVFYGDMYGTKGTTTREIPALKSKIEPLLKARKDYAYGTQRDYIDNPDVIGWTREGDSTKAKSGLATVITDGPGGSKRMYVGTSNAGEIWYDLTGNRTDKITIGSDGYATFPVNGGSVSVWVQQ

SEQ ID NO: 34859 - protein, 480 aa, Cytophaga sp.
NGTMMQYFEWYVPNDGQQWNRLRTDAPYLSSVGITAVWTPPAYKGTSQADVGYGPYDLYDLGEFNQKGTVRTKYGTKGELKSAVNTLHSNGIQVYGDVVMNHKAGADYTENVTAVEVNPSNRNQETSGEYNIQAWTGFNFPGRGTTYSNFKWQWFHFDGTDWDQSRSLSRIFKFTGKAWDWEVSSENGNYDYLMYADMDYDHPDVVNEMKKWGVWYANEVGLDGYRLDAVKHIKFSFLKDWVDNARAATGKEMFTVGEYWQNDLGALNNYLAKVNYNQSLFDAPLHYNFYAASTGGGYYDMRNILNNTLVASNPTKAVTLVENHDTQPGQSLESTVQPWFKPLAYAFILTRSGGYPSVFYGDMYGTKGTTTREIPALKSKIEPLLKARKDYAYGTQRDYIDNPDVIGWTREGDSTKAKSGLATVITDGPGGSKRMYVGTSNAGEIWYDLTGNRTDKITIGSDGYATFPVNGGSVSVWVQQ

SEQ ID NO: 34860 - protein, 480 aa, Cytophaga sp.
NGTMMQYFEWYVPNDGQQWNRLRTDAPYLSSVGITAVWTPPAYKGTSQADVGYGPYDLYDLGEFNQKGTVRTKYGTKGELKSAVNTLHSNGIQVYGDVVMNHKAGADYTENVTAVEVNPSNRNQETSGEYNIQAWTGFNFPGRGTTYSNFKWQWFHFDGTDWDQSRSLSRIFKFTGKAWDWEVSSENGNYDYLMYADIDYDHPDVVNEMKKWGVWYANEVGLDGYRLDAVKHIKFSFLKDWVDNARAATGKEMFTVGEYWQNDLGALNNYLAKVNYNQSLFDAPLHYNFYAASTGGGYYDMRNILNNTLVASNPTKAVTLVENHDTQPGQSLESTVQPWFKPLAYAFILTRSGGYPSVFYGDMYGTKGTTTREIPALKSKIEPLLKARKDYAYGTQRDYIDNPDVIGWTREGDSHKAKSGLATVITDGPGGSKRMYVGTSNAGEIWYDLTGNRTDKITIGSDGYATFPVNGGSVSVWVQQ

SEQ ID NO: 34861 - protein, 480 aa, Cytophaga sp.
NGTMMQYFEWYVPNDGQQWNRLRTDAPYLSSVGITAVWTPPAYKGTSQADDGYGPYDLYDLGEFNQKGTVRTKYGTKGELKSAVNTLHSNGIQVYGDVVMNHKAGADYTENVTAVEVNPSNRNQETSGEYNIQAWTGFNFPGRGTTYSNFKWQWFHFDGTDWDQSRSLSRIFKFTGKAWDWEVSSENGNYDYLMYADIDYDHPDVVNEMKKWGVWYANEVGLDGYRLDAVKHIKFSFLKDWVDNARAATGKEMFTVGEYWQNDLGALNNYLAKVNYNQSLFDAPLHYNFYAASTGGGYYDMRNILNNTLVASNPTKAVTLVENHDTQPGQSLESTVQPWFKPLAYAFILTRSGGYPSVFYGDMYGTKGTTTREIPALKSKIEPLLKARKDYAYGTQRDYIDNPDVIGWTREGDSTKAKSGLATVITDGPGGSKRMYVGTSNAGEIWYDLTGNRTDKITIGSDGYATFPVNGGSVSVWVQQ

SEQ ID NO: 34862 - protein, 480 aa, Cytophaga sp.
NGTMMQYFEWYVPNDGQQWNRLRTDAPYLSSVGITAVWTPPAYKGTSQADVGYGPYDLYDLGEFNQKGTVRTKYGTKGELKSAVNTLHSNGIQVYGDVVMNHKAGADYTENVTAVEVNPSNRNQETSGEYNIQAWTGFNFPGRGTTYSNFKWQWFHFDGTDWDQSRSLSRIFKFTGKAWDWEVSSENGNYDYLMYADIDYDHPDVVNEMKKWGVWYANEVGLDGYRLDAVKHIKFSFLKDWVDNARAATGKEMFTVGEYWQNDLGALNNYLAKVNYNQSLFDAPLHYNFYAASTGGGYYDMREILNNTLVASNPTKAVTLVENHDTQPGQSLESTVQPWFKPLAYAFILTRSGGYPSVFYGDMYGTKGTTTREIPALKSKIEPLLKARKDYAYGTQRDYIDNPDVIGWTREGDSTKAKSGLATVITDGPGGSKRMYVGTSNAGEIWYDLTGNRTDKITIGSDGYATFPVNGGSVSVWVQQ

SEQ ID NO: 34863 - protein, 480 aa, Cytophaga sp.
NGTMMQYFEWYVPNDGQQWNRLRTDAPYLSSVGITAVWTPPAYKGTSQADVGYGPYDLYDLGEFNQKGTVRTKYGTKGELKSAVNTLHSNGIQVYGDVVMNHKAGADYTENVTAVEVNPSNRNQETSKEYNIQAWTGFNFPGRGTTYSNFKWQWFHFDGTDWDQSRSLSRIFKFTGKAWDWEVSSENGNYDYLMYADIDYDHPDVVNEMKKWGVWYANEVGLDGYRLDAVKHIKFSFLKDWVDNARAATGKEMFTVGEYWQNDLGALNNYLAKVNYNQSLFDAPLHYNFYAASTGGGYYDMRNILNNTLVASNPTKAVTLVENHDTQPGQSLESTVQPWFKPLAYAFILTRSGGYPSVFYGDMYGTKGTTTREIPALKSKIEPLLKARKDYAYGTQRDYIDNPDVIGWTREGDSTKAKSGLATVITDGPGGSKRMYVGTSNAGEIWYDLTGNRTDKITIGSDGYATFPVNGGSVSVWVQQ

SEQ ID NO: 34864 - protein, 480 aa, Cytophaga sp.
NGTMMQYFEWYVPNDGQQWNRLRTDAPYLSSVGITAVWTPPAYKGTSQADVGYGPYDLYDLGEFNQKGTVRTKYGTKGELKSAVNTLHSNGIQVYGDVVMNHKAGADYTENVTAVEVNPSNRNQETSGEYNIQAWTGFNFPGRGTTYSNFKWQWFHFDGTDWDQSRSLSRIFKFTGKAWDWEVSSENGNYDYLMYADIDYDHPDVVNEMKKWGVWYANEVGLDGYRLDAVKHIKFSFLKDWVDNARAATGKEMFTVGEYWQNDLGALNNYLAKVNYNQSLFDAPLHYNFYAASTGGGYYDMRNILNNTLVASNPTKAVTLVENHDTQPGQSLESTVQPWFKPLAYAFILTRLGGYPSVFYGDMYGTKGTTTREIPALKSKIEPLLKARKDYAYGTQRDYIDNPDVIGWTREGDSTKAKSGLATVITDGPGGSKRMYVGTSNAGEIWYDLTGNRTDKITIGSDGYATFPVNGGSVSVWVQQ

SEQ ID NO: 34865 - protein, 480 aa, Cytophaga sp.
NGTMMQYFEWYVPNDGQQWNRLRTDAPYLSSVGITAVWTPPAYKGTSQADVGYGPYDLYDLGEFNQKGTVRTKYGTKGELKSAVNTLHSNGIQVYGDVVMNHKAGADYTENVTAVEVNPSNRNQETSGEYNIQAWTGFNFPGRGTTYSNFKWQWFHFDGTDWDQSRSLSRIFKFTGKAWDWEVSSENGNYDYLMYADIDYDHPDVVNEMKKWGVWYANEVGLDGYRLDAVKHIKFSFLKDWVDNARAATGKEMFTVGEYWQNDLGALNNYLAKVNYNQSLFDAPLHYNFYAASTGGGYYDMRNILNNTLVASNPTKAVTLVENHDTQPGQSLESTVQPWFKPLAYAFILTRSGGYPSVFYGDMYGTKGTTTREIPALKSKIEPLLKARKDYAYGTQRDYIDNPDVIGWTREGDSTKAKSGLATVITDGPGGSKRMYVGTSNAGEIWYDLTGNRTDKIIIGSDGYATFPVNGGSVSVWVQQ

SEQ ID NO: 34866 - protein, 480 aa, Cytophaga sp.
NGTMMQYFEWYVPNDGQQWNRLRTDAPYLSSVGITAVWTPPAYKGTSQADVGYGPYDLYDLGEFNQKGTVRTKYGTKGELKSAVNTLHSNGIQVYGDVVMNHKAGADYTENVTAVEVNPSNRNQETSGEYNIQAWTGFNFPGRGTTYSNFKWQWFHFDGTDWDQSRSLSRIFKFTGKAWDWEVSSENGNYDYLMYADIDYDHPDVVNEMKKWGVWYANEVGLDGYRLDAVKHIKFSFLKDWVDNARAATGKEMFTVGEYWQNDLGALNNYLAKVNYNQSLFDAPLHYNFYAASTGGGYYDMRNILNNTLVASNPTKAVTLVENHDTQPGQSLESTVQPWFKPLAYAFILTRSGGYPSVFYGDMYGTKGTTTREIPALKSKIEPLLKARKDYAYGTQRDYIDNPDVIGWTREGDSTKAKSGLATVITDGPGGSKRMYVGTSNAGEIWYDLTGNRWDKITIGSDGYATFPVNGGSVSVWVQQ

SEQ ID NO: 34867 - protein, 480 aa, Cytophaga sp.
NGTMMQYFEWYVPNDGQQWNRLRTDAPYLSSVGITAVWTPPAYKGTSQADVGYGPYDLYDLGEFNQKGTVRTKYGTKGELKSAVNTLHSNGIQVYGDVVMNHKAGADYTENVTAVEVNPSNRNQETSGEYNIQAWTGFNFPGRGTTYSNFKWQWFHFDGTDWDQSRSLSRIFKFTGKAWDWEVSSENGNYDYLMYADIDYDHPDVVDEMKKWGVWYANEVGLDGYRLDAVKHIKFSFLKDWVDNARAATGKEMFTVGEYWQNDLGALNNYLAKVNYNQSLFDAPLHYNFYAASTGGGYYDMRNILNNTLVASNPTKAVTLVENHDTQPGQSLESTVQPWFKPLAYAFILTRSGGYPSVFYGDMYGTKGTTTREIPALKSKIEPLLKARKDYAYGTQRDYIDNPDVIGWTREGDSTKAKSGLATVITDGPGGSKRMYVGTSNAGEIWYDLTGNRTDKITIGSDGYATFPVNGGSVSVWVQQ

SEQ ID NO: 34868 - protein, 480 aa, Cytophaga sp.
NGTMMQYFEWYVPNDGQQWNRLRTDAPYLSSVGITAVWTPPAYKGTSQADVGYGPYDLYDLGEFNQKGTVRTKYGTKGELKSAVNTLHSNGIQVYGDVVMNHKAGADYTENVTAVEVNPSNRNQETSGEYNIQAWTGFNFPGRGTTYSNFKWQWFHFDGTDWDQSRSLSRIFKFTGKAWDWEVSSENGNYDYLMYADIDYDHPDVVNEMKKWGVWYANEVGLDGYRLDAVKHIKFSFLKDWVDNARAATGKEMFTVGEYWQNDLGALNNYLAKVNYNQSLFDAPLHYNFYAASTGGGYYDMRNILNNTLVASNPTKAVTLVENHDTQPGQSLESTVQPWFKPLAYAFILTRSGGYPSVFYGDMYGTKGTTTREIPALKSKIEPLLKARKDYAYGTQRDYIDNPDVIGWTREGDSTKAKSGLATVITDGPGGSKRMYVGTSNAGEIWYDLTGNRTDKITIGSDGYAQFPVNGGSVSVWVQQ

SEQ ID NO: 34869 - protein, 480 aa, Cytophaga sp.
NGTMMQYFEWYVPNDGQQWNRLRTDAPYLSSVGITAVWTPPAYKGTSQADVGYGPYDLYDLGEFNQKGTVRTKYGTKGELKSAVNTLHSNGIQVYGDVVMNHKAGADYTENVTAVEVNPSNRNQETSGEYYIQAWTGFNFPGRGTTYSNFKWQWFHFDGTDWDQSRSLSRIFKFTGKAWDWEVSSENGNYDYLMYADIDYDHPDVVNEMKKWGVWYANEVGLDGYRLDAVKHIKFSFLKDWVDNARAATGKEMFTVGEYWQNDLGALNNYLAKVNYNQSLFDAPLHYNFYAASTGGGYYDMRNILNNTLVASNPTKAVTLVENHDTQPGQSLESTVQPWFKPLAYAFILTRSGGYPSVFYGDMYGTKGTTTREIPALKSKIEPLLKARKDYAYGTQRDYIDNPDVIGWTREGDSTKAKSGLATVITDGPGGSKRMYVGTSNAGEIWYDLTGNRTDKITIGSDGYATFPVNGGSVSVWVQQ

SEQ ID NO: 34870 - protein, 480 aa, Cytophaga sp.
NGTMMQYFEWYVPNDGQQWNRLRTDAPYLSSVGITAVWTPPAYKGTSQADVGYGPYDLYDLGEFNQKGTVRTKYGTKGELKSAVNTLHSNGIQVYGDVVMNHKAGADYTENVTAVEVNPSNRNQETSGEYNIQAWTGFNFPGRGTTYSNFKWQWFHFDGTDWDQSRSLSRIFKFTGKAWDWEVSSENGNYDYLMYADIDYDHPDVVNEMKKWGVWYANEVGLDGYRLDAVKHIKFSFLKDWVDNARAATGKEMFTVGEYWQNDLGALINYLAKVNYNQSLFDAPLHYNFYAASTGGGYYDMRNILNNTLVASNPTKAVTLVENHDTQPGQSLESTVQPWFKPLAYAFILTRSGGYPSVFYGDMYGTKGTTTREIPALKSKIEPLLKARKDYAYGTQRDYIDNPDVIGWTREGDSTKAKSGLATVITDGPGGSKRMYVGTSNAGEIWYDLTGNRTDKITIGSDGYATFPVNGGSVSVWVQQ

SEQ ID NO: 34871 - protein, 480 aa, Cytophaga sp.
NGTMMQYFEWYVPNDGQQWNRLRTDAPYLSSVGITAVWTPPAYKGNSQADVGYGPYDLYDLGEFNQKGTVRTKYGTKGELKSAVNTLHSNGIQVYGDVVMNHKAGADYTENVTAVEVNPSNRNQETSGEYNIQAWTGFNFPGRGTTYSNFKWQWFHFDGTDWDQSRSLSRIFKFTGKAWDWEVSSENGNYDYLMYADIDYDHPDVVNEMKKWGVWYANEVGLDGYRLDAVKHIKFSFLKDWVDNARAATGKEMFTVGEYWQNDLGALNNYLAKVNYNQSLFDAPLHYNFYAASTGGGYYDMRNILNNTLVASNPTKAVTLVENHDTQPGQSLESTVQPWFKPLAYAFILTRSGGYPSVFYGDMYGTKGTTTREIPALKSKIEPLLKARKDYAYGTQRDYIDNPDVIGWTREGDSTKAKSGLATVITDGPGGSKRMYVGTSNAGEIWYDLTGNRTDKITIGSDGYATFPVNGGSVSVWVQQ

SEQ ID NO: 34872 - protein, 480 aa, Cytophaga sp.
NGTMMQYFEWYVPNDGQQWNRLRTDAPYLSSVGITAVWTPPAYKGTSQADVGYGPYDLYDLGEFNQKGTVRTKYGTKGELKSAVNTLHSNGIQVYGDVVMNHKAGADYTENVTAVEVNPSNRNQETSGEYNIQAWTGFNFPGRGTTYSNFKWQWFHFDGTDWDQSRSLSRIFKFTGKAWDWEVSSENGNYDYLMYADIDYDHPDVVNEMKKWGVWYANEVGLDGYRLDAVKHIKFSFLKDWVDNARAATGKEMFTVGEYWQNDLGALNNYLAKVNYNQSLFDAPLHYNFYAASTGGGYYDMRNILNNTLVASNPTKAVTLVENHDTQPGQSLESTVQPWFKPLAYAFILTRSGGYPSVFYGDMYGTKGTTTREIPALKSKIEPLLKARKDYAYGTQRDYIDNPDVIGWTREGDSTKAKSGLATVITDGPGGSKRMYVGTSNAGEIWYDFTGNRTDKITIGSDGYATFPVNGGSVSVWVQQ

SEQ ID NO: 34873 - protein, 480 aa, Cytophaga sp.
NGTMMQYFEWYVPNDGQQWNRLRTDAPYLSSVGITAVWTPPAYKGTSQADVGYGPYDLYDLGEFNQKGTVRTKYGTKGELKSAVNTLHSNGIQVYGDVVMNHKAGADYTENVTAVEVNPSNRNQETSGEYNIQAWTGFNFPGRGTTYSNFKWQWFHFDGTDWDQSRSLSRIFKFTGKAWDWEVSSENGNYDYLMYADIDYDHPDVVNEMKKWGVWYANEVGLDGYRLDAVKHIKFSFLKDWVDNARAATGKEMFTVGEYWQNDLGALNNYLAKVNYNQSLFDAPLHYNFYAASTGGGYYDMRNILNNTLVASNPNKAVTLVENHDTQPGQSLESTVQPWFKPLAYAFILTRSGGYPSVFYGDMYGTKGTTTREIPALKSKIEPLLKARKDYAYGTQRDYIDNPDVIGWTREGDSTKAKSGLATVITDGPGGSKRMYVGTSNAGEIWYDLTGNRTDKITIGSDGYATFPVNGGSVSVWVQQ

SEQ ID NO: 34874 - protein, 480 aa, Cytophaga sp.
NGTMMQYFEWYVPNDGQQWNRLRTDAPYLSSVGITAVWTPPAYKGTSQADVGYGPYDLYDLGEFAQKGTVRTKYGTKGELKSAVNTLHSNGIQVYGDVVMNHKAGADYTENVTAVEVNPSNRNQETSGEYNIQAWTGFNFPGRGTTYSNFKWQWFHFDGTDWDQSRSLSRIFKFTGKAWDWEVSSENGNYDYLMYADIDYDHPDVVNEMKKWGVWYANEVGLDGYRLDAVKHIKFSFLKDWVDNARAATGKEMFTVGEYWQNDLGALNNYLAKVNYNQSLFDAPLHYNFYAASTGGGYYDMRNILNNTLVASNPTKAVTLVENHDTQPGQSLESTVQPWFKPLAYAFILTRSGGYPSVFYGDMYGTKGTTTREIPALKSKIEPLLKARKDYAYGTQRDYIDNPDVIGWTREGDSTKAKSGLATVITDGPGGSKRMYVGTSNAGEIWYDLTGNRTDKITIGSDGYATFPVNGGSVSVWVQQ

SEQ ID NO: 34875 - protein, 480 aa, Cytophaga sp.
NGTMMQYFEWYVPNDGQQWNRLRTDAPYLSSVGITAVWTPPAYKGTSQADVGYGPYDLYDLGEFNQKGTVRTKYGTKGELKSAVNTLHSNGIQVYGDVVMNHKAGADYTENVTAVEVNPSNRNQETSGEYNIQAWTGFNFPGRGTTYSNFKWQWFHFDGTDWDQSRSLSRIFKFTGKAWDWEVSSENGNYDYLMYADIDYDHPDVVVEMKKWGVWYANEVGLDGYRLDAVKHIKFSFLKDWVDNARAATGKEMFTVGEYWQNDLGALNNYLAKVNYNQSLFDAPLHYNFYAASTGGGYYDMRNILNNTLVASNPTKAVTLVENHDTQPGQSLESTVQPWFKPLAYAFILTRSGGYPSVFYGDMYGTKGTTTREIPALKSKIEPLLKARKDYAYGTQRDYIDNPDVIGWTREGDSTKAKSGLATVITDGPGGSKRMYVGTSNAGEIWYDLTGNRTDKITIGSDGYATFPVNGGSVSVWVQQ

SEQ ID NO: 34876 - protein, 480 aa, Cytophaga sp.
NGTMMQYFEWYVPNDGQQWNRLRTDAPYLSSVGITAVWTPPAYKGTSQADVGYGPYDLYDLGEFNQKGTVRTKYGTKGELKSAVNTLHSNGIQVYGDVVMNHKAGADYTENVTAVEVNPSNRNQETSGEYNIQAWTGFNFPGRGTTYSNFKWQWFHFDGTDWDQSRSLSRIFKFTGKAWDWEVSSENGNYDYLMYADIDYDHPDVVNEMKKWGVWYANEVGLDGYRLDAVKHIKFSFLKDWVDNARAATGKEMFTVGEYWQNDLGALNNYLAKVNYNQSLFDAPLHYNFYAASTGGGYYDMRNILNNTLVASNPTKAVTLVENHDTQPGQSLESTVQPWFKPLAYAFILTRSGGYPSVFYGDMYGTKGTTTREIPALKSKIEPLLKARKDYAYGTQRDYIDNPDVIGWTREGDSTKAKSGLATVITDGPGGSKRMYVGTSNAGECWYDLTGNRTDKITIGSDGYATFPVNGGSVSVWVQQ

SEQ ID NO: 34877 - protein, 480 aa, Cytophaga sp.
NGTMMQYFEWYVPNDGQQWNRLRTDAPYLSSVGITAVWTPPAYKGTSQADVGYGPYDLYDLGEFNQKGTVRTKYGTKGELKSAVNTLHSNGIQVYGDVVMNHKAGADYTENVTAVEVNPSNRNQETSGEYNIQAWTGFNFPGRGTTYSNFKWVWFHFDGTDWDQSRSLSRIFKFTGKAWDWEVSSENGNYDYLMYADIDYDHPDVVNEMKKWGVWYANEVGLDGYRLDAVKHIKFSFLKDWVDNARAATGKEMFTVGEYWQNDLGALNNYLAKVNYNQSLFDAPLHYNFYAASTGGGYYDMRNILNNTLVASNPTKAVTLVENHDTQPGQSLESTVQPWFKPLAYAFILTRSGGYPSVFYGDMYGTKGTTTREIPALKSKIEPLLKARKDYAYGTQRDYIDNPDVIGWTREGDSTKAKSGLATVITDGPGGSKRMYVGTSNAGEIWYDLTGNRTDKITIGSDGYATFPVNGGSVSVWVQQ

SEQ ID NO: 34878 - protein, 480 aa, Cytophaga sp.
NGTMMQYFEWYVPNDGQQWNRLRTDAPYLSSVGITAVWTPPAYKGTSQADVGYGPYDLYDLGEFNQKGTVRTKYGTKGELKSAVNTLHSNGIQVYGDVVMNHKAGADYTENVTAVEVNPSNRNQETSGEYNIQAWTGFNFPGRGTTYSNFKWQWFHFDGTDWDQSRSLSRIFKFTGKAWDWEVSSENGNYDYLMYADIDYDHPDVVNEMKKWGVWYANEVGLDGYRLDAVKHIKFSFLKDWVDNARAATGKEMFTVGEYWQNDLGALNNYLAKVNYNQSLFDAPLHYNFYAASTGGGYYDMRNILNNTLVASNPTKAVTLVENHDTQPGQSLESTVQPWFKPLAYAFILTRSGGYPSVFYGDMYGTKGTTTREIPALKSKIEPLLKARKDYAYGTQRDYIDNPDVIGWTREGDSTKAKSGLATVITDGPGGSKRMYVGTSNAGEIWYDLTGNRTDKITIGSDGYATFPVNEGSVSVWVQQ

SEQ ID NO: 34879 - protein, 480 aa, Cytophaga sp.
NGTMMQYFEWYVPNDGQQWNRLRTDAPYLSSVGITAVWTPPAYKGTSQADVGYGPYDLYDLGEFNQKGTVRTKYGTKGELKSAVNTLHSNGIQVYGDVVMNHKAGADYTENVTAVEVNPSNRNQETSGEYNIQAWTGFNFPGRGTTYSNFKWQWFHFDGTDWDQSRSSSRIFKFTGKAWDWEVSSENGNYDYLMYADIDYDHPDVVNEMKKWGVWYANEVGLDGYRLDAVKHIKFSFLKDWVDNARAATGKEMFTVGEYWQNDLGALNNYLAKVNYNQSLFDAPLHYNFYAASTGGGYYDMRNILNNTLVASNPTKAVTLVENHDTQPGQSLESTVQPWFKPLAYAFILTRSGGYPSVFYGDMYGTKGTTTREIPALKSKIEPLLKARKDYAYGTQRDYIDNPDVIGWTREGDSTKAKSGLATVITDGPGGSKRMYVGTSNAGEIWYDLTGNRTDKITIGSDGYATFPVNGGSVSVWVQQ

SEQ ID NO: 34880 - protein, 480 aa, Cytophaga sp.
NGTMMQYFEWYVPNDGQQWNRLRTDAPYLSSVGITAVWTPPAYKGTSQADVGYGPYDLYDLGEFNQKGTVRTKYGTKGELKSAVNTLHSNGIQVYGDVVMNHKAGADYTENVTAVEVNPSNRNQETSGEYNIQAWTGFNFPGRGTTYSNFKWQWFHFDGTDWDQSRSGSRIFKFTGKAWDWEVSSENGNYDYLMYADIDYDHPDVVNEMKKWGVWYANEVGLDGYRLDAVKHIKFSFLKDWVDNARAATGKEMFTVGEYWQNDLGALNNYLAKVNYNQSLFDAPLHYNFYAASTGGGYYDMRNILNNTLVASNPTKAVTLVENHDTQPGQSLESTVQPWFKPLAYAFILTRSGGYPSVFYGDMYGTKGTTTREIPALKSKIEPLLKARKDYAYGTQRDYIDNPDVIGWTREGDSTKAKSGLATVITDGPGGSKRMYVGTSNAGEIWYDLTGNRTDKITIGSDGYATFPVNGGSVSVWVQQ

SEQ ID NO: 34881 - protein, 480 aa, Cytophaga sp.
NGTMMQYFEWYVPNDGQQWERLRTDAPYLSSVGITAVWTPPAYKGTSQADVGYGPYDLYDLGEFNQKGTVRTKYGTKGELKSAVNTLHSNGIQVYGDVVMNHKAGADYTENVTAVEVNPSNRNQETSGEYNIQAWTGFNFPGRGTTYSNFKWQWFHFDGTDWDQSRSLSRIFKFTGKAWDWEVSSENGNYDYLMYADIDYDHPDVVNEMKKWGVWYANEVGLDGYRLDAVKHIKFSFLKDWVDNARAATGKEMFTVGEYWQNDLGALNNYLAKVNYNQSLFDAPLHYNFYAASTGGGYYDMRNILNNTLVASNPTKAVTLVENHDTQPGQSLESTVQPWFKPLAYAFILTRSGGYPSVFYGDMYGTKGTTTREIPALKSKIEPLLKARKDYAYGTQRDYIDNPDVIGWTREGDSTKAKSGLATVITDGPGGSKRMYVGTSNAGEIWYDLTGNRTDKITIGSDGYATFPVNGGSVSVWVQQ

SEQ ID NO: 34882 - protein, 480 aa, Cytophaga sp.
NGTMMQYFEWYVPNDGQQWNRLRTDAPYLSSVGITAVWTPPAYKGTSQADVGYGPYDLYDLGEFNQKGTVRTKYGTKGELKSAVNTLHSNGIQVYGDVVMNHKAGADYTENVTAVEVNPSNRNQETSGEYNIQAWTLFNFPGRGTTYSNFKWQWFHFDGTDWDQSRSLSRIFKFTGKAWDWEVSSENGNYDYLMYADIDYDHPDVVNEMKKWGVWYANEVGLDGYRLDAVKHIKFSFLKDWVDNARAATGKEMFTVGEYWQNDLGALNNYLAKVNYNQSLFDAPLHYNFYAASTGGGYYDMRNILNNTLVASNPTKAVTLVENHDTQPGQSLESTVQPWFKPLAYAFILTRSGGYPSVFYGDMYGTKGTTTREIPALKSKIEPLLKARKDYAYGTQRDYIDNPDVIGWTREGDSTKAKSGLATVITDGPGGSKRMYVGTSNAGEIWYDLTGNRTDKITIGSDGYATFPVNGGSVSVWVQQ

SEQ ID NO: 34883 - protein, 480 aa, Cytophaga sp.
NGTMMQYFEWYVPNDGQQWNRLRTDAPYLSSVGITAVWTPPAYKGTSQADVGYGPYDLYDLGEFNQKGTVRTKYGTKGELKSAVNTLHSNGIQVYGDVVMNHKAGADYTENVTAVEVNPSNRNQETSGEYNIQAWTGFNFPGRGTTYSNFKWQWFHFDGTDWDQSRSLSRIFKFTGKAWDWEVSSENGNYDYLMYADIDYDHPDVVNEMKKWGVWYANEVGLDGYRLDAVKHIKFSFLKDWVNNARAATGKEMFTVGEYWQNDLGALNNYLAKVNYNQSLFDAPLHYNFYAASTGGGYYDMRNILNNTLVASNPTKAVTLVENHDTQPGQSLESTVQPWFKPLAYAFILTRSGGYPSVFYGDMYGTKGTTTREIPALKSKIEPLLKARKDYAYGTQRDYIDNPDVIGWTREGDSTKAKSGLATVITDGPGGSKRMYVGTSNAGEIWYDLTGNRTDKITIGSDGYATFPVNGGSVSVWVQQ

SEQ ID NO: 34884 - protein, 480 aa, Cytophaga sp.
NGTMMQYFEWYVPNDGQQWNRLRYDAPYLSSVGITAVWTPPAYKGTSQADVGYGPYDLYDLGEFNQKGTVRTKYGTKGELKSAVNTLHSNGIQVYGDVVMNHKAGADYTENVTAVEVNPSNRNQETSGEYNIQAWTGFNFPGRGTTYSNFKWQWFHFDGTDWDQSRSLSRIFKFTGKAWDWEVSSENGNYDYLMYADIDYDHPDVVNEMKKWGVWYANEVGLDGYRLDAVKHIKFSFLKDWVDNARAATGKEMFTVGEYWQNDLGALNNYLAKVNYNQSLFDAPLHYNFYAASTGGGYYDMRNILNNTLVASNPTKAVTLVENHDTQPGQSLESTVQPWFKPLAYAFILTRSGGYPSVFYGDMYGTKGTTTREIPALKSKIEPLLKARKDYAYGTQRDYIDNPDVIGWTREGDSTKAKSGLATVITDGPGGSKRMYVGTSNAGEIWYDLTGNRTDKITIGSDGYATFPVNGGSVSVWVQQ

SEQ ID NO: 34885 - protein, 480 aa, Cytophaga sp.
NGTMMQYFEWYVPNDGQQWWRLRTDAPYLSSVGITAVWTPPAYKGTSQADVGYGPYDLYDLGEFNQKGTVRTKYGTKGELKSAVNTLHSNGIQVYGDVVMNHKAGADYTENVTAVEVNPSNRNQETSGEYNIQAWTGFNFPGRGTTYSNFKWQWFHFDGTDWDQSRSLSRIFKFTGKAWDWEVSSENGNYDYLMYADIDYDHPDVVNEMKKWGVWYANEVGLDGYRLDAVKHIKFSFLKDWVDNARAATGKEMFTVGEYWQNDLGALNNYLAKVNYNQSLFDAPLHYNFYAASTGGGYYDMRNILNNTLVASNPTKAVTLVENHDTQPGQSLESTVQPWFKPLAYAFILTRSGGYPSVFYGDMYGTKGTTTREIPALKSKIEPLLKARKDYAYGTQRDYIDNPDVIGWTREGDSTKAKSGLATVITDGPGGSKRMYVGTSNAGEIWYDLTGNRTDKITIGSDGYATFPVNGGSVSVWVQQ

SEQ ID NO: 34886 - protein, 480 aa, Cytophaga sp.
NGTMMQYFEWYVPNDGQQWNRLRTDAPYLSSVGITAVWTPPAYKGTSQADVGYGPYDLYDLGEFNQKGTVRTKYGTKGELKSAVNTLHSNGIQVYGDVVMNHKAGADYTENVTAVEVNPSNRNQETSGEYNIWAWTGFNFPGRGTTYSNFKWQWFHFDGTDWDQSRSLSRIFKFTGKAWDWEVSSENGNYDYLMYADIDYDHPDVVNEMKKWGVWYANEVGLDGYRLDAVKHIKFSFLKDWVDNARAATGKEMFTVGEYWQNDLGALNNYLAKVNYNQSLFDAPLHYNFYAASTGGGYYDMRNILNNTLVASNPTKAVTLVENHDTQPGQSLESTVQPWFKPLAYAFILTRSGGYPSVFYGDMYGTKGTTTREIPALKSKIEPLLKARKDYAYGTQRDYIDNPDVIGWTREGDSTKAKSGLATVITDGPGGSKRMYVGTSNAGEIWYDLTGNRTDKITIGSDGYATFPVNGGSVSVWVQQ

SEQ ID NO: 34887 - protein, 480 aa, Cytophaga sp.
NGTMMQYFEWYVPNDGQQWNRLRTDAPYLSSVGITAVWTPPAYKGTSQADVGYGPYDLYDLGEFNQKGTVRTKYGTKGELKSAVNTLHSNGIQVYGDVVMNHKAGADYTENVTAVEVNPSNRNQETSGEYNIQAWTGFNFPGRGTTYSNFKWMWFHFDGTDWDQSRSLSRIFKFTGKAWDWEVSSENGNYDYLMYADIDYDHPDVVNEMKKWGVWYANEVGLDGYRLDAVKHIKFSFLKDWVDNARAATGKEMFTVGEYWQNDLGALNNYLAKVNYNQSLFDAPLHYNFYAASTGGGYYDMRNILNNTLVASNPTKAVTLVENHDTQPGQSLESTVQPWFKPLAYAFILTRSGGYPSVFYGDMYGTKGTTTREIPALKSKIEPLLKARKDYAYGTQRDYIDNPDVIGWTREGDSTKAKSGLATVITDGPGGSKRMYVGTSNAGEIWYDLTGNRTDKITIGSDGYATFPVNGGSVSVWVQQ

SEQ ID NO: 34888 - protein, 480 aa, Cytophaga sp.
NGTMMQYFEWYVPNDGQQWNRLRTDAPYLSSVGITAVWTPPAYKGTSQADVGYGPYDLYDLGEFNQKGTVRTKYGTKGELKSAVNTLHSNGIQVYGDVVMNHKAGADYTENVTAVEVNPSNRNQETSGEYNIQAWTGFNFPGRGTTYSNFKWQWFHFDGTDWDQSRSLSRIFKFTGKAWDWEVSSENGNYDYLMYADIDYDHPDVVNEMKKWGVWYANEVGLDGYRLDAVKHIKFSFLKDWVDNARAATGKEMFTVGEYWQNDLGALNNYLAKVNYNQSLFDAPLHYNFYAASTGGGYYDMRNILNNTLVASNPTKAVTLVENHDTQPGQSLESTVQPWFKPLAYAFILTRSGGYPSVFYGDMYGTKGTTTREIPALKSKIEPLLKARKDYAYGTQRDYIDNPDVIGWTREGDSRKAKSGLATVITDGPGGSKRMYVGTSNAGEIWYDLTGNRTDKITIGSDGYATFPVNGGSVSVWVQQ

SEQ ID NO: 34889 - protein, 480 aa, Cytophaga sp.
NGTMMQYFEWYVPNDGQQWNRLRTDAPYLSSVGITAVWTPPAYKGTSQADVGYGPYDLYDLGEFNQKGTVRTKYGTKGELKSAVNTLHSNGIQVYGDVVMNHKAGADYTENVTAVEVNPSNRNQETSGEYNIQAWTGFNFPGRGTTYSNFKWQWFHFDGTDWDQSRGLSRIFKFTGKAWDWEVSSENGNYDYLMYADIDYDHPDVVNEMKKWGVWYANEVGLDGYRLDAVKHIKFSFLKDWVDNARAATGKEMFTVGEYWQNDLGALNNYLAKVNYNQSLFDAPLHYNFYAASTGGGYYDMRNILNNTLVASNPTKAVTLVENHDTQPGQSLESTVQPWFKPLAYAFILTRSGGYPSVFYGDMYGTKGTTTREIPALKSKIEPLLKARKDYAYGTQRDYIDNPDVIGWTREGDSTKAKSGLATVITDGPGGSKRMYVGTSNAGEIWYDLTGNRTDKITIGSDGYATFPVNGGSVSVWVQQ

SEQ ID NO: 34890 - protein, 480 aa, Cytophaga sp.
NGTMMQYFEWYVPNDGQQWNRLRTDAPYLSSVGITAVWTPPAYKGYSQADVGYGPYDLYDLGEFNQKGTVRTKYGTKGELKSAVNTLHSNGIQVYGDVVMNHKAGADYTENVTAVEVNPSNRNQETSGEYNIQAWTGFNFPGRGTTYSNFKWQWFHFDGTDWDQSRSLSRIFKFTGKAWDWEVSSENGNYDYLMYADIDYDHPDVVNEMKKWGVWYANEVGLDGYRLDAVKHIKFSFLKDWVDNARAATGKEMFTVGEYWQNDLGALNNYLAKVNYNQSLFDAPLHYNFYAASTGGGYYDMRNILNNTLVASNPTKAVTLVENHDTQPGQSLESTVQPWFKPLAYAFILTRSGGYPSVFYGDMYGTKGTTTREIPALKSKIEPLLKARKDYAYGTQRDYIDNPDVIGWTREGDSTKAKSGLATVITDGPGGSKRMYVGTSNAGEIWYDLTGNRTDKITIGSDGYATFPVNGGSVSVWVQQ

SEQ ID NO: 34891 - protein, 480 aa, Cytophaga sp.
NGTMMQYFEWYVPNDGQQWNRLRTDAPYLSSVGITAVWTPPAYKGTSQADVGYGPYDLYDLGEFNQKGTVRTKYGTKGELKSAVNTLHSNGIQVYGDVVMNHKAGADYTENVTAVEVNPSNRNQETSGEYNIQAWTGFNFPGRGTTYSNFKWQWFHFDGTDWDQSRSLSRIFKFTGKAWDWEVSSENGNYDYLMYADIDYDHPDVVNEMKKWGVWYANEVGLDGYRLDAVKHIKFSFLKDWVDNARAATGKEMFTVGEYWQNDLGALNNYLIKVNYNQSLFDAPLHYNFYAASTGGGYYDMRNILNNTLVASNPTKAVTLVENHDTQPGQSLESTVQPWFKPLAYAFILTRSGGYPSVFYGDMYGTKGTTTREIPALKSKIEPLLKARKDYAYGTQRDYIDNPDVIGWTREGDSTKAKSGLATVITDGPGGSKRMYVGTSNAGEIWYDLTGNRTDKITIGSDGYATFPVNGGSVSVWVQQ

SEQ ID NO: 34892 - protein, 480 aa, Cytophaga sp.
NGTMMQYFEWYVPNDGQQWNRLRTDAPYLSSVGITAVWTPPAYKGTSQADVGYGPYDLYDLGEFNQKGTVRTKYGTKGELKSAVNTLHSNGIQVYGDVVMNHKAGADYTENVTAVEVNPSNRNQETSGEYNIQAWTGFNFPGRGTTYSFFKWQWFHFDGTDWDQSRSLSRIFKFTGKAWDWEVSSENGNYDYLMYADIDYDHPDVVNEMKKWGVWYANEVGLDGYRLDAVKHIKFSFLKDWVDNARAATGKEMFTVGEYWQNDLGALNNYLAKVNYNQSLFDAPLHYNFYAASTGGGYYDMRNILNNTLVASNPTKAVTLVENHDTQPGQSLESTVQPWFKPLAYAFILTRSGGYPSVFYGDMYGTKGTTTREIPALKSKIEPLLKARKDYAYGTQRDYIDNPDVIGWTREGDSTKAKSGLATVITDGPGGSKRMYVGTSNAGEIWYDLTGNRTDKITIGSDGYATFPVNGGSVSVWVQQ

SEQ ID NO: 34893 - protein, 480 aa, Cytophaga sp.
NGTMMQYFEWYVPNDGQQWNRLRTDACYLSSVGITAVWTPPAYKGTSQADVGYGPYDLYDLGEFNQKGTVRTKYGTKGELKSAVNTLHSNGIQVYGDVVMNHKAGADYTENVTAVEVNPSNRNQETSGEYNIQAWTGFNFPGRGTTYSNFKWQWFHFDGTDWDQSRSLSRIFKFTGKAWDWEVSSENGNYDYLMYADIDYDHPDVVNEMKKWGVWYANEVGLDGYRLDAVKHIKFSFLKDWVDNARAATGKEMFTVGEYWQNDLGALNNYLAKVNYNQSLFDAPLHYNFYAASTGGGYYDMRNILNNTLVASNPTKAVTLVENHDTQPGQSLESTVQPWFKPLAYAFILTRSGGYPSVFYGDMYGTKGTTTREIPALKSKIEPLLKARKDYAYGTQRDYIDNPDVIGWTREGDSTKAKSGLATVITDGPGGSKRMYVGTSNAGEIWYDLTGNRTDKITIGSDGYATFPVNGGSVSVWVQQ

SEQ ID NO: 34894 - protein, 480 aa, Cytophaga sp.
NGTMMQYFEWYVPNDGQQWNRLRTDAPYLSSVGITAVWTPPAYKGTSQADVGYGPYDLYDLGEFNQKGTVRTKYGTKGELKSAVNTLHSNGIQVYGDVVMNHKAGADYTENVTAVEVNPSNRNQETSGEYNIQAWTGFNFPGRGTTYSNFKWQWFHFDGTDWDQSRSLSRIFKFTGKAWDWEVSSENGNYDYLMYADIDYDHPDVVNEMKKWGVWYANEVGLDGYRLDAVKHIKFSFLKDWVDNARAATGKEMFTVGEYWQNDLGALNNYLCKVNYNQSLFDAPLHYNFYAASTGGGYYDMRNILNNTLVASNPTKAVTLVENHDTQPGQSLESTVQPWFKPLAYAFILTRSGGYPSVFYGDMYGTKGTTTREIPALKSKIEPLLKARKDYAYGTQRDYIDNPDVIGWTREGDSTKAKSGLATVITDGPGGSKRMYVGTSNAGEIWYDLTGNRTDKITIGSDGYATFPVNGGSVSVWVQQ

SEQ ID NO: 34895 - protein, 480 aa, Cytophaga sp.
NGTMMQYFEWYVPNDGQQWNRLRTDAPYLSSVGITAVWTPPAYKGTSQADVGYGPYDLYDLGEFNQKGTVRTKYGTKGELKSAVNTLHSNGIQVYGDVVMNHKAGADYTENVTAVEVNPSNRNQETSGEYNIQAWTGFNFPGRGTTYSNFKWQWFHFDGTDWDQSRSLSRIFKFTGKAWDWEVSSENGNYDYLMYADIDYDHPDVVNEMKKWGVWYANEVGLDGYRLDAVKHIKFSFLKDWVDNARAATGKEMFTVGEYWQNDLGALNNYLAKVNDNQSLFDAPLHYNFYAASTGGGYYDMRNILNNTLVASNPTKAVTLVENHDTQPGQSLESTVQPWFKPLAYAFILTRSGGYPSVFYGDMYGTKGTTTREIPALKSKIEPLLKARKDYAYGTQRDYIDNPDVIGWTREGDSTKAKSGLATVITDGPGGSKRMYVGTSNAGEIWYDLTGNRTDKITIGSDGYATFPVNGGSVSVWVQQ

SEQ ID NO: 34896 - protein, 480 aa, Cytophaga sp.
NGTMMQYFEWYVPNDGQQWNRLRTDAPYLSSVGITAVWTPPAYKGTSQADVGYGPYDLYDLGEFNQKGTVRTKYGTKGELKSAVNTLHSNGIQVYGDVVMNHKAGADYTENVTAVEVNPSNRNQETSGEYNIQAWTGFNFPGRGTTYSNFKWQWEHFDGTDWDQSRSLSRIFKFTGKAWDWEVSSENGNYDYLMYADIDYDHPDVVNEMKKWGVWYANEVGLDGYRLDAVKHIKFSFLKDWVDNARAATGKEMFTVGEYWQNDLGALNNYLAKVNYNQSLFDAPLHYNFYAASTGGGYYDMRNILNNTLVASNPTKAVTLVENHDTQPGQSLESTVQPWFKPLAYAFILTRSGGYPSVFYGDMYGTKGTTTREIPALKSKIEPLLKARKDYAYGTQRDYIDNPDVIGWTREGDSTKAKSGLATVITDGPGGSKRMYVGTSNAGEIWYDLTGNRTDKITIGSDGYATFPVNGGSVSVWVQQ

SEQ ID NO: 34897 - protein, 480 aa, Cytophaga sp.
NGTMMQYFEWYVPNDGQQWNRLRTDAPYLSSVGITAVWTPPAYKGTSQADVGYGPYDLYDLGEFNQKGTVRTKYGTKGELKSAVNTLHSNGIQVYGDVVMNHKAGADYTENVTAVEVNPSNRNQETSGEYNIQAWTGFNFPGRGTTYSNFKWQWFHFDGTDWDQSRSLSRIFKFTGKAWDWEVSSENGNYDYLMYADIDYDHPDVVNEMKKWGVWYANEVGLDGYRLDAVKHIKFSFLKDWVDNARAATGKEMFTVGEYWQNDLGALNNYLAKVNYNQSLFDAPLHYNFYAASTGGGYYDMRNILNNTLVASNPTKAVTLVENHDTQPGQSLESTVQPWFKPLAYAFILTRSGGYPSVFYGDMYGTKGTTTREIPALKSKIEPLLKARKDYAYGTQRDYIDNPDVIGWTREGDSTKAKSGLATVITDGPGGSKRMYVGTSNAGEIWYDLTGNRTDKITIGSDGYATFPVNCGSVSVWVQQ

SEQ ID NO: 34898 - protein, 480 aa, Cytophaga sp.
NGTMMQYFEWYVPNDGQQWNRLRTDAPYLSSVGITAVWTPPAYKGTSQADVGYGPYDLYDLGEFNQKGTVRTKYGTKGELKSAVNTLHSNGIQVYGDVVMNHKAGADYTENVTAVEVNPSNRNQETSGEYNIQAWTGFNFPGRGTTYSNFKWQWFHFDGTDWDQSRSLSRIFKFTGKAWDWEVSSENGNYDYLMYADIDYDHPDVVNEMKKWGVWYANEVGLDGYRLDAVKHIKFSFLKDWVDNARAATGKEMFTVGEYWQNDLGALNNYLAKVNYNQSLFDAPLHYNFYAASTGGGYYDMRNILNNTLVASIPTKAVTLVENHDTQPGQSLESTVQPWFKPLAYAFILTRSGGYPSVFYGDMYGTKGTTTREIPALKSKIEPLLKARKDYAYGTQRDYIDNPDVIGWTREGDSTKAKSGLATVITDGPGGSKRMYVGTSNAGEIWYDLTGNRTDKITIGSDGYATFPVNGGSVSVWVQQ

SEQ ID NO: 34899 - protein, 480 aa, Cytophaga sp.
NGTMMQYFEWYVPNDGQQWNRLRTDAPYLSSVGITAVWTPPAYKGTSQADVGYGPYDLYDLGEFNQKGTVRTKYGTKGELKSAVNTLHSNGIQVYGDVVMNHKAGADYTENVTAVEVNPSNRNQETSGEYNIQAWTGFNFPGRGTTYSNFKWQWFHFDGTDWDQSRSLSRIFKFTGKAWDWEVSSENGNYDYLMYADIDYDHPDVVNEMKKWGVWYANEVGLDGYRLDAVKHIKFSFLKDWVDNARAATGKEMFTVGEYWQNDLGALNNYLAKVNYNQSLFDAPLHYNFYAASTGGGYYDMRNILNNTLVASNPAKAVTLVENHDTQPGQSLESTVQPWFKPLAYAFILTRSGGYPSVFYGDMYGTKGTTTREIPALKSKIEPLLKARKDYAYGTQRDYIDNPDVIGWTREGDSTKAKSGLATVITDGPGGSKRMYVGTSNAGEIWYDLTGNRTDKITIGSDGYATFPVNGGSVSVWVQQ

SEQ ID NO: 34900 - protein, 480 aa, Cytophaga sp.
NGTMMQYFEWYVPNDGQQWNRLRTDAPYLSSVGITAVWTPPAYKGTSQADVGYGPYDLYDLGEFNQKGTVRTKYGTKGELKSAVNTLHSNGIQVYGDVVMNHKAGADYTENVTAVEVNPSNRNQETSGEYNIQAWTGFNFPGRGTTYSNFKWQWFHFDGTDWDQSRSLSRIFKFTGKAWDWEVSSENGNYDYLMYADIDYDHPDVVNEMKKWGVWYANEVGLDGYRLDAVKHIKFSFLKDWVDNARAATGKEMFTVGEYWQNDLGALNNYLAKVNYNQSLFDAPLHYNFYAASTGGGYYDMRTILNNTLVASNPTKAVTLVENHDTQPGQSLESTVQPWFKPLAYAFILTRSGGYPSVFYGDMYGTKGTTTREIPALKSKIEPLLKARKDYAYGTQRDYIDNPDVIGWTREGDSTKAKSGLATVITDGPGGSKRMYVGTSNAGEIWYDLTGNRTDKITIGSDGYATFPVNGGSVSVWVQQ

SEQ ID NO: 34901 - protein, 480 aa, Cytophaga sp.
NGTMMQYFEWYVPNDGQQWNRLRTDAPYLSSVGITAVWTPPAYKGTSQADVGYGPYDLYDLGEFNQKGTVRTKYGTKGELKSAVNTLHSNGIQVYGDVVMNHKAGADYTENVTAVEVNPSNRNQETSGEYNIQAWTGFNFPGRGTTYSNFKWQWFHFDGTDWDQSRSLSRIFKGTGKAWDWEVSSENGNYDYLMYADIDYDHPDVVNEMKKWGVWYANEVGLDGYRLDAVKHIKFSFLKDWVDNARAATGKEMFTVGEYWQNDLGALNNYLAKVNYNQSLFDAPLHYNFYAASTGGGYYDMRNILNNTLVASNPTKAVTLVENHDTQPGQSLESTVQPWFKPLAYAFILTRSGGYPSVFYGDMYGTKGTTTREIPALKSKIEPLLKARKDYAYGTQRDYIDNPDVIGWTREGDSTKAKSGLATVITDGPGGSKRMYVGTSNAGEIWYDLTGNRTDKITIGSDGYATFPVNGGSVSVWVQQ

SEQ ID NO: 34902 - protein, 480 aa, Cytophaga sp.
NGTMMQYFEWYVPNDGQQWNRLRTDAPYLSSVGITAVWTPPAYKGTSQADVGYGPYDLYDLGEFNQKGTVRTKYGTKGELKSAVNTLHSNGIQVYGDVVMNHKAGADYTENVTAVEVNPSNRNQETSGEYNIQAWTGFNFPGRGTTYSNFKWQWFHFDGTDWDQSRSLSRIFKFTGKAWDWEVSSENGNYDYLMYADIDYDHPDVVNEMKKWGVWYANEVGLDGYRLDAVKHIKFSFLKDWVDNARAATGKEMFTVGEYWQNDLGALNNYLDKVNYNQSLFDAPLHYNFYAASTGGGYYDMRNILNNTLVASNPTKAVTLVENHDTQPGQSLESTVQPWFKPLAYAFILTRSGGYPSVFYGDMYGTKGTTTREIPALKSKIEPLLKARKDYAYGTQRDYIDNPDVIGWTREGDSTKAKSGLATVITDGPGGSKRMYVGTSNAGEIWYDLTGNRTDKITIGSDGYATFPVNGGSVSVWVQQ

SEQ ID NO: 34903 - protein, 480 aa, Cytophaga sp.
NGTMMQYFEWYVPNDGQQWNRLRTDAPYLSSVGITAVWTPPAYKGTSQADVGYGPYDLYDLGEFNQKGTVRTKYGTKGELKSAVNTLHSNGIQVYGDVVMNHKAGADYTENVTAVEVNPSNRNQETSGEYNIQAWTGFNFPGRGTTYSNFKWQWFHFDGTDWDQSRSLSRIFKFTGKAWDWEVSSENGNYDYLMYADIDYDHPDVVNEMKKWGVWYANEVGLDGYRLDAVKHIKFSFLKDWVDNARAATGKEMFTVGEYWQNDLGALNNYLAKVNYNQSLFDAPLHYNFYAASTGGGYYDMRNILNNTLVASNPTKAVTLVENHDTQPGQSLESTVQPWFKPLAYAFILTRSGGYPSVFYGDMYGTKGTTTREIPALKSKIEPLLKARKDYAYGTQRDYIDDPDVIGWTREGDSTKAKSGLATVITDGPGGSKRMYVGTSNAGEIWYDLTGNRTDKITIGSDGYATFPVNGGSVSVWVQQ

SEQ ID NO: 34904 - protein, 480 aa, Cytophaga sp.
NGTMMQYFEWYVPNDGQQWNRLRGDAPYLSSVGITAVWTPPAYKGTSQADVGYGPYDLYDLGEFNQKGTVRTKYGTKGELKSAVNTLHSNGIQVYGDVVMNHKAGADYTENVTAVEVNPSNRNQETSGEYNIQAWTGFNFPGRGTTYSNFKWQWFHFDGTDWDQSRSLSRIFKFTGKAWDWEVSSENGNYDYLMYADIDYDHPDVVNEMKKWGVWYANEVGLDGYRLDAVKHIKFSFLKDWVDNARAATGKEMFTVGEYWQNDLGALNNYLAKVNYNQSLFDAPLHYNFYAASTGGGYYDMRNILNNTLVASNPTKAVTLVENHDTQPGQSLESTVQPWFKPLAYAFILTRSGGYPSVFYGDMYGTKGTTTREIPALKSKIEPLLKARKDYAYGTQRDYIDNPDVIGWTREGDSTKAKSGLATVITDGPGGSKRMYVGTSNAGEIWYDLTGNRTDKITIGSDGYATFPVNGGSVSVWVQQ

SEQ ID NO: 34905 - protein, 480 aa, Cytophaga sp.
NGTMMQYFEWYVPNDGQQWNRLRTDAPYLSSVGITAVWTPPAYKGTSQADVGYGPYDLYDLGEFNQKGTVRTKYGTKGELKSAVNTLHSNGIQVYGDVVMNHKAGADYTENVTAVEVNPSNRNQETSGEYNIQAWTGFNFPGRGTTYSNFKWQWFHFDGTDWDQSRSLSRIFKFTGKAWDWEVSSENGNYDYLMYADIDYDHPDVVNEMKKWGVWYANEVGLDGYRLDAVKHIKFSFLKDWVDNARAATGKEMFTVGEYWQNDLGALNNYLAKVNYNQSLFDAPLHYNFYAASTGGGYYDMRNILNNTLVASNPTKAVTLVENHDTQPGQSLESTVQPWFKPLAYAFILTRSGGYPSVFYGDMYGTKGTTTREIPALKSKIEPLLKARKDYAYGTQRDYIDNPDVIGWTREGDSTKAKSGLATVITDGPGGSKRMYVGTSNAGEIWYDATGNRTDKITIGSDGYATFPVNGGSVSVWVQQ

SEQ ID NO: 34906 - protein, 480 aa, Cytophaga sp.
NGTMMQYFEWYVPNDGQQWNRLRTDAPYLSSVGITAVWTPPAYKGTSQADVGYGPYDLYDLGEFNQKGTVRTKYGTKGELKSAVNTLHSNGIQVYGDVVMNHKAGADYTENVTAVEVNPSNRNQETSGEYNIQAWTGFNFPGRGTTYSWFKWQWFHFDGTDWDQSRSLSRIFKFTGKAWDWEVSSENGNYDYLMYADIDYDHPDVVNEMKKWGVWYANEVGLDGYRLDAVKHIKFSFLKDWVDNARAATGKEMFTVGEYWQNDLGALNNYLAKVNYNQSLFDAPLHYNFYAASTGGGYYDMRNILNNTLVASNPTKAVTLVENHDTQPGQSLESTVQPWFKPLAYAFILTRSGGYPSVFYGDMYGTKGTTTREIPALKSKIEPLLKARKDYAYGTQRDYIDNPDVIGWTREGDSTKAKSGLATVITDGPGGSKRMYVGTSNAGEIWYDLTGNRTDKITIGSDGYATFPVNGGSVSVWVQQ

SEQ ID NO: 34907 - protein, 480 aa, Cytophaga sp.
NGTMMQYFEWYVPNDGQQWNRLRTDAPYLSSVGITAVWTPPAYKGTSQADVGYGPYDLYDLGEFNQKGTVRTKYGTKGELKSAVNTLHSNGIQVYGDVVMNHKAGADYTENVTAVEVNPSNRNQETSGEYNIQAWTGFNFPGRGTTYSNFKWQWFHFDGTDWDQSRSMSRIFKFTGKAWDWEVSSENGNYDYLMYADIDYDHPDVVNEMKKWGVWYANEVGLDGYRLDAVKHIKFSFLKDWVDNARAATGKEMFTVGEYWQNDLGALNNYLAKVNYNQSLFDAPLHYNFYAASTGGGYYDMRNILNNTLVASNPTKAVTLVENHDTQPGQSLESTVQPWFKPLAYAFILTRSGGYPSVFYGDMYGTKGTTTREIPALKSKIEPLLKARKDYAYGTQRDYIDNPDVIGWTREGDSTKAKSGLATVITDGPGGSKRMYVGTSNAGEIWYDLTGNRTDKITIGSDGYATFPVNGGSVSVWVQQ

SEQ ID NO: 34908 - protein, 480 aa, Cytophaga sp.
NGTMMQYFEWYVPNDGQQWNRLRTDAPYLSSVGITAVWTPPAYKGTSQADVGYGPYDLYDLGEFNQKGTVRTKYGTKGELKSAVNTLHSNGIQVYGDVVMNHKAGADYTENVTAVEVNPSNRNQETSGEYNIQAWTGFNFPGRGTTYSNFKWQWFHFDGTDWDQSRSLSRIFKFTGKAWDWEVSSENGNYDYLMYADIDYDHPDVVNEMKKWGVWYANEVGLDGYRLDAVKHIKFSFLKDWVDNARAATGKEMFTVGEYWQNDLGALNNYLAKVNYNQSLFDAPLHYNFYAASTGGGYYDMRNILNNTLVASFPTKAVTLVENHDTQPGQSLESTVQPWFKPLAYAFILTRSGGYPSVFYGDMYGTKGTTTREIPALKSKIEPLLKARKDYAYGTQRDYIDNPDVIGWTREGDSTKAKSGLATVITDGPGGSKRMYVGTSNAGEIWYDLTGNRTDKITIGSDGYATFPVNGGSVSVWVQQ

SEQ ID NO: 34909 - protein, 480 aa, Cytophaga sp.
NGTMMQYFEWYVPNDGQQWNRLRTDAPYLSSVGITAVWTPPAYKGTSQADVGYGPYDLYDLGEFNQKGTVRTKYGTKGELKSAVNTLHSNGIQVYGDVVMNHKAGADYTENVTAVEVNPSNRNQETSGEYNITAWTGFNFPGRGTTYSNFKWQWFHFDGTDWDQSRSLSRIFKFTGKAWDWEVSSENGNYDYLMYADIDYDHPDVVNEMKKWGVWYANEVGLDGYRLDAVKHIKFSFLKDWVDNARAATGKEMFTVGEYWQNDLGALNNYLAKVNYNQSLFDAPLHYNFYAASTGGGYYDMRNILNNTLVASNPTKAVTLVENHDTQPGQSLESTVQPWFKPLAYAFILTRSGGYPSVFYGDMYGTKGTTTREIPALKSKIEPLLKARKDYAYGTQRDYIDNPDVIGWTREGDSTKAKSGLATVITDGPGGSKRMYVGTSNAGEIWYDLTGNRTDKITIGSDGYATFPVNGGSVSVWVQQ

SEQ ID NO: 34910 - protein, 480 aa, Cytophaga sp.
NGTMMQYFEWYVPNDGQQWNRLRTDAPYLSSVGITAVWTPPAYKGTSQADVGYGPYDLYDLGEFNQKGTVRTKYGTKGELKSAVNTLHSNGIQVYGDVVMNHKAGADYTENVTAVEVNPSNRNQETSGEYNIQAWTGFNFPGRGTTYSNFKWQWFHFDGTDWDQSRSLSRIFKFTGKAWDWEVSSENGNYDYLMYADIDYDHPDVVNEMKKWGVWYANEVGLDGYRLDAVKHIKFSFLKDWVDNARHATGKEMFTVGEYWQNDLGALNNYLAKVNYNQSLFDAPLHYNFYAASTGGGYYDMRNILNNTLVASNPTKAVTLVENHDTQPGQSLESTVQPWFKPLAYAFILTRSGGYPSVFYGDMYGTKGTTTREIPALKSKIEPLLKARKDYAYGTQRDYIDNPDVIGWTREGDSTKAKSGLATVITDGPGGSKRMYVGTSNAGEIWYDLTGNRTDKITIGSDGYATFPVNGGSVSVWVQQ

SEQ ID NO: 34911 - protein, 480 aa, Cytophaga sp.
NGTMMQYFEWYVPNDGQQWNRLRTDAPYLSSVGITAVWTPPAYKGTSQADVGYGPYDLYDLGEFNQKGTVRTKYGTKGELKSAVNTLHSNGIQVYGDVVMNHKAGADYTENVTAVEVNPSNRNQETSGEYNIQAWTGFKFPGRGTTYSNFKWQWFHFDGTDWDQSRSLSRIFKFTGKAWDWEVSSENGNYDYLMYADIDYDHPDVVNEMKKWGVWYANEVGLDGYRLDAVKHIKFSFLKDWVDNARAATGKEMFTVGEYWQNDLGALNNYLAKVNYNQSLFDAPLHYNFYAASTGGGYYDMRNILNNTLVASNPTKAVTLVENHDTQPGQSLESTVQPWFKPLAYAFILTRSGGYPSVFYGDMYGTKGTTTREIPALKSKIEPLLKARKDYAYGTQRDYIDNPDVIGWTREGDSTKAKSGLATVITDGPGGSKRMYVGTSNAGEIWYDLTGNRTDKITIGSDGYATFPVNGGSVSVWVQQ

SEQ ID NO: 34912 - protein, 480 aa, Cytophaga sp.
NGTMMQYFEWYVPNDGQQWNRLRTDAPYLSSVGITAVWTPPAYKGTSQADVGYGPYDLYDLGEFNQKGTVRTKYGTKGELKSAVNTLHSNGIQVYGDVVMNHKAGADYTENVTAVEVNPSNRNQETSGEYNIQAWTGFNFPGRGTTYSNFKWQWFHFDGTDWDQSRSLSRIFKFTGKAWDWEVSSENGNYDYLMYADIDYDHPDVVNEMKKWGVWYANEVGLDGYRLDAVKHIKFSFLKDWVDNARAATGKEMFTVGEYWQNDLGALNNYLAKVNYNQSLFDAPLHYNFYAASTGGGYYDMRNILNNTLVASNPTKAVTMVENHDTQPGQSLESTVQPWFKPLAYAFILTRSGGYPSVFYGDMYGTKGTTTREIPALKSKIEPLLKARKDYAYGTQRDYIDNPDVIGWTREGDSTKAKSGLATVITDGPGGSKRMYVGTSNAGEIWYDLTGNRTDKITIGSDGYATFPVNGGSVSVWVQQ

SEQ ID NO: 34913 - protein, 480 aa, Cytophaga sp.
NGTMMQYFEWYVPNDGQQWNRLRTDAPYLSSVGITAVWTPPAYKGTSQADVGYGPYDLYDLGEFNQKGTVRTKYGTKGELKSAVNTLHSNGIQVYGDVVMNHKAGADYTENVTAVEVNPSNRNQETSGEYNIQAWTGFNFPGRGTTYSNFKWQWFHFDGNDWDQSRSLSRIFKFTGKAWDWEVSSENGNYDYLMYADIDYDHPDVVNEMKKWGVWYANEVGLDGYRLDAVKHIKFSFLKDWVDNARAATGKEMFTVGEYWQNDLGALNNYLAKVNYNQSLFDAPLHYNFYAASTGGGYYDMRNILNNTLVASNPTKAVTLVENHDTQPGQSLESTVQPWFKPLAYAFILTRSGGYPSVFYGDMYGTKGTTTREIPALKSKIEPLLKARKDYAYGTQRDYIDNPDVIGWTREGDSTKAKSGLATVITDGPGGSKRMYVGTSNAGEIWYDLTGNRTDKITIGSDGYATFPVNGGSVSVWVQQ

SEQ ID NO: 34914 - protein, 480 aa, Cytophaga sp.
NGTMMQYFEWYVPNDGQQWNRLRFDAPYLSSVGITAVWTPPAYKGTSQADVGYGPYDLYDLGEFNQKGTVRTKYGTKGELKSAVNTLHSNGIQVYGDVVMNHKAGADYTENVTAVEVNPSNRNQETSGEYNIQAWTGFNFPGRGTTYSNFKWQWFHFDGTDWDQSRSLSRIFKFTGKAWDWEVSSENGNYDYLMYADIDYDHPDVVNEMKKWGVWYANEVGLDGYRLDAVKHIKFSFLKDWVDNARAATGKEMFTVGEYWQNDLGALNNYLAKVNYNQSLFDAPLHYNFYAASTGGGYYDMRNILNNTLVASNPTKAVTLVENHDTQPGQSLESTVQPWFKPLAYAFILTRSGGYPSVFYGDMYGTKGTTTREIPALKSKIEPLLKARKDYAYGTQRDYIDNPDVIGWTREGDSTKAKSGLATVITDGPGGSKRMYVGTSNAGEIWYDLTGNRTDKITIGSDGYATFPVNGGSVSVWVQQ

SEQ ID NO: 34915 - protein, 480 aa, Cytophaga sp.
NGTMMQYFEWYVPNDGQQWNRLRTDAPYLSSVGITAVWTPPAYKGTSQADVGYGPYDLYDLGEFNQKGTVRTKYGTKGELKSAVNTLHSNGIQVYGDVVMNHKAGADYTENVTAVEVNPSNRNQETSGEYNIQAWTGFNFPGRGTTYSNFKWQWFHFDGTDWDQSRSLSRIFKFTGKAWDWEVSSENGNYDYLMYADIDYDHPDVVNEMKKWGVWYANEVGLDGYRLDAVKHIKFSFLKDWVDNARAATGKEMFTVGEYWQNDLGALNNYLAKVNYNQSLFDAPLHYNFYAASTGGGYYDMRNILNNTLVASNPTKAVTLVENHDTQPGQSLESTVQPWFKPLAYAFILTRSGGYPSVFYGDMYGTKGTTTREIPALKSKIEPLLKARKDYAYGTQLDYIDNPDVIGWTREGDSTKAKSGLATVITDGPGGSKRMYVGTSNAGEIWYDLTGNRTDKITIGSDGYATFPVNGGSVSVWVQQ

SEQ ID NO: 34916 - protein, 480 aa, Cytophaga sp.
NGTMMQYFEWYVPNDGQQWNRLRTDAPYLSSVGITAVWTPPAYKGTSQADGGYGPYDLYDLGEFNQKGTVRTKYGTKGELKSAVNTLHSNGIQVYGDVVMNHKAGADYTENVTAVEVNPSNRNQETSGEYNIQAWTGFNFPGRGTTYSNFKWQWFHFDGTDWDQSRSLSRIFKFTGKAWDWEVSSENGNYDYLMYADIDYDHPDVVNEMKKWGVWYANEVGLDGYRLDAVKHIKFSFLKDWVDNARAATGKEMFTVGEYWQNDLGALNNYLAKVNYNQSLFDAPLHYNFYAASTGGGYYDMRNILNNTLVASNPTKAVTLVENHDTQPGQSLESTVQPWFKPLAYAFILTRSGGYPSVFYGDMYGTKGTTTREIPALKSKIEPLLKARKDYAYGTQRDYIDNPDVIGWTREGDSTKAKSGLATVITDGPGGSKRMYVGTSNAGEIWYDLTGNRTDKITIGSDGYATFPVNGGSVSVWVQQ

SEQ ID NO: 34917 - protein, 480 aa, Cytophaga sp.
NGTMMQYFEWYVPNDGQQWNRLRTDAPYLSSVGITAVWTPPAYKGTSQADVGYGPYDLYDLGEFNQKGTVRTKYGTKGELKSAVNTLHSNGIQVYGDVVMNHKAGADYTENVTAVEVNPSNRNQETSGEYNIQAWTGFNFPGRGTTYSNFKWQWFHFDGTDWDQSRSLSRIFKFTGKAWDWEVSSENGNYDYLMYADIDYDHPDVVNEMKKWGVWYANEVGLDGYRLDAVKHIKFSFLKDWVDNARAATGKEMFTVGEYWQNDLGALNNYLAKVNYNQSLFDAPLHYNFYAASTGGGYYDMRNILNNTLVASNPTKAVTLVENHDTQPGQSLESTVQPWFKPLAYAFILTRSGGYPSVFYGDMYGTKGTTTREIPALKSKIEPLLKARKDYAYGDQRDYIDNPDVIGWTREGDSTKAKSGLATVITDGPGGSKRMYVGTSNAGEIWYDLTGNRTDKITIGSDGYATFPVNGGSVSVWVQQ

SEQ ID NO: 34918 - protein, 480 aa, Cytophaga sp.
NGTMMQYFEWYVPNDGQQWNRLRTDAPYLSSVGITAVWTPPAYKGTSQADVGYGPYDLYDLGEFNQKGTVRTKYGTKGELKSAVNTLHSDGIQVYGDVVMNHKAGADYTENVTAVEVNPSNRNQETSGEYNIQAWTGFNFPGRGTTYSNFKWQWFHFDGTDWDQSRSLSRIFKFTGKAWDWEVSSENGNYDYLMYADIDYDHPDVVNEMKKWGVWYANEVGLDGYRLDAVKHIKFSFLKDWVDNARAATGKEMFTVGEYWQNDLGALNNYLAKVNYNQSLFDAPLHYNFYAASTGGGYYDMRNILNNTLVASNPTKAVTLVENHDTQPGQSLESTVQPWFKPLAYAFILTRSGGYPSVFYGDMYGTKGTTTREIPALKSKIEPLLKARKDYAYGTQRDYIDNPDVIGWTREGDSTKAKSGLATVITDGPGGSKRMYVGTSNAGEIWYDLTGNRTDKITIGSDGYATFPVNGGSVSVWVQQ

SEQ ID NO: 34919 - protein, 480 aa, Cytophaga sp.
NGTMMQYFEWYVPNDGQQWNRLRTDAPYLSSVGITAVWTPPAYKGTSQADVGYGPYDLYDLGEFNQKGTVRTKYGTKGELKCAVNTLHSNGIQVYGDVVMNHKAGADYTENVTAVEVNPSNRNQETSGEYNIQAWTGFNFPGRGTTYSNFKWQWFHFDGTDWDQSRSLSRIFKFTGKAWDWEVSSENGNYDYLMYADIDYDHPDVVNEMKKWGVWYANEVGLDGYRLDAVKHIKFSFLKDWVDNARAATGKEMFTVGEYWQNDLGALNNYLAKVNYNQSLFDAPLHYNFYAASTGGGYYDMRNILNNTLVASNPTKAVTLVENHDTQPGQSLESTVQPWFKPLAYAFILTRSGGYPSVFYGDMYGTKGTTTREIPALKSKIEPLLKARKDYAYGTQRDYIDNPDVIGWTREGDSTKAKSGLATVITDGPGGSKRMYVGTSNAGEIWYDLTGNRTDKITIGSDGYATFPVNGGSVSVWVQQ

SEQ ID NO: 34920 - protein, 480 aa, Cytophaga sp.
NGTMMQYFEWYVPNDGQQWNRLRTDAPYLSSVGITAVWTPPAYKGTSQADVGYGPYDLYDLGEFNQKGTVRTKYGTKGELKSAVNTLHSNGIQVYGDVVMNHKAGADYTENVTAVEVNPSNRNQETSGEYNIQAWTGFNFPGRGTTYSNFKWQWSHFDGTDWDQSRSLSRIFKFTGKAWDWEVSSENGNYDYLMYADIDYDHPDVVNEMKKWGVWYANEVGLDGYRLDAVKHIKFSFLKDWVDNARAATGKEMFTVGEYWQNDLGALNNYLAKVNYNQSLFDAPLHYNFYAASTGGGYYDMRNILNNTLVASNPTKAVTLVENHDTQPGQSLESTVQPWFKPLAYAFILTRSGGYPSVFYGDMYGTKGTTTREIPALKSKIEPLLKARKDYAYGTQRDYIDNPDVIGWTREGDSTKAKSGLATVITDGPGGSKRMYVGTSNAGEIWYDLTGNRTDKITIGSDGYATFPVNGGSVSVWVQQ

SEQ ID NO: 34921 - protein, 480 aa, Cytophaga sp.
NGTMMQYFEWYVPNDGQQWNRLRTDAPYLSSVGITAVWTPPAYKGTSQADVGYGPYDLYDLGEFNQKGTVRTKYGTKGELKSAVNTLHSNGIQVYGDVVMNHKAGADYTENVTAVEVNPSNRNQETSGEYNIQAWTGFNFPGRGTTYSNFKWQWFHFDGTDWDQSRSLSRIFKFTGKAWDWEVSSENGNYDYLMYADIDYDHPDVVNEMKKWGVWYANEVGLDGYRLDAVKHIKFSFLKDWVDNARAATGKEMFTVGEYWQNDLGALNNYLAKVNYNQSLFDAPLHYNFHAASTGGGYYDMRNILNNTLVASNPTKAVTLVENHDTQPGQSLESTVQPWFKPLAYAFILTRSGGYPSVFYGDMYGTKGTTTREIPALKSKIEPLLKARKDYAYGTQRDYIDNPDVIGWTREGDSTKAKSGLATVITDGPGGSKRMYVGTSNAGEIWYDLTGNRTDKITIGSDGYATFPVNGGSVSVWVQQ

SEQ ID NO: 34922 - protein, 480 aa, Cytophaga sp.
NGTMMQYFEWYVPNDGQQWNRLRTDAPYLSSVGITAVWTPPAYKGTSQADVGYGPYDLYDLGEFNQKGTVRTKYGTKGELKSAVNTLHSNGIQVYGDVVMNHKAGADYTENVTAVEVNPSNRNQETSGEYNIQAWTGFNFPGRGTTYSNFKWQWFHFDGTDWDQSRSLSRIFKFTGKAWDWEVSSENGNYDYLMYADIDYDHPDVVNEMKKWGVWYANEVGLDGYRLDAVKHIKFSFLKDWVDNARAATGKEMFTVGEYWQNDLGALNNYLAKVNYNQSLFDAPLHYNFYAASTGGGYYDMRNILNNTLVASCPTKAVTLVENHDTQPGQSLESTVQPWFKPLAYAFILTRSGGYPSVFYGDMYGTKGTTTREIPALKSKIEPLLKARKDYAYGTQRDYIDNPDVIGWTREGDSTKAKSGLATVITDGPGGSKRMYVGTSNAGEIWYDLTGNRTDKITIGSDGYATFPVNGGSVSVWVQQ

SEQ ID NO: 34923 - protein, 480 aa, Cytophaga sp.
NGTMMQYFEWYVPNDGQQWNRLRTDAPYLSSVGITAVWTPPAYKGTSQADVGYGPYDLYDLGEFNQKGTVRTKYGTKGELKSAVNCLHSNGIQVYGDVVMNHKAGADYTENVTAVEVNPSNRNQETSGEYNIQAWTGFNFPGRGTTYSNFKWQWFHFDGTDWDQSRSLSRIFKFTGKAWDWEVSSENGNYDYLMYADIDYDHPDVVNEMKKWGVWYANEVGLDGYRLDAVKHIKFSFLKDWVDNARAATGKEMFTVGEYWQNDLGALNNYLAKVNYNQSLFDAPLHYNFYAASTGGGYYDMRNILNNTLVASNPTKAVTLVENHDTQPGQSLESTVQPWFKPLAYAFILTRSGGYPSVFYGDMYGTKGTTTREIPALKSKIEPLLKARKDYAYGTQRDYIDNPDVIGWTREGDSTKAKSGLATVITDGPGGSKRMYVGTSNAGEIWYDLTGNRTDKITIGSDGYATFPVNGGSVSVWVQQ

SEQ ID NO: 34924 - protein, 480 aa, Cytophaga sp.
NGTMMQYFEWYVPNDGQQWNRLRTDAPYLSSVGITAVWTPPAYKGTSQADVGYGPYDLYDLGEFNQKGTVRTKYGTKKELKSAVNTLHSNGIQVYGDVVMNHKAGADYTENVTAVEVNPSNRNQETSGEYNIQAWTGFNFPGRGTTYSNFKWQWFHFDGTDWDQSRSLSRIFKFTGKAWDWEVSSENGNYDYLMYADIDYDHPDVVNEMKKWGVWYANEVGLDGYRLDAVKHIKFSFLKDWVDNARAATGKEMFTVGEYWQNDLGALNNYLAKVNYNQSLFDAPLHYNFYAASTGGGYYDMRNILNNTLVASNPTKAVTLVENHDTQPGQSLESTVQPWFKPLAYAFILTRSGGYPSVFYGDMYGTKGTTTREIPALKSKIEPLLKARKDYAYGTQRDYIDNPDVIGWTREGDSTKAKSGLATVITDGPGGSKRMYVGTSNAGEIWYDLTGNRTDKITIGSDGYATFPVNGGSVSVWVQQ

SEQ ID NO: 34925 - protein, 480 aa, Cytophaga sp.
NGTMMQYFEWYVPNDGQQWNRLRTDAPYLSSVGITAVWTPPAYKGTSQADVGYGPYDLYDLGEFNQKGTVRTKYGTKGELKSAVNTLHSNGIQVYGDVVMNHKAGADYTENVTAVEVNPSNRNQETSGEYNIQAWTGFNFPGRGTTYSNFKWQWFHFDGTDWDQSRSLSRIFKFTGKAWDWEVSSENGNYDYLMYADIDYDHPDVVNEMKKWGVWYANEVGLDGYRLDAVKHIKFSFLKDWVDNARAATGKEMFTVGEYWQNDLGALNNYLAKVNYNQSLFDAPLHYNFYAASTGGGYYDMRMILNNTLVASNPTKAVTLVENHDTQPGQSLESTVQPWFKPLAYAFILTRSGGYPSVFYGDMYGTKGTTTREIPALKSKIEPLLKARKDYAYGTQRDYIDNPDVIGWTREGDSTKAKSGLATVITDGPGGSKRMYVGTSNAGEIWYDLTGNRTDKITIGSDGYATFPVNGGSVSVWVQQ

SEQ ID NO: 34926 - protein, 480 aa, Cytophaga sp.
NGTMMQYFEWYVPNDGQQWNRLRTDAPYLSSVGITAVWTPPAYKGTSQADVGYGPYDLYDLGEFNQKGTVRTKYGTKGELKSAVNTLHSNGIQVYGDVVMNHKAGADYTENVTAVEVNPSNRNQETSGEYNIQAWTHFNFPGRGTTYSNFKWQWFHFDGTDWDQSRSLSRIFKFTGKAWDWEVSSENGNYDYLMYADIDYDHPDVVNEMKKWGVWYANEVGLDGYRLDAVKHIKFSFLKDWVDNARAATGKEMFTVGEYWQNDLGALNNYLAKVNYNQSLFDAPLHYNFYAASTGGGYYDMRNILNNTLVASNPTKAVTLVENHDTQPGQSLESTVQPWFKPLAYAFILTRSGGYPSVFYGDMYGTKGTTTREIPALKSKIEPLLKARKDYAYGTQRDYIDNPDVIGWTREGDSTKAKSGLATVITDGPGGSKRMYVGTSNAGEIWYDLTGNRTDKITIGSDGYATFPVNGGSVSVWVQQ

SEQ ID NO: 34927 - protein, 480 aa, Cytophaga sp.
NGTMMQYFEWYVPNDGQQWNRLRTDAPYLSSVGITAVWTPPAYKGTSQADVGYGPYDLYDLGEFNQKGTVRTKYGTKGELKSAVNTLHSNGIQVYGDVVMNHKAGADYTENVTAVEVNPSNRNQETSGEYNIQAWTGFNFPGRGTTYSNFKWQWFHFDGVDWDQSRSLSRIFKFTGKAWDWEVSSENGNYDYLMYADIDYDHPDVVNEMKKWGVWYANEVGLDGYRLDAVKHIKFSFLKDWVDNARAATGKEMFTVGEYWQNDLGALNNYLAKVNYNQSLFDAPLHYNFYAASTGGGYYDMRNILNNTLVASNPTKAVTLVENHDTQPGQSLESTVQPWFKPLAYAFILTRSGGYPSVFYGDMYGTKGTTTREIPALKSKIEPLLKARKDYAYGTQRDYIDNPDVIGWTREGDSTKAKSGLATVITDGPGGSKRMYVGTSNAGEIWYDLTGNRTDKITIGSDGYATFPVNGGSVSVWVQQ

SEQ ID NO: 34928 - protein, 480 aa, Cytophaga sp.
NGTMMQYFEWYVPNDGQQWNRLRTDAPYLSSVGITAVWTPPAYKGTSQADVGYGPYDLYDLGEFNQKGTVRTKYGTKGELKSAVNTLHSNGIQVYGDVVMNHKAGADYTENVTAVEVNPSNRNQETSGEYNIQAWTGFNFPGRGTTYSTFKWQWFHFDGTDWDQSRSLSRIFKFTGKAWDWEVSSENGNYDYLMYADIDYDHPDVVNEMKKWGVWYANEVGLDGYRLDAVKHIKFSFLKDWVDNARAATGKEMFTVGEYWQNDLGALNNYLAKVNYNQSLFDAPLHYNFYAASTGGGYYDMRNILNNTLVASNPTKAVTLVENHDTQPGQSLESTVQPWFKPLAYAFILTRSGGYPSVFYGDMYGTKGTTTREIPALKSKIEPLLKARKDYAYGTQRDYIDNPDVIGWTREGDSTKAKSGLATVITDGPGGSKRMYVGTSNAGEIWYDLTGNRTDKITIGSDGYATFPVNGGSVSVWVQQ

SEQ ID NO: 34929 - protein, 480 aa, Cytophaga sp.
NGTMMQYFEWYVPNDGQQWNRLRTDAPYLSSVGITAVWTPPAYKGTSQADVGYGPYDLYDLGEFNQKGTVRTKYGTKGELKSAVNTLHSNGIQVYGDVVMNHKAGADYTENVTAVEVNPSNRNQETSGEYNIQAWTGFNFPGRGTTYSNFKWQWFHFDGDDWDQSRSLSRIFKFTGKAWDWEVSSENGNYDYLMYADIDYDHPDVVNEMKKWGVWYANEVGLDGYRLDAVKHIKFSFLKDWVDNARAATGKEMFTVGEYWQNDLGALNNYLAKVNYNQSLFDAPLHYNFYAASTGGGYYDMRNILNNTLVASNPTKAVTLVENHDTQPGQSLESTVQPWFKPLAYAFILTRSGGYPSVFYGDMYGTKGTTTREIPALKSKIEPLLKARKDYAYGTQRDYIDNPDVIGWTREGDSTKAKSGLATVITDGPGGSKRMYVGTSNAGEIWYDLTGNRTDKITIGSDGYATFPVNGGSVSVWVQQ

SEQ ID NO: 34930 - protein, 480 aa, Cytophaga sp.
NGTMMQYFEWYVPNDGQQWNRLRTDAPYLSSVGITAVWTPPAYKGTSQADVGYGPYDLYDLGEFNQKGTVRTKYGTKGELKSAVNTLHSNGIQVYGDVVMNHKAGADYTENVTAVEVNPSNRNQETSGEYNIQAWTGFNFPGRGTTYSNFKWQWFHFDGTDWDQSRSLSRIFKFTGKAWDWEVSSENGNYDYLMYADIDYDHPDVVNEMKKWGVWYANEVGLDGYRLDAVKHIKFSFLKDWVDNARAATGKEMFTVGEYWQNDLGALNNYLAKVNYNQSLFDAPLHYNFYAASTGGGYYDMRNILNNTLVAWNPTKAVTLVENHDTQPGQSLESTVQPWFKPLAYAFILTRSGGYPSVFYGDMYGTKGTTTREIPALKSKIEPLLKARKDYAYGTQRDYIDNPDVIGWTREGDSTKAKSGLATVITDGPGGSKRMYVGTSNAGEIWYDLTGNRTDKITIGSDGYATFPVNGGSVSVWVQQ

SEQ ID NO: 34931 - protein, 480 aa, Cytophaga sp.
NGTMMQYFEWYVPNDGQQWNRLRTDASYLSSVGITAVWTPPAYKGTSQADVGYGPYDLYDLGEFNQKGTVRTKYGTKGELKSAVNTLHSNGIQVYGDVVMNHKAGADYTENVTAVEVNPSNRNQETSGEYNIQAWTGFNFPGRGTTYSNFKWQWFHFDGTDWDQSRSLSRIFKFTGKAWDWEVSSENGNYDYLMYADIDYDHPDVVNEMKKWGVWYANEVGLDGYRLDAVKHIKFSFLKDWVDNARAATGKEMFTVGEYWQNDLGALNNYLAKVNYNQSLFDAPLHYNFYAASTGGGYYDMRNILNNTLVASNPTKAVTLVENHDTQPGQSLESTVQPWFKPLAYAFILTRSGGYPSVFYGDMYGTKGTTTREIPALKSKIEPLLKARKDYAYGTQRDYIDNPDVIGWTREGDSTKAKSGLATVITDGPGGSKRMYVGTSNAGEIWYDLTGNRTDKITIGSDGYATFPVNGGSVSVWVQQ

SEQ ID NO: 34932 - protein, 480 aa, Cytophaga sp.
NGTMMQYFEWYVPNDGQQWNRLRTDAPYLSSVGITAVWTPPAYKGTSQADVGYGPYDLYDLGEFNQKGTVRTKYGTKGELKSAVNTLHSNGIQVYGDVVMNHKAGADYTENVTAVEVNPSNRNQETSGEYNIQAWTGFNFPGRGTTYSNFKWQWFHFDGTDWDQSRSLSRIFKFTGKAWDWEVSSENGNYDYLMYADIDYDHPDVVNEMKKWGVWYANEVGLDGYRLDAVKHIKFSFLKDWVDNARAATGKEMFTVGEYWQNDLGALNNYLQKVNYNQSLFDAPLHYNFYAASTGGGYYDMRNILNNTLVASNPTKAVTLVENHDTQPGQSLESTVQPWFKPLAYAFILTRSGGYPSVFYGDMYGTKGTTTREIPALKSKIEPLLKARKDYAYGTQRDYIDNPDVIGWTREGDSTKAKSGLATVITDGPGGSKRMYVGTSNAGEIWYDLTGNRTDKITIGSDGYATFPVNGGSVSVWVQQ

SEQ ID NO: 34933 - protein, 480 aa, Cytophaga sp.
NGTMMQYFEWYVPNDGQQWNRLRTDAPYLSSVGITAVWTPPAYKGTSQADVGYGPYDLYDLGEFNQKGTVRTKYGTKGELKSAVNTLHSNGIQVYGDVVMNHKAGADYTENVTAVEVNPSNRNQETSGEYNIQAWTGFNFPGRGTTYSNFKWQWFHFDGTDWDQSRSLSRIFKFTGKAWDWEVSSENGNYDYLMYADIDYDHPDVVNEMKKWGVWYANEVGLDGYRLDAVKHIKFSFLKDWVDNARAATGKEMFTVGEYWQNDLGALNNYLAKVNYNQSLFDAPLHYNFYAASTGGGYYDMRNILNNTLVASNPTKAVTLVENHDTQPGQSLESTVQPWFKPLAYAFILTRSGGYPSVFYGDMYGTKGTTTREIPALKSKIEPLLKARKDYAYGTQRDYIDNPDVIGWTREGDSTKAKSGLATVITDGPGGSKRMYVGTSNAGEIWYDLTGNRDDKITIGSDGYATFPVNGGSVSVWVQQ

SEQ ID NO: 34934 - protein, 480 aa, Cytophaga sp.
NGTMMQYFEWYVPNDGQQWNRLRTDAPYLSSVGITAVWTPPAYKGTSQADVGYGPYDLYDLGEFNQKGTVRTKYGTKGELKSAVNTLHSNGIQVYGDVVMNHKAGADYTENVTAVEVNPSNRNQETSGEYNIQAWTGFNFPGRGTTYSNFKWYWFHFDGTDWDQSRSLSRIFKFTGKAWDWEVSSENGNYDYLMYADIDYDHPDVVNEMKKWGVWYANEVGLDGYRLDAVKHIKFSFLKDWVDNARAATGKEMFTVGEYWQNDLGALNNYLAKVNYNQSLFDAPLHYNFYAASTGGGYYDMRNILNNTLVASNPTKAVTLVENHDTQPGQSLESTVQPWFKPLAYAFILTRSGGYPSVFYGDMYGTKGTTTREIPALKSKIEPLLKARKDYAYGTQRDYIDNPDVIGWTREGDSTKAKSGLATVITDGPGGSKRMYVGTSNAGEIWYDLTGNRTDKITIGSDGYATFPVNGGSVSVWVQQ

SEQ ID NO: 34935 - protein, 480 aa, Cytophaga sp.
NGTMMQYFEWYVPNDGQTWNRLRTDAPYLSSVGITAVWTPPAYKGTSQADVGYGPYDLYDLGEFNQKGTVRTKYGTKGELKSAVNTLHSNGIQVYGDVVMNHKAGADYTENVTAVEVNPSNRNQETSGEYNIQAWTGFNFPGRGTTYSNFKWQWFHFDGTDWDQSRSLSRIFKFTGKAWDWEVSSENGNYDYLMYADIDYDHPDVVNEMKKWGVWYANEVGLDGYRLDAVKHIKFSFLKDWVDNARAATGKEMFTVGEYWQNDLGALNNYLAKVNYNQSLFDAPLHYNFYAASTGGGYYDMRNILNNTLVASNPTKAVTLVENHDTQPGQSLESTVQPWFKPLAYAFILTRSGGYPSVFYGDMYGTKGTTTREIPALKSKIEPLLKARKDYAYGTQRDYIDNPDVIGWTREGDSTKAKSGLATVITDGPGGSKRMYVGTSNAGEIWYDLTGNRTDKITIGSDGYATFPVNGGSVSVWVQQ

SEQ ID NO: 34936 - protein, 480 aa, Cytophaga sp.
NGTMMQYFEWYVPNDGQQWNRLRTDAPYLSSVGITAVWTPPAYKGTSQADVGYGPYDLYDLGEFNQKGTVRTKYGTKGELKSAVNTLHSNGIQVYGDVVMNHKAGADYTENVTAVEVNPSNRNQETSGEYNIQAWTGFNFPGRGTTYSNFKWQWFHFDGTDWDQSRSLSRIFKFTGKAWDWEVSSENGNYDYLMYADIDYDHPDVVNEMKKWGVWYANEVGLDGYRLDAVKHIKFSFLKDWVDNARAATGKEMFTVGEYWQNDLGALNNYLAKVNYNQSLFDAPLHYNFYAASTGGGYYDMRNILNNTLVASLPTKAVTLVENHDTQPGQSLESTVQPWFKPLAYAFILTRSGGYPSVFYGDMYGTKGTTTREIPALKSKIEPLLKARKDYAYGTQRDYIDNPDVIGWTREGDSTKAKSGLATVITDGPGGSKRMYVGTSNAGEIWYDLTGNRTDKITIGSDGYATFPVNGGSVSVWVQQ

SEQ ID NO: 34937 - protein, 480 aa, Cytophaga sp.
NGTMMQYFEWYVPNDGQQWNRLRTDAPYLSSVGITAVWTPPAYKGTSQADVGYGPYDLYDLGEFNQKGTVRTKYGTKGELKSAVNTLHSNGIQVYGDVVMNHKAGADYTENVTAVEVNPSNRNQETSGEYNIQAWTGFNFPGRGTTYSNFKWQWFHFDGTDWDQSRSLSRIFKFTGKAWDWEVSSENGNYDYLMYADIDYDHPDVVNEMKKWGVWYANEVGLDGYRLDAVKHIKFSFLKDWVDNARAATGKEMFTVGEYWQNDLGALNNYLAKVDYNQSLFDAPLHYNFYAASTGGGYYDMRNILNNTLVASNPTKAVTLVENHDTQPGQSLESTVQPWFKPLAYAFILTRSGGYPSVFYGDMYGTKGTTTREIPALKSKIEPLLKARKDYAYGTQRDYIDNPDVIGWTREGDSTKAKSGLATVITDGPGGSKRMYVGTSNAGEIWYDLTGNRTDKITIGSDGYATFPVNGGSVSVWVQQ

SEQ ID NO: 34938 - protein, 480 aa, Cytophaga sp.
NGTMMQYFEWYVPNDGQQWNRLRTDAPYLSSVGITAVWTPPAYKGTSQADVGYGPYDLYDLGEFNQKGTVRTKYGTKGELKSAVNTLHSNGIQVYGDVVMNHKAGADYTENVTAVEVNPSNRNQETSGEYNIQAWTGFNFPGRGTTYSNFKWQWFHFDGTDWDQSRSLSRIFKFTGKAWDWEVSSENGNYDYLMYADIDYDHPDVVNEMKKWGVWYANEVGLDGYRLDAVKHIKFSFLKDWVDNARAATGKEMFTVGEYWQNDLGALNNYLAKVNYNQSLFDAPLHYNFYAASTGGGYYDMRNILNNTLVASNPTKAVTLVENHDTQPGQSLESTVQPWFKPLAYAFILTRSGGYPSVFYGDMYGTKGTTTREIPALKSKIEPLLKARKDYAYGTQRDYIDNPDVIGWTREGDSTKAKSGLATVITDGPGGSKRMYVGTSNAGEIWYDLTGNRTDKITIGSDGYAKFPVNGGSVSVWVQQ

SEQ ID NO: 34939 - protein, 480 aa, Cytophaga sp.
NGTMMQYFEWYVPNDGQQWNRLRTDAPYLSSVGITAVWTPPAYKGTSQADVGYGPYDLYDLGEFNQKGTVRTKYGTKGELKSAVNTLHSNGIQVYGDVVMNHKAGADYTENVTAVEVNPSNRNQETSGEYNIQAWTGFNFPGRGTTYSNFKWQWFHFDGTDWDQSRSLSRIFKFTGKAWDWEVSSENGNYDYLMYADIDYDHPDVVNEMKKWGVWYANEVGLDGYRLDAVKHIKFSFLKDWVDNARAATGKEMFTVGEYWQNDLGALNNYLAKVNYNQSLFDAPLHYNFYAASTGGGYYDMRNILNNTLVASNPTKAVTLVENHDTQPGQSLESTVQPWFKPLAYAFILTRSGGYPSVFYGDMYGTKGTTTREIPALKSKIEPLLKARKDYAYGTQRDYIDNPDVIGWTREGDSTKAKSGLATVITDGPGGSKRMYVGTSNAGEIWYDLTGNRFDKITIGSDGYATFPVNGGSVSVWVQQ

SEQ ID NO: 34940 - protein, 480 aa, Cytophaga sp.
NGTMMQYFEWYVPNDGQQWNRLRTDAPYLSSHGITAVWTPPAYKGTSQADVGYGPYDLYDLGEFNQKGTVRTKYGTKGELKSAVNTLHSNGIQVYGDVVMNHKAGADYTENVTAVEVNPSNRNQETSGEYNIQAWTGFNFPGRGTTYSNFKWQWFHFDGTDWDQSRSLSRIFKFTGKAWDWEVSSENGNYDYLMYADIDYDHPDVVNEMKKWGVWYANEVGLDGYRLDAVKHIKFSFLKDWVDNARAATGKEMFTVGEYWQNDLGALNNYLAKVNYNQSLFDAPLHYNFYAASTGGGYYDMRNILNNTLVASNPTKAVTLVENHDTQPGQSLESTVQPWFKPLAYAFILTRSGGYPSVFYGDMYGTKGTTTREIPALKSKIEPLLKARKDYAYGTQRDYIDNPDVIGWTREGDSTKAKSGLATVITDGPGGSKRMYVGTSNAGEIWYDLTGNRTDKITIGSDGYATFPVNGGSVSVWVQQ

SEQ ID NO: 34941 - protein, 480 aa, Cytophaga sp.
NGTMMQYFEWYVPNDGQQWNRLRTDAPYLSSVGITAVWTPPAYKGTSQADVGYGPYDLYDLGEFNQKGTVRTKYGTKGELKSAVNTLHSNGIQVYGDVVMNHKAGADYTENVTAVEVNPSNRNQETSGEYNIQAWTGFNFPGRGTTYSNFKWQWFHFDGTDWDQSRSLSRIFKFTGKAWDWEVSSENGNYDYLMYADYDYDHPDVVNEMKKWGVWYANEVGLDGYRLDAVKHIKFSFLKDWVDNARAATGKEMFTVGEYWQNDLGALNNYLAKVNYNQSLFDAPLHYNFYAASTGGGYYDMRNILNNTLVASNPTKAVTLVENHDTQPGQSLESTVQPWFKPLAYAFILTRSGGYPSVFYGDMYGTKGTTTREIPALKSKIEPLLKARKDYAYGTQRDYIDNPDVIGWTREGDSTKAKSGLATVITDGPGGSKRMYVGTSNAGEIWYDLTGNRTDKITIGSDGYATFPVNGGSVSVWVQQ

SEQ ID NO: 34942 - protein, 480 aa, Cytophaga sp.
NGTMMQYFEWYVPNDGQQWNRLRTDAPYLSSVGITAVWTPPAYKGTSQADVGYGPYDLYDLGEFNQKGTVRTKYGTKAELKSAVNTLHSNGIQVYGDVVMNHKAGADYTENVTAVEVNPSNRNQETSGEYNIQAWTGFNFPGRGTTYSNFKWQWFHFDGTDWDQSRSLSRIFKFTGKAWDWEVSSENGNYDYLMYADIDYDHPDVVNEMKKWGVWYANEVGLDGYRLDAVKHIKFSFLKDWVDNARAATGKEMFTVGEYWQNDLGALNNYLAKVNYNQSLFDAPLHYNFYAASTGGGYYDMRNILNNTLVASNPTKAVTLVENHDTQPGQSLESTVQPWFKPLAYAFILTRSGGYPSVFYGDMYGTKGTTTREIPALKSKIEPLLKARKDYAYGTQRDYIDNPDVIGWTREGDSTKAKSGLATVITDGPGGSKRMYVGTSNAGEIWYDLTGNRTDKITIGSDGYATFPVNGGSVSVWVQQ

SEQ ID NO: 34943 - protein, 480 aa, Cytophaga sp.
NGTMMQYFEWYVPNDGQQWNRLRTDAPYLSSVGITAVWTPPAYKGTSQADVGYGPYDLYDLGEFNQKGTVRTKYGTKGELKSAVNTLHSNGIQVYGDVVMNHKAGADYTENVTAVEVNPSNRNQETSGEYNIQAWTGFNFPGRGTTYSNFKWQWFHFDGTDWDQSRSLSRIFKFTGKAWDWEVSSENGNYDYLMYADIDYDHPDVVNEMKKWGVWYANEVGLDGYRLDAVKHIKFSFLKDWVDNARAATGKEMFTVGEYWQNDLGALNNYLAKVNYNQSLFDAPLHYNFYAASTGGGYYDMRNILNNTLVASNPTKAVTLVENHDTQPGQSLESTVQPWFKPLAYAFILTRSGGYPSVFYGDMYGTKGTTTREIPALKEKIEPLLKARKDYAYGTQRDYIDNPDVIGWTREGDSTKAKSGLATVITDGPGGSKRMYVGTSNAGEIWYDLTGNRTDKITIGSDGYATFPVNGGSVSVWVQQ

SEQ ID NO: 34944 - protein, 480 aa, Cytophaga sp.
NGTMMQYFEWYVPNDGQQWNRLRTDAPYLSSVGITAVWTPPAYKGTSQADVGYGPYDLYDLGEFNQKGTVRTKYGTKGELKSAVNTLHSNGIQVYGDVVMNHKAGADYTENVTAVEVNPSNRNQETSGEYNIQAWTGFNFPGRGTTYSNFKWQWFHFDGTDWDQSRSLSRIFKFTGKAWDWEVSSENGNYDYLMYADIDYDHPDVVNEMKKWGVWYANEVGLDGYRLDAVKHIKFSFLKDWVDNARAATGKEMFTVGEYWQNDLGALHNYLAKVNYNQSLFDAPLHYNFYAASTGGGYYDMRNILNNTLVASNPTKAVTLVENHDTQPGQSLESTVQPWFKPLAYAFILTRSGGYPSVFYGDMYGTKGTTTREIPALKSKIEPLLKARKDYAYGTQRDYIDNPDVIGWTREGDSTKAKSGLATVITDGPGGSKRMYVGTSNAGEIWYDLTGNRTDKITIGSDGYATFPVNGGSVSVWVQQ

SEQ ID NO: 34945 - protein, 480 aa, Cytophaga sp.
NGTMMQYFEWYVPNDGQQWNRLRTDAPYLSSVGITAVWTPPAYKGTSQADVGYGPYDLYDLGEFNQKGTVRTKYGTKGELKSAVNTLHSNGIQVYGDVVMNHKAGADYTENVTAVEVNPSNRNQETSGEYNIQAWTGFNFPGRGTTYSNFKWQWFHFDGTDWDQSRSQSRIFKFTGKAWDWEVSSENGNYDYLMYADIDYDHPDVVNEMKKWGVWYANEVGLDGYRLDAVKHIKFSFLKDWVDNARAATGKEMFTVGEYWQNDLGALNNYLAKVNYNQSLFDAPLHYNFYAASTGGGYYDMRNILNNTLVASNPTKAVTLVENHDTQPGQSLESTVQPWFKPLAYAFILTRSGGYPSVFYGDMYGTKGTTTREIPALKSKIEPLLKARKDYAYGTQRDYIDNPDVIGWTREGDSTKAKSGLATVITDGPGGSKRMYVGTSNAGEIWYDLTGNRTDKITIGSDGYATFPVNGGSVSVWVQQ

SEQ ID NO: 34946 - protein, 480 aa, Cytophaga sp.
NGTMMQYFEWYVPNDGQQWNRLRTDAPYLSSVGITAVWTPPAYKGTSQADVGYGPYDLYDLGEFNQKGTVRTKYGTKGELKSAVNTLHSNGIQVYGDVVMNHKAGADYTENVTAVEVNPSNRNQETSGEYNIQAWTGFNFPGRGTTYSNFKWQWFHFDGTDWDQSRSLSRIFKFTGKAWDWEVSSENGNYDYLMYADIDYDHPDVVNEMKKWGVWYANEVGLDGYRLDAVKHIKFSFLKDWVDNARAATGKEMFTVGEYWQNDLGALNNYLAKVNYNQSLFDAPLHYNFYAASTGGGYYDMRNILNNTLVASNPTKAVTLVENHDTQPGQSLESTVQPWFKPLAYAFILTRSGGYPSVFYGDMYGTKGTTTREIPALKSKIEPLLKARKDYAYGTQVDYIDNPDVIGWTREGDSTKAKSGLATVITDGPGGSKRMYVGTSNAGEIWYDLTGNRTDKITIGSDGYATFPVNGGSVSVWVQQ

SEQ ID NO: 34947 - protein, 480 aa, Cytophaga sp.
NGTMMQYFEWYVPNDGQQWNRLRTDAPYLSSVGITAVWTPPAYKGTSQADVGYGPYDLYDLGEFNQKGTVRTKYGTKGELKSAVNTLHSNGIQVYGDVVMNHKAGADYTENVTAVEVNPSNRNQETSGEYNIQAWTGFNFPGRGTTYSNFKWQWFHFDGTDWDQSRSLSRIFKFTGKAWDWEVSSENGNYDYLMYADIDYDHPDVVNEMKKWGVWYANEVGLDGYRLDAVKHIKFSFLKDWVDNARAATGKEMFTVGEYWQNDLGALNNYLAKVNYNQSLFDAPLHYNFYAASTGGGYYDMRGILNNTLVASNPTKAVTLVENHDTQPGQSLESTVQPWFKPLAYAFILTRSGGYPSVFYGDMYGTKGTTTREIPALKSKIEPLLKARKDYAYGTQRDYIDNPDVIGWTREGDSTKAKSGLATVITDGPGGSKRMYVGTSNAGEIWYDLTGNRTDKITIGSDGYATFPVNGGSVSVWVQQ

SEQ ID NO: 34948 - protein, 480 aa, Cytophaga sp.
NGTMMQYFEWYVPNDGQQWNRLRTDAPYLSSVGITAVWTPPAYKGTSQADVGYGPYDLYDLGEFNQKGTVRTKYGTKGELKSAVNTLHSNGIQVYGDVVMNHKAGADYTENVTAVEVNPSNRNQETSGEYNIQAWTGFNFPGRGTTYSNFKWQWFHFDGTDWDQSRSLSRIFKFTGKAWDWEVSSENGNYDYLMYADIDYDHPDVVNEMKKWGVWYANEVGLDGYRLDAVKHIKFSFLKDWVDNARAATGKEMFTVGEYWQNDLGALNNYLAKVNYNQSLFDAPLHYNFYAASTGGGYYDMRNILNNTLVASNPTKAVTLVENHDTQPGQSLESTVQPWFKPLAYAFILTRSGGYPSVFYGDMYGTKGTTTREIPALKSKIEPLLKARKDYAYGTQRDYIDNPDVIGWTREGDSTKAKSGLATVITDGPGGSKRMYVGTSNAGEVWYDLTGNRTDKITIGSDGYATFPVNGGSVSVWVQQ

SEQ ID NO: 34949 - protein, 480 aa, Cytophaga sp.
NGTMMQYFEWYVPNDGQQWNRLRTDAPYLSSVGITAVWTPPAYKGTSQADVGYGPYDLYDLGEFNQKGTVRTKYGTKGELKSAVNTLHSNGIQVYGDVVMNHKAGADYTENVTAVEVNPSNRNQETSGEYNIQAWTGFNFPGRGTTYSNFKWQWFHFDGTDWDQSRSLSRIFKFTGKAWDWEVSSENGNYDYLMYADIDYDHPDVVNEMKKWGVWYANEVGLDGYRLDAVKHIKFSFLKDWVDNARAATGKEMFTVGEYWQNDLGALNNYLAKVNYNQSLFDAPLHYNFYAASTGGGYYDMRNILNNTLVASNPTKAVTLVENHDTQPGQSLESTVQPWFKPLAYAFILTRSGGYPSVFYGDMYGTKGTTTREIPALKSKIEPLLKARKRYAYGTQRDYIDNPDVIGWTREGDSTKAKSGLATVITDGPGGSKRMYVGTSNAGEIWYDLTGNRTDKITIGSDGYATFPVNGGSVSVWVQQ

SEQ ID NO: 34950 - protein, 480 aa, Cytophaga sp.
NGTMMQYFEWYVPNDGQQWNRLRTDAPYLSSVGITAVWTPPAYKGTSQADVGYGPYDLYDLGEFNQKGTVRTKYGTKGELKSAVNTLHSNGIQVYGDVVMNHKAGADYTENVTAVEVNPSNRNQETSGEYNIQAWTGFNFPGRGTTYSNFKWQWFHFDGTDWDQSRSLSRIFKFTGKAWDWEVSSENGNYDYLMYADIDYDHPDVVNEMKKWGVWYANEVGLDGYRLDAVKHIKFSFLKDWVDNARAATGKEMFTVGEYWQNDLGALNNYLAKVNYNQSLFDAPLHYNFYAASTLGGYYDMRNILNNTLVASNPTKAVTLVENHDTQPGQSLESTVQPWFKPLAYAFILTRSGGYPSVFYGDMYGTKGTTTREIPALKSKIEPLLKARKDYAYGTQRDYIDNPDVIGWTREGDSTKAKSGLATVITDGPGGSKRMYVGTSNAGEIWYDLTGNRTDKITIGSDGYATFPVNGGSVSVWVQQ

SEQ ID NO: 34951 - protein, 480 aa, Cytophaga sp.
NGTMMQYFEWYVPNDGQQWNRLRTDAPYLSSVGITAVWTPPAYKGTSQADVGYGPYDLYDLGEFNQKGTVRTKYGTKGELKSAVNTLHSNGIQVYGDVVMNHKAGADYTENVTAVEVNPSNRNQETSGEYNIQAWTGFNFPGRGTTYSNFKWQWFHFDGTDWDQSRSLSRIFKFTGKAWDWEVSSENGNYDYLMYADIDYDHPDVVNEMKKWGVWYANEVGLDGYRLDAVKHIKFSFLKDWVDNARAATGKEMFTVGEYWQNDLGALNNYLAKVNYNQSLFDAPLHYNFYAASTGGGYYDMRNILNNTLVASNPYKAVTLVENHDTQPGQSLESTVQPWFKPLAYAFILTRSGGYPSVFYGDMYGTKGTTTREIPALKSKIEPLLKARKDYAYGTQRDYIDNPDVIGWTREGDSTKAKSGLATVITDGPGGSKRMYVGTSNAGEIWYDLTGNRTDKITIGSDGYATFPVNGGSVSVWVQQ

SEQ ID NO: 34952 - protein, 480 aa, Cytophaga sp.
NGTMMQYFEWYVPNDGQQWNRLRTDAAYLSSVGITAVWTPPAYKGTSQADVGYGPYDLYDLGEFNQKGTVRTKYGTKGELKSAVNTLHSNGIQVYGDVVMNHKAGADYTENVTAVEVNPSNRNQETSGEYNIQAWTGFNFPGRGTTYSNFKWQWFHFDGTDWDQSRSLSRIFKFTGKAWDWEVSSENGNYDYLMYADIDYDHPDVVNEMKKWGVWYANEVGLDGYRLDAVKHIKFSFLKDWVDNARAATGKEMFTVGEYWQNDLGALNNYLAKVNYNQSLFDAPLHYNFYAASTGGGYYDMRNILNNTLVASNPTKAVTLVENHDTQPGQSLESTVQPWFKPLAYAFILTRSGGYPSVFYGDMYGTKGTTTREIPALKSKIEPLLKARKDYAYGTQRDYIDNPDVIGWTREGDSTKAKSGLATVITDGPGGSKRMYVGTSNAGEIWYDLTGNRTDKITIGSDGYATFPVNGGSVSVWVQQ

SEQ ID NO: 34953 - protein, 480 aa, Cytophaga sp.
NGTMMQYFEWYVPNDGQQWNRLRTDAPYLSSVGITAVWTPPAYKGTSQADVGYGPYDLYDLGEFNQKGTVRTKYGTKGELKSAVNTLHSNGIQVYGDVVMNHKAGADYTENVTAVEVNPSNRNQETSGEYNIQAWTGFNFPGRGTTYSNFKWQWFHFDGTDWDQSRSLSRIFKFTGKAWDWEVSSENGNYDYLMYADIDYDHPDVVNEMKKWGVWYANEVGLDGYRLDAVKHIKFSFLKDWVDNARAATGKEMFTVGEYWQNDLGALNNYLAKVNYNQSLFDAPLHYNFYAASTGGGYYDMRNILNNTLVASNPTKAVTLVENHDTQPGQSLESTVQPWFKPLAYAFILTRSGGYPSVFYGDMYGTKGTTTREIPALKSKIEPLLKARKDYAYGTQRDYIDNPDVIGWTREGDSTKAKSGLATVITDGPGGSKRMYVGTTNAGEIWYDLTGNRTDKITIGSDGYATFPVNGGSVSVWVQQ

SEQ ID NO: 34954 - protein, 480 aa, Cytophaga sp.
NGTMMQYFEWYVPNDGQQWNRLRTDAPYLSSVGITAVWTPPAYKGTSQADVGYGPYDLYDLGEFNQKGTVRTKYGTKGELKSAVNTLHSNGIQVYGDVVMNHKAGADYTENVTAVEVNPSNRNQETSGEYNIQAWTGFNFPGRGTTYSNFKWSWFHFDGTDWDQSRSLSRIFKFTGKAWDWEVSSENGNYDYLMYADIDYDHPDVVNEMKKWGVWYANEVGLDGYRLDAVKHIKFSFLKDWVDNARAATGKEMFTVGEYWQNDLGALNNYLAKVNYNQSLFDAPLHYNFYAASTGGGYYDMRNILNNTLVASNPTKAVTLVENHDTQPGQSLESTVQPWFKPLAYAFILTRSGGYPSVFYGDMYGTKGTTTREIPALKSKIEPLLKARKDYAYGTQRDYIDNPDVIGWTREGDSTKAKSGLATVITDGPGGSKRMYVGTSNAGEIWYDLTGNRTDKITIGSDGYATFPVNGGSVSVWVQQ

SEQ ID NO: 34955 - protein, 480 aa, Cytophaga sp.
NGTMMQYFEWYVPNDGQQWNRLRTDAPYLSSVGITAVWTPPAYKGTSQADVGYGPYDLYDLGEFNQKGTVRTKYGTKGELKSAVNTLHSNGIQVYGDVVMNHKAGADYTENVTAVEVNPSNRNQETSGEYNIQAWTGFNFPGRGTTYSNFKWQWFHFDGTDWDQSRSLSRIFKFTGKAWDWEVSSENGNYDYLMYADIDYDHPDVVNEMKKWGVWYANEVGLDGYRLDAVKHIKFSFLKDWVDNARAATGKEMFTVGEYWQNDLGALNNYLAKVNYNQSLFDAPLHYNFYAASTGGGYYDMRNILNNTLVASNPTKAVTLVENHDTQPGQSLESTVQPWFKPLAYAFILTRSGGYPSVFYGDMYGTKGTTTREIPALKSKIEPLLKARKDYAYGTQRDYIDNPDVIGWTREGDSTKAKSGLATVITDGPGGSKRMYVGTSNAGEIWYDLTGNRTDKITIGSDGYAIFPVNGGSVSVWVQQ

SEQ ID NO: 34956 - protein, 480 aa, Cytophaga sp.
NGTMMQYFEWYVPNDGQQWNRLRTDAPYLSSVGITAVWTPPAYKGTSQADVGYGPYDLYDLGEFNQKGTVRTKYGTKGELKSAVNTLHSNGIQVYGDVVMNHKAGADYTENVTAVEVNPSNRNQETSGEYNIQAWTGFNFPGRGTTYSNFKWQWFHFDGTDWDQSRSLSRIFKFTGKAWDWEVSSENGNYDYLMYADIDYDHPDVVNEMKKWGVWYANEVGLDGYRLDAVKHIKFSFLKDWVDNARAATGKEMFTVGEYWQNDLGALNNYLAKVNYNQSLFDAPLHYNFYAASTGGGYYDMRNILNNTLVASNPTKAVTLVENHDTQPGQSLESTVQPWFKPLAYAFILTRSGGYPSVFYGDMYGTKGTTTREIPALKSKIEPLLKARKDYAYGTQRDYIDNPDVIGWTREGDSTKAKSGLATVITDGPGGSKRMYVGTSNAGEIWYDETGNRTDKITIGSDGYATFPVNGGSVSVWVQQ

SEQ ID NO: 34957 - protein, 480 aa, Cytophaga sp.
NGTMMQYFEWYVPNDGQQWNRLRTDAPYLSSVGITAVWTPPAYKGTSQADVGYGPYDLYDLGEFNQKGTVRTKYGTKPELKSAVNTLHSNGIQVYGDVVMNHKAGADYTENVTAVEVNPSNRNQETSGEYNIQAWTGFNFPGRGTTYSNFKWQWFHFDGTDWDQSRSLSRIFKFTGKAWDWEVSSENGNYDYLMYADIDYDHPDVVNEMKKWGVWYANEVGLDGYRLDAVKHIKFSFLKDWVDNARAATGKEMFTVGEYWQNDLGALNNYLAKVNYNQSLFDAPLHYNFYAASTGGGYYDMRNILNNTLVASNPTKAVTLVENHDTQPGQSLESTVQPWFKPLAYAFILTRSGGYPSVFYGDMYGTKGTTTREIPALKSKIEPLLKARKDYAYGTQRDYIDNPDVIGWTREGDSTKAKSGLATVITDGPGGSKRMYVGTSNAGEIWYDLTGNRTDKITIGSDGYATFPVNGGSVSVWVQQ

SEQ ID NO: 34958 - protein, 480 aa, Cytophaga sp.
NGTMMQYFEWYVPNDGQQWNRLRTDAPYLSSVGITAVWTPPAYKGTSQADVGYGPYDLYDLGEFNQKGTVRTKYGTKGELKSAVNTLHSNGIQVYGDVVMNHKAGADYTENVTAVEVNPSNRNQETSGEYNIQAWTGFNFPGRGTTYSNFKWQWFHFDGTDWDQSRSLSRIFKFTGKAWDWEVSSENGNYDYLMYADIDYDHPDVVNEMKKWGVWYANEVGLDGYRLDAVKHIKFSFLKDWVDNARAATGKEMFTVGEYWQNDLGALNNYLAKVNYNQSLFDAPLHYNFYAASTGGGYYDMRNILNNTLVASNPWKAVTLVENHDTQPGQSLESTVQPWFKPLAYAFILTRSGGYPSVFYGDMYGTKGTTTREIPALKSKIEPLLKARKDYAYGTQRDYIDNPDVIGWTREGDSTKAKSGLATVITDGPGGSKRMYVGTSNAGEIWYDLTGNRTDKITIGSDGYATFPVNGGSVSVWVQQ

SEQ ID NO: 34959 - protein, 480 aa, Cytophaga sp.
NGTMMQYFEWYVPNDGQQWNRLRTDAPYLSSVGITAVWTPPAYKGTSQADVGYGPYDLYDLGEFNQKGTVRTKYGTKGELKSAVNTLHSNGIQVYGDVVMNHKAGADYTENVTAVEVNPSNRNQETSGEYNIQAWTGFNFPGRGTTYSNFKWQWFHFDGTDWDQSRSFSRIFKFTGKAWDWEVSSENGNYDYLMYADIDYDHPDVVNEMKKWGVWYANEVGLDGYRLDAVKHIKFSFLKDWVDNARAATGKEMFTVGEYWQNDLGALNNYLAKVNYNQSLFDAPLHYNFYAASTGGGYYDMRNILNNTLVASNPTKAVTLVENHDTQPGQSLESTVQPWFKPLAYAFILTRSGGYPSVFYGDMYGTKGTTTREIPALKSKIEPLLKARKDYAYGTQRDYIDNPDVIGWTREGDSTKAKSGLATVITDGPGGSKRMYVGTSNAGEIWYDLTGNRTDKITIGSDGYATFPVNGGSVSVWVQQ

SEQ ID NO: 34960 - protein, 480 aa, Cytophaga sp.
NGTMMQYFEWYVPNDGQQWNRLRTDAPYLSSVGITAVWTPPAYKGTSQADVGYGPYDLYDLGEFFQKGTVRTKYGTKGELKSAVNTLHSNGIQVYGDVVMNHKAGADYTENVTAVEVNPSNRNQETSGEYNIQAWTGFNFPGRGTTYSNFKWQWFHFDGTDWDQSRSLSRIFKFTGKAWDWEVSSENGNYDYLMYADIDYDHPDVVNEMKKWGVWYANEVGLDGYRLDAVKHIKFSFLKDWVDNARAATGKEMFTVGEYWQNDLGALNNYLAKVNYNQSLFDAPLHYNFYAASTGGGYYDMRNILNNTLVASNPTKAVTLVENHDTQPGQSLESTVQPWFKPLAYAFILTRSGGYPSVFYGDMYGTKGTTTREIPALKSKIEPLLKARKDYAYGTQRDYIDNPDVIGWTREGDSTKAKSGLATVITDGPGGSKRMYVGTSNAGEIWYDLTGNRTDKITIGSDGYATFPVNGGSVSVWVQQ

SEQ ID NO: 34961 - protein, 480 aa, Cytophaga sp.
NGTMMQYFEWYVPNDGQQWNRLRTDAPYLSSVGITAVWTPPAYKGTSQADVGYGPYDLYDLGEFNQKGTVRTKYGTKGELKSAVNTLHSNGIQVYGDVVMNHKAGADYTENVTAVEVNPSNRNQETSGEYNIQAWTGFNFPGRGTTYSNFKWQWFHFDGTDWDQSRSLSRIFKFTGKAWDWEVSSENGNYDYLMYADIDYDHPDVVNEMKKWGVWYANEVGLDGYRLDAVKHIKFSFLKDWVDNARAATGKEMFTVGEYWQNDLGALNNYLAKVNYNQSLFDAPLHYNFYAASTGGGYYDMRNILNNTLVASNPTKAVTLVENHDTQPGQSLESTVQPWFKPLAYAFILTRSGGYPSVFYGDMYGTKGTTTREIPALKSKIEPLLKARKDYAYGTQRDYIDNPDVIGWTREGDSTKAKSGLATVITDGPGGSKRMYVGKSNAGEIWYDLTGNRTDKITIGSDGYATFPVNGGSVSVWVQQ

SEQ ID NO: 34962 - protein, 480 aa, Cytophaga sp.
NGTMMQYFEWYVPNDGQQWNRLRTDAPYLSSVGITAVWTPPAYKGTSQADVGYGPYDLYDLGEFNQKGTVRTKYGTKGELKSAVNTLHSNGIQVYGDVVMNHKAGADYTENVTAVEVNPSNRNQETSGEYNIQAWTGFNFPGRGTTYSNFKWQWFHFDGTDWDQSRSLSRIFKFTGKAWDWEVSSENGNYDYLMYADIDYDHPDVVNEMKKWGVWYANEVGLDGYRLDAVKHIKFSFLKDWVDNARAATGKEMFTVGEYWQNDLGALNNYLAKVNYNQSLFDAPLHYNFYAASTGGGYYDMRNILNNTLVASNPTKAVTLVENHDTQPGQSLESTVQPWFKPLAYAFILTRSGGYPSVFYGDMYGTKGTTTREIPALKSKIEPLLKARKDYAYGTQRDYIDNPDVIGWTREGDSTKAKSGLATVITDGPGGSKRMYVGTSNAGEQWYDLTGNRTDKITIGSDGYATFPVNGGSVSVWVQQ

SEQ ID NO: 34963 - protein, 480 aa, Cytophaga sp.
NGTMMQYFEWYVPNDGQQWNRLRTDAPYLSSVGITAVWTPPAYKGTSQADVGYGPYDLYDLGEFNQKGTVRTKYGTKGELKSAVATLHSNGIQVYGDVVMNHKAGADYTENVTAVEVNPSNRNQETSGEYNIQAWTGFNFPGRGTTYSNFKWQWFHFDGTDWDQSRSLSRIFKFTGKAWDWEVSSENGNYDYLMYADIDYDHPDVVNEMKKWGVWYANEVGLDGYRLDAVKHIKFSFLKDWVDNARAATGKEMFTVGEYWQNDLGALNNYLAKVNYNQSLFDAPLHYNFYAASTGGGYYDMRNILNNTLVASNPTKAVTLVENHDTQPGQSLESTVQPWFKPLAYAFILTRSGGYPSVFYGDMYGTKGTTTREIPALKSKIEPLLKARKDYAYGTQRDYIDNPDVIGWTREGDSTKAKSGLATVITDGPGGSKRMYVGTSNAGEIWYDLTGNRTDKITIGSDGYATFPVNGGSVSVWVQQ

SEQ ID NO: 34964 - protein, 480 aa, Cytophaga sp.
NGTMMQYFEWYVPNDGQQWNRLRTDAPYLSSVGITAVWTPPAYKGTSQADVGYGPYDLYDLGEFNQKGTVRTKYGTKGELKSAVNTLHSNGIQVYGDVVMNHKAGADYTENVTAVEVNPSNRNQETSGEYNIQAWTGFNFPGRGTTYSNFKWQWFHFDGTDWDQSRSLSRIFKFTGKAWDWEVSSENGNYDYLMYADIDYDHPDVVNEMKKWGVWYANEVGLDGYRLDAVKHIKFSFLKDWVDNARAATGKEMFTVGEYWQNDLGALNNYLAKVNYNQSLFDAPLHYNFYAASTGGGYYDMRNILNNTLVASNPTKAVTLVENHDTQPGQSLESTVQPWFKPLAYAFILTRSGGYPSVFYGDMYGTKGTTTREIPALKSKIEPLLKARKDYAYGTQRDYIDNPDVIGWTREGDSTKAKSGLATVITDGPGGSKRMYVGTSNAGEIWYDLTGNRTDKITIGSDGCATFPVNGGSVSVWVQQ

SEQ ID NO: 34965 - protein, 480 aa, Cytophaga sp.
NGTMMQYFEWYVPNDGQQWNRLRTDAPYLSSVGITAVWTPPAYKGTSQADVGYGPYDLYDLGEFNQKGTVRTKYGTKGELKSAVNTLHSNGIQVYGDVVMNHKAGADYTENVTAVEVNPSNRNQETSGEYNIQAWTGFNFPGRGWTYSNFKWQWFHFDGTDWDQSRSLSRIFKFTGKAWDWEVSSENGNYDYLMYADIDYDHPDVVNEMKKWGVWYANEVGLDGYRLDAVKHIKFSFLKDWVDNARAATGKEMFTVGEYWQNDLGALNNYLAKVNYNQSLFDAPLHYNFYAASTGGGYYDMRNILNNTLVASNPTKAVTLVENHDTQPGQSLESTVQPWFKPLAYAFILTRSGGYPSVFYGDMYGTKGTTTREIPALKSKIEPLLKARKDYAYGTQRDYIDNPDVIGWTREGDSTKAKSGLATVITDGPGGSKRMYVGTSNAGEIWYDLTGNRTDKITIGSDGYATFPVNGGSVSVWVQQ

SEQ ID NO: 34966 - protein, 480 aa, Cytophaga sp.
NGTMMQYFEWYVPNDGQQWNRLRTDAPYLSSVGITAVWTPPAYKGTSQADVGYGPYDLYDLGEFNQKGTVRTKYGTKGELKSAVNTLHSNGIQVYGDVVMNHKAGADYTENVTAVEVNPSNRNQETSGEYNIQAWTGFVFPGRGTTYSNFKWQWFHFDGTDWDQSRSLSRIFKFTGKAWDWEVSSENGNYDYLMYADIDYDHPDVVNEMKKWGVWYANEVGLDGYRLDAVKHIKFSFLKDWVDNARAATGKEMFTVGEYWQNDLGALNNYLAKVNYNQSLFDAPLHYNFYAASTGGGYYDMRNILNNTLVASNPTKAVTLVENHDTQPGQSLESTVQPWFKPLAYAFILTRSGGYPSVFYGDMYGTKGTTTREIPALKSKIEPLLKARKDYAYGTQRDYIDNPDVIGWTREGDSTKAKSGLATVITDGPGGSKRMYVGTSNAGEIWYDLTGNRTDKITIGSDGYATFPVNGGSVSVWVQQ

SEQ ID NO: 34967 - protein, 480 aa, Cytophaga sp.
NGTMMQYFEWYVPNDGQQWNRLRTDAPYLSSVGITAVWTPPAYKGTSQADVGYGPYDLYDLGEFNQKGTVRTKYGTKGELKSAVNTLHSNGIQVYGDVVMNHKAGADYTENVTAVEVNPSNRNQETSGEYNIQAWTGFNFPGRGTTYSNFKWQWFHFDGTDWDQSRSLSRIFKFTGKAWDWEVSSENGNYDYLMYADIDYDHPDVVNEMKKWGVWYANEVGLDGYRLDAVKHIKFSFLKDWVDNARAATGKEMFTVGEYWQNDLGALNNYLAKVNYNQSLFDAPLHYNFYAASTGGGYYDMRNILNNTLVASNPTKAVTLVENHDTQPGQSLESTVQPWFKPLAYAFILTRSGGYPSVFYGDMYGTKGTTTREIPALKSKIEPLLKARKDYAYGTQRDYIDNPDVIGWTREGDSCKAKSGLATVITDGPGGSKRMYVGTSNAGEIWYDLTGNRTDKITIGSDGYATFPVNGGSVSVWVQQ

SEQ ID NO: 34968 - protein, 480 aa, Cytophaga sp.
NGTMMQYFEWYVPNDGQQWNRLRTDAPYLSSVGITAVWTPPAYKGTSQADVGYGPYDLYDLGEFNQKGTVRTKYGTKGELKSAVNTLHSNGIQVYGDVVMNHKAGADYTENVTAVEVNPSNRNQETSGEYNIQAWTGFNFPGRGTTYSNFKWQWFHFDGTDWDQSRSLSRIFKFTGKAWDWEVSSENGNYDYLMYADIDYDHPDVVNEMKKWGVWYANEVGLDGYRLDAVKHIKFSFLKDWVDNARAATGKEMFTVGEYWQNDLGALNNYLAKVNYNQSLFDAPLHYNFYAASTKGGYYDMRNILNNTLVASNPTKAVTLVENHDTQPGQSLESTVQPWFKPLAYAFILTRSGGYPSVFYGDMYGTKGTTTREIPALKSKIEPLLKARKDYAYGTQRDYIDNPDVIGWTREGDSTKAKSGLATVITDGPGGSKRMYVGTSNAGEIWYDLTGNRTDKITIGSDGYATFPVNGGSVSVWVQQ

SEQ ID NO: 34969 - protein, 480 aa, Cytophaga sp.
NGTMMQYFEWYVPNDGQQWNRLRTDAPYLSSVGITAVWTPPAYKGTSQADVGYGPYDLYDLGEFNQKGTVRTKYGTKGELKSAVNTLHSNGIQVYGDVVMNHKAGADYTENVTAVEVNPSNRNQETSGEYNIQAWTGFNFPGRGTTYSNFKWQWFHFDGTDWDQSRSLSRIFKFTGKAWDWEVSSENGNYDYLMYADIDYDHPDVVNEMKKWGVWYANEVGLDGYRLDAVKHIKFSFLKDWVDNARAATGKEMFTVGEYWQNDLGALNNYLAKVNYNQSLFDAPLHYNFYAASTGGGYYDMRNILNNTLVASNPTKAVTLVENHDTQPGQSLESTVQPWFKPLAYAFILTRSGGYPSVFYGDMYGTKGTTTREIPALKSKIEPLLKARKDYAYGTQRDYIDNPDVIGWTREGDSTKAKSGLATVITDGPGGSKRMYVGTSNAGENWYDLTGNRTDKITIGSDGYATFPVNGGSVSVWVQQ

SEQ ID NO: 34970 - protein, 480 aa, Cytophaga sp.
NGTMMQYFEWYVPNDGQQWNRLRTDAPYLSSVGITAVWTPPAYKGTSQADVGYGPYDLYDLGEFNQKGTVRTKYGTKGELKSAVNTLHSNGIQVYGDVVMNHKAGADYTENVTAVEVNPSNRNQETSGEYNIQAWTGFNFPGRGTTYSNFKWQWFHFDGTDWDQSRSLSRIFKFTGKAWDWEVSSENGNYDYLMYADIDYDHPDVVNEMKKWGVWYANEVGLDGYRLDAVKHIKFSFLKDWVDNARAATGKEMFTVGEYWQNDLGALNNYLAKVNYNQSLFDAPLHYNFYAASTGGGYYDMRNILNNTLVASNPTKAVTLVENHDTQPGQSLESTVQPWFKPLAYAFILTRSGGYPSVFYGDMYGTKGTTTREIPALKSKIEPLLKARKDYAYGTQRDYIDNPDVIGWTREGDSTKAKSGLATVITDGPGGSKRMYVGTSNAGEIWYDLTGNRTDKITIGSDGVATFPVNGGSVSVWVQQ

SEQ ID NO: 34971 - protein, 480 aa, Cytophaga sp.
NGTMMQYFEWYVPNDGQQWNRLRTDAPYLSSVGITAVWTPPAYKGTSQADVGYGPYDLYDLGEFNQKGTVRTKYGTKGELKSAVNVLHSNGIQVYGDVVMNHKAGADYTENVTAVEVNPSNRNQETSGEYNIQAWTGFNFPGRGTTYSNFKWQWFHFDGTDWDQSRSLSRIFKFTGKAWDWEVSSENGNYDYLMYADIDYDHPDVVNEMKKWGVWYANEVGLDGYRLDAVKHIKFSFLKDWVDNARAATGKEMFTVGEYWQNDLGALNNYLAKVNYNQSLFDAPLHYNFYAASTGGGYYDMRNILNNTLVASNPTKAVTLVENHDTQPGQSLESTVQPWFKPLAYAFILTRSGGYPSVFYGDMYGTKGTTTREIPALKSKIEPLLKARKDYAYGTQRDYIDNPDVIGWTREGDSTKAKSGLATVITDGPGGSKRMYVGTSNAGEIWYDLTGNRTDKITIGSDGYATFPVNGGSVSVWVQQ

SEQ ID NO: 34972 - protein, 480 aa, Cytophaga sp.
NGTMMQYFEWYVPNDGQQWNRLRTDAPYLSSVGITAVWTPPAYKGTSQADVGYGPYDLYDLGEFNQKGTVRTKYGTKGELKSAVNTLHSNGIQVYGDVVMNHKAGADYTEGVTAVEVNPSNRNQETSGEYNIQAWTGFNFPGRGTTYSNFKWQWFHFDGTDWDQSRSLSRIFKFTGKAWDWEVSSENGNYDYLMYADIDYDHPDVVNEMKKWGVWYANEVGLDGYRLDAVKHIKFSFLKDWVDNARAATGKEMFTVGEYWQNDLGALNNYLAKVNYNQSLFDAPLHYNFYAASTGGGYYDMRNILNNTLVASNPTKAVTLVENHDTQPGQSLESTVQPWFKPLAYAFILTRSGGYPSVFYGDMYGTKGTTTREIPALKSKIEPLLKARKDYAYGTQRDYIDNPDVIGWTREGDSTKAKSGLATVITDGPGGSKRMYVGTSNAGEIWYDLTGNRTDKITIGSDGYATFPVNGGSVSVWVQQ

SEQ ID NO: 34973 - protein, 480 aa, Cytophaga sp.
NGTMMQYFEWYVPNDGQQWNRLRTDAPYLSSVGITAVWTPPAYKGTSQADVGYGPYDLYDLGEFNQKGTVRTKYGTKGELKSAVNTLHSNGIQVYGDVVMNHKAGADYTENVTAVEVNPSNRNQETSGEYNIQAWTGFNFPGRGTTYSNFKWQWFHFDGTDWDQSRSLSRIFKFTGKAWDWEVSSENGNYDYLMYADIDYDHPDVVNEMKKWGVWYANEVGLDGYRLDAVKHIKFSFLKDWVDNARAATGKEMFTVGEYWQNDLGALNNYLAKVNYNQSLFDAPLHYNFYAASTGGGRYDMRNILNNTLVASNPTKAVTLVENHDTQPGQSLESTVQPWFKPLAYAFILTRSGGYPSVFYGDMYGTKGTTTREIPALKSKIEPLLKARKDYAYGTQRDYIDNPDVIGWTREGDSTKAKSGLATVITDGPGGSKRMYVGTSNAGEIWYDLTGNRTDKITIGSDGYATFPVNGGSVSVWVQQ

SEQ ID NO: 34974 - protein, 480 aa, Cytophaga sp.
NGTMMQYFEWYVPNDGQQWNRLRTDAPYLSSVGITAVWTPPAYKGTSQADVGYGPYDLYDLGEFNQKGTVRTKYGTKGELKSAVNTLHSNGIQVYGDVVMNHKAGADYTENVTAVEVNPSNRNQETSGEYNIQAWTGFNFPGRGTTYSNFKWQWFHFDGTDWDQSRSLSRIFKFTGKAWDWEVSSENGNYDYLMYADIDYDHPDVVNEMKKWGVWYANEVGLDGYRLDAVKHIKFSFLKDWVDNARAATGKEMFTVGEYWQNDLGALMNYLAKVNYNQSLFDAPLHYNFYAASTGGGYYDMRNILNNTLVASNPTKAVTLVENHDTQPGQSLESTVQPWFKPLAYAFILTRSGGYPSVFYGDMYGTKGTTTREIPALKSKIEPLLKARKDYAYGTQRDYIDNPDVIGWTREGDSTKAKSGLATVITDGPGGSKRMYVGTSNAGEIWYDLTGNRTDKITIGSDGYATFPVNGGSVSVWVQQ

SEQ ID NO: 34975 - protein, 480 aa, Cytophaga sp.
NGTMMQYFEWYVPNDGQQWNRLRTDAPYLSSVGITAVWTPPAYKGTSQADVGYGPYDLYDLGEFNQKGTVRTKYGTKGELKSAVNTLHSNGIQVYGDVVMNHKAGADYTENVTAVEVNPSNRNQETSGEYNIQAWTGFNFPGRGTTYSNFKWQWFHFDGTDWDQSRSLSRIFKFTGKAWDWEVSSENGNYDYLMYADIDYDHPDVVNEMKKWGVWYANEVGLDGYRLDAVKHIKFSFLKDWVDNARAATGKEMFTVGEYWQNDLGALLNYLAKVNYNQSLFDAPLHYNFYAASTGGGYYDMRNILNNTLVASNPTKAVTLVENHDTQPGQSLESTVQPWFKPLAYAFILTRSGGYPSVFYGDMYGTKGTTTREIPALKSKIEPLLKARKDYAYGTQRDYIDNPDVIGWTREGDSTKAKSGLATVITDGPGGSKRMYVGTSNAGEIWYDLTGNRTDKITIGSDGYATFPVNGGSVSVWVQQ

SEQ ID NO: 34976 - protein, 480 aa, Cytophaga sp.
NGTMMQYFEWYVPNDGQQWNRLRTDAPYLSSVGITAVWTPPAYKGTSQADVGYGPYDLYDLGEFNQKGTVRTKYGTKGELKSAVNTLHSNGIQVYGDVVMNHKAGADYTENVTAVEVNPSNRNQETSGEYNIQAWTGFNFPGRGTTYSLFKWQWFHFDGTDWDQSRSLSRIFKFTGKAWDWEVSSENGNYDYLMYADIDYDHPDVVNEMKKWGVWYANEVGLDGYRLDAVKHIKFSFLKDWVDNARAATGKEMFTVGEYWQNDLGALNNYLAKVNYNQSLFDAPLHYNFYAASTGGGYYDMRNILNNTLVASNPTKAVTLVENHDTQPGQSLESTVQPWFKPLAYAFILTRSGGYPSVFYGDMYGTKGTTTREIPALKSKIEPLLKARKDYAYGTQRDYIDNPDVIGWTREGDSTKAKSGLATVITDGPGGSKRMYVGTSNAGEIWYDLTGNRTDKITIGSDGYATFPVNGGSVSVWVQQ

SEQ ID NO: 34977 - protein, 480 aa, Cytophaga sp.
NGTMMQYFEWYVPNDGQQWNRLRTDAPYLSSVGITAVWTPPAYKGTSQADVGYGPYDLYDLGEFNQKGTVRTKYGTKGELKSAVNTLHSNGIQVYGDVVMNHKAGADYTENVTAVEVNPSNRNQETSGEYNIQAWTGFNFPGRGTTYSNFKWQWFHFDGTDWDQSRSLSRIFKFTGKAWDWEVSSENGNYDYLMYADIDYDHPDVVNEMKKWGVWYANEVGLDGYRLDAVKHIKFSFLKDWVDNARAATGKEMFTVGEYWQNDLGALNNYLAKVNYNQSLFDAPLHYNFYAASTGGGTYDMRNILNNTLVASNPTKAVTLVENHDTQPGQSLESTVQPWFKPLAYAFILTRSGGYPSVFYGDMYGTKGTTTREIPALKSKIEPLLKARKDYAYGTQRDYIDNPDVIGWTREGDSTKAKSGLATVITDGPGGSKRMYVGTSNAGEIWYDLTGNRTDKITIGSDGYATFPVNGGSVSVWVQQ

SEQ ID NO: 34978 - protein, 480 aa, Cytophaga sp.
NGTMMQYFEWYVPNDGQQWNRLRTDAPYLSSVGITAVWTPPAYKGTSQADVGYGPYDLYDLGEFNQKGTVRTKYGTKGELKSAVNTLHSNGIQVYGDVVMNHKAGADYTENVTAVEVNPSNRNQETSGEYNIQAWTGFNFPGRGTTYSNFKWQWFHFDGTDWDQSRSLSRIFKFTGKAWDWEVSSENGNYDYLMYADIDYDHPDVVNEMKKWGVWYANEVGLDGYRLDAVKHIKFSFLKDWVDTARAATGKEMFTVGEYWQNDLGALNNYLAKVNYNQSLFDAPLHYNFYAASTGGGYYDMRNILNNTLVASNPTKAVTLVENHDTQPGQSLESTVQPWFKPLAYAFILTRSGGYPSVFYGDMYGTKGTTTREIPALKSKIEPLLKARKDYAYGTQRDYIDNPDVIGWTREGDSTKAKSGLATVITDGPGGSKRMYVGTSNAGEIWYDLTGNRTDKITIGSDGYATFPVNGGSVSVWVQQ

SEQ ID NO: 34979 - protein, 480 aa, Cytophaga sp.
NGTMMQYFEWYVPNDGQQWNRLRTDAPYLSSVGITAVWTPPAYKGTSQADVGYGPYDLYDLGEFNQKGTVRTKYGTKGELKSAVNTLHSNGIQVYGDVVMNHKAGADYTENVTAVEVNPSNRNQETSGEYNIQAWTGFNFPGRGTTYSNFKWQWFHFDGTDWDQSRSLSRIFKFTGKAWDWEVSSENGNYDYLMYADIDYDHPDVVNEMKKWGVWYANEVGLDGYRLDAVKHIKFSFLKDWVDNARAATGKEMFTVGEYWQNDLGALNNYLAKVNYNQSLFDAPLHYNFYAASTGGGYYDMRNILNNTLVASNPTKAVTLVENHDTQPGQSLESTVQPWFKPLAYAFILTRSGGYPSVFYGDMYGTKGTTTREIPALKSKIEPLLKARKDYAYGTQRDYIDNPDVIGWTREGDSTKAKSGLATVITDGPGGSKRMYVGTSNAGEIWYDLTGNRTDKITIGSDGYAHFPVNGGSVSVWVQQ

SEQ ID NO: 34980 - protein, 480 aa, Cytophaga sp.
NGTMMQYFEWYVPNDGQQWNRLRTDAPYLSSVGITAVWTPPAYKGTSQADVGYGPYDLYDLGEFNQKGTVRTKYGTKGELKSAVNTLHSNGIQVYGDVVMNHKAGADYTENVTAVEVNPSNRNQETSGEYNIQAWTGFNFPGRGTTYSNFKWQWFHFDGTDWDQSRSLSRIFKFTGKAWDWEVSSENGNYDYLMYADIDYDHPDVVEEMKKWGVWYANEVGLDGYRLDAVKHIKFSFLKDWVDNARAATGKEMFTVGEYWQNDLGALNNYLAKVNYNQSLFDAPLHYNFYAASTGGGYYDMRNILNNTLVASNPTKAVTLVENHDTQPGQSLESTVQPWFKPLAYAFILTRSGGYPSVFYGDMYGTKGTTTREIPALKSKIEPLLKARKDYAYGTQRDYIDNPDVIGWTREGDSTKAKSGLATVITDGPGGSKRMYVGTSNAGEIWYDLTGNRTDKITIGSDGYATFPVNGGSVSVWVQQ

SEQ ID NO: 34981 - protein, 480 aa, Cytophaga sp.
NGTMMQYFEWYVPNDGQQWNRLRHDAPYLSSVGITAVWTPPAYKGTSQADVGYGPYDLYDLGEFNQKGTVRTKYGTKGELKSAVNTLHSNGIQVYGDVVMNHKAGADYTENVTAVEVNPSNRNQETSGEYNIQAWTGFNFPGRGTTYSNFKWQWFHFDGTDWDQSRSLSRIFKFTGKAWDWEVSSENGNYDYLMYADIDYDHPDVVNEMKKWGVWYANEVGLDGYRLDAVKHIKFSFLKDWVDNARAATGKEMFTVGEYWQNDLGALNNYLAKVNYNQSLFDAPLHYNFYAASTGGGYYDMRNILNNTLVASNPTKAVTLVENHDTQPGQSLESTVQPWFKPLAYAFILTRSGGYPSVFYGDMYGTKGTTTREIPALKSKIEPLLKARKDYAYGTQRDYIDNPDVIGWTREGDSTKAKSGLATVITDGPGGSKRMYVGTSNAGEIWYDLTGNRTDKITIGSDGYATFPVNGGSVSVWVQQ

SEQ ID NO: 34982 - protein, 480 aa, Cytophaga sp.
NGTMMQYFEWYVPNDGQQWNRLRTDAPYLSSVGITAVWTPPAYKGTSQADVGYGPYDLYDLGEFNQKGTVRTKYGTKGELKSAVNTLHSNGIQVYGDVVMNHKAGADYTENVTAVEVNPSNRNQETSGEYNIQAWTGFNFPGRGTTYSNFKWQWFHFDGTDWDQSRSLSRIFKFTGKAWDWEVSSENGNYDYLMYADIDYDHPDVVNEMKKWGVWYANEVGLDGYRLDAVKHIKFSFLKDWVDNARAATGKEMFTVGEYWQNDLGALNNYLAKVNYNQSLFDAPLHYNFYAASTGGGYYDMRNILNNTLVASNPTKAVTLVENHDTQPGQSLESTVQPWFKPLAYAFILTRSGGYPSVFYGDMYGTKGTTTREIPALKSKIEPLLKARKDYAYGTQRDYIDNPDVIGWTREGDSTKAKSGLATVITDGPGGSKRMYVGTSNAGEIWYDLTGNRVDKITIGSDGYATFPVNGGSVSVWVQQ

SEQ ID NO: 34983 - protein, 480 aa, Cytophaga sp.
NGTMMQYFEWYVPNDGQQWNRLRTDAPYLSSVGITAVWTPPAYKGTSQADVGYGPYDLYDLGEFNQKGTVRTKYGTKGELKSAVNTLHSNGIQVYGDVVMNHKAGADYTENVTAVEVNPSNRNQETSGEYNIQAWTGFNFPGRGTTYSNFKWQWFHFDGTDWDQSRSLSRIFKFTGKAWDWEVSSENGNYDYLMYADIDYDHPDVVNEMKKWGVWYANEVGLDGYRLDAVKHIKFSFLKDWVDNARAATGKEMFTVGEYWQNDLGALNNYLAKVNYNQSLFDAPLHYNFYAASTGGGYYDMRNILVNTLVASNPTKAVTLVENHDTQPGQSLESTVQPWFKPLAYAFILTRSGGYPSVFYGDMYGTKGTTTREIPALKSKIEPLLKARKDYAYGTQRDYIDNPDVIGWTREGDSTKAKSGLATVITDGPGGSKRMYVGTSNAGEIWYDLTGNRTDKITIGSDGYATFPVNGGSVSVWVQQ

SEQ ID NO: 34984 - protein, 480 aa, Cytophaga sp.
NGTMMQYFEWYVPNDGQQWNRLRTDAPYLSSVGITAVWTPPAYKGTSQADVGYGPYDLYDLGEFNQKGTVRTKYGTKGELKSAVNTLHSNGIQVYGDVVMNHKAGADYTENVTAVEVNPSNRNQETSGEYNIQAWTGFNFPGRGTTYSNFKWQWFHFDGTDWDQSRSLSRIFKFTGKAWDWEVSSENGNYDYLMYADIDYDHPDVVNEMKKWGVWYANEVGLDGYRLDAVKHIKFSFLKDWVDNARAATGKEMFTVGEYWQNDIGALNNYLAKVNYNQSLFDAPLHYNFYAASTGGGYYDMRNILNNTLVASNPTKAVTLVENHDTQPGQSLESTVQPWFKPLAYAFILTRSGGYPSVFYGDMYGTKGTTTREIPALKSKIEPLLKARKDYAYGTQRDYIDNPDVIGWTREGDSTKAKSGLATVITDGPGGSKRMYVGTSNAGEIWYDLTGNRTDKITIGSDGYATFPVNGGSVSVWVQQ

SEQ ID NO: 34985 - protein, 480 aa, Cytophaga sp.
NGTMMQYFEWYVPNDGQQWNRLRTDAPYLSSVGITAVWTPPAYKGTSQADVGYGPYDLYDLGEFNQKGTVRTKYGTKGELKSAVNTLHSNGIQVYGDVVMNHKAGADYTENVTAVEVNPSNRNQETSGEYNIQAWTGFNFPGRGTTYSNFKWQWFHFDGTDWDQSRSLSRIFKFTGKAWDWEVSSENGNYDYLMYADIDYDHPDVVNEMKKWGVWYANEVGLDGYRLDAVKHIKFSFLKDWVDNARAATGKEMFTVGEYWQNDLGALNNYLAKVNYNQSLFDAPLHYNFYAASTGGGYYDMRNILNNTLVASNPTKAVTLVENHDTQPGQSLESTVQPWFKPLAYAFILTRSGGYPSVFYGDMYGTKGTTTREIPALKSKIEPLLKARKDYAYGTQRDYIDNPDVIGWTREGDSTKAKSGLATVITDGPGGSKRMYVGTSNAGEIWYDLTGNRTDKITIGSDGYATFPVNQGSVSVWVQQ

SEQ ID NO: 34986 - protein, 480 aa, Cytophaga sp.
NGTMMQYFEWYVPNDGQQWNRLRTDAPYLSSVGITAVWTPPAYKGTSQADVGYGPYDLYDLGEFNQKGTVRTKYGTKGELKSAVNTLHSNGIQVYGDVVMNHKAGADYTENVTAVEVNPSNRNQETSGEYNIQAWTGFNFPGRGTTYSNFKWQWFHFDGTDWDQSRSLSRIFKFTGKAWDWEVSSENGNYDYLMYADIDYDHPDVVNEMKKWGVWYANEVGLDGYRLDAVKHIKFSFLKDWVDNARAATGKEMFTVGEYWQNDLGALNNYLAKVNYNQSLFDAPLHYNFYAASTGGGYYDMRNILNNTLVASNPTKAVTLVENHDTQPGQSLESTVQPWFKPLAYAFILTRSGGYPSVFYGDMYGTKGTTTREIPALKSKIEPLLKARKDYAYGTQRDYIDNPDVIGWTREGDSTKAKSGLATVITDGPGGSKRMYVGTSNAGEIWYDLTGNRTDKITIGSDGSATFPVNGGSVSVWVQQ

SEQ ID NO: 34987 - protein, 480 aa, Cytophaga sp.
NGTMMQYFEWYVPNDGQQWNRLRTDAPYLSSVGITAVWTPPAYKGTSQADVGYGPYDLYDLGEFNQKGTVRTKYGTKGELKSAVNTLHSNGIQVYGDVVMNHKAGADYTENVTAVEVNPSNRNQETSGEYNIQAWTGFNFPGRGTTYSNFKWQWFHFDGTDWDQSRSLSRIFKFTGKAWDWEVSSENGNYDYLMYADIDYDHPDVVNEMKKWGVWYANEVGLDGYRLDAVKHIKFSFLKDWVDNARAATGKEMFTVGEYWQNDLGSLNNYLAKVNYNQSLFDAPLHYNFYAASTGGGYYDMRNILNNTLVASNPTKAVTLVENHDTQPGQSLESTVQPWFKPLAYAFILTRSGGYPSVFYGDMYGTKGTTTREIPALKSKIEPLLKARKDYAYGTQRDYIDNPDVIGWTREGDSTKAKSGLATVITDGPGGSKRMYVGTSNAGEIWYDLTGNRTDKITIGSDGYATFPVNGGSVSVWVQQ

SEQ ID NO: 34988 - protein, 480 aa, Cytophaga sp.
NGTMMQYFEWYVPNDGQQWNRLRTDAPYLSSVGITAVWTPPAYKGTSQADVGYGPYDLYDLGEFNQKGTVRTKYGTKGELKSAVNTLHSNGIQVYGDVVMNHKAGADYTENVTAVEVNPSNRNQETSGEYNIQAWTGFNFPGRGTTYSNFKWQWFHFDGTDWDQSRSLSRIFKFTGKAWDWEVSSENGNYDYLMYADIDYDHPDVVNEMKKWGVWYANEVGLDGYRLDAVKHIKFSFLKDWVDNARAATGKEMFTVGEYWQNDLGALNNYLAKVNYNQSLFDAPLHYNFYAASTGGGYYDMRNILNNTLVASVPTKAVTLVENHDTQPGQSLESTVQPWFKPLAYAFILTRSGGYPSVFYGDMYGTKGTTTREIPALKSKIEPLLKARKDYAYGTQRDYIDNPDVIGWTREGDSTKAKSGLATVITDGPGGSKRMYVGTSNAGEIWYDLTGNRTDKITIGSDGYATFPVNGGSVSVWVQQ

SEQ ID NO: 34989 - protein, 480 aa, Cytophaga sp.
NGTMMQYFEWYVPNDGQQWNRLRTDAPYLSSVGITAVWTPPAYKGTSQADVGYGPYDLYDLGEFNQKGTVRTKYGTKGELKSAVNTLHSNGIQVYGDVVMNHKAGADYTENVTAVEVNPSNRNQETSGEYNIQAWTGFNFPGRGTTYSNFKWQWFHFDGTDWDQSRSLSRIFKFTGKAWDWEVSSENGNYDYLMYADIDYDHPDVVTEMKKWGVWYANEVGLDGYRLDAVKHIKFSFLKDWVDNARAATGKEMFTVGEYWQNDLGALNNYLAKVNYNQSLFDAPLHYNFYAASTGGGYYDMRNILNNTLVASNPTKAVTLVENHDTQPGQSLESTVQPWFKPLAYAFILTRSGGYPSVFYGDMYGTKGTTTREIPALKSKIEPLLKARKDYAYGTQRDYIDNPDVIGWTREGDSTKAKSGLATVITDGPGGSKRMYVGTSNAGEIWYDLTGNRTDKITIGSDGYATFPVNGGSVSVWVQQ

SEQ ID NO: 34990 - protein, 480 aa, Cytophaga sp.
NGTMMQYFEWYVPNDGQQWNRLRTDAPYLSSVGITAVWTPPAYKGTSQADVGYGPYDLYDLGEFNQKGTVRTKYGTKGELKSAVNTLHSNGIQVYGDVVMNHKAGADMTENVTAVEVNPSNRNQETSGEYNIQAWTGFNFPGRGTTYSNFKWQWFHFDGTDWDQSRSLSRIFKFTGKAWDWEVSSENGNYDYLMYADIDYDHPDVVNEMKKWGVWYANEVGLDGYRLDAVKHIKFSFLKDWVDNARAATGKEMFTVGEYWQNDLGALNNYLAKVNYNQSLFDAPLHYNFYAASTGGGYYDMRNILNNTLVASNPTKAVTLVENHDTQPGQSLESTVQPWFKPLAYAFILTRSGGYPSVFYGDMYGTKGTTTREIPALKSKIEPLLKARKDYAYGTQRDYIDNPDVIGWTREGDSTKAKSGLATVITDGPGGSKRMYVGTSNAGEIWYDLTGNRTDKITIGSDGYATFPVNGGSVSVWVQQ

SEQ ID NO: 34991 - protein, 480 aa, Cytophaga sp.
NGTMMQYFEWYVPNDGQQWNRLRTDAPYLSSVGITAVWTPPAYKGTSQADVGYGPYDLYDLGEFNQKGTVRTKYGTKGELKSAVNTLHSNGIQVYGDVVMNHKAGADYTENVTAVEVNPSNRNQETSGEYNIQAWTGFNFPGRGTTYSNFKWQWFHFDGTDWDQSRSLSRIFKFTGKAWDWEVSSENGNYDYLMYADIDYDHPDVVNEMKKWGVWYANEVGLDGYRLDAVKHIKFSFLKDWVDNARAATGKEMFTVGEYWQNDLGALNNYLAKVNYNQSLFDAPLHYNFYAASTGGGYYDMRNILNNTLVASNPKKAVTLVENHDTQPGQSLESTVQPWFKPLAYAFILTRSGGYPSVFYGDMYGTKGTTTREIPALKSKIEPLLKARKDYAYGTQRDYIDNPDVIGWTREGDSTKAKSGLATVITDGPGGSKRMYVGTSNAGEIWYDLTGNRTDKITIGSDGYATFPVNGGSVSVWVQQ

SEQ ID NO: 34992 - protein, 480 aa, Cytophaga sp.
NGTMMQYFEWYVPNDGQQWNRLRTDAPYLSSVGITAVWTPPAYKGTSQADVGYGPYDLYDLGEFNQKGTVRTKYGTKGELKSAVNTLHSNGIQVYGDVVMNHKAGADYTENVTAVEVNPSNRNQETSGEYNIQAWTGFNFPGRGTTYSNFKWQWFHFDGTDWDKSRSLSRIFKFTGKAWDWEVSSENGNYDYLMYADIDYDHPDVVNEMKKWGVWYANEVGLDGYRLDAVKHIKFSFLKDWVDNARAATGKEMFTVGEYWQNDLGALNNYLAKVNYNQSLFDAPLHYNFYAASTGGGYYDMRNILNNTLVASNPTKAVTLVENHDTQPGQSLESTVQPWFKPLAYAFILTRSGGYPSVFYGDMYGTKGTTTREIPALKSKIEPLLKARKDYAYGTQRDYIDNPDVIGWTREGDSTKAKSGLATVITDGPGGSKRMYVGTSNAGEIWYDLTGNRTDKITIGSDGYATFPVNGGSVSVWVQQ

SEQ ID NO: 34993 - protein, 480 aa, Cytophaga sp.
NGTMMQYFEWYVPNDGQQWNRLRTDAPYLSSVGITAVWTPPAYKGTSQADVGYGPYDLYDLGEFNQKGTVRTKYGTKGELKSAVNTLHSNGIQVYGDVVMNHKAGADYTENVTAVEVNPSNRNQETSGEYNIQAWTGFNFPGRGTTYSNFKWQWFHFDGTDWDQSRSLSRIFKFTGKAWDWEVSSENGNYDYLMYADIDYDHPDVVNEMKKWGVWYANEVGLDGYRLDAVKHIKFSFLKDWVDEARAATGKEMFTVGEYWQNDLGALNNYLAKVNYNQSLFDAPLHYNFYAASTGGGYYDMRNILNNTLVASNPTKAVTLVENHDTQPGQSLESTVQPWFKPLAYAFILTRSGGYPSVFYGDMYGTKGTTTREIPALKSKIEPLLKARKDYAYGTQRDYIDNPDVIGWTREGDSTKAKSGLATVITDGPGGSKRMYVGTSNAGEIWYDLTGNRTDKITIGSDGYATFPVNGGSVSVWVQQ

SEQ ID NO: 34994 - protein, 480 aa, Cytophaga sp.
NGTMMQYFEWYVPNDGQQWNRLRTDAPYLSSVGITAVWTPPAYKGTSQADVGYGPYDLYDLGEFNQKGTVRTKYGTKGELKSAVNTLHSNGIQVYGDVVMNHKAGADYTENVTAVEVNPSNRNQETSGEYNIQAWTGFNFPGRGTTYSNFKWQWFHFDGTDWDQSRSHSRIFKFTGKAWDWEVSSENGNYDYLMYADIDYDHPDVVNEMKKWGVWYANEVGLDGYRLDAVKHIKFSFLKDWVDNARAATGKEMFTVGEYWQNDLGALNNYLAKVNYNQSLFDAPLHYNFYAASTGGGYYDMRNILNNTLVASNPTKAVTLVENHDTQPGQSLESTVQPWFKPLAYAFILTRSGGYPSVFYGDMYGTKGTTTREIPALKSKIEPLLKARKDYAYGTQRDYIDNPDVIGWTREGDSTKAKSGLATVITDGPGGSKRMYVGTSNAGEIWYDLTGNRTDKITIGSDGYATFPVNGGSVSVWVQQ

SEQ ID NO: 34995 - protein, 480 aa, Cytophaga sp.
NGTMMQYFEWYVPNDGQQWNRLRTDAPYLSSVGITAVWTPPAYKGTSQADVGYGPYDLYDLGEFNQKGTVRTKYGTKGELKSAVNTLHSNGIQVYGDVVMNHKAGADYTENVTAVEVNPKNRNQETSGEYNIQAWTGFNFPGRGTTYSNFKWQWFHFDGTDWDQSRSLSRIFKFTGKAWDWEVSSENGNYDYLMYADIDYDHPDVVNEMKKWGVWYANEVGLDGYRLDAVKHIKFSFLKDWVDNARAATGKEMFTVGEYWQNDLGALNNYLAKVNYNQSLFDAPLHYNFYAASTGGGYYDMRNILNNTLVASNPTKAVTLVENHDTQPGQSLESTVQPWFKPLAYAFILTRSGGYPSVFYGDMYGTKGTTTREIPALKSKIEPLLKARKDYAYGTQRDYIDNPDVIGWTREGDSTKAKSGLATVITDGPGGSKRMYVGTSNAGEIWYDLTGNRTDKITIGSDGYATFPVNGGSVSVWVQQ

SEQ ID NO: 34996 - protein, 480 aa, Cytophaga sp.
NGTMMQYFEWYVPNDGQQWNRLRTDAPYLSSVGITAVWTPPAYKGTSQADVGYGPYDLYDLGEFNQKGTVRTKYGTKGELKSAVNTLHSNGIQVYGDVVMNHKAGADYTENVTAVEVNPSNRNQETSGEYNIQAWTGFNFPGRGTTYSNFKWQWFHFDGTDWDQSRSLSRIFKFTGKAWDWEVSSENGNYDYLMYADIDYDHPDVVNEMKKWGVWYANEVGLDGYRLDAVKHIKFSFLMDWVDNARAATGKEMFTVGEYWQNDLGALNNYLAKVNYNQSLFDAPLHYNFYAASTGGGYYDMRNILNNTLVASNPTKAVTLVENHDTQPGQSLESTVQPWFKPLAYAFILTRSGGYPSVFYGDMYGTKGTTTREIPALKSKIEPLLKARKDYAYGTQRDYIDNPDVIGWTREGDSTKAKSGLATVITDGPGGSKRMYVGTSNAGEIWYDLTGNRTDKITIGSDGYATFPVNGGSVSVWVQQ

SEQ ID NO: 34997 - protein, 480 aa, Cytophaga sp.
NGTMMQYFEWYVPNDGQQWNRLRTDAPYLSSVGITAVWTPPAYKGTSQADVGYGPYDLYDLGEFNQKGTVRTKYGTKGELKSAVNTLHSNGIQVYGDVVMNHKAGADYTENVTAVEVNPSNRNQETSPEYNIQAWTGFNFPGRGTTYSNFKWQWFHFDGTDWDQSRSLSRIFKFTGKAWDWEVSSENGNYDYLMYADIDYDHPDVVNEMKKWGVWYANEVGLDGYRLDAVKHIKFSFLKDWVDNARAATGKEMFTVGEYWQNDLGALNNYLAKVNYNQSLFDAPLHYNFYAASTGGGYYDMRNILNNTLVASNPTKAVTLVENHDTQPGQSLESTVQPWFKPLAYAFILTRSGGYPSVFYGDMYGTKGTTTREIPALKSKIEPLLKARKDYAYGTQRDYIDNPDVIGWTREGDSTKAKSGLATVITDGPGGSKRMYVGTSNAGEIWYDLTGNRTDKITIGSDGYATFPVNGGSVSVWVQQ

SEQ ID NO: 34998 - protein, 480 aa, Cytophaga sp.
NGTMMQYFEWYVPNDGQQWNRLRTDAPYLSSVGITAVWTPPAYKGTSQADVGYGPYDLYDLGEFNQKGTVRTKYGTKGELKSAVNTLHSNGIQVYGDVVMNHKAGADYTENVTAVEVNPSNRNQETSGEYNIQAWTGFNFPGRGTTYSNFKWQWFHFDGTDWDQSRSLSRIFKFTGKAWDWEVSSENGNYDYLMYADIDYDHPDVVNEMKKWGVWYANEVGLDGYRLDAVKHIKFSFLKDWVDNARAATGKEMFTVGEYWQNDLGALNNYLAKVNYNQSLFDAPLHYNFYAASTGGGYYDMRNILNNTLVASNPTKAVTLVENHDTQPGQSLESTVQPWFKPLAYAFILTRSGGYPSVFYGDMYGTKGTTTREIPALKSKIEPLLKARKDYAYGTQRDYIDNPDVIGWTREGDSTKAKSGLATVITDGPGGSKRMYVGTSNAGEIWYDLTGNRTDKITIGSDGYATFPVNGGSVSVWVQQ

SEQ ID NO: 34999 - protein, 480 aa, Cytophaga sp.
NGTMMQYFEWYVPNDGQQWNRLRTDAPYLSSVGITAVWTPPAYKGTSQADVGYGPYDLYDLGEFNQKGTVRTKYGTKGELKSAVNTLHSNGIQVYGDVVMNHKAGADYTENVTAVEVNPSNRNQETSGEYNIQAWTGFNFPGRGTTYSNFKWQWFHFDGTDWDQSRSLSRIFKFTGKAWDWEVSSENGNYDYLMYADIDYDHPDVVNEMKKWGVWYANEVGLDGYRLDAVKHIKFSFLKDWVDNARAATGKEMFTVGEYWQNDLGALNNYLAKVNYNQSLFDAPLHYNFYAASTGGGYYDMRNILNNTLVASNPTKAVTLVENHDTQPGQSLESTVQPWFKPLAYAFILTRSGGYPSVFYGDMYGTKGTTTSEIPALKSKIEPLLKARKDYAYGTQRDYIDNPDVIGWTREGDSTKAKSGLATVITDGPGGSKRMYVGTSNAGEIWYDLTGNRTDKITIGSDGYATFPVNGGSVSVWVQQ

SEQ ID NO: 35000 - protein, 480 aa, Cytophaga sp.
NGTMMQYFEWYVPNDGQQWNRLRTDAPYLSSVGITAVWTPPAYKGTSQADVGYGPYDLYDLGEFNQKGTVRTKYGTKGELKSAVNTLHSNGIQVYGDVVMNHKAGADYTENVTAVEVNPSNRNQETSGEYNIQAWTGFNFPGRGTTYSNFKWQWFHFDGTDWDQSRSLSRIFKFTGKAWDWEVSSENGNYDYLMYADIDYDHPDVVNEMKKWGVWYANEVGLDGYRLDAVKHIKFSFLKDWVDNARAATGKEMFTVGEYWQNDLGALNNYLAKVNYNQSLFDAPLHYNFYAASTGGGYYDMRNILNNTLVASNPTKAVTLVENHDTQPGQSLESTVQPWFKPLAYAFILTRSGGYPSVFYGDMYGTKGTTTLEIPALKSKIEPLLKARKDYAYGTQRDYIDNPDVIGWTREGDSTKAKSGLATVITDGPGGSKRMYVGTSNAGEIWYDLTGNRTDKITIGSDGYATFPVNGGSVSVWVQQ

SEQ ID NO: 35001 - protein, 480 aa, Cytophaga sp.
NGTMMQYFEWYVPNDGQQWNRLRTDAPYLSSVGITAVWTPPAYKGTSQADVGYGPYDLYDLGEFNQKGTVRTKYGTKGELKSAVNTLHSNGIQVYGDVVMNHKAGADYTENVTAVEVNPSNRNQETSGEYNIQAWTGFNFPGRGTTYSNFKWQWFHFDGTDWDQSRSLSRIFKFTGKAWDWEVSSENGNYDYLMYADIDYDHPDVVNEMKKWGVWYANEVGLDGYRLDAVKHIKFSFLKDWVDNARAATGKEMFTVGEYWQNDLGALNNYLAKVNYNQSLFDAPLHYNFYAASTGGGYYDMRNILNNTLVASNPTKAVTLVENHDTQPGQSLESTVQPWFKPLAYAFILTRCGGYPSVFYGDMYGTKGTTTREIPALKSKIEPLLKARKDYAYGTQRDYIDNPDVIGWTREGDSTKAKSGLATVITDGPGGSKRMYVGTSNAGEIWYDLTGNRTDKITIGSDGYATFPVNGGSVSVWVQQ

SEQ ID NO: 35002 - protein, 480 aa, Cytophaga sp.
NGTMMQYFEWYVPNDGQQWNRLRTDAPYLSSVGITAVWTPPAYKGTSQADVGYGPYDLYDLGEFNQKGTVRTKYGTKGELKSAVNTLHSNGIQVYGDVVMNHKAGADYTENVTAVEVNPSNRNQETSGEYNIQAWTGFNFPGRGTTYSNFKWQWFHFDGTDWDQSRSLSRIFKFTGKAWDWEVSSENGNYDYLMYADIDYDHPDVVNEMKKWGVWYANEVGLDGYRLDAVKHIKFSFLKDWVDNARAATGKEMFTVGEYWQNDLGALNNYLLKVNYNQSLFDAPLHYNFYAASTGGGYYDMRNILNNTLVASNPTKAVTLVENHDTQPGQSLESTVQPWFKPLAYAFILTRSGGYPSVFYGDMYGTKGTTTREIPALKSKIEPLLKARKDYAYGTQRDYIDNPDVIGWTREGDSTKAKSGLATVITDGPGGSKRMYVGTSNAGEIWYDLTGNRTDKITIGSDGYATFPVNGGSVSVWVQQ

SEQ ID NO: 35003 - protein, 480 aa, Cytophaga sp.
NGTMMQYFEWYVPNDGQQWNRLRTDAPYLSSVGITAVWTPPAYKGTSQADVGYGPYDLYDLGEFNQKGTVRTKYGTKGELKSAVNTLHSNGIQVYGDVVMNHKAGADYTENVTAVEVNPSNRNQETSGEYNIQAWTGFNFPGRGTTYSNFKWQWFHFDGTDWDQSRSLSRIFKFTGKAWDWEVSSENGNYDYLMYADIDYDHPDVVNEMKKWGLWYANEVGLDGYRLDAVKHIKFSFLKDWVDNARAATGKEMFTVGEYWQNDLGALNNYLAKVNYNQSLFDAPLHYNFYAASTGGGYYDMRNILNNTLVASNPTKAVTLVENHDTQPGQSLESTVQPWFKPLAYAFILTRSGGYPSVFYGDMYGTKGTTTREIPALKSKIEPLLKARKDYAYGTQRDYIDNPDVIGWTREGDSTKAKSGLATVITDGPGGSKRMYVGTSNAGEIWYDLTGNRTDKITIGSDGYATFPVNGGSVSVWVQQ

SEQ ID NO: 35004 - protein, 480 aa, Cytophaga sp.
NGTMMQYFEWYVPNDGQQWNRLRTDAPYLSSVGITAVWTPPAYKGTSQADVGYGPYDLYDLGEFNQKGTVRTKYGTKGELKSAVNTLHSNGIQVYGDVVMNHKAGADYTENVTAVEVNPSNRNQETSGEYNIQAWTGFNFPGRGTTYSNFKWQWFHFDGTDWDQSRSLSRIFKFTGKAWDWEVSSENGNYDYLMYADIDYDHPDVVNEMKKWGVWYANEVGLDGYRLDAVKHIKFSFLKDWVDNARAATGKEMFTVGEYWQNDLGALNNYLAKVNYNQSLFDAPLHYNFYAASTGGGYYDMRNILNNTLVASNPTKAVTLVENHDTQPGQSLESTVQPWFKPLAYAFILTRSGGYPSVFYGDMYGTKGTTTREIPALKSKIEPLLKARKDYAYGTQRDYIDNPDVIGWTREGDSTKAKSGLATVITDGPGGSKRMYVGTSNAGEIWYDLTGNRTDIITIGSDGYATFPVNGGSVSVWVQQ

SEQ ID NO: 35005 - protein, 480 aa, Cytophaga sp.
NGTMMQYFEWYVPNDGQQWNRLRTDAPYLSSVGITAVWTPPAYKGTSQADVGYGPYDLYDLGEFNQKGTVRTKYGTKGELKSAVNTLHSNGIQVYGDVVMNHKAGADYTENVTAVEVNPSNRNQETSGEYNIQAWTGFNFPGRGTTYSNFKWQWFHFDGTDWDQSRSLSRIFKFTGKAWDWEVSSENGNYDYLMYADIDYDHPDVVNEMKKWGVWYANEVGLDGYRLDAVKHIKFSFLKDWVDNARAATGKEMFTVGEYWQNDLGALNNYLAKVNYNQSLFDAPLHYNFYAASTGGGYYDMRNILNNTLVASNPTKAVTLVENHDTQPGQSLESTVQPWFKPLAYAFILTRSGGYPSVFYGDMYGTKGTTTREIPALKSKIEPLLKARKDYAYGTQRDYIDNPDVIGWTREGDSTKAKSGLATVITDGPGGSKRMYVGFSNAGEIWYDLTGNRTDKITIGSDGYATFPVNGGSVSVWVQQ

SEQ ID NO: 35006 - protein, 480 aa, Cytophaga sp.
NGTMMQYFEWYVPNDGQQWNRLRTDAPYLSSVGITAVWTPPAYKGTSQADVGYGPYDLYDLGEFNQKGTVRTKYGTKGELKSAVNTLHSNGIQVYGDVVMNHKAGADYTENVTAVEVNPSNRNQETSGEYNIQAWTGFNFPGRGHTYSNFKWQWFHFDGTDWDQSRSLSRIFKFTGKAWDWEVSSENGNYDYLMYADIDYDHPDVVNEMKKWGVWYANEVGLDGYRLDAVKHIKFSFLKDWVDNARAATGKEMFTVGEYWQNDLGALNNYLAKVNYNQSLFDAPLHYNFYAASTGGGYYDMRNILNNTLVASNPTKAVTLVENHDTQPGQSLESTVQPWFKPLAYAFILTRSGGYPSVFYGDMYGTKGTTTREIPALKSKIEPLLKARKDYAYGTQRDYIDNPDVIGWTREGDSTKAKSGLATVITDGPGGSKRMYVGTSNAGEIWYDLTGNRTDKITIGSDGYATFPVNGGSVSVWVQQ

SEQ ID NO: 35007 - protein, 480 aa, Cytophaga sp.
NGTMMQYFEWYVPNDGQQWNRLRTDAPYLSSVGITAVWTPPAYKGTSQADVGYGPYDLYDLGEFNQKGTVRTKYGTKGELKSAVNDLHSNGIQVYGDVVMNHKAGADYTENVTAVEVNPSNRNQETSGEYNIQAWTGFNFPGRGTTYSNFKWQWFHFDGTDWDQSRSLSRIFKFTGKAWDWEVSSENGNYDYLMYADIDYDHPDVVNEMKKWGVWYANEVGLDGYRLDAVKHIKFSFLKDWVDNARAATGKEMFTVGEYWQNDLGALNNYLAKVNYNQSLFDAPLHYNFYAASTGGGYYDMRNILNNTLVASNPTKAVTLVENHDTQPGQSLESTVQPWFKPLAYAFILTRSGGYPSVFYGDMYGTKGTTTREIPALKSKIEPLLKARKDYAYGTQRDYIDNPDVIGWTREGDSTKAKSGLATVITDGPGGSKRMYVGTSNAGEIWYDLTGNRTDKITIGSDGYATFPVNGGSVSVWVQQ

SEQ ID NO: 35008 - protein, 480 aa, Cytophaga sp.
NGTMMQYFEWYVPNDGQQWNRLRTDAPYLSSVGITAVWTPPAYKGTSQADVGYGPYDLYDLGEFNQKGTVRTKYGTKGELKQAVNTLHSNGIQVYGDVVMNHKAGADYTENVTAVEVNPSNRNQETSGEYNIQAWTGFNFPGRGTTYSNFKWQWFHFDGTDWDQSRSLSRIFKFTGKAWDWEVSSENGNYDYLMYADIDYDHPDVVNEMKKWGVWYANEVGLDGYRLDAVKHIKFSFLKDWVDNARAATGKEMFTVGEYWQNDLGALNNYLAKVNYNQSLFDAPLHYNFYAASTGGGYYDMRNILNNTLVASNPTKAVTLVENHDTQPGQSLESTVQPWFKPLAYAFILTRSGGYPSVFYGDMYGTKGTTTREIPALKSKIEPLLKARKDYAYGTQRDYIDNPDVIGWTREGDSTKAKSGLATVITDGPGGSKRMYVGTSNAGEIWYDLTGNRTDKITIGSDGYATFPVNGGSVSVWVQQ

SEQ ID NO: 35009 - protein, 480 aa, Cytophaga sp.
NGTMMQYFEWYVPNDGQQWNRLRTDAPYLSSVGITAVWTPPAYKGESQADVGYGPYDLYDLGEFNQKGTVRTKYGTKGELKSAVNTLHSNGIQVYGDVVMNHKAGADYTENVTAVEVNPSNRNQETSGEYNIQAWTGFNFPGRGTTYSNFKWQWFHFDGTDWDQSRSLSRIFKFTGKAWDWEVSSENGNYDYLMYADIDYDHPDVVNEMKKWGVWYANEVGLDGYRLDAVKHIKFSFLKDWVDNARAATGKEMFTVGEYWQNDLGALNNYLAKVNYNQSLFDAPLHYNFYAASTGGGYYDMRNILNNTLVASNPTKAVTLVENHDTQPGQSLESTVQPWFKPLAYAFILTRSGGYPSVFYGDMYGTKGTTTREIPALKSKIEPLLKARKDYAYGTQRDYIDNPDVIGWTREGDSTKAKSGLATVITDGPGGSKRMYVGTSNAGEIWYDLTGNRTDKITIGSDGYATFPVNGGSVSVWVQQ

SEQ ID NO: 35010 - protein, 480 aa, Cytophaga sp.
NGTMMQYFEWYVPNDGQQWNRLRTDAPYLSSVGITAVWTPPAYKGTSQADVGYGPYDLYDLGEFNQKGTVRTKYGTKGELKSAVNTLHSNGIQVYGDVVMNHKAGADYTENVTAVEVNPSNRNQETSGEYNIQAWTGFNFPGRGTTYSNFKWQWFHFDGTDWDQSRSLSRIFKFTGKAWDWEVSSENGNYDYLMYADIDYDHPDVVNEMKKWGVWYANEVGLDGYRLDAVKHIKFSFLTDWVDNARAATGKEMFTVGEYWQNDLGALNNYLAKVNYNQSLFDAPLHYNFYAASTGGGYYDMRNILNNTLVASNPTKAVTLVENHDTQPGQSLESTVQPWFKPLAYAFILTRSGGYPSVFYGDMYGTKGTTTREIPALKSKIEPLLKARKDYAYGTQRDYIDNPDVIGWTREGDSTKAKSGLATVITDGPGGSKRMYVGTSNAGEIWYDLTGNRTDKITIGSDGYATFPVNGGSVSVWVQQ

SEQ ID NO: 35011 - protein, 480 aa, Cytophaga sp.
NGTMMQYFEWYVPNDGQQWNRLRTDAPYLSSVGITAVWTPPAYKGTSQADVGYGPYDLYDLGEFNQKGTVRTKYGTKGELKSAVNTLHSNGIQVYGDVVMNHKAGADYTENVTAVEVNPSNRNQETSGEYNIQAWTGFNFPGRGTTYSNFKWIWFHFDGTDWDQSRSLSRIFKFTGKAWDWEVSSENGNYDYLMYADIDYDHPDVVNEMKKWGVWYANEVGLDGYRLDAVKHIKFSFLKDWVDNARAATGKEMFTVGEYWQNDLGALNNYLAKVNYNQSLFDAPLHYNFYAASTGGGYYDMRNILNNTLVASNPTKAVTLVENHDTQPGQSLESTVQPWFKPLAYAFILTRSGGYPSVFYGDMYGTKGTTTREIPALKSKIEPLLKARKDYAYGTQRDYIDNPDVIGWTREGDSTKAKSGLATVITDGPGGSKRMYVGTSNAGEIWYDLTGNRTDKITIGSDGYATFPVNGGSVSVWVQQ

SEQ ID NO: 35012 - protein, 480 aa, Cytophaga sp.
NGTMMQYFEWYVPNDGQQWNRLRTDAPYLSSVGITAVWTPPAYKGTSQADVGYGPYDLYDLGEFNQKGTVRTKYGTKGELKSAVNTLHSNGIQVYGDVVMNHKAGADYTENVTAVEVNPSNRNQETSGEYNIQAWTGFNFPGRGTTYSNFKWQWFHFDGTDWDQSRSKSRIFKFTGKAWDWEVSSENGNYDYLMYADIDYDHPDVVNEMKKWGVWYANEVGLDGYRLDAVKHIKFSFLKDWVDNARAATGKEMFTVGEYWQNDLGALNNYLAKVNYNQSLFDAPLHYNFYAASTGGGYYDMRNILNNTLVASNPTKAVTLVENHDTQPGQSLESTVQPWFKPLAYAFILTRSGGYPSVFYGDMYGTKGTTTREIPALKSKIEPLLKARKDYAYGTQRDYIDNPDVIGWTREGDSTKAKSGLATVITDGPGGSKRMYVGTSNAGEIWYDLTGNRTDKITIGSDGYATFPVNGGSVSVWVQQ

SEQ ID NO: 35013 - protein, 480 aa, Cytophaga sp.
NGTMMQYFEWYVPNDGQQWNRLRTDAPYLSSVGITAVWTPPAYKGTSQADVGYGPYDLYDLGEFNQKGTVRTKYGTKGELKSAVNTLHSNGIQVYGDVVMNHKAGADYTENVTAVEVNPSNRNQETSGEYNIQAWTGFNFPGRGTTYSNFKWQWFHFDGTDWDQSRSLSRIFKFTGKAWDWEVSSENGNYDYLMYADIDYDHPDVVNEMKKWGVWYANEVGLDGYRLDAVKHIKFSFLKDWVDNARAATGKEMFTVGEYWQNDLGALNNYLAKVNYNQSLFDAPLHYNFYAASTGGGYYDMRNILNNTLVASNPTKAVTLVENHDTQPGQSLESTVQPWFKPLAYAFILTRSGGYPSVFYGDMYGTKGTTTREIPALKSKIEPLLKARKDYAYGTQWDYIDNPDVIGWTREGDSTKAKSGLATVITDGPGGSKRMYVGTSNAGEIWYDLTGNRTDKITIGSDGYATFPVNGGSVSVWVQQ

SEQ ID NO: 35014 - protein, 480 aa, Cytophaga sp.
NGTMMQYFEWYVPNDGQQWNRLRTDAPYLSSVGITAVWTPPAYKGTSQADVGYGPYDLYDLGEFNQKGTVRTKYGTKGELKSAVNTLHSNGIQVYGDVVMNHKAGADYTENVTAVEVNPSNRNQETSGEYNIQAWTGFNFPGRGTTYSNFKWQWFHFDGTDWDQSRSLSRIFKFTGKAWDWEVSSENGNYDYLMYADIDYDHPDVVNEMKKWGVWYANEVGLDGYRLDAVKHIKFSFLKDWVDNARAATGKEMFTVGEYWQNDLGALNNYLAKVHYNQSLFDAPLHYNFYAASTGGGYYDMRNILNNTLVASNPTKAVTLVENHDTQPGQSLESTVQPWFKPLAYAFILTRSGGYPSVFYGDMYGTKGTTTREIPALKSKIEPLLKARKDYAYGTQRDYIDNPDVIGWTREGDSTKAKSGLATVITDGPGGSKRMYVGTSNAGEIWYDLTGNRTDKITIGSDGYATFPVNGGSVSVWVQQ

SEQ ID NO: 35015 - protein, 480 aa, Cytophaga sp.
NGTMMQYFEWYVPNDGQQWNRLRTDAPYLSSVGITAVWTPPAYKGTSQADVGYGPYDLYDLGEFNQKGTVRTKYGTKGELKSAVNTLHSNGIQVYGDVVMNHKAGADYTENVTAVEVNPSNRNQETSGEYNIQAWTGFNFPGRGTTYSNFKWQWFHFDGTDWDQSRSLSRIFKFTGKAWDWEVSSENGNYDYLMYADIDYDHPDVVNEMKKWGVWYANEVGLDGYRLDAVKHIKFSFLKDWVDNARAATGKEMFTVGEYWQNDLGALNNYLAKVNYNQSLFDAPLHYNFYAASTGGGYYDMRNILNNTLVASNPTKAVTLVENHDTQPGQSLESTVQPWFKPLAYAFILTRSGGYPSVFYGDMYGTKGTTTREIPALKSKIEPLLKARKDYAYGTQRDYIDNPDVIGWTREGDSTKAKSGLATVITDGPGGSKRMYVGTSNAGEIWYDLTGNRTDKITIGSDGYATFPVNGGSVSCWVQQ

SEQ ID NO: 35016 - protein, 480 aa, Cytophaga sp.
NGTMMQYFEWYVPNDGQQWNRLRTDAPYLSSVGITAVWTPPAYKGTSQADVGYGPYDLYDLGEFNQKGTVRTKYGTKGELKSAVNTLHSNGIQVYGDVVMNHKAGADYTENVTAVEVNPSNRNQETSGEYNIQAWTGFNFPGRGTTYSNFKWQWLHFDGTDWDQSRSLSRIFKFTGKAWDWEVSSENGNYDYLMYADIDYDHPDVVNEMKKWGVWYANEVGLDGYRLDAVKHIKFSFLKDWVDNARAATGKEMFTVGEYWQNDLGALNNYLAKVNYNQSLFDAPLHYNFYAASTGGGYYDMRNILNNTLVASNPTKAVTLVENHDTQPGQSLESTVQPWFKPLAYAFILTRSGGYPSVFYGDMYGTKGTTTREIPALKSKIEPLLKARKDYAYGTQRDYIDNPDVIGWTREGDSTKAKSGLATVITDGPGGSKRMYVGTSNAGEIWYDLTGNRTDKITIGSDGYATFPVNGGSVSVWVQQ

SEQ ID NO: 35017 - protein, 480 aa, Cytophaga sp.
NGTMMQYFEWYVPNDGQQWNRLRTDAPYLSSVGITAVWTPPAYKGTSQADVGYGPYDLYDLGEFNQKGTVRTKYGTKGELKSAVNTLHSNGIQVYGDVVMNHKAGADYTENVTAVEVNPSNRNQETSGEYNIQAWTGFNFPGRGTTYSNFKWQWFHFDGTDWDQSRSLSRIFKFTGKAWDWEVSSENGNYDYLMYADIDYDHPDVVNEMKKWGVWYANEVGLDGYRLDAVKHIKFSFLKDWVDNARAATGKEMFTVGEYWQNDLGALNNYLAKVNYNQSLFDAPLHYNFYAASTGGGYYDMRNILNNTLVASNPTKAVTLVENHDTQPGQSLESTVQPWFKPLAYAFILTRSGGYPSVFYGDMYGTKGTTTREIPALKSKIEPLLKARKDYAYGTQRDYIDNPDVIGWTREGDSTKAKSGLATVITDGPGGSKRMYVGTSNAGEIWYDLTGNRTDKIEIGSDGYATFPVNGGSVSVWVQQ

SEQ ID NO: 35018 - protein, 480 aa, Cytophaga sp.
NGTMMQYFEWYVPNDGQQWNRLRTDAPYLSSVGITAVWTPPAYKGTSQADVGYGPYDLYDLGEFNQKGTVRTKYGTKGELKSAVNTLHSNGIQVYGDVVMNHKAGADYTENVTAVEVNPSNRNQETSGEYNIQAWTGFNFPGRGTTYSNFKWQWFHFDGTDWDQSRSLSRIFKFTGKAWDWEVSSENGNYDYLMYADIDYDHPDVVNEMKKWGVWYANEVGLDGYRLDAVKHIKFSFLKDWVDNARAATGKEMFTVGEYWQNDLGALNNYLAKVNYNQSLFDAPLHYNFYAASTGGGYYDMRNILNNTLVASNPTKAVTLVENHDTQPGQSLESTVQPWFKPLAYAFILTRSGGYPSVFYGDMYGTKGTTTREIPALKSKIEPLLKARKDYAYGTQRDYIDNPDVIGWTREGDSTKAKSGLATVITDGPGGSKRMYVGTHNAGEIWYDLTGNRTDKITIGSDGYATFPVNGGSVSVWVQQ

SEQ ID NO: 35019 - protein, 480 aa, Cytophaga sp.
NGTMMQYFEWYVPNDGQQWNRLRTDAPYLSSVGITAVWTPPAYKGTSQADVGYGPYDLYDLGEFNQKGTVRTKYGTKGELKSAVNTLHSNGIQVYGDVVMNHKAGADYTENVTAVEVNPSNRNQETSGEYNIQAWTGFNFPGRGTTYSNFKWQWFHFDGTDWDQSRSLSRIFKFTGKAWDWEVSSENGNYDYLMYADIDYDHPDVVNEMKKWGVWYANEVGLDGYRLDAVKHIKFSFLKDWVDNARAATGKEMFTVGEYWQNDLGALNNYLAKVNYNQSLFDAPLHYNFYAASTGGGYYDMRNILNNTLVASNPTKAVTLVENHDTQPGQSLESTVQPWFKPLAYAFILTRSGGYPSVFYGDMYGTKGTTTREIPALKSKIEPLLKARKKYAYGTQRDYIDNPDVIGWTREGDSTKAKSGLATVITDGPGGSKRMYVGTSNAGEIWYDLTGNRTDKITIGSDGYATFPVNGGSVSVWVQQ

SEQ ID NO: 35020 - protein, 480 aa, Cytophaga sp.
NGTMMQYFEWYVPNDGQQWNRLRTDAPYLSSVGITAVWTPPAYKGTSQADVGYGPYDLYDLGEFNQKGTVRTKYGTKGELKSAVNTLHSNGIQVYGDVVMNHKAGADYTENVTAVEVNPSNRNQETSGEYNIQAWTGFNFPGRGTTYSNFKWQWFHFDGTDWDQSRSLSRIFKFTGKAWDWEVSSENGNYDYLMYADIDYDHPDVVNEMKKWGVWYANEVGLDGYRLDAVKHIKFSFLKDWVDNARAATGKEMFTVGEYWQNDLGALNNYLAKVNYNQSLFDAPLHYNFYAASTGGGYYDMRNILNNTLVASNPTKAVTVVENHDTQPGQSLESTVQPWFKPLAYAFILTRSGGYPSVFYGDMYGTKGTTTREIPALKSKIEPLLKARKDYAYGTQRDYIDNPDVIGWTREGDSTKAKSGLATVITDGPGGSKRMYVGTSNAGEIWYDLTGNRTDKITIGSDGYATFPVNGGSVSVWVQQ

SEQ ID NO: 35021 - protein, 480 aa, Cytophaga sp.
NGTMMQYFEWYVPNDGQQWNRLRTDAPYLSSVGITAVWTPPAYKGTSQADVGYGPYDLYDLGEFNQKGTVRTKYGTKGELKSAVNTLHSNGIQVYGDVVMNHKAGADYTENVTAVEVNPSNRNQETSGEYNIQAWTGFNFPGRGTTYSNFKWQWFHFDGTDWDQSRSLSRIFKFTGKAWDWEVSSENGNYDYLMYADIDYDHPDVVNEMKKWGVWYANEVGLDGYRLDAVKHIKFSFLKDWVDNARAATGKEMFTVGEYWQNDLGALNNYLAKVNYNQSLFDAPLHYNFYAASTGGGYYDMRNILNNTLVAKNPTKAVTLVENHDTQPGQSLESTVQPWFKPLAYAFILTRSGGYPSVFYGDMYGTKGTTTREIPALKSKIEPLLKARKDYAYGTQRDYIDNPDVIGWTREGDSTKAKSGLATVITDGPGGSKRMYVGTSNAGEIWYDLTGNRTDKITIGSDGYATFPVNGGSVSVWVQQ

SEQ ID NO: 35022 - protein, 480 aa, Cytophaga sp.
NGTMMQYFEWYVPNDGQQWNRLRTDAPYLSSVGITAVWMPPAYKGTSQADVGYGPYDLYDLGEFNQKGTVRTKYGTKGELKSAVNTLHSNGIQVYGDVVMNHKAGADYTENVTAVEVNPSNRNQETSGEYNIQAWTGFNFPGRGTTYSNFKWQWFHFDGTDWDQSRSLSRIFKFTGKAWDWEVSSENGNYDYLMYADIDYDHPDVVNEMKKWGVWYANEVGLDGYRLDAVKHIKFSFLKDWVDNARAATGKEMFTVGEYWQNDLGALNNYLAKVNYNQSLFDAPLHYNFYAASTGGGYYDMRNILNNTLVASNPTKAVTLVENHDTQPGQSLESTVQPWFKPLAYAFILTRSGGYPSVFYGDMYGTKGTTTREIPALKSKIEPLLKARKDYAYGTQRDYIDNPDVIGWTREGDSTKAKSGLATVITDGPGGSKRMYVGTSNAGEIWYDLTGNRTDKITIGSDGYATFPVNGGSVSVWVQQ

SEQ ID NO: 35023 - protein, 480 aa, Cytophaga sp.
NGTMMQYFEWYVPNDGQQWNRLRTDAPYLSSVGITAVWTPPAYKGCSQADVGYGPYDLYDLGEFNQKGTVRTKYGTKGELKSAVNTLHSNGIQVYGDVVMNHKAGADYTENVTAVEVNPSNRNQETSGEYNIQAWTGFNFPGRGTTYSNFKWQWFHFDGTDWDQSRSLSRIFKFTGKAWDWEVSSENGNYDYLMYADIDYDHPDVVNEMKKWGVWYANEVGLDGYRLDAVKHIKFSFLKDWVDNARAATGKEMFTVGEYWQNDLGALNNYLAKVNYNQSLFDAPLHYNFYAASTGGGYYDMRNILNNTLVASNPTKAVTLVENHDTQPGQSLESTVQPWFKPLAYAFILTRSGGYPSVFYGDMYGTKGTTTREIPALKSKIEPLLKARKDYAYGTQRDYIDNPDVIGWTREGDSTKAKSGLATVITDGPGGSKRMYVGTSNAGEIWYDLTGNRTDKITIGSDGYATFPVNGGSVSVWVQQ

SEQ ID NO: 35024 - protein, 480 aa, Cytophaga sp.
NGTMMQYFEWYVPNDGQQWNRLRTDAPYLSSVGITAVWTPPAYKGTSQADVGYGPYDLYDLGEFNQKGTVRTKYGTKGELKSAVNTLHSNGIQVYGDVVMNHKAGADYTENVTAVEVNPSNRNQETSGEYNIQAWTGFNFPGRGTTYSNFKWQWFHFDGTDWDQSRSLSRIFKFTGKAWDWEVSSENGNYDYLMYADIDYDHPDVVNEMKKWGVWYANEVGLDGYRLDAVKHIKFSFLKDWVDNARAATGKEMFTVGEYWQNDLGALNNYLKKVNYNQSLFDAPLHYNFYAASTGGGYYDMRNILNNTLVASNPTKAVTLVENHDTQPGQSLESTVQPWFKPLAYAFILTRSGGYPSVFYGDMYGTKGTTTREIPALKSKIEPLLKARKDYAYGTQRDYIDNPDVIGWTREGDSTKAKSGLATVITDGPGGSKRMYVGTSNAGEIWYDLTGNRTDKITIGSDGYATFPVNGGSVSVWVQQ

SEQ ID NO: 35025 - protein, 480 aa, Cytophaga sp.
NGTMMQYFEWYVPNDGQQWNRLRTDAPYLSSVGITAVWTPPAYKGTSQADVGYGPYDLYDLGEFNQKGTVRTKYGTKGELKSAVNELHSNGIQVYGDVVMNHKAGADYTENVTAVEVNPSNRNQETSGEYNIQAWTGFNFPGRGTTYSNFKWQWFHFDGTDWDQSRSLSRIFKFTGKAWDWEVSSENGNYDYLMYADIDYDHPDVVNEMKKWGVWYANEVGLDGYRLDAVKHIKFSFLKDWVDNARAATGKEMFTVGEYWQNDLGALNNYLAKVNYNQSLFDAPLHYNFYAASTGGGYYDMRNILNNTLVASNPTKAVTLVENHDTQPGQSLESTVQPWFKPLAYAFILTRSGGYPSVFYGDMYGTKGTTTREIPALKSKIEPLLKARKDYAYGTQRDYIDNPDVIGWTREGDSTKAKSGLATVITDGPGGSKRMYVGTSNAGEIWYDLTGNRTDKITIGSDGYATFPVNGGSVSVWVQQ

SEQ ID NO: 35026 - protein, 480 aa, Cytophaga sp.
NGTMMQYFEWYVPNDGQQWNRLRTDAPYLSSVGITAVWTPPAYKGTSQADVGYGPYDLYDLGEFNQKGTVRTKYGTKGELKSAVNTLHSNGIQVYGDVVMNHKAGADYTENVTAVEVNPSNRNQETSGEYNIQAWTGFNFPGRGTTYSNFKWQWFHFDGTDWDQSRSLSRIFKFTGKAWDWEVSSENGNYDYLMYADIDYDHPDVVNEMKKWGVWYANEVGLDGYRLDAVKHIKFSFLKDWVDNARAATGKEMFTVGEYWQNDLGALNNYLTKVNYNQSLFDAPLHYNFYAASTGGGYYDMRNILNNTLVASNPTKAVTLVENHDTQPGQSLESTVQPWFKPLAYAFILTRSGGYPSVFYGDMYGTKGTTTREIPALKSKIEPLLKARKDYAYGTQRDYIDNPDVIGWTREGDSTKAKSGLATVITDGPGGSKRMYVGTSNAGEIWYDLTGNRTDKITIGSDGYATFPVNGGSVSVWVQQ

SEQ ID NO: 35027 - protein, 480 aa, Cytophaga sp.
NGTMMQYFEWYVPNDGQQWNRLRTDAPYLSSVGITAVWTPPAYKGTSQADVGYGPYDLYDLGEFNQKGTVRTKYGTKGELKSAVNTLHSNGIQVYGDVVMNHKAGADYTENVTAVEVNPSNRNQETSGEYNIQAWTGFNFPGRGTTYSNFKWQWFHFDGTDWDQSRSLSRIFKFTGKAWDWEVSSENGNYDYLMYADIDYDHPDVVNEMKKWGVWYANEVGLDGYRLDAVKHIKFSFLKDWVDNARAATGKEMFTVGEYWQNDLGALNNYLAKVNYNQSLFDAPLHYNFYAASTGGGYYDMRNILNNTLVASNPTKAVTLVENHDTQPGQSLESTVQPWFKPLAYAFILTRSGGYPSVFYGDMYGTKGTTTREIPALKSKIEPLLKARKDYAYGTQRDYIDNPDVIGWTREGDSTKAKSGLATVITDGPGGSKRMYVGTSNAGEIWYDLTGNRTDKITIGSDGYATFPVNNGSVSVWVQQ

SEQ ID NO: 35028 - protein, 480 aa, Cytophaga sp.
NGTMMQYFEWYVPNDGQQWNRLRTDAPYLSSVGITAVWTPPAYKGTSQADVGYGPYDLYDLGEFNQKGTVRTKYGTKGELKSAVNTLHSNGIQVYGDVVMNHKAGADYTENVTAVEVNPSNRNQETSGEYNIQAWTGFNFPGRGTTYSNFKWQWFHFDGTDWDQSRSLSRIFKFTGKAWDWEVSSENGNYDYLMYADIDYDHPDVVNEMKKWGVWYANEVGLDGYRLDAVKHIKFSFLKDWVDNARAATGKEMFTVGEYWQNDLGALNNYLAKVNYNQSLFDAPLHYNFYAASTGGGYYDMRNILNNTLVASNPTKAVTLVENHDTQPGQSLESTVQPWFKPLAYAFILTRSGGYPSVFYGDMYGTKGTTTREIPALKSKIEPLLKARKDYAYGTQRDYIDNPDVIGWTREGDSTKAKSGLATVITDGPGGSKRMYVGTSNAGEIWYDLTGNRTDKITIGSDGYATFPVNTGSVSVWVQQ

SEQ ID NO: 35029 - protein, 480 aa, Cytophaga sp.
NGTMMQYFEWYVPNDGQQWNRLRTDAPYLSSVGITAVWTPPAYKGTSQADVGYGPYDLYDLGEFNQKGTVRTKYGTKGELKSAVNTLHSNGIQVYGDVVMNHKAGADYTENVTAVEVNPSNRNQETSGEYNIQAWTGFNFPGRGTTYSNFKWQWFHFDGTDWDQSRSLSRIFKFTGKAWDWEVSSENGNYDYLMYADIDYDHPDVVNEMKKWGVWYANEVGLDGYRLDAVKHIKFSFLKDWVDNARAATGKEMFTVGEYWQNDLGALNNYLAKVNYNQSLFDAPLHYNFYAASTGGGYYDMRNILNNTLVASNPTKAVTLVENHDTQPGQSLESTVQPWFKPLAYAFILTRSGGYPSVFYGDMYGTKGTTTREIPALKSKIEPLLKARKDYAYGTQRDYIDNPDVIGWTREGDSWKAKSGLATVITDGPGGSKRMYVGTSNAGEIWYDLTGNRTDKITIGSDGYATFPVNGGSVSVWVQQ

SEQ ID NO: 35030 - protein, 480 aa, Cytophaga sp.
NGTMMQYFEWYVPNDGQQWNRLRTDAPYLSSVGITAVWTPPAYKGTSQADVGYGPYDLYDLGEFNQKGTVRTKYGTKGELKSAVNTLHSNGIQVYGDVVMNHKAGADYTENVTAVEVNPSNRNQETSGEYNIQAWTGFNFPGRGTTYSNFKWQWFHFDGTDWDQSRSLSRIFKFTGKAWDWEVSSENGNYDYLMYADIDYDHPDVVNEMKKWGVWYANEVGLDGYRLDAVKHIKFSFLKDWVDNARAATGKEMFTVGEYWQNDLGALNNYLAKVNYNQSLFDAPLHYNFYAASTGGGYYDMRNILNNTLVASNPTKAVTLVENHDTQPGQSLESTVQPWFKPLAYAFILTRSGGYPSVFYGDMYGTKGTTTREIPALKSKIEPLLKARKDYAYGTQRDYIDNPDVIGWTREGDSTKAKSGLATVITDGPGGSKRMYVGTSNAGEAWYDLTGNRTDKITIGSDGYATFPVNGGSVSVWVQQ

SEQ ID NO: 35031 - protein, 480 aa, Cytophaga sp.
NGTMMQYFEWYVPNDGQQWNRLRTDAPELSSVGITAVWTPPAYKGTSQADVGYGPYDLYDLGEFNQKGTVRTKYGTKGELKSAVNTLHSNGIQVYGDVVMNHKAGADYTENVTAVEVNPSNRNQETSGEYNIQAWTGFNFPGRGTTYSNFKWQWFHFDGTDWDQSRSLSRIFKFTGKAWDWEVSSENGNYDYLMYADIDYDHPDVVNEMKKWGVWYANEVGLDGYRLDAVKHIKFSFLKDWVDNARAATGKEMFTVGEYWQNDLGALNNYLAKVNYNQSLFDAPLHYNFYAASTGGGYYDMRNILNNTLVASNPTKAVTLVENHDTQPGQSLESTVQPWFKPLAYAFILTRSGGYPSVFYGDMYGTKGTTTREIPALKSKIEPLLKARKDYAYGTQRDYIDNPDVIGWTREGDSTKAKSGLATVITDGPGGSKRMYVGTSNAGEIWYDLTGNRTDKITIGSDGYATFPVNGGSVSVWVQQ

SEQ ID NO: 35032 - protein, 480 aa, Cytophaga sp.
NGTMMQYFEWYVPNDGQQWNRLRTDAPYLSSVGITAVWTPPAYKGTSQADVGYGPYDLYDLGEFNQKGTVRTKYGTKGELKSAVNTLHSNGIQVYGDVVMNHKAGADYTENVTAVEVNPSNRNQETSGEYNIQAWTGFNFPGRGITYSNFKWQWFHFDGTDWDQSRSLSRIFKFTGKAWDWEVSSENGNYDYLMYADIDYDHPDVVNEMKKWGVWYANEVGLDGYRLDAVKHIKFSFLKDWVDNARAATGKEMFTVGEYWQNDLGALNNYLAKVNYNQSLFDAPLHYNFYAASTGGGYYDMRNILNNTLVASNPTKAVTLVENHDTQPGQSLESTVQPWFKPLAYAFILTRSGGYPSVFYGDMYGTKGTTTREIPALKSKIEPLLKARKDYAYGTQRDYIDNPDVIGWTREGDSTKAKSGLATVITDGPGGSKRMYVGTSNAGEIWYDLTGNRTDKITIGSDGYATFPVNGGSVSVWVQQ

SEQ ID NO: 35033 - protein, 480 aa, Cytophaga sp.
NGTMMQYFEWYVPNDGQQWNRLRTDAPYLSSVGITAVWTPPAYKGTSQADVGYGPYDLYDLGEFNQKGTVRTKYGTKGELKSAVNTLHSNGIQVYGDVVMNHKAGADYTENVTAVEVNPTNRNQETSGEYNIQAWTGFNFPGRGTTYSNFKWQWFHFDGTDWDQSRSLSRIFKFTGKAWDWEVSSENGNYDYLMYADIDYDHPDVVNEMKKWGVWYANEVGLDGYRLDAVKHIKFSFLKDWVDNARAATGKEMFTVGEYWQNDLGALNNYLAKVNYNQSLFDAPLHYNFYAASTGGGYYDMRNILNNTLVASNPTKAVTLVENHDTQPGQSLESTVQPWFKPLAYAFILTRSGGYPSVFYGDMYGTKGTTTREIPALKSKIEPLLKARKDYAYGTQRDYIDNPDVIGWTREGDSTKAKSGLATVITDGPGGSKRMYVGTSNAGEIWYDLTGNRTDKITIGSDGYATFPVNGGSVSVWVQQ

SEQ ID NO: 35034 - protein, 480 aa, Cytophaga sp.
NGTMMQYFEWYVPNDGQQWNRLRTDAPYLSSVGITAVWTPPAYKGTSQADVGYGPYDLYDLGEFNQKGTVRTKYGTKGELKSAVNTLHSNGIQVYGDVVMNHKAGADYTENVTAVEVNPSNRNQETSGEYNIQAWTGFNFPGRGTTYSNFKWQWFHFDGTDWDQSRSLSRIFKFTGKAWDWEVSSENGNYDYLMYADIDYDHPDVVNEMKKWGVWYANEVGLDGYRLDAVKHIKFSFLKDWVDNARAATGKEMFTVGEYWQNDLGALNNYLYKVNYNQSLFDAPLHYNFYAASTGGGYYDMRNILNNTLVASNPTKAVTLVENHDTQPGQSLESTVQPWFKPLAYAFILTRSGGYPSVFYGDMYGTKGTTTREIPALKSKIEPLLKARKDYAYGTQRDYIDNPDVIGWTREGDSTKAKSGLATVITDGPGGSKRMYVGTSNAGEIWYDLTGNRTDKITIGSDGYATFPVNGGSVSVWVQQ

SEQ ID NO: 35035 - protein, 480 aa, Cytophaga sp.
NGTMMQYFEWYVPNDGQQWNRLRTDAPYLSSVGITAVWTPPAYKGTSQADVGYGPYDLYDLGEFNQKGTVRTKYGTKGELKSAVNTLHSNGIQVYGDVVMNHKAGADYTENVTAVEVNPSNRNQETSGEYNIIAWTGFNFPGRGTTYSNFKWQWFHFDGTDWDQSRSLSRIFKFTGKAWDWEVSSENGNYDYLMYADIDYDHPDVVNEMKKWGVWYANEVGLDGYRLDAVKHIKFSFLKDWVDNARAATGKEMFTVGEYWQNDLGALNNYLAKVNYNQSLFDAPLHYNFYAASTGGGYYDMRNILNNTLVASNPTKAVTLVENHDTQPGQSLESTVQPWFKPLAYAFILTRSGGYPSVFYGDMYGTKGTTTREIPALKSKIEPLLKARKDYAYGTQRDYIDNPDVIGWTREGDSTKAKSGLATVITDGPGGSKRMYVGTSNAGEIWYDLTGNRTDKITIGSDGYATFPVNGGSVSVWVQQ

SEQ ID NO: 35036 - protein, 480 aa, Cytophaga sp.
NGTMMQYFEWYVPNDGQQWNRLRTDAPYLSSVGITAVWTPPAYKGTSQADVGYGPYDLYDLGEFNQKGTVRTKYGTKGELKSAVNTLHSNGIQVYGDVVMNHKAGADYTENVTAVEVNPSNRNQETSGEYNIQAWTGFNFPGRGTTYSNFKWQWFHFDGTDWDQSRSLSRIFKFTGKAWDWEVSSENGNYDYLMYADIDYDHPDVVNEMKKWGVWYANEVGLDGYRLDAVKHIKFSFLKDWVDNARAATGKEMFTVGEYWQNDLGALNNYLAKVNYNQSLFDAPLHYNFYAASTGGGYYDMRNILNNTLVASMPTKAVTLVENHDTQPGQSLESTVQPWFKPLAYAFILTRSGGYPSVFYGDMYGTKGTTTREIPALKSKIEPLLKARKDYAYGTQRDYIDNPDVIGWTREGDSTKAKSGLATVITDGPGGSKRMYVGTSNAGEIWYDLTGNRTDKITIGSDGYATFPVNGGSVSVWVQQ

SEQ ID NO: 35037 - protein, 480 aa, Cytophaga sp.
NGTMMQYFEWYVPNDGQQWNRLRTDAPYLSSVGITAVWTPPAYKGTSQADVGYGPYDLYDLGEFNQKGTVRTKYGTKGELKSAVNTLHSNGIQVYGDVVMNHKAGADYTENVTAVEVNPSNRNQETSGEYNIQAWTGFNFPGRGTTYSNFKWQWFHFDGTDWDQSRSLSRIFKFTGKAWDWEVSSENGNYDYLMYADIDYDHPDVVNEMKKWGVWYANEVGLDGYRLDAVKHIKFSFLKDWVDNARAATGKEMFTVGEYWQNDLGALNNYLAKVNYNQSLFDAPLHYNFYAASTGGGYYDMRNILNNTLVASNPTKAVTLVENHDTQPGQSLESTVQPWFKPLAYAFILTRSGGYPSVFYGDMYGTKGTTTREIPALKSKIEPLLKARKDYAYGTQRDYIDNPDVIGWTREGDSTRAKSGLATVITDGPGGSKRMYVGTSNAGEIWYDLTGNRTDKITIGSDGYATFPVNGGSVSVWVQQ

SEQ ID NO: 35038 - protein, 480 aa, Cytophaga sp.
NGTMMQYFEWYVPNDGQQWNRLRTDAPYLSSVGITAVWTPPAYKGTSQADVGYGPYDLYDLGEFNQKGTVRTKYGTKGELKSAVNTLHSNGIQVYGDVVMNHKAGADRTENVTAVEVNPSNRNQETSGEYNIQAWTGFNFPGRGTTYSNFKWQWFHFDGTDWDQSRSLSRIFKFTGKAWDWEVSSENGNYDYLMYADIDYDHPDVVNEMKKWGVWYANEVGLDGYRLDAVKHIKFSFLKDWVDNARAATGKEMFTVGEYWQNDLGALNNYLAKVNYNQSLFDAPLHYNFYAASTGGGYYDMRNILNNTLVASNPTKAVTLVENHDTQPGQSLESTVQPWFKPLAYAFILTRSGGYPSVFYGDMYGTKGTTTREIPALKSKIEPLLKARKDYAYGTQRDYIDNPDVIGWTREGDSTKAKSGLATVITDGPGGSKRMYVGTSNAGEIWYDLTGNRTDKITIGSDGYATFPVNGGSVSVWVQQ

SEQ ID NO: 35039 - protein, 480 aa, Cytophaga sp.
NGTMMQYFEWYVPNDGQQWNRLRTDAPYLSSVGITAVWTPPAYKGTSQADVGYGPYDLYDLGEFNQKGTVRTKYGTKGELKSAVNTLHSNGIQVYGDVVMNHKAGADYTENVTAVEVNPSNRNQETSGKYNIQAWTGFNFPGRGTTYSNFKWQWFHFDGTDWDQSRSLSRIFKFRGKAWDWEVSSENGNYDYLMYADIDYDHPDVVNEMKKWGVWYANEVGLDGYRLDAVKHIKFSFLKDWVDNARAATGKEMFTVGEYWQNDLGALNNYLAKVNYNQSLFDAPLHYNFYAASTGGGYYDMRNILNNTLVASNPTKAVTLVENHDTQPGQSLESTVQPWFKPLAYAFILTRSGGYPSVFYGDMYGTKGTTTREIPALKSKIEPLLKARKDYAYGTQRDYIDNPDVIGWTREGDSTKAKSGLATVITDGPGGSKRMYVGTSNAGEIWYDLTGNRTDKITIGSDGYATFPVNGGSVSVWVQQ

SEQ ID NO: 35040 - protein, 480 aa, Cytophaga sp.
NGTMMQYFEWYVPNDGQQWNRLRTDAPYLSSVGITAVWTPPAYKGTSQADVGYGPYDLYDLGEFNQKGTVRTKYGTKGELKSAVNTLHSNGIQVYGDVVMNHKAGADYTENVTAVEVNPSNRNQETSGEYNIQAWTGFNFPGRGTTYSNFKWQWFHFDGTDWDVSRSLSRIFKFTGKAWDWEVSSENGNYDYLMYADIDYDHPDVVNEMKKWGVWYANEVGLDGYRLDAVKHIKFSFLKDWVDNARAATGKEMFTVGEYWQNDLGALNNYLAKVNYNQSLFDAPLHYNFYAASTGGGYYDMRNILNNTLVASNPTKAVTLVENHDTQPGQSLESTVQPWFKPLAYAFILTRSGGYPSVFYGDMYGTKGTTTREIPALKSKIEPLLKARKDYAYGTQRDYIDNPDVIGWTREGDSTKAKSGLATVITDGPGGSKRMYVGTSNAGEIWYDLTGNRTDKITIGSDGYATFPVNGGSVSVWVQQ

SEQ ID NO: 35041 - protein, 480 aa, Cytophaga sp.
NGTMMQYFEWYVPNDGQQWNRLRTDAPYLSSVGITAVWTPPAYKGASQADVGYGPYDLYDLGEFNQKGTVRTKYGTKGELKSAVNTLHSNGIQVYGDVVMNHKAGADYTENVTAVEVNPSNRNQETSGEYNIQAWTGFNFPGRGTTYSNFKWQWFHFDGTDWDQSRSLSRIFKFTGKAWDWEVSSENGNYDYLMYADIDYDHPDVVNEMKKWGVWYANEVGLDGYRLDAVKHIKFSFLKDWVDNARAATGKEMFTVGEYWQNDLGALNNYLAKVNYNQSLFDAPLHYNFYAASTGGGYYDMRNILNNTLVASNPTKAVTLVENHDTQPGQSLESTVQPWFKPLAYAFILTRSGGYPSVFYGDMYGTKGTTTREIPALKSKIEPLLKARKDYAYGTQRDYIDNPDVIGWTREGDSTKAKSGLATVITDGPGGSKRMYVGTSNAGEIWYDLTGNRTDKITIGSDGYATFPVNGGSVSVWVQQ

SEQ ID NO: 35042 - protein, 480 aa, Cytophaga sp.
NGTMMQYFEWYVPNDGQQWNRLRTDAPYLSSVGITAVWTPPAYKGTSQADVGYGPYDLYDLGEFNQKGTVRTKYGTKGELKSAVNTLHSNGIQVYGDVVMNHKAGADYTENVTAVEVNPSNRNQETSGEYNIQAWTGFNFPGRGTTYSNFKWQWFHFDGTDWDHSRSLSRIFKFTGKAWDWEVSSENGNYDYLMYADIDYDHPDVVNEMKKWGVWYANEVGLDGYRLDAVKHIKFSFLKDWVDNARAATGKEMFTVGEYWQNDLGALNNYLAKVNYNQSLFDAPLHYNFYAASTGGGYYDMRNILNNTLVASNPTKAVTLVENHDTQPGQSLESTVQPWFKPLAYAFILTRSGGYPSVFYGDMYGTKGTTTREIPALKSKIEPLLKARKDYAYGTQRDYIDNPDVIGWTREGDSTKAKSGLATVITDGPGGSKRMYVGTSNAGEIWYDLTGNRTDKITIGSDGYATFPVNGGSVSVWVQQ

SEQ ID NO: 35043 - protein, 480 aa, Cytophaga sp.
NGTMMQYFEWYVPNDGQQWNRLRTDAPYLSSVGITAVWTPPAYKGTSQADVGYGPYDLYDLGEFNQKGTVRTKYGTKGELKSAVNTLHSNGIQVYGDVVMNHKAGADYTENVTAVEVNPSNRNQETSGEYNIQAWTGFNFPGRGTTYSNFKWQWFHFDGTDWDQSRSLSRIFKFTGKAWDWEVSSENGNYDYLMYADIDYDHPDVVNEMKKWGVWYANEVGLDGYRLDAVKHIKFSFLADWVDNARAATGKEMFTVGEYWQNDLGALNNYLAKVNYNQSLFDAPLHYNFYAASTGGGYYDMRNILNNTLVASNPTKAVTLVENHDTQPGQSLESTVQPWFKPLAYAFILTRSGGYPSVFYGDMYGTKGTTTREIPALKSKIEPLLKARKDYAYGTQRDYIDNPDVIGWTREGDSTKAKSGLATVITDGPGGSKRMYVGTSNAGEIWYDLTGNRTDKITIGSDGYATFPVNGGSVSVWVQQ

SEQ ID NO: 35044 - protein, 480 aa, Cytophaga sp.
NGTMMQYFEWYVPNDGQQWNRLRTDAPYLSSVGITAVWTPPAYKGTSQADVGYGPYDLYDLGEFNQKGTVRTKYGTKGELKSAVNTLHSNGIQVYGDVVMNHKAGADYTENVTAVEVNPSNRNQETSGEYNIQAWTGFNFPGRGTTYSNFKWQWFHFDGTDWDQSRSLSRIFKFTGKAWDWEVSSENGNYDYLMYADIDYDHPDVVNEMKKWGVWYANEVGLDGYRLDAVKHIKFSFLKDWVDNARAATGKEMFTVGEYWQNDLGALNNYLAKVNYNQSLFDAPLHYNFYAASTGGGYYDMRNILNNTLVASNPTKAVTLVENHDTQPGQSLESTVQPWFKPLAYAFILTRSGGYPSVFYGDMYGTKGTTTREIPALKSKIEPLLKARKDYAYGTQRDYIDNPDVIGWTREGDSTKAKSGLATVITDGPGGSKRMYVGTSNAGEIWYDLTGNRTDKITIGSDGYATFPVNVGSVSVWVQQ

SEQ ID NO: 35045 - protein, 480 aa, Cytophaga sp.
NGTMMQYFEWYVPNDGQQWNRLRTDAPYLSSVGITAVWTPPAYKGTSQADVGYGPYDLYDLGEFNQKGTVRTKYGTKGELKSAVNTLHSNGIQVYGDVVMNHKAGADYTENVTAVEVNPSNRNQETSGEYNIQAWTGFNFPGRGTTYSHFKWQWFHFDGTDWDQSRSLSRIFKFTGKAWDWEVSSENGNYDYLMYADIDYDHPDVVNEMKKWGVWYANEVGLDGYRLDAVKHIKFSFLKDWVDNARAATGKEMFTVGEYWQNDLGALNNYLAKVNYNQSLFDAPLHYNFYAASTGGGYYDMRNILNNTLVASNPTKAVTLVENHDTQPGQSLESTVQPWFKPLAYAFILTRSGGYPSVFYGDMYGTKGTTTREIPALKSKIEPLLKARKDYAYGTQRDYIDNPDVIGWTREGDSTKAKSGLATVITDGPGGSKRMYVGTSNAGEIWYDLTGNRTDKITIGSDGYATFPVNGGSVSVWVQQ

SEQ ID NO: 35046 - protein, 480 aa, Cytophaga sp.
NGTMMQYFEWYVPNDGQQWNRLRTDAPYLSSVGITAVWTPPAYKGTSQADVGYGPYDLYDLGEFNQKGTVRTKYGTKGELKSAVNTLHSNGIQVYGDVVMNHKAGADYTENVTAVEVNPSNRNQETSGEYNIQAWTGFNFPGRGTTYSNFKWQWFHFDGTDWDQSRSLSRIFKFTGKAWDWEVSSENGNYDYLMYADIDYDHPDVVNEMKKWGVWYANEVGLDGYRLDAVKHIKFSFLKDWVDNARAATGKEMFTVGEYWQNDLGALNNYLAKVNYNQSLFDAPLHYNFYAASTGGGYYDMRNILNNTLVASNPTKAVTLVENHDTQPGQSLESTVQPWFKPLAYAFILTRSGGYPSVFYGDMYGTKGTTTREIPALKSKIEPLLKARKDYAYGTQRDYIDNPDVIGWTREGDSTKAKSGLATVITDGPGGSKRMYVGTSNAGEIWYDLTGNRTDDITIGSDGYATFPVNGGSVSVWVQQ

SEQ ID NO: 35047 - protein, 480 aa, Cytophaga sp.
NGTMMQYFEWYVPNDGQQWNRLRTDAPYLSSVGITAVWTPPAYKGTSQADVGYGPYDLYDLGEFNQKGTVRTKYGTKGELKSAVNTLHSNGIQVYGDVVMNHKAGADHTENVTAVEVNPSNRNQETSGEYNIQAWTGFNFPGRGTTYSNFKWQWFHFDGTDWDQSRSLSRIFKFTGKAWDWEVSSENGNYDYLMYADIDYDHPDVVNEMKKWGVWYANEVGLDGYRLDAVKHIKFSFLKDWVDNARAATGKEMFTVGEYWQNDLGALNNYLAKVNYNQSLFDAPLHYNFYAASTGGGYYDMRNILNNTLVASNPTKAVTLVENHDTQPGQSLESTVQPWFKPLAYAFILTRSGGYPSVFYGDMYGTKGTTTREIPALKSKIEPLLKARKDYAYGTQRDYIDNPDVIGWTREGDSTKAKSGLATVITDGPGGSKRMYVGTSNAGEIWYDLTGNRTDKITIGSDGYATFPVNGGSVSVWVQQ

SEQ ID NO: 35048 - protein, 480 aa, Cytophaga sp.
NGTMMQYFEWYVPNDGQQWNRLRTDAPYLSSVGITAVWTPPAYKGTSQADVGYGPYDLYDLGEFNQKGTVRTKYGTKGELKSAVNTLHSNGIQVYGDVVMNHKAGADYTENVTAVEVNPSNRNQETSGEYNIQAWTGFNFPGRGTTYSNFKWQWFHFDGTDWDQSRSLSRIFKFTGKAWDWEVSSENGNYDYLMYADIDYDHPDVVNEMKKWGVWYANEVGLDGYRLDAVKHIKFSFLKDWVDNARAATGKEMFTVGEYWQNDLGALNNYLAKVNYNQSLFDAPLHYNFYAASTGGGYYDMRNILKNTLVASNPTKAVTLVENHDTQPGQSLESTVQPWFKPLAYAFILTRSGGYPSVFYGDMYGTKGTTTREIPALKSKIEPLLKARKDYAYGTQRDYIDNPDVIGWTREGDSTKAKSGLATVITDGPGGSKRMYVGTSNAGEIWYDLTGNRTDKITIGSDGYATFPVNGGSVSVWVQQ

SEQ ID NO: 35049 - protein, 480 aa, Cytophaga sp.
NGTMMQYFEWYVPNDGQQWNRLRTDAPYLSSVGITAVWTPPAYKGTSQADVGYGPYDLYDLGEFNQKGTVRTKYGTKGELKSAVNTLHSNGIQVYGDVVMNHKAGADYTENVTAVEVNPSNRNQETSGEYNIQAWTGFNFPGRGTTYSNFKWQWFHFDGTDWDQSRSLSRIFKFTGKAWDWEVSSENGNYDYLMYADIDYDHPDVVNEMKKWGVWYANEVGLDGYRLDAVKHIKFSFLKDWVDNARAATGKEMFTVGEYWQNDLGALNNYLAKVNYNQSLFDAPLHYNFYAASTGGGYYDMRNILNNTLVASNPTKAVTLVENHDTQPGQSLESTVQPWFKPLAYAFILTRSGGYPSVFYGDMYGTKGTTTREIPALKSKIEPLLKARKDYAYGTQRDYIDNPDVIGWTREGDSTKAKSGLATVITDGPGGSKRMYVGTANAGEIWYDLTGNRTDKITIGSDGYATFPVNGGSVSVWVQQ

SEQ ID NO: 35050 - protein, 480 aa, Cytophaga sp.
NGTMMQYFEWYVPNDGQQWNRLRTDAPYLSSVGITAVWTPPAYKGTSQADVGYGPYDLYDLGEFNQKGTVRTKYGTKGELKSAVNTLHSNGIQVYGDVVMNHKAGADYTENVTAVEVNPSNRNQETSGEYNIQAWTGFNFPGRGTTYSNFKWQWFHFDGTDWDQSRSLSRIFKFTGKAWDWEVSSENGNYDYLMYADIDYDHPDVVNEMKKWGVWYANEVGLDGYRLDAVKHIKFSFLKDWVDNARAATGKEMFTVGEYWQNDLGALNNYLAKVNYNQSLFDAPLHYNFLAASTGGGYYDMRNILNNTLVASNPTKAVTLVENHDTQPGQSLESTVQPWFKPLAYAFILTRSGGYPSVFYGDMYGTKGTTTREIPALKSKIEPLLKARKDYAYGTQRDYIDNPDVIGWTREGDSTKAKSGLATVITDGPGGSKRMYVGTSNAGEIWYDLTGNRTDKITIGSDGYATFPVNGGSVSVWVQQ

SEQ ID NO: 35051 - protein, 480 aa, Cytophaga sp.
NGTMMQYFEWYVPNDGQQWNRLRTDAPYLSSVGITAVWTPPAYKGTSQADVGYGPYDLYDLGEFNQKGTVRTKYGTKGELKSAVNTLHSNGIQVYGDVVMNHKAGADDTENVTAVEVNPSNRNQETSGEYNIQAWTGFNFPGRGTTYSNFKWQWFHFDGTDWDQSRSLSRIFKFTGKAWDWEVSSENGNYDYLMYADIDYDHPDVVNEMKKWGVWYANEVGLDGYRLDAVKHIKFSFLKDWVDNARAATGKEMFTVGEYWQNDLGALNNYLAKVNYNQSLFDAPLHYNFYAASTGGGYYDMRNILNNTLVASNPTKAVTLVENHDTQPGQSLESTVQPWFKPLAYAFILTRSGGYPSVFYGDMYGTKGTTTREIPALKSKIEPLLKARKDYAYGTQRDYIDNPDVIGWTREGDSTKAKSGLATVITDGPGGSKRMYVGTSNAGEIWYDLTGNRTDKITIGSDGYATFPVNGGSVSVWVQQ

SEQ ID NO: 35052 - protein, 480 aa, Cytophaga sp.
NGTMMQYFEWYVPNDGQQWNRLRTDAPYLSSVGITAVWTPPAYKGTSQADVGYGPYDLYDLGEFNQKGTVRTKYGTKGELKSAVNTLHSNGIQVYGDVVMNHKAGADYTENVTAVEVNPSNRNQETSGEYNIQAWTGFNFPGRGTTYSNFKWQWFHFDGTDWDQSRSLSRIFKFTGKAWDWEVSSENGNYDYLMYADIDYDHPDVVNEMKKWGVWYANEVGLDGYRLDAVKHIKFSFLKDWVDNARAATGKEMFTVGEYWQNDLGALNNYLAKVNYNQSLFDAPLHYNFYAASTGGGYYDMRNILNNTLVASNPTKAVTLVENHDTQPGQSLESTVQPWFKPLAYAFILTRSGGYPSVFYGDMYGTKGTTTREIPALKSKIEPLLKARKDYAYGAQRDYIDNPDVIGWTREGDSTKAKSGLATVITDGPGGSKRMYVGTSNAGEIWYDLTGNRTDKITIGSDGYATFPVNGGSVSVWVQQ

SEQ ID NO: 35053 - protein, 480 aa, Cytophaga sp.
NGTMMQYFEWYVPNDGQQWNRLRTDAPYLSSVGITAVWTPPAYKGTSQADVGYGPYDLYDLGEFNQKGTVRTKYGTKGELKSAVNTLHSNGIQVYGDVVMNHKAGADYTENVTAVEVNPSNRNQETSGEYNIQAWTGFNFPGRGTTYSNFKWQWFHFDGTDWDQSRSLSRIFKFTGKAWDWEVSSENGNYDYLMYADIDYDHPDVVNEMKKWGVWYANEVGLDGYRLDAVKHIKFSFLKDWVDNARAATGKEMFTVGEYWQNDLGALNNYLAKVNYNQSLFDAPLHYNFYAASTGGGYYDMRNILNNTLVASNPTKAVTLVENHDTQPGQSLESTVQPWFKPLAYAFILTRSGGYPSVFYGDMYGTKGTTTREIPALKSKIEPLLKARKDYAYGTQRDYIDNPDVIGWTREGDSPKAKSGLATVITDGPGGSKRMYVGTSNAGEIWYDLTGNRTDKITIGSDGYATFPVNGGSVSVWVQQ

SEQ ID NO: 35054 - protein, 480 aa, Cytophaga sp.
NGTMMQYFEWYVPNDGQQWNRLRTDAPYLSSVGITAVWTPPAYKGTSQADVGYGPYDLYDLGEFNQKGTVRTKYGTKGELKSAVNTLHSNGIQVYGDVVMNHKAGADYTENVTAVEVNPSNRNQETSGEYCIQAWTGFNFPGRGTTYSNFKWQWFHFDGTDWDQSRSLSRIFKFTGKAWDWEVSSENGNYDYLMYADIDYDHPDVVNEMKKWGVWYANEVGLDGYRLDAVKHIKFSFLKDWVDNARAATGKEMFTVGEYWQNDLGALNNYLAKVNYNQSLFDAPLHYNFYAASTGGGYYDMRNILNNTLVASNPTKAVTLVENHDTQPGQSLESTVQPWFKPLAYAFILTRSGGYPSVFYGDMYGTKGTTTREIPALKSKIEPLLKARKDYAYGTQRDYIDNPDVIGWTREGDSTKAKSGLATVITDGPGGSKRMYVGTSNAGEIWYDLTGNRTDKITIGSDGYATFPVNGGSVSVWVQQ

SEQ ID NO: 35055 - protein, 480 aa, Cytophaga sp.
NGTMMQYFEWYVPNDGQQWNRLRTDAPYLSSVGITAVWTPPAYKGTSQADVGYGPYDLYDLGEFNQKGTVRTKYGTKGELKSAVNTLHSNGIQVYGDVVMNHKAGADYTENVTAVEVNPSNRNQETSGEYNIQAWTGFNFPGRGTTYSNFKWQWFHFDGTDWDQSRHLSRIFKFTGKAWDWEVSSENGNYDYLMYADIDYDHPDVVNEMKKWGVWYANEVGLDGYRLDAVKHIKFSFLKDWVDNARAATGKEMFTVGEYWQNDLGALNNYLAKVNYNQSLFDAPLHYNFYAASTGGGYYDMRNILNNTLVASNPTKAVTLVENHDTQPGQSLESTVQPWFKPLAYAFILTRSGGYPSVFYGDMYGTKGTTTREIPALKSKIEPLLKARKDYAYGTQRDYIDNPDVIGWTREGDSTKAKSGLATVITDGPGGSKRMYVGTSNAGEIWYDLTGNRTDKITIGSDGYATFPVNGGSVSVWVQQ

SEQ ID NO: 35056 - protein, 480 aa, Cytophaga sp.
NGTMMQYFEWYVPNDGQQWNRLRTDAPYLSSVGITAVWTPPAYKGTSQADVGYGPYDLYDLGEFNQKGTVRTKYGTKGELKSAVNTLHSNGIQVYGDVVMNHKAGADYTENVTAVEVNPSNRNQETSGEYNIQAWTGFNFPGRGTTYSNFKWQWFHFDGTDWDQSRSLSRIFKFTGKAWDWEVSSENGNYDYLMYADIDYDHPDVVNEMKKWGVWYANEVGLDGYRLDAVKHIKFSFLKDWVDNARAATGKEMFTVGEYWQNDVGALNNYLAKVNYNQSLFDAPLHYNFYAASTGGGYYDMRNILNNTLVASNPTKAVTLVENHDTQPGQSLESTVQPWFKPLAYAFILTRSGGYPSVFYGDMYGTKGTTTREIPALKSKIEPLLKARKDYAYGTQRDYIDNPDVIGWTREGDSTKAKSGLATVITDGPGGSKRMYVGTSNAGEIWYDLTGNRTDKITIGSDGYATFPVNGGSVSVWVQQ

SEQ ID NO: 35057 - protein, 480 aa, Cytophaga sp.
NGTMMQYFEWYVPNDGQQWNRLRTDAPYLSSVGITAVWTPPAYKGTSQADVGYGPYDLYDLGEFNQKGTVRTKYGTKGELKSAVNTLHSNGIQVYGDVVMNHKAGADYTENVTAVEVNPSNRNQETSGEYNIQAWTGFNFPGRGTTYSNFKWQWFHFDGTDWDQSRSLSRIFKFTGKAWDWEVSSENGNYDYLMYADIDYDHPDVVNEMKKWGVWYANEVGLDGYRLDAVKHIKFSFLKDWVDNARAATGKEMFTVGEYWQNDLGALNNYLAKVNYNQSLFDAPLHYNFYAASTGGGYYDMRNILNNTLVASNPTKAVTLVENHDTQPGQSLESTVQPWFKPLAYAFILTRSGGYPSVFYGDMYGTKGTTTREIPALKSKIEPLLKARKDYAYGTQRDYIDNPDVIGWTREGDSTKAKSGLATVITDGPGGSKRMYVGTSNAGEIWYDLTGNRTDKITIGSDGYATFPVNYGSVSVWVQQ

SEQ ID NO: 35058 - protein, 480 aa, Cytophaga sp.
NGTMMQYFEWYVPNDGQQWNRLRTDAPYLSSVGITAVWTPPAYKGTSQADVGYGPYDLYDLGEFNQKGTVRTKYGTKGELKSAVNRLHSNGIQVYGDVVMNHKAGADYTENVTAVEVNPSNRNQETSGEYNIQAWTGFNFPGRGTTYSNFKWQWFHFDGTDWDQSRSLSRIFKFTGKAWDWEVSSENGNYDYLMYADIDYDHPDVVNEMKKWGVWYANEVGLDGYRLDAVKHIKFSFLKDWVDNARAATGKEMFTVGEYWQNDLGALNNYLAKVNYNQSLFDAPLHYNFYAASTGGGYYDMRNILNNTLVASNPTKAVTLVENHDTQPGQSLESTVQPWFKPLAYAFILTRSGGYPSVFYGDMYGTKGTTTREIPALKSKIEPLLKARKDYAYGTQRDYIDNPDVIGWTREGDSTKAKSGLATVITDGPGGSKRMYVGTSNAGEIWYDLTGNRTDKITIGSDGYATFPVNGGSVSVWVQQ

SEQ ID NO: 35059 - protein, 480 aa, Cytophaga sp.
NGTMMQYFEWYVPNDGQQWNRLRTDAPYLSSVGITAVWTPPAYKGTSQADVGYGPYDLYDLGEFNQKGTVRTKYGTKGELKAAVNTLHSNGIQVYGDVVMNHKAGADYTENVTAVEVNPSNRNQETSGEYNIQAWTGFNFPGRGTTYSNFKWQWFHFDGTDWDQSRSLSRIFKFTGKAWDWEVSSENGNYDYLMYADIDYDHPDVVNEMKKWGVWYANEVGLDGYRLDAVKHIKFSFLKDWVDNARAATGKEMFTVGEYWQNDLGALNNYLAKVNYNQSLFDAPLHYNFYAASTGGGYYDMRNILNNTLVASNPTKAVTLVENHDTQPGQSLESTVQPWFKPLAYAFILTRSGGYPSVFYGDMYGTKGTTTREIPALKSKIEPLLKARKDYAYGTQRDYIDNPDVIGWTREGDSTKAKSGLATVITDGPGGSKRMYVGTSNAGEIWYDLTGNRTDKITIGSDGYATFPVNGGSVSVWVQQ

SEQ ID NO: 35060 - protein, 480 aa, Cytophaga sp.
NGTMMQYFEWYVPNDGQQWNRLRTDAPYLSSVGITAVWTPPAYKGTSQADVGYGPYDLYDLGEFNQKGTVRTKYGTKGELKSAVNTLHSNGIQVYGDVVMNHKAGADYTENVTAVEVNPSNRNQETSGEYNIQAWTGFNFPGRGTTYSNFKWQWFHFDGTDWDQSRSLSRIFKFTGKAWDWEVSSENGNYDYLMYADIDYDHPDVVNEMKKWGVWYANEVGLDGYRLDAVKHIKFSFLKDWVDNARAATGKEMFTVGEYWQNDLGALNNYLAKVNYNQSLFDAPLHYNFYAASTGGGYYDMRNILNNTLVASNPTKAVTLVENHDTQPGQSLESTVQPWFKPLAYAFILTRVGGYPSVFYGDMYGTKGTTTREIPALKSKIEPLLKARKDYAYGTQRDYIDNPDVIGWTREGDSTKAKSGLATVITDGPGGSKRMYVGTSNAGEIWYDLTGNRTDKITIGSDGYATFPVNGGSVSVWVQQ

SEQ ID NO: 35061 - protein, 480 aa, Cytophaga sp.
NGTMMQYFEWYVPNDGQQWNRLRTDAPYLSSVGITAVWTPPAYKGTSQADVGYGPYDLYDLGEFNQKGTVRTKYGTKGELKSAVNTLHSTGIQVYGDVVMNHKAGADYTENVTAVEVNPSNRNQETSGEYNIQAWTGFNFPGRGTTYSNFKWQWFHFDGTDWDQSRSLSRIFKFTGKAWDWEVSSENGNYDYLMYADIDYDHPDVVNEMKKWGVWYANEVGLDGYRLDAVKHIKFSFLKDWVDNARAATGKEMFTVGEYWQNDLGALNNYLAKVNYNQSLFDAPLHYNFYAASTGGGYYDMRNILNNTLVASNPTKAVTLVENHDTQPGQSLESTVQPWFKPLAYAFILTRSGGYPSVFYGDMYGTKGTTTREIPALKSKIEPLLKARKDYAYGTQRDYIDNPDVIGWTREGDSTKAKSGLATVITDGPGGSKRMYVGTSNAGEIWYDLTGNRTDKITIGSDGYATFPVNGGSVSVWVQQ

SEQ ID NO: 35062 - protein, 480 aa, Cytophaga sp.
NGTMMQYFEWYVPNDGQQWNRLRTDAHYLSSVGITAVWTPPAYKGTSQADVGYGPYDLYDLGEFNQKGTVRTKYGTKGELKSAVNTLHSNGIQVYGDVVMNHKAGADYTENVTAVEVNPSNRNQETSGEYNIQAWTGFNFPGRGTTYSNFKWQWFHFDGTDWDQSRSLSRIFKFTGKAWDWEVSSENGNYDYLMYADIDYDHPDVVNEMKKWGVWYANEVGLDGYRLDAVKHIKFSFLKDWVDNARAATGKEMFTVGEYWQNDLGALNNYLAKVNYNQSLFDAPLHYNFYAASTGGGYYDMRNILNNTLVASNPTKAVTLVENHDTQPGQSLESTVQPWFKPLAYAFILTRSGGYPSVFYGDMYGTKGTTTREIPALKSKIEPLLKARKDYAYGTQRDYIDNPDVIGWTREGDSTKAKSGLATVITDGPGGSKRMYVGTSNAGEIWYDLTGNRTDKITIGSDGYATFPVNGGSVSVWVQQ

SEQ ID NO: 35063 - protein, 480 aa, Cytophaga sp.
NGTMMQYFEWYVPNDGQQWNRLRTDAPYLSSVGITAVWTPPAYKGTSQADVGYGPYDLYDLGEFNQKGTVRTKYGTKGELKSAVNTLHSNGIQVYGDVVMNHKAGADYTENVTAVEVNPSNRNQETSGEYNIQAWTGFNFPGRGTTYSNFKWQWFHFDGTDWDRSRSLSRIFKFTGKAWDWEVSSENGNYDYLMYADIDYDHPDVVNEMKKWGVWYANEVGLDGYRLDAVKHIKFSFLKDWVDNARAATGKEMFTVGEYWQNDLGALNNYLAKVNYNQSLFDAPLHYNFYAASTGGGYYDMRNILNNTLVASNPTKAVTLVENHDTQPGQSLESTVQPWFKPLAYAFILTRSGGYPSVFYGDMYGTKGTTTREIPALKSKIEPLLKARKDYAYGTQRDYIDNPDVIGWTREGDSTKAKSGLATVITDGPGGSKRMYVGTSNAGEIWYDLTGNRTDKITIGSDGYATFPVNGGSVSVWVQQ

SEQ ID NO: 35064 - protein, 480 aa, Cytophaga sp.
NGTMMQYFEWYVPNDGQQWNRLRTDAPYLSSVGITAVWTPPAYKGTSQADVGYGPYDLYDLGEFNQKGTVRTKYGTKGELKSAVNTLHSNGIQVYGDVVMNHKAGADYTENVTAVEVNPSNRNQETSGEYNIQAWTGFNFPGRGTTYSNFKWQWFHFDGTDWDQSRSLSRIFKFTGKAWDWEVSSENGNYDYLMYADIDYDHPDVVNEMKKWGEWYANEVGLDGYRLDAVKHIKFSFLKDWVDNARAATGKEMFTVGEYWQNDLGALNNYLAKVNYNQSLFDAPLHYNFYAASTGGGYYDMRNILNNTLVASNPTKAVTLVENHDTQPGQSLESTVQPWFKPLAYAFILTRSGGYPSVFYGDMYGTKGTTTREIPALKSKIEPLLKARKDYAYGTQRDYIDNPDVIGWTREGDSTKAKSGLATVITDGPGGSKRMYVGTSNAGEIWYDLTGNRTDKITIGSDGYATFPVNGGSVSVWVQQ

SEQ ID NO: 35065 - protein, 480 aa, Cytophaga sp.
NGTMMQYFEWYVPNDGQQWNRLRTDAPYLSSVGITAVWTPPAYKGTSQADVGYGPYDLYDLGEFNQKGTVRTKYGTKGELKSAVNTLHSNGIQVYGDVVMNHKAGADYTENVTAVEVNPSNRNQETSGEYNIQAWTGFNFPGRGTTYSNFKWQWFHFDGTDWDQSRSLSRIFKFTGKAWDWEVSSENGNYDYLMYADIDYDHPDVVNEMKKWGVWYANEVGLDGYRLDAVKHIKFSFLKDWVDNARAATGKEMFTVGEYWQNDLGALNNYLAKVNYNQSLFDAPLHYNFYAASTGGGYYDMRNILNNTLVASNPTKAVTLVENHDTQPGQSLESTVQPWFKPLAYAFILTRSGGYPSVFYGDMYGTKGTTTCEIPALKSKIEPLLKARKDYAYGTQRDYIDNPDVIGWTREGDSTKAKSGLATVITDGPGGSKRMYVGTSNAGEIWYDLTGNRTDKITIGSDGYATFPVNGGSVSVWVQQ

SEQ ID NO: 35066 - protein, 480 aa, Cytophaga sp.
NGTMMQYFEWYVPNDGQQWNRLRTDAPYLSSVGITAVWTPPAYKGTSQADVGYGPYDLYDLGEFNQKGTVRTKYGTKGELKSAVNTLHSNGIQVYGDVVMNHKAGADYTENVTAVEVNPSNRNQETSGEYNIQAWTGFNFPGRGTTYSNFKWQWFHFDGTDWDQSRSLSRIFKFTGKAWDWEVSSENGNYDYLMYADIDYDHPDVVNEMKKWGVWYANEVGLDGYRLDAVKHIKFSFLKDWVDNARAATGKEMFTVGEYWQNDLGALNNYLAKVNYNQSLFDAPLHYNFYAASTGGGYYDMRAILNNTLVASNPTKAVTLVENHDTQPGQSLESTVQPWFKPLAYAFILTRSGGYPSVFYGDMYGTKGTTTREIPALKSKIEPLLKARKDYAYGTQRDYIDNPDVIGWTREGDSTKAKSGLATVITDGPGGSKRMYVGTSNAGEIWYDLTGNRTDKITIGSDGYATFPVNGGSVSVWVQQ

SEQ ID NO: 35067 - protein, 480 aa, Cytophaga sp.
NGTMMQYFEWYVPNDGQQWNRLRTDAPYLSSVGITAVWTPPAYKGTSQADVGYGPYDLYDLGEFNQKGTVRTKYGTKGELKSAVNTLHSNGIQVYGDVVMNHKAGADYTENVTAVEVNPSNRNQETSGEYNIQAWTGFNFPGRGTTYSNFKWQWFHFDGTDWDQSRSLSRIFKFTGKAWDWEVSSENGNYDYLMYADIDYDHPDVVNEMKKWGVWYANEVGLDGYRLDAVKHIKFSFLKDWVDNARAATGKEMFTVGEYWQNDLGALNNYLAKVNYNQSLFDAPLHYNFYAASTGGGYYDMRNILNNTLVASNPTKAVTLVENHDTQPGQSLESTVQPWFKPLAYAFILTRSGGYPSVFYGDMYGTKGTTTREIPALKSKIEPLLKARKDYAYGTQRDYIDNPDVIGWTREGDSTNAKSGLATVITDGPGGSKRMYVGTSNAGEIWYDLTGNRTDKITIGSDGYATFPVNGGSVSVWVQQ

SEQ ID NO: 35068 - protein, 480 aa, Cytophaga sp.
NGTMMQYFEWYVPNDGQQWNRLRTDAPYLSSVGITAVWCPPAYKGTSQADVGYGPYDLYDLGEFNQKGTVRTKYGTKGELKSAVNTLHSNGIQVYGDVVMNHKAGADYTENVTAVEVNPSNRNQETSGEYNIQAWTGFNFPGRGTTYSNFKWQWFHFDGTDWDQSRSLSRIFKFTGKAWDWEVSSENGNYDYLMYADIDYDHPDVVNEMKKWGVWYANEVGLDGYRLDAVKHIKFSFLKDWVDNARAATGKEMFTVGEYWQNDLGALNNYLAKVNYNQSLFDAPLHYNFYAASTGGGYYDMRNILNNTLVASNPTKAVTLVENHDTQPGQSLESTVQPWFKPLAYAFILTRSGGYPSVFYGDMYGTKGTTTREIPALKSKIEPLLKARKDYAYGTQRDYIDNPDVIGWTREGDSTKAKSGLATVITDGPGGSKRMYVGTSNAGEIWYDLTGNRTDKITIGSDGYATFPVNGGSVSVWVQQ

SEQ ID NO: 35069 - protein, 480 aa, Cytophaga sp.
NGTMMQYFEWYVPNDGQQWNRLRTDAPYLSSVGITAVWTPPAYKGTSQADVGYGPYDLYDLGEFNQKGTVRTKYGTKGELKSAVNTLHSNGIQVYGDVVMNHKAGADYTENVTAVEVNPSNRNQETSGEYNIQAWTGFNFPGRGTTYSNFKWQWFHFDGTDWDQSRSLSRIFKFTGKAWDWEVSSENGNYDYLMYADIDYDHPDVVNEMKKWGVWYANEVGLDGYRLDAVKHIKFSFLKDWVDNARAATGKEMFTVGEYWQNDLGALNNYLAKVNYNQSLFDAPLHYNFYAASTGGGYYDMRNILNNTLVASNPTKAVTLVENHDTQPGQSLESTVQPWFKPLAYAFILTRSGGYPSVFYGDMYGTKGTTTREIPALKSKIEPLLKARKDYAYGTQRDYIDNPDVIGWTREGDSTKAKSGLATVITDGPGGSKRMYVGTSNAGEIWYDLTGNRTDAITIGSDGYATFPVNGGSVSVWVQQ

SEQ ID NO: 35070 - protein, 480 aa, Cytophaga sp.
NGTMMQYFEWYVPNDGQQWNRLRTDAPYLSSVGITAVWTPPAYKGTSQADVGYGPYDLYDLGEFNQKGTVRTKYGTKGELKSAVNTLHSNGIQVYGDVVMNHKAGADYTENVTAVEVNPSNRNQETSGEYNIQAWTGFTFPGRGTTYSNFKWQWFHFDGTDWDQSRSLSRIFKFTGKAWDWEVSSENGNYDYLMYADIDYDHPDVVNEMKKWGVWYANEVGLDGYRLDAVKHIKFSFLKDWVDNARAATGKEMFTVGEYWQNDLGALNNYLAKVNYNQSLFDAPLHYNFYAASTGGGYYDMRNILNNTLVASNPTKAVTLVENHDTQPGQSLESTVQPWFKPLAYAFILTRSGGYPSVFYGDMYGTKGTTTREIPALKSKIEPLLKARKDYAYGTQRDYIDNPDVIGWTREGDSTKAKSGLATVITDGPGGSKRMYVGTSNAGEIWYDLTGNRTDKITIGSDGYATFPVNGGSVSVWVQQ

SEQ ID NO: 35071 - protein, 480 aa, Cytophaga sp.
NGTMMQYFEWYVPNDGQQWNRLRTDAPYLSSVGITAVWTPPAYKGTSQADVGYGPYDLYDLGEFNQKGTVRTKYGTKGELKSAVNTLHSNGIQVYGDVVMNHKAGADYTENVTAVEVNPSNRNQETSGEYNIQAWTGFNFPGRGTTYSNFKWQWFHFDGTDWDQSRSLSRIFKFTGKAWDWEVSSENGNYDYLMYADIDYDHPDVVNEMKKWGVWYANEVGLDGYRLDAVKHIKFSFLKDWVDNSRAATGKEMFTVGEYWQNDLGALNNYLAKVNYNQSLFDAPLHYNFYAASTGGGYYDMRNILNNTLVASNPTKAVTLVENHDTQPGQSLESTVQPWFKPLAYAFILTRSGGYPSVFYGDMYGTKGTTTREIPALKSKIEPLLKARKDYAYGTQRDYIDNPDVIGWTREGDSTKAKSGLATVITDGPGGSKRMYVGTSNAGEIWYDLTGNRTDKITIGSDGYATFPVNGGSVSVWVQQ

SEQ ID NO: 35072 - protein, 480 aa, Cytophaga sp.
NGTMMQYFEWYVPNDGQQWNRLRTDAPYLSSVGITAVWTPPAYKGTSQADVGYGPYDLYDLGEFNQKGTVRTKYGTKGELKSAVNTLHSNGIQVYGDVVMNHKAGADYTENVTAVEVNPSNRNQETSGEYNIQAWTGFNFPGRGTTYSNFKWQWFHFDGTDWDQSRSLSRIFKFTGKAWDWEVSSENGNYDYLMYADIDYDHPDVVNEMKKWGVWYANEVGLDGYRLDAVKHIKFSFLKDWVDNARAATGKEMFTVGEYWQNDLGALNNYLAKVNYNQSLFDAPLHYNFYAASTGGGYYDMRNILNNTLVASNPTKAVTLVENHDTQPGQSLESTVQPWFKPLAYAFILTRSGGYPSVFYGDMYGTKGTTTREIPALKSKIEPLLKARKDYAYGNQRDYIDNPDVIGWTREGDSTKAKSGLATVITDGPGGSKRMYVGTSNAGEIWYDLTGNRTDKITIGSDGYATFPVNGGSVSVWVQQ

SEQ ID NO: 35073 - protein, 480 aa, Cytophaga sp.
NGTMMQYFEWYVPNDGQQWNRLRTDAPYLSSVGITAVWTPPAYKGTSQADVGYGPYDLYDLGEFNQKGTVRTKYGTKGELKSAVNTLHSNGIQVYGDVVMNHKAGADCTENVTAVEVNPSNRNQETSGEYNIQAWTGFNFPGRGTTYSNFKWQWFHFDGTDWDQSRSLSRIFKFTGKAWDWEVSSENGNYDYLMYADIDYDHPDVVNEMKKWGVWYANEVGLDGYRLDAVKHIKFSFLKDWVDNARAATGKEMFTVGEYWQNDLGALNNYLAKVNYNQSLFDAPLHYNFYAASTGGGYYDMRNILNNTLVASNPTKAVTLVENHDTQPGQSLESTVQPWFKPLAYAFILTRSGGYPSVFYGDMYGTKGTTTREIPALKSKIEPLLKARKDYAYGTQRDYIDNPDVIGWTREGDSTKAKSGLATVITDGPGGSKRMYVGTSNAGEIWYDLTGNRTDKITIGSDGYATFPVNGGSVSVWVQQ

SEQ ID NO: 35074 - protein, 480 aa, Cytophaga sp.
NGTMMQYFEWYVPNDGQQWNRLRTDAPYLSSVGITAVWTPPAYKGTSQADVGYGPYDLYDLGEFNQKGTVRTKYGTKGELKSAVNTLHSNGIQVYGDVVMNHKAGADYTENVTAVEVNPSNRNQETSGEYNIQAWTGFNFPGRGTTYSNFKWQWFHFDGTDWDQSRSLSRIFKFTGKAWDWEVSSENGNYDYLMYADIDYDHPDVVNEMKKWGVWYANEVGLDGYRLDAVKHIKFSFLKDWVDNARAATGKEMFTVGEYWQNDLGALNNYLAKVNYNQSLFDAPLHYNFYAASTGGGYYDMRNILNNTLVASNPQKAVTLVENHDTQPGQSLESTVQPWFKPLAYAFILTRSGGYPSVFYGDMYGTKGTTTREIPALKSKIEPLLKARKDYAYGTQRDYIDNPDVIGWTREGDSTKAKSGLATVITDGPGGSKRMYVGTSNAGEIWYDLTGNRTDKITIGSDGYATFPVNGGSVSVWVQQ

SEQ ID NO: 35075 - protein, 480 aa, Cytophaga sp.
NGTMMQYFEWYVPNDGQQWNRLRTDAPYLSSVGITAVWTPPAYKGTSQADVGYGPYDLYDLGEFNQKGTVRTKYGTKGELKSAVNTLHSNGIQVYGDVVMNHKAGADYTENVTAVEVNPSNRNQETSGEYNIQAWTGFNFPGRGTTYSNFKWQWHHFDGTDWDQSRSLSRIFKFTGKAWDWEVSSENGNYDYLMYADIDYDHPDVVNEMKKWGVWYANEVGLDGYRLDAVKHIKFSFLKDWVDNARAATGKEMFTVGEYWQNDLGALNNYLAKVNYNQSLFDAPLHYNFYAASTGGGYYDMRNILNNTLVASNPTKAVTLVENHDTQPGQSLESTVQPWFKPLAYAFILTRSGGYPSVFYGDMYGTKGTTTREIPALKSKIEPLLKARKDYAYGTQRDYIDNPDVIGWTREGDSTKAKSGLATVITDGPGGSKRMYVGTSNAGEIWYDLTGNRTDKITIGSDGYATFPVNGGSVSVWVQQ

SEQ ID NO: 35076 - protein, 480 aa, Cytophaga sp.
NGTMMQYFEWYVPNDGQQWNRLRTDAPYLSSVGITAVWTPPAYKGTSQADVGYGPYDLYDLGEFNQKGTVRTKYGTKGELKSAVNTLHSNGIQVYGDVVMNHKAGADYTENVTAVEVNPSNRNQETSGEYNIQAWTGFNFPGRGTTYSNFKWQWFHFDGTDWDQSRSLSRIFKFTGKAWDWEVSSENGNYDYLMYADIDYDHPDVVNEMKKWGVWYANEVGLDGYRLDAVKHIKFSFLKDWVDNARAATGKEMFTVGEYWQNDLGALNNYLAKVNYNQSLFDAPLHYNFYAASTGGGYYDMRNILNNTLVASNPTKAVTLVENHDTQPGQSLESTVQPWFKPLAYAFILTRSGGYPSVFYGDMYGTKGTTTREIPALKSKIEPLLKARKDYAYGMQRDYIDNPDVIGWTREGDSTKAKSGLATVITDGPGGSKRMYVGTSNAGEIWYDLTGNRTDKITIGSDGYATFPVNGGSVSVWVQQ

SEQ ID NO: 35077 - protein, 480 aa, Cytophaga sp.
NGTMMQYFEWYVPNDGQQWNRLRTDAPYLSSVGITAVWTPPAYKGTSQADVGYGPYDLYDLGEFNQKGTVRTKYGTKGELKSAVNTLHSNGIQVYGDVVMNHKAGADYTENVTAVEVNPSNRNQETSGEYNIQAWTGFNFPGRGTTYSNFKWQWFHFDGTDWDQSRSLSRIFKFTGKAWDWEVSSENGNYDYLMYADIDYDHPDVVNEMKKWGVWYANEVGLDGYRLDAVKHIKFSFLKDWVDNARAATGKEMFTVGEYWQNDLGALNNYLAKVNYNQSLFDAPLHYNFYAASTGGGYYDMRNILENTLVASNPTKAVTLVENHDTQPGQSLESTVQPWFKPLAYAFILTRSGGYPSVFYGDMYGTKGTTTREIPALKSKIEPLLKARKDYAYGTQRDYIDNPDVIGWTREGDSTKAKSGLATVITDGPGGSKRMYVGTSNAGEIWYDLTGNRTDKITIGSDGYATFPVNGGSVSVWVQQ

SEQ ID NO: 35078 - protein, 480 aa, Cytophaga sp.
NGTMMQYFEWYVPNDGQQWNRLRTDAPYLSSVGITAVWTPPAYKGTSQADVGYGPYDLYDLGEFNQKGTVRTKYGTKGELKSAVNTLHSNGIQVYGDVVMNHKAGADQTENVTAVEVNPSNRNQETSGEYNIQAWTGFNFPGRGTTYSNFKWQWFHFDGTDWDQSRSLSRIFKFTGKAWDWEVSSENGNYDYLMYADIDYDHPDVVNEMKKWGVWYANEVGLDGYRLDAVKHIKFSFLKDWVDNARAATGKEMFTVGEYWQNDLGALNNYLAKVNYNQSLFDAPLHYNFYAASTGGGYYDMRNILNNTLVASNPTKAVTLVENHDTQPGQSLESTVQPWFKPLAYAFILTRSGGYPSVFYGDMYGTKGTTTREIPALKSKIEPLLKARKDYAYGTQRDYIDNPDVIGWTREGDSTKAKSGLATVITDGPGGSKRMYVGTSNAGEIWYDLTGNRTDKITIGSDGYATFPVNGGSVSVWVQQ

SEQ ID NO: 35079 - protein, 480 aa, Cytophaga sp.
NGTMMQYFEWYVPNDGQQWNRLRTDAPYLSSVGITAVWTPPAYKGTSQADVGYGPYDLYDLGEFNQKGTVRTKYGTKGELKSAVNTLHSNGIQVYGDVVMNHKAGADYTENVTAVEVNPSNRNQETSGEYNIQAWTGFNFPGRGTTYSNFKWQWFHFDGTDWDQSRSLSRIFKFTGKAWDWEVSSENGNYDYLMYADIDYDHPDVVHEMKKWGVWYANEVGLDGYRLDAVKHIKFSFLKDWVDNARAATGKEMFTVGEYWQNDLGALNNYLAKVNYNQSLFDAPLHYNFYAASTGGGYYDMRNILNNTLVASNPTKAVTLVENHDTQPGQSLESTVQPWFKPLAYAFILTRSGGYPSVFYGDMYGTKGTTTREIPALKSKIEPLLKARKDYAYGTQRDYIDNPDVIGWTREGDSTKAKSGLATVITDGPGGSKRMYVGTSNAGEIWYDLTGNRTDKITIGSDGYATFPVNGGSVSVWVQQ

SEQ ID NO: 35080 - protein, 480 aa, Cytophaga sp.
NGTMMQYFEWYVPNDGQQWNRLRTDAPYLSSVGITAVWTPPAYKGTSQADVGYGPYDLYDLGEFNQKGTVRTKYGTKGELKSAVNTLHSNGIQVYGDVVMNHKAGADYTENVTAVEVNPSNRNQETSGEYNIQAWTGFNFPGRGTTYSNFKWQWDHFDGTDWDQSRSLSRIFKFTGKAWDWEVSSENGNYDYLMYADIDYDHPDVVNEMKKWGVWYANEVGLDGYRLDAVKHIKFSFLKDWVDNARAATGKEMFTVGEYWQNDLGALNNYLAKVNYNQSLFDAPLHYNFYAASTGGGYYDMRNILNNTLVASNPTKAVTLVENHDTQPGQSLESTVQPWFKPLAYAFILTRSGGYPSVFYGDMYGTKGTTTREIPALKSKIEPLLKARKDYAYGTQRDYIDNPDVIGWTREGDSTKAKSGLATVITDGPGGSKRMYVGTSNAGEIWYDLTGNRTDKITIGSDGYATFPVNGGSVSVWVQQ

SEQ ID NO: 35081 - protein, 480 aa, Cytophaga sp.
NGTMMQYFEWYVPNDGQQWNRLRTDAPYLSSVGITAVWTPPAYKGTSQADVGYGPYDLYDLGEFNQKGTVRTKYGTKGELKSAVNTLHSNGIQVYGDVVMNHKAGADYTENVTAVEVNPSNRNQETSGEYNIQAWTGFNFPGRGTTYSNFKWQWFHFDGTDWDQSRSLSRIFKFTGKAWDWEVSSENGNYDYLMYADIDYDHPDVVNEMKKWGVWYANEVGLDGYRLDALKHIKFSFLKDWVDNARAATGKEMFTVGEYWQNDLGALNNYLAKVNYNQSLFDAPLHYNFYAASTGGGYYDMRNILNNTLVASNPTKAVTLVENHDTQPGQSLESTVQPWFKPLAYAFILTRSGGYPSVFYGDMYGTKGTTTREIPALKSKIEPLLKARKDYAYGTQRDYIDNPDVIGWTREGDSTKAKSGLATVITDGPGGSKRMYVGTSNAGEIWYDLTGNRTDKITIGSDGYATFPVNGGSVSVWVQQ

SEQ ID NO: 35082 - protein, 480 aa, Cytophaga sp.
NGTMMQYFEWYVPNDGQQWNRLRTDAPYLSSVGITAVWTPPAYKGTSQADVGYGPYDLYDLGEFNQKGTVRTKYGTKGELKSAVNTLHSNGIQVYGDVVMNHKAGADYTENVTAVEVNPSNRNQETSGEYNIQAWTGFNFPGRGTTYSNFKWQWFHFDGTDWDQSRSLSRIFKFTGKAWDWEVSSENGNYDYLMYADIDYDHPDVVNEMKKWGVWYANEVGLDGYRLDAVKHIKFSFLKDWVDNARAATGKEMFTVGEYWQNDLGALNNYLAKVNYNQSLFDAPLHYNFYAASTGGGYYDMRNILNNTLVAMNPTKAVTLVENHDTQPGQSLESTVQPWFKPLAYAFILTRSGGYPSVFYGDMYGTKGTTTREIPALKSKIEPLLKARKDYAYGTQRDYIDNPDVIGWTREGDSTKAKSGLATVITDGPGGSKRMYVGTSNAGEIWYDLTGNRTDKITIGSDGYATFPVNGGSVSVWVQQ

SEQ ID NO: 35083 - protein, 480 aa, Cytophaga sp.
NGTMMQYFEWYVPNDGQQWNRLRTDAPYLSSVGITAVWTPPAYKGTSQADVGYGPYDLYDLGEFSQKGTVRTKYGTKGELKSAVNTLHSNGIQVYGDVVMNHKAGADYTENVTAVEVNPSNRNQETSGEYNIQAWTGFNFPGRGTTYSNFKWQWFHFDGTDWDQSRSLSRIFKFTGKAWDWEVSSENGNYDYLMYADIDYDHPDVVNEMKKWGVWYANEVGLDGYRLDAVKHIKFSFLKDWVDNARAATGKEMFTVGEYWQNDLGALNNYLAKVNYNQSLFDAPLHYNFYAASTGGGYYDMRNILNNTLVASNPTKAVTLVENHDTQPGQSLESTVQPWFKPLAYAFILTRSGGYPSVFYGDMYGTKGTTTREIPALKSKIEPLLKARKDYAYGTQRDYIDNPDVIGWTREGDSTKAKSGLATVITDGPGGSKRMYVGTSNAGEIWYDLTGNRTDKITIGSDGYATFPVNGGSVSVWVQQ

SEQ ID NO: 35084 - protein, 480 aa, Cytophaga sp.
NGTMMQYFEWYVPNDGQQWNRLRTDAPYLSSVGITAVWTPPAYKGTSQADVGYGPYDLYDLGEFNQKGTVRTKYGTKGELKSAVNTLHSNGIQVYGDVVMNHKAGADYTENVTAVEVNPGNRNQETSGEYNIQAWTGFNFPGRGTTYSNFKWQWFHFDGTDWDQSRSLSRIFKFTGKAWDWEVSSENGNYDYLMYADIDYDHPDVVNEMKKWGVWYANEVGLDGYRLDAVKHIKFSFLKDWVDNARAATGKEMFTVGEYWQNDLGALNNYLAKVNYNQSLFDAPLHYNFYAASTGGGYYDMRNILNNTLVASNPTKAVTLVENHDTQPGQSLESTVQPWFKPLAYAFILTRSGGYPSVFYGDMYGTKGTTTREIPALKSKIEPLLKARKDYAYGTQRDYIDNPDVIGWTREGDSTKAKSGLATVITDGPGGSKRMYVGTSNAGEIWYDLTGNRTDKITIGSDGYATFPVNGGSVSVWVQQ

SEQ ID NO: 35085 - protein, 480 aa, Cytophaga sp.
NGTMMQYFEWYVPNDGQQWNRLRTDAPYLSSVGITAVWTPPAYKGTSQADVGYGPYDLYDLGEFNQKGTVRTKYGTKGELKSAVNTLHSNGIQVYGDVVMNHKAGADYTENVTAVEVNPSNRNQETSGEYDIQAWTGFNFPGRGTTYSNFKWQWFHFDGTDWDQSRSLSRIFKFTGKAWDWEVSSENGNYDYLMYADIDYDHPDVVNEMKKWGVWYANEVGLDGYRLDAVKHIKFSFLKDWVDNARAATGKEMFTVGEYWQNDLGALNNYLAKVNYNQSLFDAPLHYNFYAASTGGGYYDMRNILNNTLVASNPTKAVTLVENHDTQPGQSLESTVQPWFKPLAYAFILTRSGGYPSVFYGDMYGTKGTTTREIPALKSKIEPLLKARKDYAYGTQRDYIDNPDVIGWTREGDSTKAKSGLATVITDGPGGSKRMYVGTSNAGEIWYDLTGNRTDKITIGSDGYATFPVNGGSVSVWVQQ

SEQ ID NO: 35086 - protein, 480 aa, Cytophaga sp.
NGTMMQYFEWYVPNDGQQWNRLRTDAPYLSSVGITAVWTPPAYKGTSQADVGYGPYDLYDLGEFNQKGTVRTKYGTKGELKSAVNTLHSNGIQVYGDVVINHKAGADYTENVTAVEVNPSNRNQETSGEYNIQAWTGFNFPGRGTTYSNFKWQWFHFDGTDWDQSRSLSRIFKFTGKAWDWEVSSENGNYDYLMYADIDYDHPDVVNEMKKWGVWYANEVGLDGYRLDAVKHIKFSFLKDWVDNARAATGKEMFTVGEYWQNDLGALNNYLAKVNYNQSLFDAPLHYNFYAASTGGGYYDMRNILNNTLVASNPTKAVTLVENHDTQPGQSLESTVQPWFKPLAYAFILTRSGGYPSVFYGDMYGTKGTTTREIPALKSKIEPLLKARKDYAYGTQRDYIDNPDVIGWTREGDSTKAKSGLATVITDGPGGSKRMYVGTSNAGEIWYDLTGNRTDKITIGSDGYATFPVNGGSVSVWVQQ

SEQ ID NO: 35087 - protein, 480 aa, Cytophaga sp.
NGTMMQYFEWYVPNDGQQWNRLRTDAPYLSSNGITAVWTPPAYKGTSQADVGYGPYDLYDLGEFNQKGTVRTKYGTKGELKSAVNTLHSNGIQVYGDVVMNHKAGADYTENVTAVEVNPSNRNQETSGEYNIQAWTGFNFPGRGTTYSNFKWQWFHFDGTDWDQSRSLSRIFKFTGKAWDWEVSSENGNYDYLMYADIDYDHPDVVNEMKKWGVWYANEVGLDGYRLDAVKHIKFSFLKDWVDNARAATGKEMFTVGEYWQNDLGALNNYLAKVNYNQSLFDAPLHYNFYAASTGGGYYDMRNILNNTLVASNPTKAVTLVENHDTQPGQSLESTVQPWFKPLAYAFILTRSGGYPSVFYGDMYGTKGTTTREIPALKSKIEPLLKARKDYAYGTQRDYIDNPDVIGWTREGDSTKAKSGLATVITDGPGGSKRMYVGTSNAGEIWYDLTGNRTDKITIGSDGYATFPVNGGSVSVWVQQ

SEQ ID NO: 35088 - protein, 480 aa, Cytophaga sp.
NGTMMQYFEWYVPNDGQQWNRLRTDAPYLSSVGITAVWTPPAYKGTSQADVGYGPYDLYDLGEFNQKGTVRTKYGTKGELKSAVNTLHSNGIQVYGDVVMNHKAGADYTENVTAVEVNPSNRNQETSGEYNIQAWTGFNFPGRGTTYSNFKWQWFHFDGTDWDQSRSLSRIFKFTGKAWDWEVSSENGNYDYLMYADIDYDHPDVVNEMKKWGVWYANEVGLDGYRLDAVKHIKFSFLKDWVDNARAATGKEMFTVGEYWQNDLGALNNYLAKVNYNQSLFDAPLHYNFYAASTGGGYYDMRNILNNTLVASNPTKAVTLVENHDTQPGQSLESTVQPWFKPLAYAFILTRSGGYPSVFYGDMYGTKGTTTREIPALKSKIEPLLKARKDYAYGTQRDYIDNPDVIGWTREGDSTKAKSGLATVITDGPGGSKRMYVGTSNAGEIWYDLTGNRTDKITIGSDGLATFPVNGGSVSVWVQQ

SEQ ID NO: 35089 - protein, 480 aa, Cytophaga sp.
NGTMMQYFEWYVPNDGQQWNRLRTDAPYLSSVGITAVWTPPAYKGTSQADVGYGPYDLYDLGEFNQKGTVRTKYGTKGELKSAVNTLHSNGIQVYGDVVMNHKAGADYTENVTAVEVNPSNRNQETSGEYNIQAWTGFNFPGRGTTYSNFKWQWFHFDGTDWDQSRSLSRIFKFTGKAWDWEVSSENGNYDYLMYADIDYDHPDVVNEMKKWGVWYANEVGLDGYRLDAVKHIKFSFLKDWVDNARAATGKEMFTVGEYWQNDLGALNNYLAKVNYNQSLFDAPLHYNFYAASTGGGYYDMRNILNNTLVASNPTKAVTLVENHDTQPGQSLESTVQPWFKPLAYAFILTRSGGYPSVFYGDMYGTKGTTTREIPALKSKIEPLLKARKDYAYGTQRDYIDNPDVIGWTREGDSTCAKSGLATVITDGPGGSKRMYVGTSNAGEIWYDLTGNRTDKITIGSDGYATFPVNGGSVSVWVQQ

SEQ ID NO: 35090 - protein, 480 aa, Cytophaga sp.
NGTMMQYFEWYVPNDGQQWNRLRSDAPYLSSVGITAVWTPPAYKGTSQADVGYGPYDLYDLGEFNQKGTVRTKYGTKGELKSAVNTLHSNGIQVYGDVVMNHKAGADYTENVTAVEVNPSNRNQETSGEYNIQAWTGFNFPGRGTTYSNFKWQWFHFDGTDWDQSRSLSRIFKFTGKAWDWEVSSENGNYDYLMYADIDYDHPDVVNEMKKWGVWYANEVGLDGYRLDAVKHIKFSFLKDWVDNARAATGKEMFTVGEYWQNDLGALNNYLAKVNYNQSLFDAPLHYNFYAASTGGGYYDMRNILNNTLVASNPTKAVTLVENHDTQPGQSLESTVQPWFKPLAYAFILTRSGGYPSVFYGDMYGTKGTTTREIPALKSKIEPLLKARKDYAYGTQRDYIDNPDVIGWTREGDSTKAKSGLATVITDGPGGSKRMYVGTSNAGEIWYDLTGNRTDKITIGSDGYATFPVNGGSVSVWVQQ

SEQ ID NO: 35091 - protein, 480 aa, Cytophaga sp.
NGTMMQYFEWYVPNDGQQWNRLRTDAPYLSSVGITAVWTPPAYKGTSQADVGYGPYDLYDLGEFNQKGTVRTKYGTKGELKSAVNTLHSNGIQVYGDVVMNHKAGADYTENVTAVEVNPSNRNQETSGEYNIQAWTGFNFPGRGTTYSNFKWQWFHFDGTDWDDSRSLSRIFKFTGKAWDWEVSSENGNYDYLMYADIDYDHPDVVNEMKKWGVWYANEVGLDGYRLDAVKHIKFSFLKDWVDNARAATGKEMFTVGEYWQNDLGALNNYLAKVNYNQSLFDAPLHYNFYAASTGGGYYDMRNILNNTLVASNPTKAVTLVENHDTQPGQSLESTVQPWFKPLAYAFILTRSGGYPSVFYGDMYGTKGTTTREIPALKSKIEPLLKARKDYAYGTQRDYIDNPDVIGWTREGDSTKAKSGLATVITDGPGGSKRMYVGTSNAGEIWYDLTGNRTDKITIGSDGYATFPVNGGSVSVWVQQ

SEQ ID NO: 35092 - protein, 480 aa, Cytophaga sp.
NGTMMQYFEWYVPNDGQQWNRLRTDAPYLSSVGITAVWTPPAYKGTSQADVGYGPYDLYDLGEFNQKGTVRTKYGTKGELKMAVNTLHSNGIQVYGDVVMNHKAGADYTENVTAVEVNPSNRNQETSGEYNIQAWTGFNFPGRGTTYSNFKWQWFHFDGTDWDQSRSLSRIFKFTGKAWDWEVSSENGNYDYLMYADIDYDHPDVVNEMKKWGVWYANEVGLDGYRLDAVKHIKFSFLKDWVDNARAATGKEMFTVGEYWQNDLGALNNYLAKVNYNQSLFDAPLHYNFYAASTGGGYYDMRNILNNTLVASNPTKAVTLVENHDTQPGQSLESTVQPWFKPLAYAFILTRSGGYPSVFYGDMYGTKGTTTREIPALKSKIEPLLKARKDYAYGTQRDYIDNPDVIGWTREGDSTKAKSGLATVITDGPGGSKRMYVGTSNAGEIWYDLTGNRTDKITIGSDGYATFPVNGGSVSVWVQQ

SEQ ID NO: 35093 - protein, 480 aa, Cytophaga sp.
NGTMMQYFEWYVPNDGQQWNRLRTDAPYLSSVGITAVWTPPAYKGTSQADVGYGPYDLYDLGEFNQKGTVRTKYGTKGELKSAVNTLHSNGIQVYGDVVMNHKAGADYTENVTAVEVNPSNRNQETSGEYNIQAWTGFNFPGRGTTYSNFKWQWFHFDGTDWDQSRSLSRIFKFTGKAWDWEVSSENGNYDYLMYADIDYDHPDVVNEMKKWGVWYANEVGLDGYRLDAVKHIKFSFLKDWVDNARAATGKEMFTVGEYWQNDLGALNNYLAKVNYNQSLFDAPLHYNFYAASTGGGYYDMRNILNNTLVASNPTKAVTLVENHDTQPGQSLESTVQPWFKPLAYAFILTRSEGYPSVFYGDMYGTKGTTTREIPALKSKIEPLLKARKDYAYGTQRDYIDNPDVIGWTREGDSTKAKSGLATVITDGPGGSKRMYVGTSNAGEIWYDLTGNRTDKITIGSDGYATFPVNGGSVSVWVQQ

SEQ ID NO: 35094 - protein, 480 aa, Cytophaga sp.
NGTMMQYFEWYVPNDGQQWNRLRTDAPYLSSVGITAVWTPPAYKGTSQADVGYGPYDLYDLGEFNQKGTVRTKYGTKGELKHAVNTLHSNGIQVYGDVVMNHKAGADYTENVTAVEVNPSNRNQETSGEYNIQAWTGFNFPGRGTTYSNFKWQWFHFDGTDWDQSRSLSRIFKFTGKAWDWEVSSENGNYDYLMYADIDYDHPDVVNEMKKWGVWYANEVGLDGYRLDAVKHIKFSFLKDWVDNARAATGKEMFTVGEYWQNDLGALNNYLAKVNYNQSLFDAPLHYNFYAASTGGGYYDMRNILNNTLVASNPTKAVTLVENHDTQPGQSLESTVQPWFKPLAYAFILTRSGGYPSVFYGDMYGTKGTTTREIPALKSKIEPLLKARKDYAYGTQRDYIDNPDVIGWTREGDSTKAKSGLATVITDGPGGSKRMYVGTSNAGEIWYDLTGNRTDKITIGSDGYATFPVNGGSVSVWVQQ

SEQ ID NO: 35095 - protein, 480 aa, Cytophaga sp.
NGTMMQYFEWYVPNDGQQWNRLRTDAPYLSSVGITAVWTPPAYKGTSQADVGYGPYDLYDLGEFNQKGTVRTKYGTKGELKSAVNTLHSNGIQVYGDVVMNHKAGADYTENVTAVEVNPSNRNQETSGEYNIQAWTGFNFPGRGTTYSNFKWQWFHFDGTDWDQSRSLSRIFKFTGKAWDWEVSSENGNYDYLMYADIDYDHPDVVNEMKKWGVWYANEVGLDGYRLDAVKHIKFSFLKDWVDNARAATGKEMFTVGEYWQNDLGALNNYLAKVNYNQSLFDAPLHYNFYAASTGGGYYDMRNILNNTLVASNPTKAVTLVENHDTQPGQSLESTVQPWFKPLAYAFILTRSGGYPSVFYGDMYGTKGTTTREIPALKSKIEPLLKARKDYAYGTQRDYIDNPDVIGWTREGDSTKAKSGLATVITDGPGGSKRMYVGTSNAGEIWYDVTGNRTDKITIGSDGYATFPVNGGSVSVWVQQ

SEQ ID NO: 35096 - protein, 480 aa, Cytophaga sp.
NGTMMQYFEWYVPNDGQQWNRLRTDAPYLSSVGITAVWTPPAYKGTSQADVGYGPYDLYDLGEFNQKGTVRTKYGTKGELKSAVNTLHSNGIQVYGDVVMNHKAGADYTENVTAVEVNPSNRNQETSGEYNIQAWTGFNFPGRGTTYSNFKWQWFHFDGTDWDQSRSLSRIFKFTGKAWDWEVSSENGNYDYLMYADIDYDHPDVVNEMKKWGVWYANEVGLDGYRLDAVKHIKFSFLKDWVDNARAATGKEMFTVGEYWQNDLGALNNYLAKVNYNQSLFDAPLHYNFYAASTGGGYYDMRNILNNTLVASNPTKAVTLVENHDTQPGQSLESTVQPWFKPLAYAFILTRSGGYPSVFYGDMYGTKGTTQREIPALKSKIEPLLKARKDYAYGTQRDYIDNPDVIGWTREGDSTKAKSGLATVITDGPGGSKRMYVGTSNAGEIWYDLTGNRTDKITIGSDGYATFPVNGGSVSVWVQQ

SEQ ID NO: 35097 - protein, 480 aa, Cytophaga sp.
NGTMMQYFEWYVPNDGQQWNRLRTDAPYLSSVGITAVWTPPAYKGTSQADVGYGPYDLYDLGEFNQKGTVRTKYGTKGELKSAVNTLHSNGIQVYGDVVMNHKAGADYTENVTAVEVNPSNRNQETSGEYNIQAWTGFNFPGRGTTYSNFKWQWFHFDGTDWDQSRSLSRIFKFTGKAWDWEVSSENGNYDYLMYADIDYDHPDVVNEMKKWGVWYANEVKLDGYRLDAVKHIKFSFLKDWVDNARAATGKEMFTVGEYWQNDLGALNNYLAKVNYNQSLFDAPLHYNFYAASTGGGYYDMRNILNNTLVASNPTKAVTLVENHDTQPGQSLESTVQPWFKPLAYAFILTRSGGYPSVFYGDMYGTKGTTTREIPALKSKIEPLLKARKDYAYGTQRDYIDNPDVIGWTREGDSTKAKSGLATVITDGPGGSKRMYVGTSNAGEIWYDLTGNRTDKITIGSDGYATFPVNGGSVSVWVQQ

SEQ ID NO: 35098 - protein, 480 aa, Cytophaga sp.
NGTMMQYFEWYVPNDGQQWNRLRTDAPYLSSVGITAVWTPPAYKGTSQADVGYGPYDLYDLGEFNQKGTVRTKYGTKGELKSAVNTLHSNGIQVYGDVVMNHKAGADYTENVTAVEVNPSNRNQETSGEYNIQAWTGFNFPGRGTTYSNFKWQWFHFDGTDWDQSRSLSRIFKFTGKAWDWEVSSENGNYDYLMYADIDYDHPDVVNEMKKWGVWYANEVGLDGYRLDAVKHIKFSFLKDWVDNARAATGKEMFTVGEYWQNDLGALNNYLAKVNYNQSLFDAPLHYNFYAASTGGGIYDMRNILNNTLVASNPTKAVTLVENHDTQPGQSLESTVQPWFKPLAYAFILTRSGGYPSVFYGDMYGTKGTTTREIPALKSKIEPLLKARKDYAYGTQRDYIDNPDVIGWTREGDSTKAKSGLATVITDGPGGSKRMYVGTSNAGEIWYDLTGNRTDKITIGSDGYATFPVNGGSVSVWVQQ

SEQ ID NO: 35099 - protein, 480 aa, Cytophaga sp.
NGTMMQYFEWYVPNDGQQWNRLRTDAPYLSSVGITAVWTPPAYKGTSQADVGYGPYDLYDLGEFNQKGTVRTKYGTKGELKSAVNTLHSNGIQVYGDVVMNHKAGADYTENVTAVEVNPSNRNQETSGEYNIQAWTGFNFPGRGTTYSNFKWQWFHFDGTDWDQSRSLSRIFKFTGKAWDWEVSSENGNYDYLMYADIDYDHPDVVNEMKKWGVWYANEVGLDGYRLDAVKHIKFSFLKDWVDNARAATGKEMFTVGEYWQNDLGALNNYLAKVKYNQSLFDAPLHYNFYAASTGGGYYDMRNILNNTLVASNPTKAVTLVENHDTQPGQSLESTVQPWFKPLAYAFILTRSGGYPSVFYGDMYGTKGTTTREIPALKSKIEPLLKARKDYAYGTQRDYIDNPDVIGWTREGDSTKAKSGLATVITDGPGGSKRMYVGTSNAGEIWYDLTGNRTDKITIGSDGYATFPVNGGSVSVWVQQ

SEQ ID NO: 35100 - protein, 480 aa, Cytophaga sp.
NGTMMQYFEWYVPNDGQQWNRLRTDAPYLSSVGITAVWTPPAYKGTSQADVGYGPYDLYDLGEFNQKGTVRTKYGTKGELKSAVNTLHSNGIQVYGDVVMNHKAGADYTENVTAVEVNPENRNQETSGEYNIQAWTGFNFPGRGTTYSNFKWQWFHFDGTDWDQSRSLSRIFKFTGKAWDWEVSSENGNYDYLMYADIDYDHPDVVNEMKKWGVWYANEVGLDGYRLDAVKHIKFSFLKDWVDNARAATGKEMFTVGEYWQNDLGALNNYLAKVNYNQSLFDAPLHYNFYAASTGGGYYDMRNILNNTLVASNPTKAVTLVENHDTQPGQSLESTVQPWFKPLAYAFILTRSGGYPSVFYGDMYGTKGTTTREIPALKSKIEPLLKARKDYAYGTQRDYIDNPDVIGWTREGDSTKAKSGLATVITDGPGGSKRMYVGTSNAGEIWYDLTGNRTDKITIGSDGYATFPVNGGSVSVWVQQ

SEQ ID NO: 35101 - protein, 480 aa, Cytophaga sp.
NGTMMQYFEWYVPNDGQQWNRLRTDAPYLSSVGITAVWTPPAYKGTSQADLGYGPYDLYDLGEFNQKGTVRTKYGTKGELKSAVNTLHSNGIQVYGDVVMNHKAGADYTENVTAVEVNPSNRNQETSGEYNIQAWTGFNFPGRGTTYSNFKWQWFHFDGTDWDQSRSLSRIFKFTGKAWDWEVSSENGNYDYLMYADIDYDHPDVVNEMKKWGVWYANEVGLDGYRLDAVKHIKFSFLKDWVDNARAATGKEMFTVGEYWQNDLGALNNYLAKVNYNQSLFDAPLHYNFYAASTGGGYYDMRNILNNTLVASNPTKAVTLVENHDTQPGQSLESTVQPWFKPLAYAFILTRSGGYPSVFYGDMYGTKGTTTREIPALKSKIEPLLKARKDYAYGTQRDYIDNPDVIGWTREGDSTKAKSGLATVITDGPGGSKRMYVGTSNAGEIWYDLTGNRTDKITIGSDGYATFPVNGGSVSVWVQQ

SEQ ID NO: 35102 - protein, 480 aa, Cytophaga sp.
NGTMMQYFEWYVPNDGQQWNRLRTDAPYLSSVGITAVWTPPAYKGTSQADVGYGPYDLYDLGEFNQKGTVRTKYGTKGELKSAVNTLHSNGIQVYGDVVMNHKAGADYTENVTAVEVNPSNRNQETSGEYNIQAWTGFNFPGRGTTYSNFKWQWFHFDGTDWDQSRSLSRIFKFTGKAWDWEVSSENGNYDYLMYADIDYDHPDVVNEMKKWGVWYANEVGLDGYRLDAVKHIKFSFLKDWVDNARAATGKEMFTVGEYWQNDLGALNNYLAKVNYNQSLFDAPLHYNFYAASTGGGYYDMRNILNNTLVASNPRKAVTLVENHDTQPGQSLESTVQPWFKPLAYAFILTRSGGYPSVFYGDMYGTKGTTTREIPALKSKIEPLLKARKDYAYGTQRDYIDNPDVIGWTREGDSTKAKSGLATVITDGPGGSKRMYVGTSNAGEIWYDLTGNRTDKITIGSDGYATFPVNGGSVSVWVQQ

SEQ ID NO: 35103 - protein, 480 aa, Cytophaga sp.
NGTMMQYFEWYVPNDGQQWSRLRTDAPYLSSVGITAVWTPPAYKGTSQADVGYGPYDLYDLGEFNQKGTVRTKYGTKGELKSAVNTLHSNGIQVYGDVVMNHKAGADYTENVTAVEVNPSNRNQETSGEYNIQAWTGFNFPGRGTTYSNFKWQWFHFDGTDWDQSRSLSRIFKFTGKAWDWEVSSENGNYDYLMYADIDYDHPDVVNEMKKWGVWYANEVGLDGYRLDAVKHIKFSFLKDWVDNARAATGKEMFTVGEYWQNDLGALNNYLAKVNYNQSLFDAPLHYNFYAASTGGGYYDMRNILNNTLVASNPTKAVTLVENHDTQPGQSLESTVQPWFKPLAYAFILTRSGGYPSVFYGDMYGTKGTTTREIPALKSKIEPLLKARKDYAYGTQRDYIDNPDVIGWTREGDSTKAKSGLATVITDGPGGSKRMYVGTSNAGEIWYDLTGNRTDKITIGSDGYATFPVNGGSVSVWVQQ

SEQ ID NO: 35104 - protein, 480 aa, Cytophaga sp.
NGTMMQYFEWYVPNDGQQWNRLRTDAPYLSSVGITAVWTPPAYKGTSQADVGYGPYDLYDLGEFNQKGTVRTKYGTKGELKSAVNTLHSNGIQVYGDVVMNHKAGADYTENVTAVEVNPSNRNQETSGEYNIQAWTGFNFPGRGTTYSNFKWQWFHFDGTDWDQSRSLSRIFKFTGKAWDWEVSSENGNYDYLMYADIDYDHPDVVSEMKKWGVWYANEVGLDGYRLDAVKHIKFSFLKDWVDNARAATGKEMFTVGEYWQNDLGALNNYLAKVNYNQSLFDAPLHYNFYAASTGGGYYDMRNILNNTLVASNPTKAVTLVENHDTQPGQSLESTVQPWFKPLAYAFILTRSGGYPSVFYGDMYGTKGTTTREIPALKSKIEPLLKARKDYAYGTQRDYIDNPDVIGWTREGDSTKAKSGLATVITDGPGGSKRMYVGTSNAGEIWYDLTGNRTDKITIGSDGYATFPVNGGSVSVWVQQ

SEQ ID NO: 35105 - protein, 480 aa, Cytophaga sp.
NGTMMQYFEWYVPNDGQQWNRLRTDAPYLSSVGITAVWTPPAYKGTSQADVGYGPYDLYDLGEFNQKGTVRTKYGTKGELKSAVNTLHSNGIQVYGDVVMNHKAGADYTENVTAVEVNPSNRNQETSGEYNIQAWTGFNFPGRGTTYSNFKWQWFHFDGTDWDQSRSLSRIFKFTGKAWDWEVSSENGNYDYLMYADIDYDHPDVVNEMKKWGVWYANEVGLDGYRLDAVKHIKFSFLKDWVDNARAATGKEMFTVGEYWQNDLGALNNYLAKVNYNQSLFDAPLHYNFYAASTGGGYYDMRNILNNTLVASNPTKAVTLVENHDTQPGQSLESTVQPWFKPLAYAFILTRSGGYPSVFYGDMYGTKGTTTGEIPALKSKIEPLLKARKDYAYGTQRDYIDNPDVIGWTREGDSTKAKSGLATVITDGPGGSKRMYVGTSNAGEIWYDLTGNRTDKITIGSDGYATFPVNGGSVSVWVQQ

SEQ ID NO: 35106 - protein, 480 aa, Cytophaga sp.
NGTMMQYFEWYVPNDGQQWNRLRTDAPYLSSVGITAVWTPPAYKGTSQADVGYGPYDLYDLGEFNQKGTVRTKYGTKGELKSAVNTLHSNGIQVYGDVVMNHKAGADYTENVTAVEVNPSNRNQETSGEYNIQAWTGFNFPGRGTTYSNFKWQWGHFDGTDWDQSRSLSRIFKFTGKAWDWEVSSENGNYDYLMYADIDYDHPDVVNEMKKWGVWYANEVGLDGYRLDAVKHIKFSFLKDWVDNARAATGKEMFTVGEYWQNDLGALNNYLAKVNYNQSLFDAPLHYNFYAASTGGGYYDMRNILNNTLVASNPTKAVTLVENHDTQPGQSLESTVQPWFKPLAYAFILTRSGGYPSVFYGDMYGTKGTTTREIPALKSKIEPLLKARKDYAYGTQRDYIDNPDVIGWTREGDSTKAKSGLATVITDGPGGSKRMYVGTSNAGEIWYDLTGNRTDKITIGSDGYATFPVNGGSVSVWVQQ

SEQ ID NO: 35107 - protein, 480 aa, Cytophaga sp.
NGTMMQYFEWYVPNDGQQWNRLRTDAPYLSSVGITAVWTPPAYKGTSQADVGYGPYDLYDLGEFNQKGTVRTKYGTKGELKSAVNTLHSNGIQVYGDVVMNHKAGADYTENVTAVEVNPSNRNQETSGEYNIQAWTGFNFPGRGTTYSNFKWQWFHFDGTDWDQSRSLSRIFKFTGKAWDWEVSSENGNYDYLMYADIDYDHPDVVNEMKKWGVWYANEVGLDGYRLDAVKHIKFSFLKDWVDNARAATGKEMFTVGEYWQNDLGALNNYLAKVNYNQSLFDAPLHYNFYAASTGGGYYDMRNILNNTLVASNPTKAVTLVENHDTQPGQSLESTVQPWFKPLAYAFILTRSGGYPSVFYGDMYGTKGTTTREIPALKSKIEPLLKARKDYAYGTQYDYIDNPDVIGWTREGDSTKAKSGLATVITDGPGGSKRMYVGTSNAGEIWYDLTGNRTDKITIGSDGYATFPVNGGSVSVWVQQ

SEQ ID NO: 35108 - protein, 480 aa, Cytophaga sp.
NGTMMQYFEWYVPNDGQQWNRLRTDAPYLSSVGITAVWTPPAYKGTSQADVGYGPYDLYDLGEFNQKGTVRTKYGTKGELKSAVNTLHSNGIQVYGDVVMNHKAGADYTENVTAVEVNPSNRNQETSGEYNIQAWTGFNFPGRGTTYSNFKWQWFHFDGTDWDQSRSNSRIFKFTGKAWDWEVSSENGNYDYLMYADIDYDHPDVVNEMKKWGVWYANEVGLDGYRLDAVKHIKFSFLKDWVDNARAATGKEMFTVGEYWQNDLGALNNYLAKVNYNQSLFDAPLHYNFYAASTGGGYYDMRNILNNTLVASNPTKAVTLVENHDTQPGQSLESTVQPWFKPLAYAFILTRSGGYPSVFYGDMYGTKGTTTREIPALKSKIEPLLKARKDYAYGTQRDYIDNPDVIGWTREGDSTKAKSGLATVITDGPGGSKRMYVGTSNAGEIWYDLTGNRTDKITIGSDGYATFPVNGGSVSVWVQQ

SEQ ID NO: 35109 - protein, 480 aa, Cytophaga sp.
NGTMMQYFEWYVPNDGQQWNRLRTDAPYLSSVGITAVWTPPAYKGTSQADVGYGPYDLYDLGEFNQKGTVRTKYGTKGELKSAVNTLHSNGIQVYGDVVMNHKAGADYTENVTAVEVNPSNRNQETSGEYNIQAWTGFNFPGRGTTYSNFKWQWFHFDGTDWDQSRSLSRIFKFTGKAWDWEVSSENGNYDYLMYADIDYDHPDVVNEMKKWGVWYANEVGLDGYRLDAVKHIKFSFLKDWVDNARAATGKEMFTVGEYWQNDLGALNNYLAKVNYNQSLFDAPLHYNFYAASTGGGYYDMRNILNNTLVASNPTKAVTLVENHDTQPGQSLESTVQPWFKPLAYAFILTRSGGYPSVFYGDMYGTKGTTTREIPALKSKIEPLLKARKDYAYGTQRDYIDNPDVIGWTREGDSVKAKSGLATVITDGPGGSKRMYVGTSNAGEIWYDLTGNRTDKITIGSDGYATFPVNGGSVSVWVQQ

SEQ ID NO: 35110 - protein, 480 aa, Cytophaga sp.
NGTMMQYFEWYVPNDGQQWNRLRTDAPYLSSVGITAVWTPPAYKGTSQADVGYGPYDLYDLGEFNQKGTVRTKYGTKGELKSAVNTLHSNGIQVYGDVVMNHKAGADYTENVTAVEVNPSNRNQETSGEYNIQAWTGFNFPGRGTTYSEFKWQWFHFDGTDWDQSRSLSRIFKFTGKAWDWEVSSENGNYDYLMYADIDYDHPDVVNEMKKWGVWYANEVGLDGYRLDAVKHIKFSFLKDWVDNARAATGKEMFTVGEYWQNDLGALNNYLAKVNYNQSLFDAPLHYNFYAASTGGGYYDMRNILNNTLVASNPTKAVTLVENHDTQPGQSLESTVQPWFKPLAYAFILTRSGGYPSVFYGDMYGTKGTTTREIPALKSKIEPLLKARKDYAYGTQRDYIDNPDVIGWTREGDSTKAKSGLATVITDGPGGSKRMYVGTSNAGEIWYDLTGNRTDKITIGSDGYATFPVNGGSVSVWVQQ

SEQ ID NO: 35111 - protein, 480 aa, Cytophaga sp.
NGTMMQYFEWYVPNDGQQWNRLRTDAPYLSSVGITAVWTPPAYKGTSQADVGYGPYDLYDLGEFNQKGTVRTKYGTKGELKSAVNTLHSNGIQVYGDVVMNHKAGADSTENVTAVEVNPSNRNQETSGEYNIQAWTGFNFPGRGTTYSNFKWQWFHFDGTDWDQSRSLSRIFKFTGKAWDWEVSSENGNYDYLMYADIDYDHPDVVNEMKKWGVWYANEVGLDGYRLDAVKHIKFSFLKDWVDNARAATGKEMFTVGEYWQNDLGALNNYLAKVNYNQSLFDAPLHYNFYAASTGGGYYDMRNILNNTLVASNPTKAVTLVENHDTQPGQSLESTVQPWFKPLAYAFILTRSGGYPSVFYGDMYGTKGTTTREIPALKSKIEPLLKARKDYAYGTQRDYIDNPDVIGWTREGDSTKAKSGLATVITDGPGGSKRMYVGTSNAGEIWYDLTGNRTDKITIGSDGYATFPVNGGSVSVWVQQ

SEQ ID NO: 35112 - protein, 480 aa, Cytophaga sp.
NGTMMQYFEWYVPNDGQQWNRLRTDAPYLSSVGITAVWTPPAYKGTSQADVGYGPYDLYDLGEFNQKGTVRTKYGTKGELKSAVNTLHSNGIQVYGDVVMNHKAGADYTENVTAVEVNPSNRNQETSGEYNIQAWTGFNFPGRGTTYSNFKWQWFHFDGTDWDQSRSLSRIFKFTGKAWDWEVSSENGNYDYLMYADIDYDHPDVVNEMKKWGVWYANEVGLDGYRLDAVKHIKFSFLKDWVDNARAATGKEMFTVGEYWQNDLGALNNYLAKVNYNQSLFDAPLHYNFYAASTGGGYYDMRNILNNTLVQSNPTKAVTLVENHDTQPGQSLESTVQPWFKPLAYAFILTRSGGYPSVFYGDMYGTKGTTTREIPALKSKIEPLLKARKDYAYGTQRDYIDNPDVIGWTREGDSTKAKSGLATVITDGPGGSKRMYVGTSNAGEIWYDLTGNRTDKITIGSDGYATFPVNGGSVSVWVQQ

SEQ ID NO: 35113 - protein, 480 aa, Cytophaga sp.
NGTMMQYFEWYVPNDGQQWNRLRTDAPYLSSVGITAVWTPPAYKGTSQADVGYGPYDLYDLGEFNQKGTVRTKYGTKGELKSAVNTLHSNGIQVYGDVVMNHKAGADYTENVTAVEVNPSNRNQETSGEYNIQAWTGFNFPGRGTTYSNFKWQWFHFDGTDWDQSRSLSRIFKFTGKAWDWEVSSENGNYDYLMYADIDYDHPDVVNEMKKWGVWYANEVGLDGYRLDAVKHIKFSFLKDWVDNARAATGKEMFTVGEYWQNDLGALNNYLAKVNYNQSLFDAPLHYNFYAASTGGGYYDMRNILQNTLVASNPTKAVTLVENHDTQPGQSLESTVQPWFKPLAYAFILTRSGGYPSVFYGDMYGTKGTTTREIPALKSKIEPLLKARKDYAYGTQRDYIDNPDVIGWTREGDSTKAKSGLATVITDGPGGSKRMYVGTSNAGEIWYDLTGNRTDKITIGSDGYATFPVNGGSVSVWVQQ

SEQ ID NO: 35114 - protein, 480 aa, Cytophaga sp.
NGTMMQYFEWYLPNDGQQWNRLRTDAPYLSSVGITAVWTPPAYKGTSQADVGYGPYDLYDLGEFNQKGTVRTKYGTKGELKSAVNTLHSNGIQVYGDVVMNHKAGADYTENVTAVEVNPSNRNQETSGEYNIQAWTGFNFPGRGTTYSNFKWQWFHFDGTDWDQSRSLSRIFKFTGKAWDWEVSSENGNYDYLMYADIDYDHPDVVNEMKKWGVWYANEVGLDGYRLDAVKHIKFSFLKDWVDNARAATGKEMFTVGEYWQNDLGALNNYLAKVNYNQSLFDAPLHYNFYAASTGGGYYDMRNILNNTLVASNPTKAVTLVENHDTQPGQSLESTVQPWFKPLAYAFILTRSGGYPSVFYGDMYGTKGTTTREIPALKSKIEPLLKARKDYAYGTQRDYIDNPDVIGWTREGDSTKAKSGLATVITDGPGGSKRMYVGTSNAGEIWYDLTGNRTDKITIGSDGYATFPVNGGSVSVWVQQ

SEQ ID NO: 35115 - protein, 480 aa, Cytophaga sp.
NGTMMQYFEWYVPNDGQQWNRLRTDAPYLSSVGITAVWTPPAYKGTSQADVGYGPYDLYDLGEFNQKGTVRTKYGTKGELKSAVNTLHSNGIQVYGDVVMNHKAGADYTENVTAVEVNPSNRNQETSGEYNIQAWTGFNFPGRGTTYSNFKWQWFHFDGTDWDQSRSLSRIFKFTGKAWDWEVSSENGNYDYLMYADIDYDHPDVVNEMKKWGVWYANEVGLDGYRLDAVKHIKFSFLKDWVDNARAATGKEMFTVGEYWQNDLGALNNYLAKVNYNQSLFDAPLHYNFYAASTGGGYYDMRNILNNTLVASNPTKAVTLVENHDTQPGQSLESTVQPWFKPLAYAFILTRSGGYPSVFYGDMYGTKGTTTREIPALKSKIEPLLKARKDYAYGKQRDYIDNPDVIGWTREGDSTKAKSGLATVITDGPGGSKRMYVGTSNAGEIWYDLTGNRTDKITIGSDGYATFPVNGGSVSVWVQQ

SEQ ID NO: 35116 - protein, 480 aa, Cytophaga sp.
NGTMMQYFEWYVPNDGQQWNRLRTDAPYLSSVGITAVWTPPAYKGTSQADVGYGPYDLYDLGEFNQKGTVRTKYGTKGELKSAVNTLHSNGIQVYGDVVMNHKAGADYTENVTAVEVNPSNRNQETSGEYNIQAWTGFNFPGRGTTYSNFKWQWFHFDGTDWDQSRSLSRIFKFTGKAWDWEVSSENGNYDYLMYADIDYDHPDVVNEMKKWGVWYANEVGLDGYRLDAVKHIKFSFLKDWVDNARAATGKEMFTVGEYWQNDLGALNNYLAKVNYNQSLFDAPLHYNFYAASTGGGYYDMRNILNNTLVASNPTKAVTLVENHDTQPGQSLESTVQPWFKPLAYAFILTRSGGYPSVFYGDMYGTKGTTTREIPALKSKIEPLLKARKDYAYGTQRDYIDNPDVIGWTREGDSTKAKSGLATCITDGPGGSKRMYVGTSNAGEIWYDLTGNRTDKITIGSDGYATFPVNGGSVSVWVQQ

SEQ ID NO: 35117 - protein, 480 aa, Cytophaga sp.
NGTMMQYFEWYVPNDGQQWNRLRTDAPYLSSVGITAVWTPPAYKGTSQADVGYGPYDLYDLGEFNQKGTVRTKYGTKGELKSAVNTLHSNGIQVYGDVVMNHKAGADYTENVTAVEVNPSNRNQETSGEYNIQAWTGFDFPGRGTTYSNFKWQWFHFDGTDWDQSRSLSRIFKFTGKAWDWEVSSENGNYDYLMYADIDYDHPDVVNEMKKWGVWYANEVGLDGYRLDAVKHIKFSFLKDWVDNARAATGKEMFTVGEYWQNDLGALNNYLAKVNYNQSLFDAPLHYNFYAASTGGGYYDMRNILNNTLVASNPTKAVTLVENHDTQPGQSLESTVQPWFKPLAYAFILTRSGGYPSVFYGDMYGTKGTTTREIPALKSKIEPLLKARKDYAYGTQRDYIDNPDVIGWTREGDSTKAKSGLATVITDGPGGSKRMYVGTSNAGEIWYDLTGNRTDKITIGSDGYATFPVNGGSVSVWVQQ

SEQ ID NO: 35118 - protein, 480 aa, Cytophaga sp.
NGTMMQYFEWYVPNDGQQWNRLRTDAPYLSSVGITAVWTPPAYKGTSQADVGYGPYDLYDLGEFNQKGTVRTKYGTKGELKSAVNTLHSNGIQVYGDVVMNHKAGADYTENVTAVEVNPSNRNQETSGEYNIQAWTGFNFPGRGTTYSNFKWQWFHFDGTDWDQSRSLSRIFKFTGKAWDWEVSSENGNYDYLMYADIDYDHPDVVNEMKKWGVWYANEVGLDGYRLDAVKHIKFSFLKDWVDNARAATGKEMFTVGEYWQNDLGALNNYLWKVNYNQSLFDAPLHYNFYAASTGGGYYDMRNILNNTLVASNPTKAVTLVENHDTQPGQSLESTVQPWFKPLAYAFILTRSGGYPSVFYGDMYGTKGTTTREIPALKSKIEPLLKARKDYAYGTQRDYIDNPDVIGWTREGDSTKAKSGLATVITDGPGGSKRMYVGTSNAGEIWYDLTGNRTDKITIGSDGYATFPVNGGSVSVWVQQ

SEQ ID NO: 35119 - protein, 480 aa, Cytophaga sp.
NGTMMQYFEWYVPNDGQQWNRLRTDAPYLSSVGITAVWTPPAYKGTSQADVGYGPYDLYDLGEFNQKGTVRTKYGTKGELKSAVNTLHSNGIQVYGDVVMNHKAGADYTENVTAVEVNPSNRNQETSGEYNIQAWTGFNFPGRGTTYSNFKWQWFHFDGTDWDQSRSLSRIFKFTGKAWDWEVSSENGNYDYLMYADIDYDHPDVVNEMKKWGVWYANEVQLDGYRLDAVKHIKFSFLKDWVDNARAATGKEMFTVGEYWQNDLGALNNYLAKVNYNQSLFDAPLHYNFYAASTGGGYYDMRNILNNTLVASNPTKAVTLVENHDTQPGQSLESTVQPWFKPLAYAFILTRSGGYPSVFYGDMYGTKGTTTREIPALKSKIEPLLKARKDYAYGTQRDYIDNPDVIGWTREGDSTKAKSGLATVITDGPGGSKRMYVGTSNAGEIWYDLTGNRTDKITIGSDGYATFPVNGGSVSVWVQQ

SEQ ID NO: 35120 - protein, 480 aa, Cytophaga sp.
NGTMMQYFEWYVPNDGQQWNRLRTDAPYLSSVGITAVWTPPAYKGTSQADVGYGPYDLYDLGEFNQKGTVRTKYGTKGELKSAVNTLHSNGIQVYGDVVMNHKAGADYTENVTAVEVNPSNRNQETSGEYNIQAWTGFNFPGRGTTYSNFKWQWFHFDGTDWDQSRSLSRIFKFTGKAWDWEVSSENGNYDYLMYADIDYDHPDVVNEMKKWGVWYANEVGLDGYRLDAVKHIKFSFLKDWVDNARAATGKEMFTVGEYWQNDLGALNNYLAKVNYNQSLFDAPLHYNFYAASTGGGYYDMRNILNNTLVAGNPTKAVTLVENHDTQPGQSLESTVQPWFKPLAYAFILTRSGGYPSVFYGDMYGTKGTTTREIPALKSKIEPLLKARKDYAYGTQRDYIDNPDVIGWTREGDSTKAKSGLATVITDGPGGSKRMYVGTSNAGEIWYDLTGNRTDKITIGSDGYATFPVNGGSVSVWVQQ

SEQ ID NO: 35121 - protein, 480 aa, Cytophaga sp.
NGTMMQYFEWYVPNDGQQWNRLRTDAPYLSSVGITAVWTPPAYKGTSQADVGYGPYDLYDLGEFNQKGTVRTKYGTKGELKSAVNTLHSNGIQVYGDVVMNHKAGADYTENVTAVEVNPSNRNQETSGEYNIQAWTGFNFPGRGTTYSNFKWQWFHFDGTDWDQSRSLSRIFKFTGKAWDWEVSSENGNYDYLMYADIDYDHPDVVNEMKKWGVWYANEVGLDGYRLDAVKHIKFSFLKDWVDNARAATGKEMFTVGEYWQNDLGALNNYLAKVNYNQSLFDAPLHYNFYAASTGGGYYDMRNILNNTLVASNPTKAVTLVENHDTQPGQSLESTVQPWFKPLAYAFILTRSGGYPSVFYGDMYGTKGTTTREIPALKSKIEPLLKARKDYAYGTQRDYIDNPDVIGWTREGDSTKAKSGLATVITDGPGGSKRMYVGTSNAGEIWYDLTGNRTDKITIGSDGYATFPVNKGSVSVWVQQ

SEQ ID NO: 35122 - protein, 480 aa, Cytophaga sp.
NGTMMQYFEWYVPNDGQQWNRLRTDAPYLSSVGITAVWTPPAYKGTSQADVGYGPYDLYDLGEFNQKGTVRTKYGTKGELKSAVNTLHSNGIQVYGDVVMNHKAGADYTENVTAVEVNPSNRNQETSGRYNIQAWTGFNFPGRGTTYSNFKWQWFHFDGTDWDQSRSLSRIFKFRGKAWDWEVSSENGNYDYLMYADIDYDHPDVVNEMKKWGVWYANEVGLDGYRLDAVKHIKFSFLKDWVDNARAATGKEMFTVGEYWQNDLGALNNYLAKVNYNQSLFDAPLHYNFYAASTGGGYYDMRNILNNTLVASNPTKAVTLVENHDTQPGQSLESTVQPWFKPLAYAFILTRSGGYPSVFYGDMYGTKGTTTREIPALKSKIEPLLKARKDYAYGTQRDYIDNPDVIGWTREGDSTKAKSGLATVITDGPGGSKRMYVGTSNAGEIWYDLTGNRTDKITIGSDGYATFPVNGGSVSVWVQQ

SEQ ID NO: 35123 - protein, 480 aa, Cytophaga sp.
NGTMMQYFEWYVPNDGQQWNRLRTDAPYLSSVGITAVWTPPAYKGTSQADVGYGPYDLYDLGEFNQKGTVRTKYGTKGELKSAVNTLHSNGIQVYGDVVMNHKAGADYTENVTAVEVNPSNRNQETSGEYNIQAWTGFNFPGRGTTYSNFKWQWAHFDGTDWDQSRSLSRIFKFTGKAWDWEVSSENGNYDYLMYADIDYDHPDVVNEMKKWGVWYANEVGLDGYRLDAVKHIKFSFLKDWVDNARAATGKEMFTVGEYWQNDLGALNNYLAKVNYNQSLFDAPLHYNFYAASTGGGYYDMRNILNNTLVASNPTKAVTLVENHDTQPGQSLESTVQPWFKPLAYAFILTRSGGYPSVFYGDMYGTKGTTTREIPALKSKIEPLLKARKDYAYGTQRDYIDNPDVIGWTREGDSTKAKSGLATVITDGPGGSKRMYVGTSNAGEIWYDLTGNRTDKITIGSDGYATFPVNGGSVSVWVQQ

SEQ ID NO: 35124 - protein, 480 aa, Cytophaga sp.
NGTMMQYFEWYVPNDGQQWNRLRTDAPYLSSVGITAVWTPPAYKGTSQADVGYGPYDLYDLGEFNQKGTVRTKYGTKGELKSAVNTLHSNGIQVYGDVVMNHKAGADYTENVTAVEVNPSNRNQETSGEYNIQAWTGFNFPGRGTTYSNFKWQWFHFDGTDWDQSRSLSRIFKFTGKAWDWEVSSENGNYDYLMYADIDYDHPDVVNEMKKWGVWYANEVGLDGYRLDAVKHIKFSFLKDWVDNARAATGKEMFTVGEYWQNDLGALNNYLAKVNYNQSLFDAPLHYNFYAASTGGGYYDMRNILNNTLVASNPTKAVTLVENHDTQPGQSLESTVQPWFKPLAYAFILTRSGGYPSVFYGDMYGTKGTTAREIPALKSKIEPLLKARKDYAYGTQRDYIDNPDVIGWTREGDSTKAKSGLATVITDGPGGSKRMYVGTSNAGEIWYDLTGNRTDKITIGSDGYATFPVNGGSVSVWVQQ

SEQ ID NO: 35125 - protein, 480 aa, Cytophaga sp.
NGTMMQYFEWYVPNDGQQWNRLRTDAPYLSSVGITAVWTPPAYKGTSQADVGYGPYDLYDLGEFNQKGTVRTKYGTKGELKSAVNTLHSNGIQVYGDVVMNHKAGADYTENVTAVEVNPSNRNQETSGEYNIQAWTGFNFPGRGTTYSRFKWQWFHFDGTDWDQSRSLSRIFKFTGKAWDWEVSSENGNYDYLMYADIDYDHPDVVNEMKKWGVWYANEVGLDGYRLDAVKHIKFSFLKDWVDNARAATGKEMFTVGEYWQNDLGALNNYLAKVNYNQSLFDAPLHYNFYAASTGGGYYDMRNILNNTLVASNPTKAVTLVENHDTQPGQSLESTVQPWFKPLAYAFILTRSGGYPSVFYGDMYGTKGTTTREIPALKSKIEPLLKARKDYAYGTQRDYIDNPDVIGWTREGDSTKAKSGLATVITDGPGGSKRMYVGTSNAGEIWYDLTGNRTDKITIGSDGYATFPVNGGSVSVWVQQ

SEQ ID NO: 35126 - protein, 480 aa, Cytophaga sp.
NGTMMQYFEWYVPNDGQQWNRLRTDAPYLSSVGITAVWTPPAYKGTSQADVGYGPYDLYDLGEFNQKGTVRTKYGTKGELKSAVNTLHSNGIQVYGDVVMNHKAGADYTENVTAVEVNPSNRNQETSGEYNIQAWTGFNFPGRGTTYSNFKWQWFHFDGTDWDQSRSLSRIFKFTGKAWDWEVSSENGNYDYLMYADIDYDHPDVVNEMKKWGVWYANEVGLDGYRLDAVKHIKFSFLKDWVDNARAATGKEMFTVGEYWQNDLGALNNYLAKVNYNQSLFDAPLHYNFYAASTGGGYYDMRNILNNTLVASNPTKAVTLVENHDTQPGQSLESTVQPWFKPLAYAFILTRSGGYPSVFYGDMYGTKGTTTREIPALKSKIEPLLKARKDYAYGTQRDYIDNPDVIGWTREGDSTKAKSGLATVITDGPGGSKRMYVGTSNAGEIWYDLTGNRTDKITIGSDGYATFPVNPGSVSVWVQQ

SEQ ID NO: 35127 - protein, 480 aa, Cytophaga sp.
NGTMMQYFEWYVPNDGQQWNRLRTDAPYLSSVGITAVWTPPAYKGTSQADVGYGPYDLYDLGEFNQKGTVRTKYGTKGELKSAVNTLHSNGIQVYGDVVMNHKAGADYTENVTAVEVNPSNRNQETSGEYNIQAWTGFNFPGRGTTYSNFKWQWFHFDGTDWDQSRSLSRIFKFTGKAWDWEVSSENGNYDYLMYADIDYDHPDVVNEMKKWGVWYANEVGLDGYRLDAVKHIKFSFLKDWVDNARAATGKEMFTVGEYWQNDLGALKNYLAKVNYNQSLFDAPLHYNFYAASTGGGYYDMRNILNNTLVASNPTKAVTLVENHDTQPGQSLESTVQPWFKPLAYAFILTRSGGYPSVFYGDMYGTKGTTTREIPALKSKIEPLLKARKDYAYGTQRDYIDNPDVIGWTREGDSTKAKSGLATVITDGPGGSKRMYVGTSNAGEIWYDLTGNRTDKITIGSDGYATFPVNGGSVSVWVQQ

SEQ ID NO: 35128 - protein, 480 aa, Cytophaga sp.
NGTMMQYFEWYVPNDGQQWNRLRTDAPYLSSVGITAVWTPPAYKGTSQADVGYGPYDLYDLGEFNQKGTVRTKYGTKGELKSAVNTLHSNGIQVYGDVVMNHKAGADYTENVTAVEVNPSNRNQETSGEYNIQAWTGFNFPGRGTTYSNFKWQWFHFDGTDWDQSRSLSRIFKFTGKAWDWEVSSENGNYDYLMYADIDYDHPDVVNEMKKWGVWYANEVGLDGYRLDAVKHIKFSFLKDWVDNARAATGKEMFTVGEYWQNDLGALNNYLAKVNYNQSLFDAPLHYNFYAASTGGGYYDMRNILNNTLVASNPTKAVTLVENHDTQPGQSLESTVQPWFKPLAYAFILTRSGGYPSVFYGDMYGTKGTTTREIPALKSKIEPLLKARKDYAYGTQRDYIDNPDVIGWTREGDSTKAKSGLATVITDGPGGSKRMYVGTSNAGEIWYDHTGNRTDKITIGSDGYATFPVNGGSVSVWVQQ

SEQ ID NO: 35129 - protein, 480 aa, Cytophaga sp.
NGTMMQYFEWYVPNDGQQWNRLRTDAPMLSSVGITAVWTPPAYKGTSQADVGYGPYDLYDLGEFNQKGTVRTKYGTKGELKSAVNTLHSNGIQVYGDVVMNHKAGADYTENVTAVEVNPSNRNQETSGEYNIQAWTGFNFPGRGTTYSNFKWQWFHFDGTDWDQSRSLSRIFKFTGKAWDWEVSSENGNYDYLMYADIDYDHPDVVNEMKKWGVWYANEVGLDGYRLDAVKHIKFSFLKDWVDNARAATGKEMFTVGEYWQNDLGALNNYLAKVNYNQSLFDAPLHYNFYAASTGGGYYDMRNILNNTLVASNPTKAVTLVENHDTQPGQSLESTVQPWFKPLAYAFILTRSGGYPSVFYGDMYGTKGTTTREIPALKSKIEPLLKARKDYAYGTQRDYIDNPDVIGWTREGDSTKAKSGLATVITDGPGGSKRMYVGTSNAGEIWYDLTGNRTDKITIGSDGYATFPVNGGSVSVWVQQ

SEQ ID NO: 35130 - protein, 480 aa, Cytophaga sp.
NGTMMQYFEWYVPNDGQQWNRLRTDAPYLSSVGITAVWTPPAYKGTSQADVGYGPYDLYDLGEFNQKGTVRTKYGTKGELKSAVNTLHSNGIQVYGDVVMNHKAGADYTENVTAVEVNPSNRNQETSGEYNIQAWTGFNFPGRGTTYSNFKWQWFHFDGTDWDQSRSLSRIFKFTGKAWDWEVSSENGNYDYLMYADIDYDHPDVVNEMKKWGVWYANEVGLDGYRLDAVKHIKFSFLKDWVDNARAATGKEMFTVGEYWQNDLGALNNYLAKVNYNQSLFDAPLHYNFYAASTGGGYYDMRNILNNTLVASNPTKAVTLVENHDTQPGQSLESTVQPWFKPLAYAFILTRSGGYPSVFYGDMYGTKGTTTREIPALKSKIEPLLKARKDYAYGTQRDYIDNPDVIGWTREGDSTKAKSGLATVITDGPGGSKRMYVGTSNAGEDWYDLTGNRTDKITIGSDGYATFPVNGGSVSVWVQQ

SEQ ID NO: 35131 - protein, 480 aa, Cytophaga sp.
NGTMMQYFEWYVPNDGQQWNRLRTDAPYLSSVGITAVWTPPAYKGTSQADVGYGPYDLYDLGEFNQKGTVRTKYGTKGELKNAVNTLHSNGIQVYGDVVMNHKAGADYTENVTAVEVNPSNRNQETSGEYNIQAWTGFNFPGRGTTYSNFKWQWFHFDGTDWDQSRSLSRIFKFTGKAWDWEVSSENGNYDYLMYADIDYDHPDVVNEMKKWGVWYANEVGLDGYRLDAVKHIKFSFLKDWVDNARAATGKEMFTVGEYWQNDLGALNNYLAKVNYNQSLFDAPLHYNFYAASTGGGYYDMRNILNNTLVASNPTKAVTLVENHDTQPGQSLESTVQPWFKPLAYAFILTRSGGYPSVFYGDMYGTKGTTTREIPALKSKIEPLLKARKDYAYGTQRDYIDNPDVIGWTREGDSTKAKSGLATVITDGPGGSKRMYVGTSNAGEIWYDLTGNRTDKITIGSDGYATFPVNGGSVSVWVQQ

SEQ ID NO: 35132 - protein, 480 aa, Cytophaga sp.
NGTMMQYFEWYVPNDGQQWNRLRTDAPYLSSVGITAVWTPPAYKGTSQADVGYGPYDLYDLGEFNQKGTVRTKYGTKGELKSAVNTLHSNGIQVYGDVVMNHKAGADYTENVTAVEVNPSNRNQETSGEYNIQAWTGFNFPGRGTTYSNFKWQWFHFDGTDWDQSRSLSRIFKFTGKAWDWEVSSENGNYDYLMYADIDYDHPDVVNEMKKWGVWYANEVGLDGYRLDAVKHIKFSFLKDWVDNARAATGKEMFTVGEYWQNDLGALNNYLAKVNYNQSLFDAPLHYNFYAASTGGGYYDMRNILNNTLVACNPTKAVTLVENHDTQPGQSLESTVQPWFKPLAYAFILTRSGGYPSVFYGDMYGTKGTTTREIPALKSKIEPLLKARKDYAYGTQRDYIDNPDVIGWTREGDSTKAKSGLATVITDGPGGSKRMYVGTSNAGEIWYDLTGNRTDKITIGSDGYATFPVNGGSVSVWVQQ

SEQ ID NO: 35133 - protein, 480 aa, Cytophaga sp.
NGTMMQYFEWYVPNDGQQWNRLRTDAPYLSSVGITAVWTPPAYKGKSQADVGYGPYDLYDLGEFNQKGTVRTKYGTKGELKSAVNTLHSNGIQVYGDVVMNHKAGADYTENVTAVEVNPSNRNQETSGEYNIQAWTGFNFPGRGTTYSNFKWQWFHFDGTDWDQSRSLSRIFKFTGKAWDWEVSSENGNYDYLMYADIDYDHPDVVNEMKKWGVWYANEVGLDGYRLDAVKHIKFSFLKDWVDNARAATGKEMFTVGEYWQNDLGALNNYLAKVNYNQSLFDAPLHYNFYAASTGGGYYDMRNILNNTLVASNPTKAVTLVENHDTQPGQSLESTVQPWFKPLAYAFILTRSGGYPSVFYGDMYGTKGTTTREIPALKSKIEPLLKARKDYAYGTQRDYIDNPDVIGWTREGDSTKAKSGLATVITDGPGGSKRMYVGTSNAGEIWYDLTGNRTDKITIGSDGYATFPVNGGSVSVWVQQ

SEQ ID NO: 35134 - protein, 480 aa, Cytophaga sp.
NGTMMQYFEWYVPNDGQQWNRLRTDAPYLSSVGITAVWTPPAYKGTSQADVGYGPYDLYDLGEFNQKGTVRTKYGTKGELKSAVNTLHSNGIQVYGDVVMNHKAGADYTENVTAVEVNPSNRNQETSGEYNIQAWTGFNFPGRGTTYSNFKWKWFHFDGTDWDQSRSLSRIFKFTGKAWDWEVSSENGNYDYLMYADIDYDHPDVVNEMKKWGVWYANEVGLDGYRLDAVKHIKFSFLKDWVDNARAATGKEMFTVGEYWQNDLGALNNYLAKVNYNQSLFDAPLHYNFYAASTGGGYYDMRNILNNTLVASNPTKAVTLVENHDTQPGQSLESTVQPWFKPLAYAFILTRSGGYPSVFYGDMYGTKGTTTREIPALKSKIEPLLKARKDYAYGTQRDYIDNPDVIGWTREGDSTKAKSGLATVITDGPGGSKRMYVGTSNAGEIWYDLTGNRTDKITIGSDGYATFPVNGGSVSVWVQQ

SEQ ID NO: 35135 - protein, 480 aa, Cytophaga sp.
NGTMMQYFEWYVPNDGQQWNRLRTDAPYLSSVGITAVWTPPAYKGTSQADVGYGPYDLYDLGEFNQKGTVRTKYGTKGELKSAVNTLHSNGIQVYGDVVMNHKAGADYTENVTAVEVNPSNRNQETSGEYNIQAWTGFNFPGRGTTYSNFKWQWFHFDGTDWDQSRSLSRIFKFTGKAWDWEVSSENGNYDYLMYADIDYDHPDVVNEMKKWGVWYANEVGLDGYRLDAVKHIKFSFLKDWVDNARAATGKEMFTVGEYWQNDLGALNNYLAKVNYNQSLFDAPLHYNFYAASIGGGYYDMRNILNNTLVASNPTKAVTLVENHDTQPGQSLESTVQPWFKPLAYAFILTRSGGYPSVFYGDMYGTKGTTTREIPALKSKIEPLLKARKDYAYGTQRDYIDNPDVIGWTREGDSTKAKSGLATVITDGPGGSKRMYVGTSNAGEIWYDLTGNRTDKITIGSDGYATFPVNGGSVSVWVQQ

SEQ ID NO: 35136 - protein, 480 aa, Cytophaga sp.
NGTMMQYFEWYVPNDGQQWNRLRTDAPYLSSVGITAVWTPPAYKGTSQADVGYGPYDLYDLGEFNQKGTVRTKYGTKGELKSAVNTLHSNGIQVYGDVVMNHKAGADYTENVTAVEVNPSNRNQETSGEYNIQAWTGFNFPGRGTTYSNFKWQWFHFDGTDWDQSRSLSRIFKFTGKAWDWEVSSENGNYDYLMYADIDYDHPDVVNEMKKWGVWYANEVGLDGYRLDAVKHIKFSFLYDWVDNARAATGKEMFTVGEYWQNDLGALNNYLAKVNYNQSLFDAPLHYNFYAASTGGGYYDMRNILNNTLVASNPTKAVTLVENHDTQPGQSLESTVQPWFKPLAYAFILTRSGGYPSVFYGDMYGTKGTTTREIPALKSKIEPLLKARKDYAYGTQRDYIDNPDVIGWTREGDSTKAKSGLATVITDGPGGSKRMYVGTSNAGEIWYDLTGNRTDKITIGSDGYATFPVNGGSVSVWVQQ

SEQ ID NO: 35137 - protein, 480 aa, Cytophaga sp.
NGTMMQYFEWYVPNDGQQWNRLRTDAPYLSSVGITAVWTPPAYKGTSQADVGYGPYDLYDLGEFNQKGTVRTKYGTKGELKSAVNTLHSNGIQVYGDVVMNHKAGADYTENVTAVEVNPSNRNQETSGEYNIQAWTGFNFPGRGTTYSNFKWQWFHFDGTDWDQSRSLSRIFKFTGKAWDWEVSSENGNYDYLMYADIDYDHPDVVIEMKKWGVWYANEVGLDGYRLDAVKHIKFSFLKDWVDNARAATGKEMFTVGEYWQNDLGALNNYLAKVNYNQSLFDAPLHYNFYAASTGGGYYDMRNILNNTLVASNPTKAVTLVENHDTQPGQSLESTVQPWFKPLAYAFILTRSGGYPSVFYGDMYGTKGTTTREIPALKSKIEPLLKARKDYAYGTQRDYIDNPDVIGWTREGDSTKAKSGLATVITDGPGGSKRMYVGTSNAGEIWYDLTGNRTDKITIGSDGYATFPVNGGSVSVWVQQ

SEQ ID NO: 35138 - protein, 480 aa, Cytophaga sp.
NGTMMQYFEWYVPNDGQQWNRLRTDAPYLSSVGITAVWTPPAYKGTSQADVGYGPYDLYDLGEFNQKGTVRTKYGTKGELKSAVNTLHSNGIQVYGDVVMNHKAGADYTENVTAVEVNPSNRNQETSGEYNIQAWTGFNFPGRGTTYSNFKWQWFHFDGTDWDQSRSLSRIFKFTGKAWDWEVSSENGNYDYLMYADIDYDHPDVVNEMKKWGVWYANEVGLDGYRLDAVKHIKFSFLKDWVDNARAATGKEMFTVGEYWQNDLGALNNYLAKVNYNQSLFDAPLHYNFYAASTGGGYYDMRNILNNTLVKSNPTKAVTLVENHDTQPGQSLESTVQPWFKPLAYAFILTRSGGYPSVFYGDMYGTKGTTTREIPALKSKIEPLLKARKDYAYGTQRDYIDNPDVIGWTREGDSTKAKSGLATVITDGPGGSKRMYVGTSNAGEIWYDLTGNRTDKITIGSDGYATFPVNGGSVSVWVQQ

SEQ ID NO: 35139 - protein, 480 aa, Cytophaga sp.
NGTMMQYFEWYVPNDGQQWNRLRTDAPYLSSVGITAVWTPPAYKGTSQADVGYGPYDLYDLGEFNQKGTVRTKYGTKGELKSAVNTLHSNGIQVYGDVVMNHKAGADYTENVTAVEVNPSNRNQETSGEYNIQAWTGFNFPGRGTTYSNFKWQWFHFDGTDWDQSRSLSRIFKFTGKAWDWEVSSENGNYDYLMYADIDYDHPDVVNEMKKWGVWYANEVGLDGYRLDAVKHIKFSFLKDWVDNARAATGKEMFTVGEYWQNDLGALNNYLAKVNYNQSLFDAPLHYNFYAASTGGGYYDMRNILNNTLVASNPTKAVTLVENHDTQPGQSLESTVQPWFKPLAYAFILTRSGGYPSVFYGDMYGTKGTTTREIPALKSKIEPLLKARKDYAYGTQRDYIDNPDVIGWTREGDSTKAKSGLATVITDGPGGSKRMYVGTSNAGEIWYDLTGNRTDKIVIGSDGYATFPVNGGSVSVWVQQ

SEQ ID NO: 35140 - protein, 480 aa, Cytophaga sp.
NGTMMQYFEWYVPNDGQQWNRLRTDAPYLSSVGITAVWTPPAYKGTSQADVGYGPYDLYDLGEFNQKGTVRTKYGTKGELKSAVNTLHSNGIQVYGDVVMNHKAGADYTENVTAVEVNPSNRNQETSGEYNIQAWTGFNFPGRGTTYSNFKWQWFHFDGTDWDQSRSLSRIFKFTGKAWDWEVSSENGNYDYLMYADIDYDHPDVVNEMKKWGVWYANEVGLDGYRLDAVKHIKFSFLKDWVDNARAATGKEMFTVGEYWQNDLGALSNYLAKVNYNQSLFDAPLHYNFYAASTGGGYYDMRNILNNTLVASNPTKAVTLVENHDTQPGQSLESTVQPWFKPLAYAFILTRSGGYPSVFYGDMYGTKGTTTREIPALKSKIEPLLKARKDYAYGTQRDYIDNPDVIGWTREGDSTKAKSGLATVITDGPGGSKRMYVGTSNAGEIWYDLTGNRTDKITIGSDGYATFPVNGGSVSVWVQQ

SEQ ID NO: 35141 - protein, 480 aa, Cytophaga sp.
NGTMMQYFEWYVPNDGQQWNRLRTDAPYLSSVGITAVWTPPAYKGTSQNDVGYGPYDLYDLGEFNQKGTVRTKYGTKGELKSAVNTLHSNGIQVYGDVVMNHKAGADYTENVTAVEVNPSNRNQETSGEYNIQAWTGFNFPGRGTTYSNFKWQWFHFDGTDWDQSRSLSRIFKFTGKAWDWEVSSENGNYDYLMYADIDYDHPDVVNEMKKWGVWYANEVGLDGYRLDAVKHIKFSFLKDWVDNARAATGKEMFTVGEYWQNDLGALNNYLAKVNYNQSLFDAPLHYNFYAASTGGGYYDMRNILNNTLVASNPTKAVTLVENHDTQPGQSLESTVQPWFKPLAYAFILTRSGGYPSVFYGDMYGTKGTTTREIPALKSKIEPLLKARKDYAYGTQRDYIDNPDVIGWTREGDSTKAKSGLATVITDGPGGSKRMYVGTSNAGEIWYDLTGNRTDKITIGSDGYATFPVNGGSVSVWVQQ

SEQ ID NO: 35142 - protein, 480 aa, Cytophaga sp.
NGTMMQYFEWYVPNDGQQWNRLRTDAPYLSSVGITAVWTPPAYKGTSQADVGYGPYDLYDLGEFNQKGTVRTKYGTKGELKSAVNTLHSNGIQVYGDVVMNHKAGADYTENVTAVEVNPSNRNQETSGEYNIQAWTGFNFPGRGTTYSNFKWQWFHFDGTDWDQSRSLSRIFKFTGKAWDWEVSSENGNYDYLMYADIDYDHPDVVNEMKKWGVWYANEVGLDGYRLDAVKHIKFSFLKDWVDNARAATGKEMFTVGEYWQNDLGALNNYLAKVNYNQSLFDAPLHYNFYAASTGGGYYDMRNILNNTLVASNPTKAVTLVENHDTQPGQSLESTVQPWFKPLAYAFILTRSGGYPSVFYGDMYGTKGTTTREIPALKSKIEPLLKARKDYAYGTQRDYIDNPDVIGWTREGDSTKAKSGLATVITDGPGGSKRMYVGTSNAGEIWYDLTGNRTDPITIGSDGYATFPVNGGSVSVWVQQ

SEQ ID NO: 35143 - protein, 480 aa, Cytophaga sp.
NGTMMQYFEWYVPNDGQQWNRLRTDAPYLSSVGITAVWTPPAYKGTSQADVGYGPYDLYDLGEFNQKGTVRTKYGTKGELKSAVNTLHSNGIQVYGDVVMNHKAGADYTENVTAVEVNPSNRNQETSGEYNIQAWTGFNFPGRGTTYSNFKWQWFHFDGTDWDQSRSLSRIFKFTGKAWDWEVSSENGNYDYLMYADIDYDHPDVVNEMKKWGVWYANEVGLDGYRLDAVKHIKFSFLKDWVDNARAATGKEMFTVGEYWQNDLGALNNYLAKVNYNQSLFDAPLHYNFYAASTGGGYYDMRNILNNTLVASNPTKAVTLVENHDTQPGQSLESTVQPWFKPLAYAFILTRSQGYPSVFYGDMYGTKGTTTREIPALKSKIEPLLKARKDYAYGTQRDYIDNPDVIGWTREGDSTKAKSGLATVITDGPGGSKRMYVGTSNAGEIWYDLTGNRTDKITIGSDGYATFPVNGGSVSVWVQQ

SEQ ID NO: 35144 - protein, 480 aa, Cytophaga sp.
NGTMMQYFEWYVPNDGQQWNRLRTDAPYLSSVGITAVWTPPAYKGTSQADVGYGPYDLYDLGEFNQKGTVRTKYGTKGELKSAVNTLHSNGIQVYGDVVMNHKAGADYTENVTAVEVNPSNRNQETSGEYNIQAWTGFNFPGRGTTYSNFKWQWFHFDGTDWDQSRSLSRIFKFTGKAWDWEVSSENGNYDYLMYADHDYDHPDVVNEMKKWGVWYANEVGLDGYRLDAVKHIKFSFLKDWVDNARAATGKEMFTVGEYWQNDLGALNNYLAKVNYNQSLFDAPLHYNFYAASTGGGYYDMRNILNNTLVASNPTKAVTLVENHDTQPGQSLESTVQPWFKPLAYAFILTRSGGYPSVFYGDMYGTKGTTTREIPALKSKIEPLLKARKDYAYGTQRDYIDNPDVIGWTREGDSTKAKSGLATVITDGPGGSKRMYVGTSNAGEIWYDLTGNRTDKITIGSDGYATFPVNGGSVSVWVQQ

SEQ ID NO: 35145 - protein, 480 aa, Cytophaga sp.
NGTMMQYFEWYVPNDGQQWNRLRTDAPYLSSVGITAVWTPPAYKGTSQADVGYGPYDLYDLGEFNQKGTVRTKYGTKGELKSAVNTLHSNGIQVYGDVVMNHKAGADYTENVTAVEVNPSNRNQETSGEYNIQAWTGFNFPGRGTTYSNFKWQWFHFDGTDWDQSRSLSRIFKFTGKAWDWEVSSENGNYDYLMYADIDYDHPDVVNEMKKWGVWYANEVGLDGYRLDAVKHIKFSFLKDWVDNARAATGKEMFTVGEYWQNDLGALNNYLAKVNYNQSLFDAPLHYNFYAASTGGGYYDMRNILNNTLVASNPTKAVTLVENHDTQPGQSLESTVQPWFKPLAYAFILTRSGGYPSVFYGDMYGTKGTTTHEIPALKSKIEPLLKARKDYAYGTQRDYIDNPDVIGWTREGDSTKAKSGLATVITDGPGGSKRMYVGTSNAGEIWYDLTGNRTDKITIGSDGYATFPVNGGSVSVWVQQ

SEQ ID NO: 35146 - protein, 480 aa, Cytophaga sp.
NGTMMQYFEWYVPNDGQQWNRLRTDAPYLSSVGITAVWTPPAYKGTSQADVGYGPYDLYDLGEFNQKGTVRTKYGTKGELKSAVNTLHSNGIQVYGDVVMNHKAGADYTENVTAVEVNPSNRNQETSGEYNIQAWTGFIFPGRGTTYSNFKWQWFHFDGTDWDQSRSLSRIFKFTGKAWDWEVSSENGNYDYLMYADIDYDHPDVVNEMKKWGVWYANEVGLDGYRLDAVKHIKFSFLKDWVDNARAATGKEMFTVGEYWQNDLGALNNYLAKVNYNQSLFDAPLHYNFYAASTGGGYYDMRNILNNTLVASNPTKAVTLVENHDTQPGQSLESTVQPWFKPLAYAFILTRSGGYPSVFYGDMYGTKGTTTREIPALKSKIEPLLKARKDYAYGTQRDYIDNPDVIGWTREGDSTKAKSGLATVITDGPGGSKRMYVGTSNAGEIWYDLTGNRTDKITIGSDGYATFPVNGGSVSVWVQQ

SEQ ID NO: 35147 - protein, 480 aa, Cytophaga sp.
NGTMMQYFEWYVPNDGQQWNRLRTDAPYLSSVGITAVWTPPAYKGTSQADVGYGPYDLYDLGEFNQKGTVRTKYGTKGELKSAVNTLHSNGIQVYGDVVMNHKAGADYTENVTAVEVNPSNRNQETSGEYNIQAWTGFNFPGRGTTYSNFKWQWFHFDGTDWDQSRSLSRIFKFTGKAWDWEVSSENGNYDYLMYADIDYDHPDVVNEMKKWGVWYANEVGLDGYRLDAVKHIKFSFLKDWVDNARAATGKEMFTVGEYWQNDLGALNNYLAKVNYNQSLFDAPLHYNFYAASTGGGYYDMRNILNNTLVASNPTKAVTLVENHDTQPGQSLESTVQPWFKPLAYAFILTRSGGYPSVFYGDMYGTKGTTTREIPALKSKIEPLLKARKDYAYGTQRDYIDNPDVIGWTREGDSTKAKSGLATVITDGPGGSKRMYVGTSNAGELWYDLTGNRTDKITIGSDGYATFPVNGGSVSVWVQQ

SEQ ID NO: 35148 - protein, 480 aa, Cytophaga sp.
NGTMMQYFEWYVPNDGQQWNRLRTDAPYLSSVGITAVWTPPAYKGTSQADVGYGPYDLYDLGEFNQKGTVRTKYGTKGELKSAVNTLHSNGIQVYGDVVMNHKAGADYTENVTAVEVNPSNRNQETSGEYNIQAWTGFNFPGRGTTYSNFKWQWFHFDGTDWDQSRSLSRIFKFTGKAWDWEVSSENGNYDYLMYADIDYDHPDVVNEMKKWGVWYANEVGLDGYRLDAVKHIKFSFLKDWVDNARAATGKEMFTVGEYWQNDLGALNNYLAKVNYNQSLFDAPLHYNFYAASTGGGYYDMRNILNNTLVASNPTKAVTLVENHDTQPGQSLESTVQPWFKPLAYAFILTRSGGYPSVFYGDMYGTKGTTTREIPALKSKIEPLLKARKDYAYGTQRDYIDEPDVIGWTREGDSTKAKSGLATVITDGPGGSKRMYVGTSNAGEIWYDLTGNRTDKITIGSDGYATFPVNGGSVSVWVQQ

SEQ ID NO: 35149 - protein, 480 aa, Cytophaga sp.
NGTMMQYFEWYVPNDGQQWNRLRTDAWYLSSVGITAVWTPPAYKGTSQADVGYGPYDLYDLGEFNQKGTVRTKYGTKGELKSAVNTLHSNGIQVYGDVVMNHKAGADYTENVTAVEVNPSNRNQETSGEYNIQAWTGFNFPGRGTTYSNFKWQWFHFDGTDWDQSRSLSRIFKFTGKAWDWEVSSENGNYDYLMYADIDYDHPDVVNEMKKWGVWYANEVGLDGYRLDAVKHIKFSFLKDWVDNARAATGKEMFTVGEYWQNDLGALNNYLAKVNYNQSLFDAPLHYNFYAASTGGGYYDMRNILNNTLVASNPTKAVTLVENHDTQPGQSLESTVQPWFKPLAYAFILTRSGGYPSVFYGDMYGTKGTTTREIPALKSKIEPLLKARKDYAYGTQRDYIDNPDVIGWTREGDSTKAKSGLATVITDGPGGSKRMYVGTSNAGEIWYDLTGNRTDKITIGSDGYATFPVNGGSVSVWVQQ

SEQ ID NO: 35150 - protein, 480 aa, Cytophaga sp.
NGTMMQYFEWYVPNDGQQWNRLRTDAPYLSSVGITAVWTPPAYKGTSQADQGYGPYDLYDLGEFNQKGTVRTKYGTKGELKSAVNTLHSNGIQVYGDVVMNHKAGADYTENVTAVEVNPSNRNQETSGEYNIQAWTGFNFPGRGTTYSNFKWQWFHFDGTDWDQSRSLSRIFKFTGKAWDWEVSSENGNYDYLMYADIDYDHPDVVNEMKKWGVWYANEVGLDGYRLDAVKHIKFSFLKDWVDNARAATGKEMFTVGEYWQNDLGALNNYLAKVNYNQSLFDAPLHYNFYAASTGGGYYDMRNILNNTLVASNPTKAVTLVENHDTQPGQSLESTVQPWFKPLAYAFILTRSGGYPSVFYGDMYGTKGTTTREIPALKSKIEPLLKARKDYAYGTQRDYIDNPDVIGWTREGDSTKAKSGLATVITDGPGGSKRMYVGTSNAGEIWYDLTGNRTDKITIGSDGYATFPVNGGSVSVWVQQ

SEQ ID NO: 35151 - protein, 480 aa, Cytophaga sp.
NGTMMQYFEWYVPNDGQQWNRLRTDAPYLSSVGITAVWTPPAYKGTSQADVGYGPYDLYDLGEFNQKGTVRTKYGTKGELKSAVNTLHSNGIQVYGDVVMNHKAGADYTENVTAVEVNPSNRNQETSGEYNIQAWTGFNFPGRGTTYSNFKWQWFHFDGTDWDQSRSLSRIFKFTGKAWDWEVSSENGNYDYLMYADIDYDHPDVVNEMKKWGVWYANEVGLDGYRLDAVKHIKFSFLKDWVDNARAATGKEMFTVGEYWQNDLGALNNYLAKVNYNQSLFDAPLHYNFYAASTRGGYYDMRNILNNTLVASNPTKAVTLVENHDTQPGQSLESTVQPWFKPLAYAFILTRSGGYPSVFYGDMYGTKGTTTREIPALKSKIEPLLKARKDYAYGTQRDYIDNPDVIGWTREGDSTKAKSGLATVITDGPGGSKRMYVGTSNAGEIWYDLTGNRTDKITIGSDGYATFPVNGGSVSVWVQQ

SEQ ID NO: 35152 - protein, 480 aa, Cytophaga sp.
NGTMMQYFEWYCPNDGQQWNRLRTDAPYLSSVGITAVWTPPAYKGTSQADVGYGPYDLYDLGEFNQKGTVRTKYGTKGELKSAVNTLHSNGIQVYGDVVMNHKAGADYTENVTAVEVNPSNRNQETSGEYNIQAWTGFNFPGRGTTYSNFKWQWFHFDGTDWDQSRSLSRIFKFTGKAWDWEVSSENGNYDYLMYADIDYDHPDVVNEMKKWGVWYANEVGLDGYRLDAVKHIKFSFLKDWVDNARAATGKEMFTVGEYWQNDLGALNNYLAKVNYNQSLFDAPLHYNFYAASTGGGYYDMRNILNNTLVASNPTKAVTLVENHDTQPGQSLESTVQPWFKPLAYAFILTRSGGYPSVFYGDMYGTKGTTTREIPALKSKIEPLLKARKDYAYGTQRDYIDNPDVIGWTREGDSTKAKSGLATVITDGPGGSKRMYVGTSNAGEIWYDLTGNRTDKITIGSDGYATFPVNGGSVSVWVQQ

SEQ ID NO: 35153 - protein, 480 aa, Cytophaga sp.
NGTMMQYFEWYVPNDGQQWNRLRTDAPYLSSVGITAVWTPPAYKGTSQADVGYGPYDLYDLGEFNQKGTVRTKYGTKGELKSAVNTLHSNGIQVYGDVVMNHKAGADYTENVTAVEVNPSNRNQETSGEYNIQAWTGFCFPGRGTTYSNFKWQWFHFDGTDWDQSRSLSRIFKFTGKAWDWEVSSENGNYDYLMYADIDYDHPDVVNEMKKWGVWYANEVGLDGYRLDAVKHIKFSFLKDWVDNARAATGKEMFTVGEYWQNDLGALNNYLAKVNYNQSLFDAPLHYNFYAASTGGGYYDMRNILNNTLVASNPTKAVTLVENHDTQPGQSLESTVQPWFKPLAYAFILTRSGGYPSVFYGDMYGTKGTTTREIPALKSKIEPLLKARKDYAYGTQRDYIDNPDVIGWTREGDSTKAKSGLATVITDGPGGSKRMYVGTSNAGEIWYDLTGNRTDKITIGSDGYATFPVNGGSVSVWVQQ

SEQ ID NO: 35154 - protein, 480 aa, Cytophaga sp.
NGTMMQYFEWYVPNDGQQWNRLRTDAPYLSSVGITAVWTPPAYKGTSQADVGYGPYDLYDLGEFNQKGTVRTKYGTKGELKSAVNTLHSNGIQVYGDVVMNHKAGADYTENVTAVEVNPSNRNQETSGEYNIQAWTGFNFPGRGTTYSNFKWQWFHFDGTDWDQSRSLSRIFKFTGKAWDWEVSSENGNYDYLMYADIDYDHPDVVNEMKKWGVWYANEVGLDGYRLDAVKHIKFSFLKDWVDNARAATGKEMFTVGEYWQNDLGALNNYLAKVNYNQSLFDAPLHYNFYAASTGGGYYDMRNILNNTLVASNPTKAVTLVENHDTQPGQSLESTVQPWFKPLAYAFILTRSGGYPSVFYGDMYGTKGTTTREIPALKSKIEPLLKARKDYAYGTQRDYIDNPDVIGWTREGDSDKAKSGLATVITDGPGGSKRMYVGTSNAGEIWYDLTGNRTDKITIGSDGYATFPVNGGSVSVWVQQ

SEQ ID NO: 35155 - protein, 480 aa, Cytophaga sp.
NGTMMQYFEWYVPNDGQQWNRLRTDAGYLSSVGITAVWTPPAYKGTSQADVGYGPYDLYDLGEFNQKGTVRTKYGTKGELKSAVNTLHSNGIQVYGDVVMNHKAGADYTENVTAVEVNPSNRNQETSGEYNIQAWTGFNFPGRGTTYSNFKWQWFHFDGTDWDQSRSLSRIFKFTGKAWDWEVSSENGNYDYLMYADIDYDHPDVVNEMKKWGVWYANEVGLDGYRLDAVKHIKFSFLKDWVDNARAATGKEMFTVGEYWQNDLGALNNYLAKVNYNQSLFDAPLHYNFYAASTGGGYYDMRNILNNTLVASNPTKAVTLVENHDTQPGQSLESTVQPWFKPLAYAFILTRSGGYPSVFYGDMYGTKGTTTREIPALKSKIEPLLKARKDYAYGTQRDYIDNPDVIGWTREGDSTKAKSGLATVITDGPGGSKRMYVGTSNAGEIWYDLTGNRTDKITIGSDGYATFPVNGGSVSVWVQQ

SEQ ID NO: 35156 - protein, 480 aa, Cytophaga sp.
NGTMMQYFEWYVPNDGQQWNRLRTDAPYLSSVGITAVWTPPAYKGTSQADSGYGPYDLYDLGEFNQKGTVRTKYGTKGELKSAVNTLHSNGIQVYGDVVMNHKAGADYTENVTAVEVNPSNRNQETSGEYNIQAWTGFNFPGRGTTYSNFKWQWFHFDGTDWDQSRSLSRIFKFTGKAWDWEVSSENGNYDYLMYADIDYDHPDVVNEMKKWGVWYANEVGLDGYRLDAVKHIKFSFLKDWVDNARAATGKEMFTVGEYWQNDLGALNNYLAKVNYNQSLFDAPLHYNFYAASTGGGYYDMRNILNNTLVASNPTKAVTLVENHDTQPGQSLESTVQPWFKPLAYAFILTRSGGYPSVFYGDMYGTKGTTTREIPALKSKIEPLLKARKDYAYGTQRDYIDNPDVIGWTREGDSTKAKSGLATVITDGPGGSKRMYVGTSNAGEIWYDLTGNRTDKITIGSDGYATFPVNGGSVSVWVQQ

SEQ ID NO: 35157 - protein, 480 aa, Cytophaga sp.
NGTMMQYFEWYVPNDGQQWNRLRTDAPYLSSVGITAVWTPPAYKGTSQADVGYGPYDLYDLGEFNQKGTVRTKYGTKGELKSAVNTLHSNGIQVYGDVVMNHKAGADYTENVTAVEVNPSNRNQETSGEYNIQAWTGFNFPGRGTTYSAFKWQWFHFDGTDWDQSRSLSRIFKFTGKAWDWEVSSENGNYDYLMYADIDYDHPDVVNEMKKWGVWYANEVGLDGYRLDAVKHIKFSFLKDWVDNARAATGKEMFTVGEYWQNDLGALNNYLAKVNYNQSLFDAPLHYNFYAASTGGGYYDMRNILNNTLVASNPTKAVTLVENHDTQPGQSLESTVQPWFKPLAYAFILTRSGGYPSVFYGDMYGTKGTTTREIPALKSKIEPLLKARKDYAYGTQRDYIDNPDVIGWTREGDSTKAKSGLATVITDGPGGSKRMYVGTSNAGEIWYDLTGNRTDKITIGSDGYATFPVNGGSVSVWVQQ

SEQ ID NO: 35158 - protein, 480 aa, Cytophaga sp.
NGTMMQYFEWYVPNDGQQWNRLRTDAPYLSSVGITAVWTPPAYKGTSQADVGYGPYDLYDLGEFNQKGTVRTKYGTKRELKSAVNTLHSNGIQVYGDVVMNHKAGADYTENVTAVEVNPSNRNQETSGEYNIQAWTGFNFPGRGTTYSNFKWQWFHFDGTDWDQSRSLSRIFKFTGKAWDWEVSSENGNYDYLMYADIDYDHPDVVNEMKKWGVWYANEVGLDGYRLDAVKHIKFSFLKDWVDNARAATGKEMFTVGEYWQNDLGALNNYLAKVNYNQSLFDAPLHYNFYAASTGGGYYDMRNILNNTLVASNPTKAVTLVENHDTQPGQSLESTVQPWFKPLAYAFILTRSGGYPSVFYGDMYGTKGTTTREIPALKSKIEPLLKARKDYAYGTQRDYIDNPDVIGWTREGDSTKAKSGLATVITDGPGGSKRMYVGTSNAGEIWYDLTGNRTDKITIGSDGYATFPVNGGSVSVWVQQ

SEQ ID NO: 35159 - protein, 480 aa, Cytophaga sp.
NGTMMQYFEWYVPNDGQQWNRLRTDAPYLSSVGITAVWTPPAYKGTSQADVGYGPYDLYDLGEFNQKGTVRTKYGTKGELKSAVNTLHSNGIQVYGDVVMNHKAGADYTENVTAVEVNPSNRNQETSGEYNIQAWTGFNFPGRGTTYSNFKWQWFHFDGTDWDQSRSLSRIFKFTGKAWDWEVSSENGNYDYLMYADIDYDHPDVVNEMKKWGVWYANEVGLDGYRLDAVKHIKFSFLKDWVDNARAATGKEMFTVGEYWQNDLGALNNYLAKVNYNQSLFDAPLHYNFYAASTGGGYYDMRNILNNTLVASNPTKAVTLVENHDTQPGQSLESTVQPWFKPLAYAFILTRSGGYPSVFYGDMYGTKGTTYREIPALKSKIEPLLKARKDYAYGTQRDYIDNPDVIGWTREGDSTKAKSGLATVITDGPGGSKRMYVGTSNAGEIWYDLTGNRTDKITIGSDGYATFPVNGGSVSVWVQQ

SEQ ID NO: 35160 - protein, 480 aa, Cytophaga sp.
NGTMMQYFEWYVPNDGQQWNRLRTDAPYLSSVGITAVWTPPAYKGTSQADVGYGPYDLYDLGEFYQKGTVRTKYGTKGELKSAVNTLHSNGIQVYGDVVMNHKAGADYTENVTAVEVNPSNRNQETSGEYNIQAWTGFNFPGRGTTYSNFKWQWFHFDGTDWDQSRSLSRIFKFTGKAWDWEVSSENGNYDYLMYADIDYDHPDVVNEMKKWGVWYANEVGLDGYRLDAVKHIKFSFLKDWVDNARAATGKEMFTVGEYWQNDLGALNNYLAKVNYNQSLFDAPLHYNFYAASTGGGYYDMRNILNNTLVASNPTKAVTLVENHDTQPGQSLESTVQPWFKPLAYAFILTRSGGYPSVFYGDMYGTKGTTTREIPALKSKIEPLLKARKDYAYGTQRDYIDNPDVIGWTREGDSTKAKSGLATVITDGPGGSKRMYVGTSNAGEIWYDLTGNRTDKITIGSDGYATFPVNGGSVSVWVQQ

SEQ ID NO: 35161 - protein, 480 aa, Cytophaga sp.
NGTMMQYFEWYVPNDGQQWNRLRTDAPYLSSVGITAVWTPPAYKGTSQADVGYGPYDLYDLGEFNQKGTVRTKYGTKGELKSAVNTLHSNGIQVYGDVVMNHKAGADYTENVTAVEVNPSNRNQETSGEYNIQAWTGFNFPGRGTTYSNFKWQWFHFDGTDWDQSRSLSRIFKFTGKAWDWEVSSENGNYDYLMYADIDYDHPDVVNEMKKWGVWYANEVGLDGYRLDAVKHIKFSFLKDWVDNARAATGKEMFTVGEYWQNDLGALNNYLMKVNYNQSLFDAPLHYNFYAASTGGGYYDMRNILNNTLVASNPTKAVTLVENHDTQPGQSLESTVQPWFKPLAYAFILTRSGGYPSVFYGDMYGTKGTTTREIPALKSKIEPLLKARKDYAYGTQRDYIDNPDVIGWTREGDSTKAKSGLATVITDGPGGSKRMYVGTSNAGEIWYDLTGNRTDKITIGSDGYATFPVNGGSVSVWVQQ

SEQ ID NO: 35162 - protein, 480 aa, Cytophaga sp.
NGTMMQYFEWYVPNDGQQWNRLRTDAPYLSSVGITAVWTPPAYKGTSQADVGYGPYDLYDLGEFNQKGTVRTKYGTKGELKSAVNTLHSNGIQVYGDVVMNHKAGADYTENVTAVEVNPSNRNQETSGEYNIQAWTGFNFPGRGTTYSNFKWQWFHFDGTDWDQSRSLSRIFKFTGKAWDWEVSSENGNYDYLMYADIDYDHPDVVNEMKKWGVWYANEVGLDGYRLDAVKHIKFSFLKDWVDNARAATGKEMFTVGEYWQNDLGALNNYLAKVNGNQSLFDAPLHYNFYAASTGGGYYDMRNILNNTLVASNPTKAVTLVENHDTQPGQSLESTVQPWFKPLAYAFILTRSGGYPSVFYGDMYGTKGTTTREIPALKSKIEPLLKARKDYAYGTQRDYIDNPDVIGWTREGDSTKAKSGLATVITDGPGGSKRMYVGTSNAGEIWYDLTGNRTDKITIGSDGYATFPVNGGSVSVWVQQ

SEQ ID NO: 35163 - protein, 480 aa, Cytophaga sp.
NGTMMQYFEWYVPNDGQQWNRLRTDAFYLSSVGITAVWTPPAYKGTSQADVGYGPYDLYDLGEFNQKGTVRTKYGTKGELKSAVNTLHSNGIQVYGDVVMNHKAGADYTENVTAVEVNPSNRNQETSGEYNIQAWTGFNFPGRGTTYSNFKWQWFHFDGTDWDQSRSLSRIFKFTGKAWDWEVSSENGNYDYLMYADIDYDHPDVVNEMKKWGVWYANEVGLDGYRLDAVKHIKFSFLKDWVDNARAATGKEMFTVGEYWQNDLGALNNYLAKVNYNQSLFDAPLHYNFYAASTGGGYYDMRNILNNTLVASNPTKAVTLVENHDTQPGQSLESTVQPWFKPLAYAFILTRSGGYPSVFYGDMYGTKGTTTREIPALKSKIEPLLKARKDYAYGTQRDYIDNPDVIGWTREGDSTKAKSGLATVITDGPGGSKRMYVGTSNAGEIWYDLTGNRTDKITIGSDGYATFPVNGGSVSVWVQQ

SEQ ID NO: 35164 - protein, 480 aa, Cytophaga sp.
NGTMMQYFEWYVPNDGQQWNRLRTDAPYLSSVGITAVWTPPAYKGTSQADVGYGPYDLYDLGEFNQKGTVRTKYGTKGELKSAVNTLHSNGIQVYGDVVMNHKAGADKTENVTAVEVNPSNRNQETSGEYNIQAWTGFNFPGRGTTYSNFKWQWFHFDGTDWDQSRSLSRIFKFTGKAWDWEVSSENGNYDYLMYADIDYDHPDVVNEMKKWGVWYANEVGLDGYRLDAVKHIKFSFLKDWVDNARAATGKEMFTVGEYWQNDLGALNNYLAKVNYNQSLFDAPLHYNFYAASTGGGYYDMRNILNNTLVASNPTKAVTLVENHDTQPGQSLESTVQPWFKPLAYAFILTRSGGYPSVFYGDMYGTKGTTTREIPALKSKIEPLLKARKDYAYGTQRDYIDNPDVIGWTREGDSTKAKSGLATVITDGPGGSKRMYVGTSNAGEIWYDLTGNRTDKITIGSDGYATFPVNGGSVSVWVQQ

SEQ ID NO: 35165 - protein, 480 aa, Cytophaga sp.
NGTMMQYFEWYVPNDGQQWNRLRTDAPYLSSVGITAVWTPPAYKGTSQADVGYGPYDLYDLGEFNQKGTVRTKYGTKGELKSAVNTLHSNGIQVYGDVVMNHKAGADYTENVTAVEVNPSNRNQETSGEYNIQAWTGFNFPGRGTTYSNFKWQWFHFDGTDWDQSRSLSRIFKFTGKAWDWEVSSENGNYDYLMYADIDYDHPDVVNEMKKWGVWYANEVGLDGYRLDAVKHIKFSFLKDWVDNARAATGKEMFTVGEYWQNDLGALNNYLAKVNYNQSLFDAPLHYNFYAASTGGGYYDMRNILNNTLVASNPTKAVTLVENHDTQPGQSLESTVQPWFKPLAYAFILTRSGGYPSVFYGDMYGTKGTTTREIPALKSKIEPLLKARKIYAYGTQRDYIDNPDVIGWTREGDSTKAKSGLATVITDGPGGSKRMYVGTSNAGEIWYDLTGNRTDKITIGSDGYATFPVNGGSVSVWVQQ

SEQ ID NO: 35166 - protein, 480 aa, Cytophaga sp.
NGTMMQYFEWYVPNDGQQWNRLRTDAPYLSSVGITAVWTPPAYKGTSQADVGYGPYDLYDLGEFNQKGTVRTKYGTKGELKSAVNTLHSNGIQVYGDVVMNHKAGADYTENVTAVEVNPSNRNQETSGEYNIQAWTGFNFPGRGTTYSNFKWQWFHFDGTDWDQSRSLSRIFKFTGKAWDWEVSSENGNYDYLMYADIDYDHPDVVNEMKKWGVWYANEVGLDGYRLDAVKHIKFSFLKDWVDNARAATGKEMFTVGEYWQNDLGALNNYLAKVNYNQSLFDAPLHYNFYAASTGGGYYDMRNILNNTLVADNPTKAVTLVENHDTQPGQSLESTVQPWFKPLAYAFILTRSGGYPSVFYGDMYGTKGTTTREIPALKSKIEPLLKARKDYAYGTQRDYIDNPDVIGWTREGDSTKAKSGLATVITDGPGGSKRMYVGTSNAGEIWYDLTGNRTDKITIGSDGYATFPVNGGSVSVWVQQ

SEQ ID NO: 35167 - protein, 480 aa, Cytophaga sp.
NGTMMQYFEWYVPNDGQQWNRLRTDAPYLSSVGITAVWTPPAYKGTSQADVGYGPYDLYDLGEFNQKGTVRTKYGTKGELKSAVNTLHSNGIQVYGDVVMNHKAGADYTENVTAVEVNPSNRNQETSGEYNIFAWTGFNFPGRGTTYSNFKWQWFHFDGTDWDQSRSLSRIFKFTGKAWDWEVSSENGNYDYLMYADIDYDHPDVVNEMKKWGVWYANEVGLDGYRLDAVKHIKFSFLKDWVDNARAATGKEMFTVGEYWQNDLGALNNYLAKVNYNQSLFDAPLHYNFYAASTGGGYYDMRNILNNTLVASNPTKAVTLVENHDTQPGQSLESTVQPWFKPLAYAFILTRSGGYPSVFYGDMYGTKGTTTREIPALKSKIEPLLKARKDYAYGTQRDYIDNPDVIGWTREGDSTKAKSGLATVITDGPGGSKRMYVGTSNAGEIWYDLTGNRTDKITIGSDGYATFPVNGGSVSVWVQQ

SEQ ID NO: 35168 - protein, 480 aa, Cytophaga sp.
NGTMMQYFEWYVPNDGQQWNRLRQDAPYLSSVGITAVWTPPAYKGTSQADVGYGPYDLYDLGEFNQKGTVRTKYGTKGELKSAVNTLHSNGIQVYGDVVMNHKAGADYTENVTAVEVNPSNRNQETSGEYNIQAWTGFNFPGRGTTYSNFKWQWFHFDGTDWDQSRSLSRIFKFTGKAWDWEVSSENGNYDYLMYADIDYDHPDVVNEMKKWGVWYANEVGLDGYRLDAVKHIKFSFLKDWVDNARAATGKEMFTVGEYWQNDLGALNNYLAKVNYNQSLFDAPLHYNFYAASTGGGYYDMRNILNNTLVASNPTKAVTLVENHDTQPGQSLESTVQPWFKPLAYAFILTRSGGYPSVFYGDMYGTKGTTTREIPALKSKIEPLLKARKDYAYGTQRDYIDNPDVIGWTREGDSTKAKSGLATVITDGPGGSKRMYVGTSNAGEIWYDLTGNRTDKITIGSDGYATFPVNGGSVSVWVQQ

SEQ ID NO: 35169 - protein, 480 aa, Cytophaga sp.
NGTMMQYFEWYVPNDGQQWNRLRTDAPYLSSVGITAVWTPPAYKGTSQADVGYGPYDLYDLGEFNQKGTVRTKYGTKGELKSAVNTLHSNGIQVYGDVVMNHKAGADYTENVTAVEVNPSNRNQETSGEYNIQAWTGFNFPGRGTTYSNFKWQWFHFDGTDWDQSRSLSRIFKFTGKAWDWEVSSENGNYDYLMYADIDYDHPDVVNEMKKWGVWYANEVGLDGYRLDAVKHIKFSFLKDWVDNARAATGKEMFTVGEYWQNDLGALNNYLAKVNYNQSLFDAPLHYNFYAASTGGGYYDMRNILNNTLVASNPTKAVTLVENHDTQPGQSLESTVQPWFKPLAYAFILTRSGGYPSVFYGDMYGTKGTTTREIPALKSKIEPLLKARKCYAYGTQRDYIDNPDVIGWTREGDSTKAKSGLATVITDGPGGSKRMYVGTSNAGEIWYDLTGNRTDKITIGSDGYATFPVNGGSVSVWVQQ

SEQ ID NO: 35170 - protein, 480 aa, Cytophaga sp.
NGTMMQYFEWYVPNDGQQWNRLRTDAPYLSSVGITAVWTPPAYKGTSQADVGYGPYDLYDLGEFNQKGTVRTKYGTKGELISAVNTLHSNGIQVYGDVVMNHKAGADYTENVTAVEVNPSNRNQETSGEYNIQAWTGFNFPGRGTTYSNFKWQWFHFDGTDWDQSRSLSRIFKFTGKAWDWEVSSENGNYDYLMYADIDYDHPDVVNEMKKWGVWYANEVGLDGYRLDAVKHIKFSFLKDWVDNARAATGKEMFTVGEYWQNDLGALNNYLAKVNYNQSLFDAPLHYNFYAASTGGGYYDMRNILNNTLVASNPTKAVTLVENHDTQPGQSLESTVQPWFKPLAYAFILTRSGGYPSVFYGDMYGTKGTTTREIPALKSKIEPLLKARKDYAYGTQRDYIDNPDVIGWTREGDSTKAKSGLATVITDGPGGSKRMYVGTSNAGEIWYDLTGNRTDKITIGSDGYATFPVNGGSVSVWVQQ

SEQ ID NO: 35171 - protein, 480 aa, Cytophaga sp.
NGTMMQYFEWYVPNDGQQWNRLRTDAPYLSSVGITAVWTPPAYKGTSQADVGYGPYDLYDLGEFNQKGTVRTKYGTKGELKSAVNTLHSNGIQVYGDVVMNHKAGADYTENVTAVEVNPSNRNQETSGEYNIQAWTGFNFPGRGTTYSNFKWQWFHFDGTDWDQSRSLSRIFKFTGKAWDWEVSSENGNYDYLMYADIDYDHPDVVLEMKKWGVWYANEVGLDGYRLDAVKHIKFSFLKDWVDNARAATGKEMFTVGEYWQNDLGALNNYLAKVNYNQSLFDAPLHYNFYAASTGGGYYDMRNILNNTLVASNPTKAVTLVENHDTQPGQSLESTVQPWFKPLAYAFILTRSGGYPSVFYGDMYGTKGTTTREIPALKSKIEPLLKARKDYAYGTQRDYIDNPDVIGWTREGDSTKAKSGLATVITDGPGGSKRMYVGTSNAGEIWYDLTGNRTDKITIGSDGYATFPVNGGSVSVWVQQ

SEQ ID NO: 35172 - protein, 480 aa, Cytophaga sp.
NGTMMQYFEWYVPNDGQQWNRLRTDAPYLSSVGITAVWTPPAYKGTSQADVGYGPYDLYDLGEFNQKGTVRTKYGTKGELKSAVNTLHSNGIQVYGDVVMNHKAGADYTENVTAVEVNPSNRNQETSGEYNIQAWTGFNFPGRGTTYSNFKWQWFHFDGTDWDQSRSLSRIFKFTGKAWDWEVSSENGNYDYLMYADIDYDHPDVVNEMKKWGVWYANEVGLDGYRLDAVKHIKFSFLKDWVDNARAATGKEMFTVGEYWQNDLGALNNYLAKVNYNQSLFDAPLHYNFYAASTGGGYYDMRNILNNTLVASNPTKAVTLVENHDTQPGQSLESTVQPWFKPLAYAFILTRSGGYPSVFYGDMYGTKGTTTREIPALKSKIEPLLKARKDYAYGTQRDYIDNPDVIGWTREGDSTKAKSGLATVITDGPGGSKRMYVGTSNAGEIWYDLTGNRTDKITIGSDGYATFPVNHGSVSVWVQQ

SEQ ID NO: 35173 - protein, 480 aa, Cytophaga sp.
NGTMMQYFEWYVPNDGQQWNRLRTDAPYLSSVGITAVWTPPAYKGTSQADVGYGPYDLYDLGEFNQKGTVRTKYGTKGELKSAVNTLHSNGIQVYGDVVMNHKAGADYTENVTAVEVNPSNRNQETSGEYNIQAWTGFNFPGRGTTYSNFKWQWFHFDGTDWDQSRSLSRIFKFTGKAWDWEVSSENGNYDYLMYADIDYDHPDVVNEMKKWGVWYANEVGLDGYRLDAVKHIKFSFLKDWVDNARAATGKEMFTVGEYWQNDLGALNNYLAKVNYNQSLFDAPLHYNFYAASTGGGYYDMRNILNNTLVASNPTKAVTLVENHDTQPGQSLESTVQPWFKPLAYAFILTRSGGYPSVFYGDMYGTKGTTTREIPALKSKIEPLLKARKDYAYGTQRDYIDNPDVIGWTREGDSTLAKSGLATVITDGPGGSKRMYVGTSNAGEIWYDLTGNRTDKITIGSDGYATFPVNGGSVSVWVQQ

SEQ ID NO: 35174 - protein, 480 aa, Cytophaga sp.
NGTMMQYFEWYVPNDGQQWNRLRTDAPYLSSVGITAVWTPPAYKGTSQADVGYGPYDLYDLGEFNQKGTVRTKYGTKGELKSAVNTLHSNGIQVYGDVVMNHKAGADYTENVTAVEVNPSNRNQETSGEYNIQAWTGFNFPGRGTTYSNFKWQWFHFDGTDWDQSRSLSRIFKFTGKAWDWEVSSENGNYDYLMYADIDYDHPDVVNEMKKWGVWYANEVGLDGYRLDAVKHIKFSFLKDWVDNARAATGKEMFTVGEYWQNDLGALNNYLAKVNYNQSLFDAPLHYNFYAASEGGGYYDMRNILNNTLVASNPTKAVTLVENHDTQPGQSLESTVQPWFKPLAYAFILTRSGGYPSVFYGDMYGTKGTTTREIPALKSKIEPLLKARKDYAYGTQRDYIDNPDVIGWTREGDSTKAKSGLATVITDGPGGSKRMYVGTSNAGEIWYDLTGNRTDKITIGSDGYATFPVNGGSVSVWVQQ

SEQ ID NO: 35175 - protein, 480 aa, Cytophaga sp.
NGTMMQYFEWYVPNDGQQWNRLRTDAPYLSSVGITAVWTPPAYKGTSQADVGYGPYDLYDLGEFNQKGTVRTKYGTKGELKSAVNTLHSNGIQVYGDVVMNHKAGADYTENVTAVEVNPSNRNQETSGEYNIQAWTGFNFPGRGTTYSNFKWQWFHFDGTDWDQSRSLSRIFKFTGKAWDWEVSSENGNYDYLMYADIDYDHPDVVNEMKKWGVWYANEVGLDGYRLDAVKHIKFSFLKDWVDNARAATGKEMFTVGEYWQNDLGALNNYLAKVNYNQSLFDAPLHYNFYAASTGGGYYDMRNILNNTLVASNPTKAVTLVENHDTQPGQSLESTVQPWFKPLAYAFILTRMGGYPSVFYGDMYGTKGTTTREIPALKSKIEPLLKARKDYAYGTQRDYIDNPDVIGWTREGDSTKAKSGLATVITDGPGGSKRMYVGTSNAGEIWYDLTGNRTDKITIGSDGYATFPVNGGSVSVWVQQ

SEQ ID NO: 35176 - protein, 480 aa, Cytophaga sp.
NGTMMQYFEWYVPNDGQQWNRLRTDAPYLSSVGITAVWTPPAYKGTSQADVGYGPYDLYDLGEFNQKGTVRTKYGTKGELKSAVNTLHSNGIQVYGDVVMNHKAGADYTENVTAVEVNPSNRNQETSGEYNIQAWTGFNFPGRGTTYSNFKWQWFHFDGTDWDQSRSLSRIFKFTGKAWDWEVSSENGNYDYLMYADIDYDHPDVVNEMKKWGVWYANEVGLDGYRLDAVKHIKFSFLKDWVDNARAATGKEMFTVGEYWQNDLGALNNYLAKVNYNQSLFDAPLHYNFYAASTGGGYYDMRNILNNTLVASNPTKAVTLVENHDTQPGQSLESTVQPWFKPLAYAFILTRSGGYPSVFYGDMYGTKGTTTREIPALKSKIEPLLKARKDYAYGTQRDYIDNPDVIGWTREGDSTKAKSGLATVITDGPGGSKRMYVGTRNAGEIWYDLTGNRTDKITIGSDGYATFPVNGGSVSVWVQQ

SEQ ID NO: 35177 - protein, 480 aa, Cytophaga sp.
NGTMMQYFEWYVPNDGQQWNRLRTDAPYLSSVGITAVWTPPAYKGTSQADVGYGPYDLYDLGEFNQKGTVRTKYGTKGELKSAVNTLHSNGIQVYGDVVMNHKAGADYTENVTAVEVNPSNRNQETSGEYNIQAWTGFNFPGRGTTYSNFKWQWFHFDGTDWDQSRSLSRIFKFTGKAWDWEVSSENGNYDYLMYADIDYDHPDVVNEMKKWGVWYANEVGLDGYRLDAVKHIKFSFLKDWVDNARAATGKEMFTVGEYWQNDLGALNNYLAKVNYNQSLFDAPLHYNFYAASTGGGYYDMRNILNNTLVASNPTKAVTLVENHDTQPGQSLESTVQPWFKPLAYAFILTRSGGYPSVFYGDMYGTKGTTTREIPALKSKIEPLLKARKDYAYGTQRDYIDNPDVIGWTREGDSTKAKSGLATVITDGPGGSKRMYTGTSNAGEIWYDLTGNRTDKITIGSDGYATFPVNGGSVSVWVQQ

SEQ ID NO: 35178 - protein, 480 aa, Cytophaga sp.
NGTMMQYFEWYVPNDGQQWNRLRTDAPYLSSVGITAVWTPPAYKGTSQADVGYGPYDLYDLGEFNQKGTVRTKYGTKGELKSAVNTLHSNGIQVYGDVVMNHKAGADYTENVTAVEVNPSNRNQETSGEYNIQAWTGFNFPGRGTTYSNFKWQWFHFDGTDWDQSRNLSRIFKFTGKAWDWEVSSENGNYDYLMYADIDYDHPDVVNEMKKWGVWYANEVGLDGYRLDAVKHIKFSFLKDWVDNARAATGKEMFTVGEYWQNDLGALNNYLAKVNYNQSLFDAPLHYNFYAASTGGGYYDMRNILNNTLVASNPTKAVTLVENHDTQPGQSLESTVQPWFKPLAYAFILTRSGGYPSVFYGDMYGTKGTTTREIPALKSKIEPLLKARKDYAYGTQRDYIDNPDVIGWTREGDSTKAKSGLATVITDGPGGSKRMYVGTSNAGEIWYDLTGNRTDKITIGSDGYATFPVNGGSVSVWVQQ

SEQ ID NO: 35179 - protein, 480 aa, Cytophaga sp.
NGTMMQYFEWYVPNDGQQWNRLRTDAPYLSSVGITAVWTPPAYKGTSQADVGYGPYDLYDLGEFNQKGTVRTKYGTKIELKSAVNTLHSNGIQVYGDVVMNHKAGADYTENVTAVEVNPSNRNQETSGEYNIQAWTGFNFPGRGTTYSNFKWQWFHFDGTDWDQSRSLSRIFKFTGKAWDWEVSSENGNYDYLMYADIDYDHPDVVNEMKKWGVWYANEVGLDGYRLDAVKHIKFSFLKDWVDNARAATGKEMFTVGEYWQNDLGALNNYLAKVNYNQSLFDAPLHYNFYAASTGGGYYDMRNILNNTLVASNPTKAVTLVENHDTQPGQSLESTVQPWFKPLAYAFILTRSGGYPSVFYGDMYGTKGTTTREIPALKSKIEPLLKARKDYAYGTQRDYIDNPDVIGWTREGDSTKAKSGLATVITDGPGGSKRMYVGTSNAGEIWYDLTGNRTDKITIGSDGYATFPVNGGSVSVWVQQ

SEQ ID NO: 35180 - protein, 480 aa, Cytophaga sp.
NGTMMQYFEWYVPNDGQQWNRLRTDAPYLSSVGITAVWTPPAYKGTSQADRGYGPYDLYDLGEFNQKGTVRTKYGTKGELKSAVNTLHSNGIQVYGDVVMNHKAGADYTENVTAVEVNPSNRNQETSGEYNIQAWTGFNFPGRGTTYSNFKWQWFHFDGTDWDQSRSLSRIFKFTGKAWDWEVSSENGNYDYLMYADIDYDHPDVVNEMKKWGVWYANEVGLDGYRLDAVKHIKFSFLKDWVDNARAATGKEMFTVGEYWQNDLGALNNYLAKVNYNQSLFDAPLHYNFYAASTGGGYYDMRNILNNTLVASNPTKAVTLVENHDTQPGQSLESTVQPWFKPLAYAFILTRSGGYPSVFYGDMYGTKGTTTREIPALKSKIEPLLKARKDYAYGTQRDYIDNPDVIGWTREGDSTKAKSGLATVITDGPGGSKRMYVGTSNAGEIWYDLTGNRTDKITIGSDGYATFPVNGGSVSVWVQQ

SEQ ID NO: 35181 - protein, 480 aa, Cytophaga sp.
NGTMMQYFEWYVPNDGQQWNRLRTDAPYLSSVGITAVWTPPAYKGTSQADVGYGPYDLYDLGEFNQKGTVRTKYGTKGELKSAVNTLHSNGIQVYGDVVMNHKAGADYTENVTAVEVNPSNRNQETSGEYNIQAWTGFNFPGRGTTYSNFKWQWFHFDGTDWDQSRSLSRIFKFTGKAWDWEVSSENGNYDYLMYADIDYDHPDVVNEMKKWGVWYANEVGLDGYRLDAVKHIKFSFLKDWVDNARAATGKEMFTVGEYWQNDLGALNNYLAKVNYNQSLFDAPLHYNFYAASTGGGYYDMRNILNNTLVASNPTKAVTLVENHDTQPGQSLESTVQPWFKPLAYAFILTRSGGYPSVFYGDMYGTKGTTTREIPALKSKIEPLLKARKDYAYGTQRDYIDNPDVIGWTREGDSQKAKSGLATVITDGPGGSKRMYVGTSNAGEIWYDLTGNRTDKITIGSDGYATFPVNGGSVSVWVQQ

SEQ ID NO: 35182 - protein, 480 aa, Cytophaga sp.
NGTMMQYFEWYVPNDGQQWNRLRTDAPYLSSVGITAVWTPPAYKGTSQADVGYGPYDLYDLGEFNQKGTVRTKYGTKGELKSAVNTLHSNGIQVYGDVVMNHKAGADYTENVTAVEVNPSNRNQETSGEYNIQAWTGFNFPGRGTTYSNFKWQWFHFDGTDWDQSRSLSRIFKFTGKAWDWEVSSENGNYDYLMYADIDYDHPDVVNEMKKWGVWYANEVGLDGYRLDAVKHIKFSFLKDWVDNARAATGKEMFTVGEYWQNDLGALNNYLAKVNYNQSLFDAPLHYNFYAASTGGGYYDMRNILNNTLVASNPTKAVTLVENHDTQPGQSLESTVQPWFKPLAYAFILTRSGGYPSVFYGDMYGTKGTTTREIPALKSKIEPLLKARKDYAYGTQRDYIDNPDVIGWTREGDSTKAKSGLATVITDGPGGSKRMYVGTSNAGEIWYDLTGNRTDKITIGSDGYANFPVNGGSVSVWVQQ

SEQ ID NO: 35183 - protein, 480 aa, Cytophaga sp.
NGTMMQYFEWYVPNDGQQWNRLRTDAPYLSSVGITAVWTPPAYKGTSQADVGYGPYDLYDLGEFNQKGTVRTKYGTKGELKSAVNTLHSNGIQVYGDVVMNHKAGADYTENVTAVEVNPSNRNQETSGEYNIQAWTGFNFPGRGTTYSCFKWQWFHFDGTDWDQSRSLSRIFKFTGKAWDWEVSSENGNYDYLMYADIDYDHPDVVNEMKKWGVWYANEVGLDGYRLDAVKHIKFSFLKDWVDNARAATGKEMFTVGEYWQNDLGALNNYLAKVNYNQSLFDAPLHYNFYAASTGGGYYDMRNILNNTLVASNPTKAVTLVENHDTQPGQSLESTVQPWFKPLAYAFILTRSGGYPSVFYGDMYGTKGTTTREIPALKSKIEPLLKARKDYAYGTQRDYIDNPDVIGWTREGDSTKAKSGLATVITDGPGGSKRMYVGTSNAGEIWYDLTGNRTDKITIGSDGYATFPVNGGSVSVWVQQ

SEQ ID NO: 35184 - protein, 480 aa, Cytophaga sp.
NGTMMQYFEWYVPNDGQQWNRLRTDAPYLSSVGITAVWTPPAYKGTSQADVGYGPYDLYDLGEFNQKGTVRTKYGTKGELKSAVNTLHSNGIQVYGDVVMNHKAGADYTENVTAVEVNPSNRNQETSGEYNIQAWTGFNFPGRGTTYSNFKWQWFHFDGTDWDQSRSLSRIFKFTGKAWDWEVSSENGNYDYLMYADIDYDHPDVVNEMKKWGVWYANEVGLDGYRLDAVKHIKFSFLKDWVDNARAATGKEMFTVGEYWQNDLGALNNYLAKVNYNQSLFDAPLHYNFYAASTGGGYYDMRVILNNTLVASNPTKAVTLVENHDTQPGQSLESTVQPWFKPLAYAFILTRSGGYPSVFYGDMYGTKGTTTREIPALKSKIEPLLKARKDYAYGTQRDYIDNPDVIGWTREGDSTKAKSGLATVITDGPGGSKRMYVGTSNAGEIWYDLTGNRTDKITIGSDGYATFPVNGGSVSVWVQQ

SEQ ID NO: 35185 - protein, 480 aa, Cytophaga sp.
NGTMMQYFEWYVPNDGQQWNRLRTDAPYLSSVGITAVWTPPAYKGVSQADVGYGPYDLYDLGEFNQKGTVRTKYGTKGELKSAVNTLHSNGIQVYGDVVMNHKAGADYTENVTAVEVNPSNRNQETSGEYNIQAWTGFNFPGRGTTYSNFKWQWFHFDGTDWDQSRSLSRIFKFTGKAWDWEVSSENGNYDYLMYADIDYDHPDVVNEMKKWGVWYANEVGLDGYRLDAVKHIKFSFLKDWVDNARAATGKEMFTVGEYWQNDLGALNNYLAKVNYNQSLFDAPLHYNFYAASTGGGYYDMRNILNNTLVASNPTKAVTLVENHDTQPGQSLESTVQPWFKPLAYAFILTRSGGYPSVFYGDMYGTKGTTTREIPALKSKIEPLLKARKDYAYGTQRDYIDNPDVIGWTREGDSTKAKSGLATVITDGPGGSKRMYVGTSNAGEIWYDLTGNRTDKITIGSDGYATFPVNGGSVSVWVQQ

SEQ ID NO: 35186 - protein, 480 aa, Cytophaga sp.
NGTMMQYFEWYVPNDGQQWNRLRTDAPFLSSVGITAVWTPPAYKGTSQADVGYGPYDLYDLGEFNQKGTVRTKYGTKGELKSAVNTLHSNGIQVYGDVVMNHKAGADYTENVTAVEVNPSNRNQETSGEYNIQAWTGFNFPGRGTTYSNFKWQWFHFDGTDWDQSRSLSRIFKFTGKAWDWEVSSENGNYDYLMYADIDYDHPDVVNEMKKWGVWYANEVGLDGYRLDAVKHIKFSFLKDWVDNARAATGKEMFTVGEYWQNDLGALNNYLAKVNYNQSLFDAPLHYNFYAASTGGGYYDMRNILNNTLVASNPTKAVTLVENHDTQPGQSLESTVQPWFKPLAYAFILTRSGGYPSVFYGDMYGTKGTTTREIPALKSKIEPLLKARKDYAYGTQRDYIDNPDVIGWTREGDSTKAKSGLATVITDGPGGSKRMYVGTSNAGEIWYDLTGNRTDKITIGSDGYATFPVNGGSVSVWVQQ

SEQ ID NO: 35187 - protein, 480 aa, Cytophaga sp.
NGTMMQYFEWYVPNDGQQWNRLRTDAPYLSSVGITAVWTPPAYKGTSQADVGYGPYDLYDLGEFNQKGTVRTKYGTKGELKSAVNTLHSNGIQVYGDVVMNHKAGADYTENVTAVEVNPSNRNQETSGEYNIQAWTGFNFPGRGTTYSNFKWQWFHFDGTDWDQSRSLSRIFKFTGKAWDWEVSSENGNYDYLMYADIDYDHPDVVNEMKKWGVWYANEVGLDGYRLDAVKHIKFSFLKDWVDNARAATGKEMFTVGEYWQNDLGALNNYLAKVNYNQSLFDAPLHYNFYAASTGGGYYDMRNILNNTLVASNPTKAVTLVENHDTQPGQSLESTVQPWFKPLAYAFILTRSGGYPSVFYGDMYGTKGTTTREIPALKSKIEPLLKARKDYAYGCQRDYIDNPDVIGWTREGDSTKAKSGLATVITDGPGGSKRMYVGTSNAGEIWYDLTGNRTDKITIGSDGYATFPVNGGSVSVWVQQ

SEQ ID NO: 35188 - protein, 480 aa, Cytophaga sp.
NGTMMQYFEWYVPNDGQQWNRLRTDAPYLSSVGITAVWTPPAYKGTSQADVGYGPYDLYDLGEFNQKGTVRTKYGTKGELKSAVNTLHSNGIQVYGDVVMNHKAGADYTENVTAVEVNPSNRNQETSGEYNIQAWTGFNFPGRGTTYSNFKWQWFHFDGTDWDQSRSLSRIFKFTGKAWDWEVSSENGNYDYLMYADIDYDHPDVVNEMKKWGVWYANEVGLDGYRLDAVKHIKFSFLKDWVDNARAATGKEMFTVGEYWQNDLGALNNYLAKVNYNQSLFDAPLHYNFYAASTGGGYYDMRNILNNTLVASNPTKAVTLVENHDTQPGQSLESTVQPWFKPLAYAFILTRSGGYPSVFYGDMYGTKGTTTREIPALKSKIEPLLKARKDYAYGTQRDYIDNPDVIGWTREGDSTYAKSGLATVITDGPGGSKRMYVGTSNAGEIWYDLTGNRTDKITIGSDGYATFPVNGGSVSVWVQQ

SEQ ID NO: 35189 - protein, 480 aa, Cytophaga sp.
NGTMMQYFEWYIPNDGQQWNRLRTDAPYLSSVGITAVWTPPAYKGTSQADVGYGPYDLYDLGEFNQKGTVRTKYGTKGELKSAVNTLHSNGIQVYGDVVMNHKAGADYTENVTAVEVNPSNRNQETSGEYNIQAWTGFNFPGRGTTYSNFKWQWFHFDGTDWDQSRSLSRIFKFTGKAWDWEVSSENGNYDYLMYADIDYDHPDVVNEMKKWGVWYANEVGLDGYRLDAVKHIKFSFLKDWVDNARAATGKEMFTVGEYWQNDLGALNNYLAKVNYNQSLFDAPLHYNFYAASTGGGYYDMRNILNNTLVASNPTKAVTLVENHDTQPGQSLESTVQPWFKPLAYAFILTRSGGYPSVFYGDMYGTKGTTTREIPALKSKIEPLLKARKDYAYGTQRDYIDNPDVIGWTREGDSTKAKSGLATVITDGPGGSKRMYVGTSNAGEIWYDLTGNRTDKITIGSDGYATFPVNGGSVSVWVQQ

SEQ ID NO: 35190 - protein, 480 aa, Cytophaga sp.
NGTMMQYFEWYVPNDGQQWNRLRTDAPYLSSVGITAVWTPPAYKGTSQADVGYGPYDLYDLGEFNQKGTVRTKYGTKGELKSAVNTLHSNGIQVYGDVVMNHKAGADYTENVTAVEVNPSNRNQETSFEYNIQAWTGFNFPGRGTTYSNFKWQWFHFDGTDWDQSRSLSRIFKFTGKAWDWEVSSENGNYDYLMYADIDYDHPDVVNEMKKWGVWYANEVGLDGYRLDAVKHIKFSFLKDWVDNARAATGKEMFTVGEYWQNDLGALNNYLAKVNYNQSLFDAPLHYNFYAASTGGGYYDMRNILNNTLVASNPTKAVTLVENHDTQPGQSLESTVQPWFKPLAYAFILTRSGGYPSVFYGDMYGTKGTTTREIPALKSKIEPLLKARKDYAYGTQRDYIDNPDVIGWTREGDSTKAKSGLATVITDGPGGSKRMYVGTSNAGEIWYDLTGNRTDKITIGSDGYATFPVNGGSVSVWVQQ

SEQ ID NO: 35191 - protein, 480 aa, Cytophaga sp.
NGTMMQYFEWYVPNDGQQWNRLRTDAPYLSSVGITAVWTPPAYKGTSQADVGYGPYDLYDLGEFNQKGTVRTKYGTKGELKSAVNTLHSNGIQVYGDVVMNHKAGADYTENVTAVEVNPSNRNQETSGEYNIQAWTGFNFPGRGTTYSNFKWQWFHFDGTDWDQSRSLSRIFKFTGKAWDWEVSSENGNYDYLMYADIDYDHPDVVNEMKKWGVWYANEVGLDGYRLDAVKHIKFSFLKDWVDNARAATGKEMFTVGEYWQNDLGALNNYLAKVNYNQSLFDAPLHYNFYAASTGGGYYDMRSILNNTLVASNPTKAVTLVENHDTQPGQSLESTVQPWFKPLAYAFILTRSGGYPSVFYGDMYGTKGTTTREIPALKSKIEPLLKARKDYAYGTQRDYIDNPDVIGWTREGDSTKAKSGLATVITDGPGGSKRMYVGTSNAGEIWYDLTGNRTDKITIGSDGYATFPVNGGSVSVWVQQ

SEQ ID NO: 35192 - protein, 480 aa, Cytophaga sp.
NGTMMQYFEWYVPNDGQQWNRLRTDAPYLSSVGITAVWTPPAYKGTSQADVGYGPYDLYDLGEFNQKGTVRTKYGTKGELKSAVNQLHSNGIQVYGDVVMNHKAGADYTENVTAVEVNPSNRNQETSGEYNIQAWTGFNFPGRGTTYSNFKWQWFHFDGTDWDQSRSLSRIFKFTGKAWDWEVSSENGNYDYLMYADIDYDHPDVVNEMKKWGVWYANEVGLDGYRLDAVKHIKFSFLKDWVDNARAATGKEMFTVGEYWQNDLGALNNYLAKVNYNQSLFDAPLHYNFYAASTGGGYYDMRNILNNTLVASNPTKAVTLVENHDTQPGQSLESTVQPWFKPLAYAFILTRSGGYPSVFYGDMYGTKGTTTREIPALKSKIEPLLKARKDYAYGTQRDYIDNPDVIGWTREGDSTKAKSGLATVITDGPGGSKRMYVGTSNAGEIWYDLTGNRTDKITIGSDGYATFPVNGGSVSVWVQQ

SEQ ID NO: 35193 - protein, 480 aa, Cytophaga sp.
NGTMMQYFEWYVPNDGQQWNRLRTDAPYLSSVGITAVWTPPAYKGTSQADVGYGPYDLYDLGEFNQKGTVRTKYGTKGELKSAVNTLHSNGIQVYGDVVMNHKAGADYTENVTAVEVNPSNRNQETSGEYNIQAWTGFNFPGRGTTYSNFKWQWFHFDGTDWDQSRSLSRIFKFTGKAWDWEVSSENGNYDYLMYADIDYDHPDVVNEMKKWGVWYANEVGLDGYRLDAVKHIKFSFLKDWVDNARAATGKEMFTVGEYWQNDLGALNNYLAKVNYNQSLFDAPLHYNFYAASTGGGYYDMRNILNNTLVASNPTKAVTLVENHDTQPGQSLESTVQPWFKPLAYAFILTRSGGYPEVFYGDMYGTKGTTTREIPALKSKIEPLLKARKDYAYGTQRDYIDNPDVIGWTREGDSTKAKSGLATVITDGPGGSKRMYVGTSNAGEIWYDLTGNRTDKITIGSDGYATFPVNGGSVSVWVQQ

SEQ ID NO: 35194 - protein, 480 aa, Cytophaga sp.
NGTMMQYFEWYVPNDGQQWNRLRTDAPYLSSVGITAVWTPPAYKGTSQADVGYGPYDLYDLGEFNQKGTVRTKYGTKGELKSAVNTLHSNGIQVYGDVVMNHKAGADYTENVTAVEVNPSNRNQETSGEYNIQAWTGFNFPGRGTTYSNFKWQWFHFDGTDWDQSRSLSRIFKFTGKAWDWEVSSENGNYDYLMYADIDYDHPDVVNEMKKWGVWYANEVGLDGYRLDAVKHIKFSFLKDWVDNARAATGKEMFTVGEYWQNDLGALNNYLAKVNYNQSLFDAPLHYNFYAASTGGGYYDMRNILNNTLVASNPTKAVTLVENHDTQPGQSLESTVQPWFKPLAYAFILTRSGGYPSVFYGDMYGTKGTTTREIPALKSKIEPLLKARKMYAYGTQRDYIDNPDVIGWTREGDSTKAKSGLATVITDGPGGSKRMYVGTSNAGEIWYDLTGNRTDKITIGSDGYATFPVNGGSVSVWVQQ

SEQ ID NO: 35195 - protein, 480 aa, Cytophaga sp.
NGTMMQYFEWYVPNDGQQWNRLRTDAPYLSSVGITAVWTPPAYKGTSQADVGYGPYDLYDLGEFNQKGTVRTKYGTKGELKSAVNTLHSNGIQVYGDVVMNHKAGADYTENVTAVEVNPSNRNQETSGEYNIQAWTMFNFPGRGTTYSNFKWQWFHFDGTDWDQSRSLSRIFKFTGKAWDWEVSSENGNYDYLMYADIDYDHPDVVNEMKKWGVWYANEVGLDGYRLDAVKHIKFSFLKDWVDNARAATGKEMFTVGEYWQNDLGALNNYLAKVNYNQSLFDAPLHYNFYAASTGGGYYDMRNILNNTLVASNPTKAVTLVENHDTQPGQSLESTVQPWFKPLAYAFILTRSGGYPSVFYGDMYGTKGTTTREIPALKSKIEPLLKARKDYAYGTQRDYIDNPDVIGWTREGDSTKAKSGLATVITDGPGGSKRMYVGTSNAGEIWYDLTGNRTDKITIGSDGYATFPVNGGSVSVWVQQ

SEQ ID NO: 35196 - protein, 480 aa, Cytophaga sp.
NGTMMQYFEWYVPNDGQQWNRLRTDAPYLSSVGITAVWTPPAYKGTSQADVGYGPYDLYDLGEFNQKGTVRTKYGTKGELKRAVNTLHSNGIQVYGDVVMNHKAGADYTENVTAVEVNPSNRNQETSGEYNIQAWTGFNFPGRGTTYSNFKWQWFHFDGTDWDQSRSLSRIFKFTGKAWDWEVSSENGNYDYLMYADIDYDHPDVVNEMKKWGVWYANEVGLDGYRLDAVKHIKFSFLKDWVDNARAATGKEMFTVGEYWQNDLGALNNYLAKVNYNQSLFDAPLHYNFYAASTGGGYYDMRNILNNTLVASNPTKAVTLVENHDTQPGQSLESTVQPWFKPLAYAFILTRSGGYPSVFYGDMYGTKGTTTREIPALKSKIEPLLKARKDYAYGTQRDYIDNPDVIGWTREGDSTKAKSGLATVITDGPGGSKRMYVGTSNAGEIWYDLTGNRTDKITIGSDGYATFPVNGGSVSVWVQQ

SEQ ID NO: 35197 - protein, 480 aa, Cytophaga sp.
NGTMMQYFEWYVPNDGQQWNRLRTDAPYLSSVGITAVWTPPAYKGTSQADVGYGPYDLYDLGEFNQKGTVRTKYGTKGELKSAVNTLHSNGIQVYGDVVMNHKAGADYTENVTAVEVNPSNRNQETSGEYNIQAWTGFNFPGRGTTYSNFKWQWFHFDGTDWDQSRSLSRIFKFTGKAWDWEVSSENGNYDYLMYADQDYDHPDVVNEMKKWGVWYANEVGLDGYRLDAVKHIKFSFLKDWVDNARAATGKEMFTVGEYWQNDLGALNNYLAKVNYNQSLFDAPLHYNFYAASTGGGYYDMRNILNNTLVASNPTKAVTLVENHDTQPGQSLESTVQPWFKPLAYAFILTRSGGYPSVFYGDMYGTKGTTTREIPALKSKIEPLLKARKDYAYGTQRDYIDNPDVIGWTREGDSTKAKSGLATVITDGPGGSKRMYVGTSNAGEIWYDLTGNRTDKITIGSDGYATFPVNGGSVSVWVQQ

SEQ ID NO: 35198 - protein, 480 aa, Cytophaga sp.
NGTMMQYFEWYVPNDGQQWNRLRTDAPYLSSVGITAVWTPPAYKGTSQADVGYGPYDLYDLGEFNQKGTVRTKYGTKGELKSAVNTLHSNGIQVYGDVVMNHKAGADYTENVTAVEVNPSNRNQETSGEYNIQAWTGFNFPGRGTTYSNFKWQWFHFDGTDWDQSRSLSRIFKFTGKAWDWEVSSENGNYDYLMYADIDYDHPDVVNEMKKWGVWYANEVGLDGYRLDAVKHIKFSFLKDWVDNARAATGKEMFTVGEYWQNDLGALNNYLAKVNYNQSLFDAPLHYNFYAASTGGGYYDMRNILNNTLVASNPVKAVTLVENHDTQPGQSLESTVQPWFKPLAYAFILTRSGGYPSVFYGDMYGTKGTTTREIPALKSKIEPLLKARKDYAYGTQRDYIDNPDVIGWTREGDSTKAKSGLATVITDGPGGSKRMYVGTSNAGEIWYDLTGNRTDKITIGSDGYATFPVNGGSVSVWVQQ

SEQ ID NO: 35199 - protein, 480 aa, Cytophaga sp.
NGTMMQYFEWYVPNDGQQWNRLRTDAPYLSSVGITAVWTPPAYKGTSQADVGYGPYDLYDLGEFNQKGTVRTKYGTKGELKSAVNTLHSNGIQVYGDVVMNHKAGADYTENVTAVEVNPSNRNQETSGEYNIQAWTGFNFPGRGTTYSNFKWQWFHFDGTDWDQSRSLSRIFKFTGKAWDWEVSSENGNYDYLMYADFDYDHPDVVNEMKKWGVWYANEVGLDGYRLDAVKHIKFSFLKDWVDNARAATGKEMFTVGEYWQNDLGALNNYLAKVNYNQSLFDAPLHYNFYAASTGGGYYDMRNILNNTLVASNPTKAVTLVENHDTQPGQSLESTVQPWFKPLAYAFILTRSGGYPSVFYGDMYGTKGTTTREIPALKSKIEPLLKARKDYAYGTQRDYIDNPDVIGWTREGDSTKAKSGLATVITDGPGGSKRMYVGTSNAGEIWYDLTGNRTDKITIGSDGYATFPVNGGSVSVWVQQ

SEQ ID NO: 35200 - protein, 480 aa, Cytophaga sp.
NGTMMQYFEWYVPNDGQQWNRLRTDAPYLSSVGITAVWTPPAYKGTSQADVGYGPYDLYDLGEFNQKGTVRTKYGTKGELKSAVNTLHSNGIQVYGDVVMNHKAGADYTENVTAVEVNPSNRNQETSGEYNIQAWTGFNFPGRGTTYSNFKWQWFHFDGTDWDQSRSLSRIFKFTGKAWDWEVSSENGNYDYLMYADIDYDHPDVVNEMKKWGVWYANEVGLDGYRLDAVKHIKFSFLKDWVDNARAATGKEMFTVGEYWQNDLGALNNYLAKVNYNQSLFDAPLHYNFYAASTGGGYYDMRNILNNTLVASNPTKAVTLVENHDTQPGQSLESTVQPWFKPLAYAFILTRSGGYPSVFYGDMYGTKGTTTREIPALKSKIEPLLKARKDYAYGVQRDYIDNPDVIGWTREGDSTKAKSGLATVITDGPGGSKRMYVGTSNAGEIWYDLTGNRTDKITIGSDGYATFPVNGGSVSVWVQQ

SEQ ID NO: 35201 - protein, 480 aa, Cytophaga sp.
NGTMMQYFEWYVPNDGQQWNRLRTDAPYLSSVGITAVWTPPAYKGTSQADVGYGPYDLYDLGEFNQKGTVRTKYGTKGELKSAVNTLHSNGIQVYGDVVMNHKAGADYTENVTAVEVNPSNRNQETSGEYNIQAWTGFNFPGRGTTYSNFKWQWFHFDGTDWDQSRSLSRIFKFTGKAWDWEVSSENGNYDYLMYADIDYDHPDVVNEMKKWGVWYANEVGLDGYRLDAVKHIKFSFLKDWVDNARAATGKEMFTVGEYWQNDLGALNNYLAKVNYNQSLFDAPLHYNFYAASTGGGYYDMRNILNNTLVASNPTKAVTLVENHDTQPGQSLESTVQPWFKPLAYAFILTRSGGYPSVFYGDMYGTKGTTTREIPALKSKIEPLLKARKDYAYGTQRDYIDNPDVIGWTREGDSTKAKSGLATVITDGPGGSKRMYVGTSNAGEIWYDLTGNRTDMITIGSDGYATFPVNGGSVSVWVQQ

SEQ ID NO: 35202 - protein, 480 aa, Cytophaga sp.
NGTMMQYFEWYVPNDGQQWNRLRTDAPYLSSVGITAVWTPPAYKGTSQADVGYGPYDLYDLGEFNQKGTVRTKYGTKGELKSAVNTLHSNGIQVYGDVVMNHKAGADYTENVTAVEVNPSNRNQETSGEYNIQAWTGFNFPGRGTTYSNFKWQWFHFDGTDWDQSRSLSRIFKFTGKAWDWEVSSENGNYDYLMYADIDYDHPDVVNEMKKWGVWYANEVGLDGYRLDAVKHIKFSFLKDWVDNARAATGKEMFTVGEYWQNDLGALNNYLAKVNYNQSLFDAPLHYNFYAASTGGGYYDMRNILNNTLVASNPTKAVTLVENHDTQPGQSLESTVQPWFKPLAYAFILTRSGGYPSVFYGDMYGTKGTTTREIPALKNKIEPLLKARKDYAYGTQRDYIDNPDVIGWTREGDSTKAKSGLATVITDGPGGSKRMYVGTSNAGEIWYDLTGNRTDKITIGSDGYATFPVNGGSVSVWVQQ

SEQ ID NO: 35203 - protein, 480 aa, Cytophaga sp.
NGTMMQYFEWYVPNDGQQWNRLRTDAPYLSSVGITAVWTPPAYKGTSQADVGYGPYDLYDLGEFNQKGTVRTKYGTKGELKSAVNTLHSNGIQVYGDVVMNHKAGADYTENVTAVEVNPSNRNQETSGEYNIQAWTGFNFPGRGTTYSNFKWQWFHFDGTDWDQSRSLSRIFKFTGKAWDWEVSSENGNYDYLMYADIDYDHPDVVNEMKKWGVWYANEVGLDGYRLDAVKHIKFSFLKDWVDNARAATGKEMFTVGEYWQNDLGALNNYLAKVNYNQSLFDAPLHYNFYAASTGGGWYDMRNILNNTLVASNPTKAVTLVENHDTQPGQSLESTVQPWFKPLAYAFILTRSGGYPSVFYGDMYGTKGTTTREIPALKSKIEPLLKARKDYAYGTQRDYIDNPDVIGWTREGDSTKAKSGLATVITDGPGGSKRMYVGTSNAGEIWYDLTGNRTDKITIGSDGYATFPVNGGSVSVWVQQ

SEQ ID NO: 35204 - protein, 480 aa, Cytophaga sp.
NGTMMQYFEWYVPNDGQQWNRLRTDAPYLSSVGITAVWTPPAYKGTSQADVGYGPYDLYDLGEFCQKGTVRTKYGTKGELKSAVNTLHSNGIQVYGDVVMNHKAGADYTENVTAVEVNPSNRNQETSGEYNIQAWTGFNFPGRGTTYSNFKWQWFHFDGTDWDQSRSLSRIFKFTGKAWDWEVSSENGNYDYLMYADIDYDHPDVVNEMKKWGVWYANEVGLDGYRLDAVKHIKFSFLKDWVDNARAATGKEMFTVGEYWQNDLGALNNYLAKVNYNQSLFDAPLHYNFYAASTGGGYYDMRNILNNTLVASNPTKAVTLVENHDTQPGQSLESTVQPWFKPLAYAFILTRSGGYPSVFYGDMYGTKGTTTREIPALKSKIEPLLKARKDYAYGTQRDYIDNPDVIGWTREGDSTKAKSGLATVITDGPGGSKRMYVGTSNAGEIWYDLTGNRTDKITIGSDGYATFPVNGGSVSVWVQQ

SEQ ID NO: 35205 - protein, 480 aa, Cytophaga sp.
NGTMMQYFEWYVPNDGQQWNRLRTDAPYLSSVGITAVWTPPAYKGTSQADVGYGPYDLYDLGEFNQKGTVRTKYGTKGELKSAVNTLHSNGIQVYGDVVMNHKAGADYTENVTAVEVNPSNRNQETSGEYNIQAWTGFNFPGRGTTYSNFKWQWFHFDGTDWDQSRSLSRIFKFTGKAWDWEVSSENGNYDYLMYADIDYDHPDVVNEMKKWGVWYANEVGLDGYRLDAVKHIKFSFLKDWVDNARAATGKEMFTVGEYWQNDLGALNNYLAKVNYNQSLFDAPLHYNFYAASTGGGYYDMRNILNNTLVASNPTKAVTLVENHDTQPGQSLESTVQPWFKPLAYAFILTRSGGYPSVFYGDMYGTKGTTTREIPALKSKIEPLLKARKDYAYGTQRDYIDNPDVIGWTREGDSTKAKSGLATVITDGPGGSKRMYVGTSNAGEIWYDLTGNRTDKITIGSDGYATFPVNGGSVSVWVQR

SEQ ID NO: 35206 - protein, 480 aa, Cytophaga sp.
NGTMMQYFEWYVPNDGQQWNRLRTDAPYLSSVGITAVWTPPAYKGTSQADVGYGPYDLYDLGEFNQKGTVRTKYGTKGELKSAVNTLHSNGIQVYGDVVMNHKAGADYTENVTAVEVNPSNRNQETSGEYNIQAWTGFNFPGRGTTYSNFKWQWFHFDGTDWDQSRSLSRIFKFTGKAWDWEVSSENGNYDYLMYADIDYDHPDVVNEMKKWGVWYANEVGLDGYRLDAVKHIKFSFLKDWVDFARAATGKEMFTVGEYWQNDLGALNNYLAKVNYNQSLFDAPLHYNFYAASTGGGYYDMRNILNNTLVASNPTKAVTLVENHDTQPGQSLESTVQPWFKPLAYAFILTRSGGYPSVFYGDMYGTKGTTTREIPALKSKIEPLLKARKDYAYGTQRDYIDNPDVIGWTREGDSTKAKSGLATVITDGPGGSKRMYVGTSNAGEIWYDLTGNRTDKITIGSDGYATFPVNGGSVSVWVQQ

SEQ ID NO: 35207 - protein, 480 aa, Cytophaga sp.
NGTMMQYFEWYVPNDGQQWNRLRTDAPYLSSVGITAVWTPPAYKGTSQADVGYGPYDLYDLGEFNQKGTVRTKYGTKGELKSAVNTLHSNGIQVYGDVVMNHKAGADYTENVTAVEVNPSNRNQETSGEYNIQAWTGFNFPGRGTTYSNFKWQWFHFDGTDWDQSRSLSRIFKFTGKAWDWEVSSENGNYDYLMYADIDYDHPDVVNEMKKWGVWYANEVGLDGYRLDAVKHIKFSFLCDWVDNARAATGKEMFTVGEYWQNDLGALNNYLAKVNYNQSLFDAPLHYNFYAASTGGGYYDMRNILNNTLVASNPTKAVTLVENHDTQPGQSLESTVQPWFKPLAYAFILTRSGGYPSVFYGDMYGTKGTTTREIPALKSKIEPLLKARKDYAYGTQRDYIDNPDVIGWTREGDSTKAKSGLATVITDGPGGSKRMYVGTSNAGEIWYDLTGNRTDKITIGSDGYATFPVNGGSVSVWVQQ

SEQ ID NO: 35208 - protein, 480 aa, Cytophaga sp.
NGTMMQYFEWYVPNDGQQWNRLRTDAPYLSSVGITAVWTPPAYKGTSQADVGYGPYDLYDLGEFNQKGTVRTKYGTKGELKSAVNTLHSNGIQVYGDVVMNHKAGADYTENVTAVEVNPSNRNQETSGEYNIQAWTGFNFPGRGTTYSNFKWQWFHFDGTDWDQSRSLSRIFKFTGKAWDWEVSSENGNYDYLMYADIDYDHPDVVNEMKKWGVWYANEVGLDGYRLDAVKHIKFSFLKDWVDNARAATGKEMFTVGEYWQNDLGALNNYLAKVNYNQSLFDAPLHYNFYAASTGGGYYDMRNILNNTLVASNPTKAVTLVENHDTQPGQSLESTVQPWFKPLAYAFILTRSGGYPSVFYGDMYGTKGTTTIEIPALKSKIEPLLKARKDYAYGTQRDYIDNPDVIGWTREGDSTKAKSGLATVITDGPGGSKRMYVGTSNAGEIWYDLTGNRTDKITIGSDGYATFPVNGGSVSVWVQQ

SEQ ID NO: 35209 - protein, 480 aa, Cytophaga sp.
NGTMMQYFEWYVPNDGQQWNRLRTDAPYLSSVGITAVWTPPAYKGTSQADVGYGPYDLYDLGEFNQKGTVRTKYGTKGELKSAVNTLHSNGIQVYGDVVMNHKAGADYTENVTAVEVNPSNRNQETSGEYNIQAWTGFNFPGRGTTYSNFKWQWFHFDGTDWDQSRSLSRIFKFTGKAWDWEVSSENGNYDYLMYADIDYDHPDVVNEMKKWGVWYANEVGLDGYRLDAVKHIKFSFLKDWVDNARAATGKEMFTVGEYWQNDLGALNNYLAKVNYNQSLFDAPLHYNFYAASTGGGYYDMRNILNNTLVASNPTKAVTLVENHDTQPGQSLESTVQPWFKPLAYAFILTRYGGYPSVFYGDMYGTKGTTTREIPALKSKIEPLLKARKDYAYGTQRDYIDNPDVIGWTREGDSTKAKSGLATVITDGPGGSKRMYVGTSNAGEIWYDLTGNRTDKITIGSDGYATFPVNGGSVSVWVQQ

SEQ ID NO: 35210 - protein, 480 aa, Cytophaga sp.
NGTMMQYFEWYVPNDGQQWNRLRTDAPYLSSVGITAVWTPPAYKGTSQADVGYGPYDLYDLGEFNQKGTVRTKYGTKGELKSAVNTLHSNGIQVYGDVVMNHKAGADYTENVTAVEVNPSNRNQETSGEYNIQAWTGFNFPGRGTTYSNFKWQWFHFDGTDWDQSRSLSRIFKFTGKAWDWEVSSENGNYDYLMYADIDYDHPDVVNEMKKWGVWYANEVGLDGYRLDAVKHIKFSFLKDWVDNARAATGKEMFTVGEYWQNDLGALNNYLAKVNYNQSLFDAPLHYNFYAASTGGGYYDMRNILNNTLVASNPTKAVTLVENHDTQPGQSLESTVQPWFKPLAYAFILTRSGGYPSVFYGDMYGTKGTTTREIPALKSKIEPLLKARKDYAYGTQRDYIDNPDVIGWTREGDSLKAKSGLATVITDGPGGSKRMYVGTSNAGEIWYDLTGNRTDKITIGSDGYATFPVNGGSVSVWVQQ

SEQ ID NO: 35211 - protein, 480 aa, Cytophaga sp.
NGTMMQYFEWYVPNDGQQWNRLRTDAPYLSSVGITAVWTPPAYKGTSQADVGYGPYDLYDLGEFNQKGTVRTKYGTKGELKSAVNTLHSNGIQVYGDVVMNHKAGADYTENVTAVEVNPSNRNQETSGEYNIQAWTGFNFPGRGTTYSNFKWQWFHFDGTDWDQSRSLSRIFKFTGKAWDWEVSSENGNYDYLMYADIDYDHPDVVNEMKKWGVWYANEVGLDGYRLDAVKHIKFSFLKDWVDNARAATGKEMFTVGEYWQNDLGALNNYLAKVNYNQSLFDAPLHYNFYAASTGGGYYDMRNILNNTLVASNPTKAVTLVENHDTQPGQSLESTVQPWFKPLAYAFILTRSGGYPSVFYGDMYGTKGTTTREIPALKSKIEPLLKARKDYAYGRQRDYIDNPDVIGWTREGDSTKAKSGLATVITDGPGGSKRMYVGTSNAGEIWYDLTGNRTDKITIGSDGYATFPVNGGSVSVWVQQ

SEQ ID NO: 35212 - protein, 480 aa, Cytophaga sp.
NGTMMQYFEWYVPNDGQQWNRLRTDAPYLSSVGITAVWTPPAYKGTSQADVGYGPYDLYDLGEFNQKGTVRTKYGTKGELKSAVNTLHSNGIQVYGDVVMNHKAGADYTENVTAVEVNPSNRNQETSGEYNIQAWTGFNFPGRGTTYSNFKWQWFHFDGLDWDQSRSLSRIFKFTGKAWDWEVSSENGNYDYLMYADIDYDHPDVVNEMKKWGVWYANEVGLDGYRLDAVKHIKFSFLKDWVDNARAATGKEMFTVGEYWQNDLGALNNYLAKVNYNQSLFDAPLHYNFYAASTGGGYYDMRNILNNTLVASNPTKAVTLVENHDTQPGQSLESTVQPWFKPLAYAFILTRSGGYPSVFYGDMYGTKGTTTREIPALKSKIEPLLKARKDYAYGTQRDYIDNPDVIGWTREGDSTKAKSGLATVITDGPGGSKRMYVGTSNAGEIWYDLTGNRTDKITIGSDGYATFPVNGGSVSVWVQQ

SEQ ID NO: 35213 - protein, 480 aa, Cytophaga sp.
NGTMMQYFEWYVPNDGQQWNRLRTDAPYLSSVGITAVWTPPAYKGTSQADVGYGPYDLYDLGEFNQKGTVRTKYGTKGELKSAVNTLHSNGIQVYGDVVMNHKAGADYTENVTAVEVNPSNRNQETSGEYNIQAWTGFNFPGRGTTYSNFKWQWFHFDGTDWDQSRSLSRIFKFTGKAWDWEVSSENGNYDYLMYADIDYDHPDVVNEMKKWGVWYANEVGLDGYRLDAVKHIKFSFLKDWVDNARAATGKEMFTVGEYWQNDLGALNNYLAKVNYNQSLFDAPLHYNFYAASTGGGYYDMRNILNNTLVASNPTKAVTLVENHDTQPGQSLESTVQPWFKPLAYAFILTRSGGYPSVFYGDMYGTKGTTTREIPALKSKIEPLLKARKDYAYGTQRDYIDNPDVIGWTREGDSTKAKSGLATVITDGPGGSKRMYVGTSNAGEIWYDLTGNRTDKITIGSDGYATFPVNGGSVSVWVQE

SEQ ID NO: 35214 - protein, 480 aa, Cytophaga sp.
NGTMMQYFEWYVPNDGQQWNRLRTDAPYLSSVGITAVWTPPAYKGTSQADVGYGPYDLYDLGEFNQKGTVRTKYGTKGELKSAVNTLHSNGIQVYGDVVMNHKAGADYTENVTAVEVNPSNRNQETSGEYNIQAWTGFNFPGRGTTYSNFKWQWFHFDGTDWDQSRSLSRIFKFTGKAWDWEVSSENGNYDYLMYADIDYDHPDVVNEMKKWGVWYANEVGLDGYRLDAVKHIKFSFLKDWVDNARAATGKEMFTVGEYWQNDLGALNNYLAKVNYNQSLFDAPLHYNFYAASTGGGYYDMRNILNNTLVASNPTKAVTLVENHDTQPGQSLESTVQPWFKPLAYAFILTRSGGYPSVFYGDMYGTKGTTTREIPALKSKIEPLLKARKDYAYGTQRDYIDNPDVIGWTREGDSTKAKSGLATVITDGPGGSKRMYVGTSNAGEIWYDLTGNRTDKITIGSDGYATFPVNGGSVSAWVQQ

SEQ ID NO: 35215 - protein, 480 aa, Cytophaga sp.
NGTMMQYFEWYVPNDGQQWNRLRTDAPYLSSVGITAVWTPPAYKGTSQADVGYGPYDLYDLGEFNQKGTVRTKYGTKGELKSAVNTLHSNGIQVYGDVVMNHKAGADYTENVTAVEVNPSNRNQETSGEYNIQAWTGFNFPGRGTTYSNFKWQWFHFDGTDWDQSRSLSRIFKFTGKAWDWEVSSENGNYDYLMYADIDYDHPDVVNEMKKWGVWYANEVGLDGYRLDAVKHIKFSFLKDWVDNARAATGKEMFTVGEYWQNDLGALNNYLAKVNYNQSLFDAPLHYNFYAASTGGGYYDMRNILNNTLVASNPTKAVTLVENHDTQPGQSLESTVQPWFKPLAYAFILTRSGGYPSVFYGDMYGTKGTTTREIPALKSKIEPLLKARKDYAYGTQRDYIDNPDVIGWTREGDSTKAKSGLATVITDGPGGSKRMYVGTSNAGEHWYDLTGNRTDKITIGSDGYATFPVNGGSVSVWVQQ

SEQ ID NO: 35216 - protein, 480 aa, Cytophaga sp.
NGTMMQYFEWYVPNDGQQWNRLRTDAPYLSSVGITAVWTPPAYKGTSQADVGYGPYDLYDLGEFNQKGTVRTKYGTKQELKSAVNTLHSNGIQVYGDVVMNHKAGADYTENVTAVEVNPSNRNQETSGEYNIQAWTGFNFPGRGTTYSNFKWQWFHFDGTDWDQSRSLSRIFKFTGKAWDWEVSSENGNYDYLMYADIDYDHPDVVNEMKKWGVWYANEVGLDGYRLDAVKHIKFSFLKDWVDNARAATGKEMFTVGEYWQNDLGALNNYLAKVNYNQSLFDAPLHYNFYAASTGGGYYDMRNILNNTLVASNPTKAVTLVENHDTQPGQSLESTVQPWFKPLAYAFILTRSGGYPSVFYGDMYGTKGTTTREIPALKSKIEPLLKARKDYAYGTQRDYIDNPDVIGWTREGDSTKAKSGLATVITDGPGGSKRMYVGTSNAGEIWYDLTGNRTDKITIGSDGYATFPVNGGSVSVWVQQ

SEQ ID NO: 35217 - protein, 480 aa, Cytophaga sp.
NGTMMQYFEWYVPNDGQQWNRLRTDAKYLSSVGITAVWTPPAYKGTSQADVGYGPYDLYDLGEFNQKGTVRTKYGTKGELKSAVNTLHSNGIQVYGDVVMNHKAGADYTENVTAVEVNPSNRNQETSGEYNIQAWTGFNFPGRGTTYSNFKWQWFHFDGTDWDQSRSLSRIFKFTGKAWDWEVSSENGNYDYLMYADIDYDHPDVVNEMKKWGVWYANEVGLDGYRLDAVKHIKFSFLKDWVDNARAATGKEMFTVGEYWQNDLGALNNYLAKVNYNQSLFDAPLHYNFYAASTGGGYYDMRNILNNTLVASNPTKAVTLVENHDTQPGQSLESTVQPWFKPLAYAFILTRSGGYPSVFYGDMYGTKGTTTREIPALKSKIEPLLKARKDYAYGTQRDYIDNPDVIGWTREGDSTKAKSGLATVITDGPGGSKRMYVGTSNAGEIWYDLTGNRTDKITIGSDGYATFPVNGGSVSVWVQQ

SEQ ID NO: 35218 - protein, 480 aa, Cytophaga sp.
NGTMMQYFEWYVPNDGQQWNRLRTDAPYLSSVGITAVWTPPAYKGTSQADVGYGPYDLYDLGEFNQKGTVRTKYGTKGELKSAVNTLHSNGIQVYGDVVMNHKAGADYTENVTAVEVNPSNRNQETSGEYNIQAWTGFNFPGRGTTYSNFKWQWIHFDGTDWDQSRSLSRIFKFTGKAWDWEVSSENGNYDYLMYADIDYDHPDVVNEMKKWGVWYANEVGLDGYRLDAVKHIKFSFLKDWVDNARAATGKEMFTVGEYWQNDLGALNNYLAKVNYNQSLFDAPLHYNFYAASTGGGYYDMRNILNNTLVASNPTKAVTLVENHDTQPGQSLESTVQPWFKPLAYAFILTRSGGYPSVFYGDMYGTKGTTTREIPALKSKIEPLLKARKDYAYGTQRDYIDNPDVIGWTREGDSTKAKSGLATVITDGPGGSKRMYVGTSNAGEIWYDLTGNRTDKITIGSDGYATFPVNGGSVSVWVQQ

SEQ ID NO: 35219 - protein, 480 aa, Cytophaga sp.
NGTMMQYFEWYVPNDGQQWNRLRTDAPYLSSVGITAVWTPPAYKGTSQADVGYGPYDLYDLGEFNQKGTVRTKYGTKGELKSAVNTLHSNGIQVYGDVVMNHKAGADYTENVTAVEVNPSNRNQETSGEYNIQAWTGFNFPGRGTTYSNFKWQWFHFDGTDWDQSRSLSRIFKFTGKAWDWEVSSENGNYDYLMYADIDYDHPDVVNEMKKWGVWYANEVGLDGYRLDAVKHIKFSFLKDWVDNARAATGKEMFTVGEYWQNDLGALNNYLAKVNYNQSLFDAPLHYNFYAASTGGGYYDMRNILNNTLVASNPTKAVTLVENHDTQPGQSLESTVQPWFKPLAYAFILTRSGGYPSVFYGDMYGTKGTTTREIPALKSKIEPLLKARKDYAYGTQRDYIDNPDVIGWTREGDSTKAKSGLATVITDGPGGSKRMYVGYSNAGEIWYDLTGNRTDKITIGSDGYATFPVNGGSVSVWVQQ

SEQ ID NO: 35220 - protein, 480 aa, Cytophaga sp.
NGTMMQYFEWYVPNDGQQWNRLRTDAPYLSSVGITAVWTPPAYKGTSQADVGYGPYDLYDLGEFNQKGTVRTKYGTKGELKSAVNTLHSNGIQVYGDVVMNHKAGADYTENVTAVEVNPSNRNQETSGEYNIQAWTGFNFPGRGTTYSNFKWQWFHFDGTDWDQSRSLSRIFKFTGKAWDWEVSSENGNYDYLMYADIDYDHPDVVNEMKKWGVWYANEVGLDGYRLDAVKHIKFSFLKDWVDNARAATGKEMFTVGEYWQNDLGALNNYLAKVNANQSLFDAPLHYNFYAASTGGGYYDMRNILNNTLVASNPTKAVTLVENHDTQPGQSLESTVQPWFKPLAYAFILTRSGGYPSVFYGDMYGTKGTTTREIPALKSKIEPLLKARKDYAYGTQRDYIDNPDVIGWTREGDSTKAKSGLATVITDGPGGSKRMYVGTSNAGEIWYDLTGNRTDKITIGSDGYATFPVNGGSVSVWVQQ

SEQ ID NO: 35221 - protein, 480 aa, Cytophaga sp.
NGTMMQYFEWYVPNDGQQWNRLRTDAPYLSSVGITAVWTPPAYKGTSQADVGYGPYDLYDLGEFNQKGTVRTKYGTKGELKSAVNTLHSNGIQVYGDVVMNHKAGADYTENVTAVEVNPSNRNQETSGEYNIQAWTGFNFPGRGTTYSNFKWQWFHFDGTDWDQSRSLSRIFKFTGKAWDWEVSSENGNYDYLMYADIDYDHPDVVNEMKKWGVWYANEVGLDGYRLDAVKHIKFSFLKDWVDNARAATGKEMFTVGEYWQNDLGALNNYLAKVNYNQSLFDAPLHYNFYAASTGGGYYDMRNILNNTLVAYNPTKAVTLVENHDTQPGQSLESTVQPWFKPLAYAFILTRSGGYPSVFYGDMYGTKGTTTREIPALKSKIEPLLKARKDYAYGTQRDYIDNPDVIGWTREGDSTKAKSGLATVITDGPGGSKRMYVGTSNAGEIWYDLTGNRTDKITIGSDGYATFPVNGGSVSVWVQQ

SEQ ID NO: 35222 - protein, 480 aa, Cytophaga sp.
NGTMMQYFEWYVPNDGQQWNRLRTDAPYLSSVGITAVWTPPAYKGTSQQDVGYGPYDLYDLGEFNQKGTVRTKYGTKGELKSAVNTLHSNGIQVYGDVVMNHKAGADYTENVTAVEVNPSNRNQETSGEYNIQAWTGFNFPGRGTTYSNFKWQWFHFDGTDWDQSRSLSRIFKFTGKAWDWEVSSENGNYDYLMYADIDYDHPDVVNEMKKWGVWYANEVGLDGYRLDAVKHIKFSFLKDWVDNARAATGKEMFTVGEYWQNDLGALNNYLAKVNYNQSLFDAPLHYNFYAASTGGGYYDMRNILNNTLVASNPTKAVTLVENHDTQPGQSLESTVQPWFKPLAYAFILTRSGGYPSVFYGDMYGTKGTTTREIPALKSKIEPLLKARKDYAYGTQRDYIDNPDVIGWTREGDSTKAKSGLATVITDGPGGSKRMYVGTSNAGEIWYDLTGNRTDKITIGSDGYATFPVNGGSVSVWVQQ

SEQ ID NO: 35223 - protein, 480 aa, Cytophaga sp.
NGTMMQYFEWYVPNDGQQWNRLRTDAPYLSSVGITAVWTPPAYKGTSQADVGYGPYDLYDLGEFNQKGTVRTKYGTKGELKSAVNTLHSNGIQVYGDVVMNHKAGADYTENVTAVEVNPSNRNQETSGEYNIQAWTGFNFPGRGTTYSNFKWQWFHFDGTDWDQSRSLSRIFKFTGKAWDWEVSSENGNYDYLMYADIDYDHPDVVNEMKKWGVWYANEVGLDGYRLDAVKHIKFSFLKDWVDNARAATGKEMFTVGEYWQNDLGALNNYLAKVNYNQSLFDAPLHYNFYAASTGGGYYDMRNILNNTLVASNPTKAVTLVENHDTQPGQSLESTVQPWFKPLAYAFILTRSGGYPSVFYGDMYGTKGTTTREIPALKSKIEPLLKARKDYAYGTQRDYIDNPDVIGWTREGDSTKAKSGLATVITDGPGGSKRMYVGHSNAGEIWYDLTGNRTDKITIGSDGYATFPVNGGSVSVWVQQ

SEQ ID NO: 35224 - protein, 480 aa, Cytophaga sp.
NGTMMQYFEWYVPNDGQQWNRLRTDAYYLSSVGITAVWTPPAYKGTSQADVGYGPYDLYDLGEFNQKGTVRTKYGTKGELKSAVNTLHSNGIQVYGDVVMNHKAGADYTENVTAVEVNPSNRNQETSGEYNIQAWTGFNFPGRGTTYSNFKWQWFHFDGTDWDQSRSLSRIFKFTGKAWDWEVSSENGNYDYLMYADIDYDHPDVVNEMKKWGVWYANEVGLDGYRLDAVKHIKFSFLKDWVDNARAATGKEMFTVGEYWQNDLGALNNYLAKVNYNQSLFDAPLHYNFYAASTGGGYYDMRNILNNTLVASNPTKAVTLVENHDTQPGQSLESTVQPWFKPLAYAFILTRSGGYPSVFYGDMYGTKGTTTREIPALKSKIEPLLKARKDYAYGTQRDYIDNPDVIGWTREGDSTKAKSGLATVITDGPGGSKRMYVGTSNAGEIWYDLTGNRTDKITIGSDGYATFPVNGGSVSVWVQQ

SEQ ID NO: 35225 - protein, 480 aa, Cytophaga sp.
NGTMMQYFEWYVPNDGQQWNRLRTDAPYLSSVGITAVWTPPAYKGTSQADVGYGPYDLYDLGEFNQKGTVRTKYGTKGELKSAVNTLHSNGIQVYGDVVMNHKAGADYTENVTAVEVNPSNRNQETSGEYPIQAWTGFNFPGRGTTYSNFKWQWFHFDGTDWDQSRSLSRIFKFTGKAWDWEVSSENGNYDYLMYADIDYDHPDVVNEMKKWGVWYANEVGLDGYRLDAVKHIKFSFLKDWVDNARAATGKEMFTVGEYWQNDLGALNNYLAKVNYNQSLFDAPLHYNFYAASTGGGYYDMRNILNNTLVASNPTKAVTLVENHDTQPGQSLESTVQPWFKPLAYAFILTRSGGYPSVFYGDMYGTKGTTTREIPALKSKIEPLLKARKDYAYGTQRDYIDNPDVIGWTREGDSTKAKSGLATVITDGPGGSKRMYVGTSNAGEIWYDLTGNRTDKITIGSDGYATFPVNGGSVSVWVQQ

SEQ ID NO: 35226 - protein, 480 aa, Cytophaga sp.
NGTMMQYFEWYVPNDGQQWNRLRTDAPYLSSVGITAVWTPPAYKGTSQADVGYGPYDLYDLGEFNQKGTVRTKYGTKGELKSAVNTLHSNGIQVYGDVVMNHKAGADYTENVTAVEVNPSNRNQETSGEYNIQAWTGFNFPGRGTTYSNFKWQWFHFDGTDWDQSRSLSRIFKFTGKAWDWEVSSENGNYDYLMYADIDYDHPDVVNEMKKWGVWYANEVGLDGYRLDAVKHIKFSFLKDWVDNARAATGKEMFTVGEYWQNDLGALNNYLAKVNYNQSLFDAPLHYNFYAASTGGGYYDMRNILNNTLVASNPTKAVTLVENHDTQPGQSLESTVQPWFKPLAYAFILTRSGGYPSVFYGDMYGTKGTTTREIPALKSKIEPLLKARKDYAYGTQRDYIDNPDVIGWTREGDSTKAKSGLATVITDGPGGSKRMYVGTSNAGEIWYDLTGNRTDYITIGSDGYATFPVNGGSVSVWVQQ

SEQ ID NO: 35227 - protein, 480 aa, Cytophaga sp.
NGTMMQYFEWYVPNDGQQWNRLRTDAPYLSSVGITAVWTPPAYKGTSQADVGYGPYDLYDLGEFNQKGTVRTKYGTKGELKSAVNTLHSNGIQVYGDVVMNHKAGADYTENVTAVEVNPSNRNQETSGEYNIQAWTGFNFPGRGTTYSNFKWQWFHFDGTDWDQSRSLSRIFKFTGKAWDWEVSSENGNYDYLMYADIDYDHPDVVNEMKKWGVWYANEVGLDGYRLDAVKHIKFSFLKDWVDNARAATGKEMFTVGEYWQNDLGALNNYLAKVNYNQSLFDAPLHYNFYAASTGGGYYDMRNILNNTLVASNPTKAVTLVENHDTQPGQSLESTVQPWFKPLAYAFILTRSGGYPSVFYGDMYGTKGTTTREIPALKSKIEPLLKARKDYAYGTQRDYIDNPDVIGWTREGDSTKAKSGLATVITDGPGGSKRMYVGTSNAGEIWYDLTGNRTDKIFIGSDGYATFPVNGGSVSVWVQQ

SEQ ID NO: 35228 - protein, 480 aa, Cytophaga sp.
NGTMMQYFEWYVPNDGQQWNRLRTDAPYLSSVGITAVWTPPAYKGTSQADVGYGPYDLYDLGEFNQKGTVRTKYGTKGELKSAVNTLHSNGIQVYGDVVMNHKAGADYTENVTAVEVNPSNRNQETSGEYNIQAWTGFNFPGRGTTYSNFKWQWFHFDGTDWDQSRSLSRIFKFTGKAWDWEVSSENGNYDYLMYADIDYDHPDVVNEMKKWGVWYANEVGLDGYRLDAVKHIKFSFLKDWVDNARAATGKEMFTVGEYWQNDLGALNNYLAKVNYNQSLFDAPLHYNFYAASTGGGYYDMRNILNNTLVASNPTKAVTLVENHDTQPGQSLESTVQPWFKPLAYAFILTRSGGYPSVFYGDMYGTKGTTTREIPALKSKIEPLLKARKDYAYGEQRDYIDNPDVIGWTREGDSTKAKSGLATVITDGPGGSKRMYVGTSNAGEIWYDLTGNRTDKITIGSDGYATFPVNGGSVSVWVQQ

SEQ ID NO: 35229 - protein, 480 aa, Cytophaga sp.
NGTMMQYFEWYVPNDGQQWNRLRTDAPYLSSVGITAVWTPPAYKGTSQADVGYGPYDLYDLGEFNQKGTVRTKYGTKGELKSAVNTLHSNGIQVYGDVVMNHKAGADYTENVTAVEVNPSNRNQETSGEYNIQAWTGFNFPGRGTTYSNFKWQWFHFDGCDWDQSRSLSRIFKFTGKAWDWEVSSENGNYDYLMYADIDYDHPDVVNEMKKWGVWYANEVGLDGYRLDAVKHIKFSFLKDWVDNARAATGKEMFTVGEYWQNDLGALNNYLAKVNYNQSLFDAPLHYNFYAASTGGGYYDMRNILNNTLVASNPTKAVTLVENHDTQPGQSLESTVQPWFKPLAYAFILTRSGGYPSVFYGDMYGTKGTTTREIPALKSKIEPLLKARKDYAYGTQRDYIDNPDVIGWTREGDSTKAKSGLATVITDGPGGSKRMYVGTSNAGEIWYDLTGNRTDKITIGSDGYATFPVNGGSVSVWVQQ

SEQ ID NO: 35230 - protein, 480 aa, Cytophaga sp.
NGTMMQYFEWYVPNDGQQWNRLRTDAPYLSSVGITAVWTPPAYKGTSQADVGYGPYDLYDLGEFNQKGTVRTKYGTKGELKSAVNTLHSNGIQVYGDVVMNHKAGADYTENVTAVEVNPSNRNQETSGEYNIQAWTGFNFPGRGTTYSNFKWQWFHFDGTDWDTSRSLSRIFKFTGKAWDWEVSSENGNYDYLMYADIDYDHPDVVNEMKKWGVWYANEVGLDGYRLDAVKHIKFSFLKDWVDNARAATGKEMFTVGEYWQNDLGALNNYLAKVNYNQSLFDAPLHYNFYAASTGGGYYDMRNILNNTLVASNPTKAVTLVENHDTQPGQSLESTVQPWFKPLAYAFILTRSGGYPSVFYGDMYGTKGTTTREIPALKSKIEPLLKARKDYAYGTQRDYIDNPDVIGWTREGDSTKAKSGLATVITDGPGGSKRMYVGTSNAGEIWYDLTGNRTDKITIGSDGYATFPVNGGSVSVWVQQ

SEQ ID NO: 35231 - protein, 480 aa, Cytophaga sp.
NGTMMQYFEWYVPNDGQQWNRLRTDAPYLSSVGITAVWTPPAYKGTSQADVGYGPYDLYDLGEFNQKGTVRTKYGTKGELKSAVNTLHSNGIQVYGDVVMNHKAGADYTENVTAVEVNPSNRNQETSGEYGIQAWTGFNFPGRGTTYSNFKWQWFHFDGTDWDQSRSLSRIFKFTGKAWDWEVSSENGNYDYLMYADIDYDHPDVVNEMKKWGVWYANEVGLDGYRLDAVKHIKFSFLKDWVDNARAATGKEMFTVGEYWQNDLGALNNYLAKVNYNQSLFDAPLHYNFYAASTGGGYYDMRNILNNTLVASNPTKAVTLVENHDTQPGQSLESTVQPWFKPLAYAFILTRSGGYPSVFYGDMYGTKGTTTREIPALKSKIEPLLKARKDYAYGTQRDYIDNPDVIGWTREGDSTKAKSGLATVITDGPGGSKRMYVGTSNAGEIWYDLTGNRTDKITIGSDGYATFPVNGGSVSVWVQQ

SEQ ID NO: 35232 - protein, 480 aa, Cytophaga sp.
NGTMMQYFEWYVPNDGQQWNRLRTDAPYLSSVGITAVWTPPAYKGTSQADIGYGPYDLYDLGEFNQKGTVRTKYGTKGELKSAVNTLHSNGIQVYGDVVMNHKAGADYTENVTAVEVNPSNRNQETSGEYNIQAWTGFNFPGRGTTYSNFKWQWFHFDGTDWDQSRSLSRIFKFTGKAWDWEVSSENGNYDYLMYADIDYDHPDVVNEMKKWGVWYANEVGLDGYRLDAVKHIKFSFLKDWVDNARAATGKEMFTVGEYWQNDLGALNNYLAKVNYNQSLFDAPLHYNFYAASTGGGYYDMRNILNNTLVASNPTKAVTLVENHDTQPGQSLESTVQPWFKPLAYAFILTRSGGYPSVFYGDMYGTKGTTTREIPALKSKIEPLLKARKDYAYGTQRDYIDNPDVIGWTREGDSTKAKSGLATVITDGPGGSKRMYVGTSNAGEIWYDLTGNRTDKITIGSDGYATFPVNGGSVSVWVQQ

SEQ ID NO: 35233 - protein, 480 aa, Cytophaga sp.
NGTMMQYFEWYVPNDGQQWNRLRTDAPYLSSVGITAVWTPPAYKGTSQADVGYGPYDLYDLGEFNQKGTVRTKYGTKGELKSAVNTLHSNGIQVYGDVVMNHKAGADYTENVTAVEVNPSNRNQETSGEYNIQAWTGFNFPGRGTTYSNFKWQWFHFDGTDWDQSRSLSRIFKFTGKAWDWEVSSENGNYDYLMYADIDYDHPDVVNEMKKWGVWYANEVGLDGYRLDAVKHIKFSFLKDWVDNARAATGKEMFTVGEYWQNDLGALNNYLAKVNYNQSLFDAPLHYNFYAASTGGGYYDMRNILNNTLVASNPTKAVTLVENHDTQPGQSLESTVQPWFKPLAYAFILTRSGGYPSVFYGDMYGTKGTTTREIPALKSKIEPLLKARKDYAYGTQRDYIDNPDVIGWTREGDSTKAKSGLATVITDGPGGSKRMYVGTSNAGEKWYDLTGNRTDKITIGSDGYATFPVNGGSVSVWVQQ

SEQ ID NO: 35234 - protein, 480 aa, Cytophaga sp.
NGTMMQYFEWYVPNDGQQWNRLRTDAPYLSSVGITAVWTPPAYKGTSQADVGYGPYDLYDLGEFNQKGTVRTKYGTKGELKSAVNTLHSNGIQVYGDVVMNHKAGADYTENVTAVEVNPSNRNQETSGEYNIQAWTGFNFPGRGTTYSNFKWQWFHFDGTDWDQSRSLSRIFKFTGKAWDWEVSSENGNYDYLMYADIDYDHPDVVNEMKKWGVWYANEVGLDGYRLDAVKHIKFSFLKDWVANARAATGKEMFTVGEYWQNDLGALNNYLAKVNYNQSLFDAPLHYNFYAASTGGGYYDMRNILNNTLVASNPTKAVTLVENHDTQPGQSLESTVQPWFKPLAYAFILTRSGGYPSVFYGDMYGTKGTTTREIPALKSKIEPLLKARKDYAYGTQRDYIDNPDVIGWTREGDSTKAKSGLATVITDGPGGSKRMYVGTSNAGEIWYDLTGNRTDKITIGSDGYATFPVNGGSVSVWVQQ

SEQ ID NO: 35235 - protein, 480 aa, Cytophaga sp.
NGTMMQYFEWYVPNDGQQWNRLRTDAPYLSSVGITAVWTPPAYKGTSQADVGYGPYDLYDLGEFNQKGTVRTKYGTKGELKSAVNTLHSNGIQVYGDVVMNHKAGADYTENVTAVEVNPSNRNQETSGEYNIQAWTGFNFPGRGTTYSNFKWQWFHFDGTDWDQSRSLSRIFKFTGKAWDWEVSSENGNYDYLMYADIDYDHPDVVNEMKKWGVWYANEVGLDGYRLDAVKHIKFSFLKDWVDNARAATGKEMFTVGEYWQNDLGALNNYLAKVNYNQSLFDAPLHYNFYAASTGGGYYDMRNILNNTLVASNPTKAVTLVENHDTQPGQSLESTVQPWFKPLAYAFILTRSGGYPSVFYGDMYGTKGTTTREIPALKSKIEPLLKARKDYAYGTQRDYIDNPDVIGWTREGDSTKAKSGLATVITDGPGGSKRMYVGTSNAGEIWYDLTGNRTDKITIGSDGYAPFPVNGGSVSVWVQQ

SEQ ID NO: 35236 - protein, 480 aa, Cytophaga sp.
NGTMMQYFEWYVPNDGQQWNRLRTDAPYLSSVGITAVWTPPAYKGTSQADVGYGPYDLYDLGEFNQKGTVRTKYGTKGELKSAVNTLHSNGIQVYGDVVMNHKAGADYTENVTAVEVNPSNRNQETSGEYNIQAWTGFNFPGRGTTYSNFKWQWFHFDGTDWDQSRSLSRIFKFTGKAWDWEVSSENGNYDYLMYADIDYDHPDVVNEMKKWGVWYANEVGLDGYRLDAVKHIKFSFLKDWVDNARAATGKEMFTVGEYWQNDLGALNNYLHKVNYNQSLFDAPLHYNFYAASTGGGYYDMRNILNNTLVASNPTKAVTLVENHDTQPGQSLESTVQPWFKPLAYAFILTRSGGYPSVFYGDMYGTKGTTTREIPALKSKIEPLLKARKDYAYGTQRDYIDNPDVIGWTREGDSTKAKSGLATVITDGPGGSKRMYVGTSNAGEIWYDLTGNRTDKITIGSDGYATFPVNGGSVSVWVQQ

SEQ ID NO: 35237 - protein, 480 aa, Cytophaga sp.
NGTMMQYFEWYVPNDGQQWNRLRTDAPYLSSVGITAVWTPPAYKGTSQADVGYGPYDLYDLGEFNQKGTVRTKYGTKGELKSAVNTLHSNGIQVYGDVVMNHKAGADYTENVTAVEVNPSNRNQETSGEYNIQAWTGFNFPGRGTTYSNFKWQWFHFDGTDWDQSRSLSRIFKFTGKAWDWEVSSENGNYDYLMYADIDYDHPDVVNEMKKWGVWYANEVGLDGYRLDAVKHIKFSFLKDWVDNARAATGKEMFTVGEYWQNDLGALNNYLAKVNYNQSLFDAPLHYNFYAASTGGGYYDMRNILNNTLVASNPTKAVTLVENHDTQPGQSLESTVQPWFKPLAYAFILTRSGGYPSVFYGDMYGTKGTTTDEIPALKSKIEPLLKARKDYAYGTQRDYIDNPDVIGWTREGDSTKAKSGLATVITDGPGGSKRMYVGTSNAGEIWYDLTGNRTDKITIGSDGYATFPVNGGSVSVWVQQ

SEQ ID NO: 35238 - protein, 480 aa, Cytophaga sp.
NGTMMQYFEWYVPNDGQQWNRLRTDAPYLSSVGITAVWTPPAYKGTSQADVGYGPYDLYDLGEFNQKGTVRTKYGTKGELKSAVNTLHSNGIQVYGDVVMNHKAGADYTENVTAVEVNPSNRNQETSGEYNIQAWTGFNFPGRGTTYSNFKWQWFHFDGTDWDQSRSLSRIFKFTGKAWDWEVSSENGNYDYLMYADIDYDHPDVVNEMKKWGVWYANEVGLDGYRLDAVKHIKFSFLKDWVDNARAATGKEMFTVGEYWQNDLGALNNYLAKVNYNQSLFDAPLHYNFYAASTGGGYYDMRNILNNTLVASNPTKAVTLVENHDTQPGQSLESTVQPWFKPLAYAFILTRSGGYPSVFYGDMYGTKGTTTREIPALKSKIEPLLKARKSYAYGTQRDYIDNPDVIGWTREGDSTKAKSGLATVITDGPGGSKRMYVGTSNAGEIWYDLTGNRTDKITIGSDGYATFPVNGGSVSVWVQQ

SEQ ID NO: 35239 - protein, 480 aa, Cytophaga sp.
NGTMMQYFEWYVPNDGQQWNRLRTDAPYLSSVGITAVWTPPAYKGTSQADVGYGPYDLYDLGEFNQKGTVRTKYGTKGELKSAVNTLHSNGIQVYGDVVMNHKAGADYTENVTAVEVNPSNRNQETSGEYNIQAWTGFNFPGRGTTYSNFKWQWFHFDGTDWDQSRSLSRIFKFTGKAWDWEVSSENGNYDYLMYADIDYDHPDVVNEMKKWGVWYANEVGLDGYRLDAVKHIKFSFLKDWVDNARAATGKEMFTVGEYWQNDLGALNNYLAKVGYNQSLFDAPLHYNFYAASTGGGYYDMRNILNNTLVASNPTKAVTLVENHDTQPGQSLESTVQPWFKPLAYAFILTRSGGYPSVFYGDMYGTKGTTTREIPALKSKIEPLLKARKDYAYGTQRDYIDNPDVIGWTREGDSTKAKSGLATVITDGPGGSKRMYVGTSNAGEIWYDLTGNRTDKITIGSDGYATFPVNGGSVSVWVQQ

SEQ ID NO: 35240 - protein, 480 aa, Cytophaga sp.
NGTMMQYFEWYVPNDGQQWNRLRTDAPYLSSVGITAVWTPPAYKGTSQADVGYGPYDLYDLGEFNQKGTVRTKYGTKGELKSAVNTLHSNGIQVYGDVVMNHKAGADYTENVTAVEVNPSNRNQETSGEYNIQAWTGFNFPGRGTTYSNFKWQWFHFDGTDWDQSRSLSRIFKFTGKAWDWEVSSENGNYDYLMYADIDYDHPDVVNEMKKWGVWYANEVGLDGYRLDAVKHIKFSFLKDWVDNARAATGKEMFTVGEYWQNDLGALNNYLAKVNYNQSLFDAPLHYNFYAASTGGGYYDMRNILNDTLVASNPTKAVTLVENHDTQPGQSLESTVQPWFKPLAYAFILTRSGGYPSVFYGDMYGTKGTTTREIPALKSKIEPLLKARKDYAYGTQRDYIDNPDVIGWTREGDSTKAKSGLATVITDGPGGSKRMYVGTSNAGEIWYDLTGNRTDKITIGSDGYATFPVNGGSVSVWVQQ

SEQ ID NO: 35241 - protein, 480 aa, Cytophaga sp.
NGTMMQYFEWYVPNDGQQWNRLRTDAPYLSSVGITAVWTPPAYKGTSQADVGYGPYDLYDLGEFNQKGTVRTKYGTKGELKSAVNTLHSNGIQVYGDVVMNHKAGADYTENVTAVEVNPSNRNQETSGEYNIQAWTGFNFPGRGTTYSNFKWQWFHFDGTDWDQSRSLSRIFKFTGKAWDWEVSSENGNYDYLMYADIDYDHPDVVNEMKKWGVWYANEVGLDGYRLDAVKHIKFSFLKDWVDNARAATGKEMFTVGEYWQNDLGALNNYLAKVNYNQSLFDAPLHYNFYAASTGGGYYDMRNILNNTLVASNPTKAVTLVENHDTQPGQSLESTVQPWFKPLAYAFILTRSGGYPSVFYGDMYGTKGTTTREIPALKSKIEPLLKARKDYAYGTQRDYIDNPDVIGWTREGDSTSAKSGLATVITDGPGGSKRMYVGTSNAGEIWYDLTGNRTDKITIGSDGYATFPVNGGSVSVWVQQ

SEQ ID NO: 35242 - protein, 480 aa, Cytophaga sp.
NGTMMQYFEWYVPNDGQQWNRLRTDAPYLSSVGITAVWTPPAYKGTSQADVGYGPYDLYDLGEFNQKGTVRTKYGTKGELKSAVNTLHSNGIQVYGDVVMNHKAGADYTENVTAVEVNPSNRNQETSGEYNIQAWTGFNFPGRGTTYSNFKWQWFHFDGTDWDQSRSLSRIFKFTGKAWDWEVSSENGNYDYLMYADIDYDHPDVVGEMKKWGVWYANEVGLDGYRLDAVKHIKFSFLKDWVDNARAATGKEMFTVGEYWQNDLGALNNYLAKVNYNQSLFDAPLHYNFYAASTGGGYYDMRNILNNTLVASNPTKAVTLVENHDTQPGQSLESTVQPWFKPLAYAFILTRSGGYPSVFYGDMYGTKGTTTREIPALKSKIEPLLKARKDYAYGTQRDYIDNPDVIGWTREGDSTKAKSGLATVITDGPGGSKRMYVGTSNAGEIWYDLTGNRTDKITIGSDGYATFPVNGGSVSVWVQQ

SEQ ID NO: 35243 - protein, 480 aa, Cytophaga sp.
NGTMMQYFEWYVPNDGQQWNRLRTDAPYLSSVGITAVWTPPAYKGTSQADVGYGPYDLYDLGEFNQKGTVRTKYGTKTELKSAVNTLHSNGIQVYGDVVMNHKAGADYTENVTAVEVNPSNRNQETSGEYNIQAWTGFNFPGRGTTYSNFKWQWFHFDGTDWDQSRSLSRIFKFTGKAWDWEVSSENGNYDYLMYADIDYDHPDVVNEMKKWGVWYANEVGLDGYRLDAVKHIKFSFLKDWVDNARAATGKEMFTVGEYWQNDLGALNNYLAKVNYNQSLFDAPLHYNFYAASTGGGYYDMRNILNNTLVASNPTKAVTLVENHDTQPGQSLESTVQPWFKPLAYAFILTRSGGYPSVFYGDMYGTKGTTTREIPALKSKIEPLLKARKDYAYGTQRDYIDNPDVIGWTREGDSTKAKSGLATVITDGPGGSKRMYVGTSNAGEIWYDLTGNRTDKITIGSDGYATFPVNGGSVSVWVQQ

SEQ ID NO: 35244 - protein, 480 aa, Cytophaga sp.
NGTMMQYFEWYVPNDGQQWNRLRTDAPYLSSVGITAVWTPPAYKGTSQADVGYGPYDLYDLGEFNQKGTVRTKYGTKGELKSAVNTLHSNGIQVYGDVVMNHKAGADYTENVTAVEVNPSNRNQETSGEYNIQAWTGFNFPGRGTTYSNFKWQWNHFDGTDWDQSRSLSRIFKFTGKAWDWEVSSENGNYDYLMYADIDYDHPDVVNEMKKWGVWYANEVGLDGYRLDAVKHIKFSFLKDWVDNARAATGKEMFTVGEYWQNDLGALNNYLAKVNYNQSLFDAPLHYNFYAASTGGGYYDMRNILNNTLVASNPTKAVTLVENHDTQPGQSLESTVQPWFKPLAYAFILTRSGGYPSVFYGDMYGTKGTTTREIPALKSKIEPLLKARKDYAYGTQRDYIDNPDVIGWTREGDSTKAKSGLATVITDGPGGSKRMYVGTSNAGEIWYDLTGNRTDKITIGSDGYATFPVNGGSVSVWVQQ

SEQ ID NO: 35245 - protein, 480 aa, Cytophaga sp.
NGTMMQYFEWYVPNDGQQWNRLRTDAPYLSSVGITAVWTPPAYKGTSQADVGYGPYDLYDLGEFMQKGTVRTKYGTKGELKSAVNTLHSNGIQVYGDVVMNHKAGADYTENVTAVEVNPSNRNQETSGEYNIQAWTGFNFPGRGTTYSNFKWQWFHFDGTDWDQSRSLSRIFKFTGKAWDWEVSSENGNYDYLMYADIDYDHPDVVNEMKKWGVWYANEVGLDGYRLDAVKHIKFSFLKDWVDNARAATGKEMFTVGEYWQNDLGALNNYLAKVNYNQSLFDAPLHYNFYAASTGGGYYDMRNILNNTLVASNPTKAVTLVENHDTQPGQSLESTVQPWFKPLAYAFILTRSGGYPSVFYGDMYGTKGTTTREIPALKSKIEPLLKARKDYAYGTQRDYIDNPDVIGWTREGDSTKAKSGLATVITDGPGGSKRMYVGTSNAGEIWYDLTGNRTDKITIGSDGYATFPVNGGSVSVWVQQ

SEQ ID NO: 35246 - protein, 480 aa, Cytophaga sp.
NGTMMQYFEWYVPNDGQQWNRLRTDAPYLSSVGITAVWTPPAYKGTSQADVGYGPYDLYDLGEFNQKGTVRTKYGTKGELKSAVNTLHSNGIQVYGDVVMNHKAGADYTENVTAVEVNPSNRNQETSGEYNIQAWTGFNFPGRGTTYSNFKWFWFHFDGTDWDQSRSLSRIFKFTGKAWDWEVSSENGNYDYLMYADIDYDHPDVVNEMKKWGVWYANEVGLDGYRLDAVKHIKFSFLKDWVDNARAATGKEMFTVGEYWQNDLGALNNYLAKVNYNQSLFDAPLHYNFYAASTGGGYYDMRNILNNTLVASNPTKAVTLVENHDTQPGQSLESTVQPWFKPLAYAFILTRSGGYPSVFYGDMYGTKGTTTREIPALKSKIEPLLKARKDYAYGTQRDYIDNPDVIGWTREGDSTKAKSGLATVITDGPGGSKRMYVGTSNAGEIWYDLTGNRTDKITIGSDGYATFPVNGGSVSVWVQQ

SEQ ID NO: 35247 - protein, 480 aa, Cytophaga sp.
NGTMMQYFEWYVPNDGQQWNRLRTDAPYLSSVGITAVWTPPAYKGTSQADVGYGPYDLYDLGEFNQKGTVRTKYGTKGELKSAVNTLHSNGIQVYGDVVMNHKAGADYTENVTAVEVNPSNRNQETSGEYSIQAWTGFNFPGRGTTYSNFKWQWFHFDGTDWDQSRSLSRIFKFTGKAWDWEVSSENGNYDYLMYADIDYDHPDVVNEMKKWGVWYANEVGLDGYRLDAVKHIKFSFLKDWVDNARAATGKEMFTVGEYWQNDLGALNNYLAKVNYNQSLFDAPLHYNFYAASTGGGYYDMRNILNNTLVASNPTKAVTLVENHDTQPGQSLESTVQPWFKPLAYAFILTRSGGYPSVFYGDMYGTKGTTTREIPALKSKIEPLLKARKDYAYGTQRDYIDNPDVIGWTREGDSTKAKSGLATVITDGPGGSKRMYVGTSNAGEIWYDLTGNRTDKITIGSDGYATFPVNGGSVSVWVQQ

SEQ ID NO: 35248 - protein, 480 aa, Cytophaga sp.
NGTMMQYFEWYVPNDGQQWNRLRTDAPYLSSVGITAVWTPPAYKGTSQADVGYGPYDLYDLGEFNQKGTVRTKYGTKGELKSAVNTLHSNGIQVYGDVVMNHKAGADYTENVTAVEVNPSNRNQETSGEYNIQAWTGFNFPGRGTTYSNFKWQWFHFDGTDWDQSRSLSRIFKFTGKAWDWEVSSENGNYDYLMYADIDYDHPDVVNEMKKWGVWYANEVGLDGYRLDAVKHIKFSFLKDWVDNARAATGKEMFTVGEYWQNDLGALNNYLAKVNYNQSLFDAPLHYNFYAASTGGGAYDMRNILNNTLVASNPTKAVTLVENHDTQPGQSLESTVQPWFKPLAYAFILTRSGGYPSVFYGDMYGTKGTTTREIPALKSKIEPLLKARKDYAYGTQRDYIDNPDVIGWTREGDSTKAKSGLATVITDGPGGSKRMYVGTSNAGEIWYDLTGNRTDKITIGSDGYATFPVNGGSVSVWVQQ

SEQ ID NO: 35249 - protein, 480 aa, Cytophaga sp.
NGTMMQYFEWYVPNDGQQWNRLRTDAPYLSSVGITAVWTPPAYKGTSQADVGYGPYDLYDLGEFNQKGTVRTKYGTKGELKSAVNTLHSNGIQVYGDVVMNHKAGADYTENVTAVEVNPSNRNQETSGEYNIQAWTGFNFPGRGTTYSNFKWQWFHFDGTDWDQSRSLSRIFKFTGKAWDWEVSSENGNYDYLMYADIDYDHPDVVNEMKKWGVWYANEVGLDGYRLDAVKHIKFSFLKDWVDNARAATGKEMFTVGEYWQNDLGALNNYLAKVNYNQSLFDAPLHYNFYAASTGGGYYDMRNILNNTLVASNPTKAVTLVENHDTQPGQSLESTVQPWFKPLAYAFILTRSGGYPSVFYGDMYGTKGTTTREIPALKSKIEPLLKARKDYAYGTQRDYIDNPDVIGWTREGDSTKAKSGLATVITDGPGGSKRMYVGTSNAGEIWYDLTGNRTDKIMIGSDGYATFPVNGGSVSVWVQQ

SEQ ID NO: 35250 - protein, 480 aa, Cytophaga sp.
NGTMMQYFEWYVPNDGQQWNRLRTDAPYLSSVGITAVWTPPAYKGTSQADVGYGPYDLYDLGEFNQKGTVRTKYGTKGELKSAVNTLHSNGIQVYGDVVMNHKAGADYTENVTAVEVNPSNRNQETSGEYNIQAWTGFNFPGRGTTYSNFKWQWFHFDGTDWDQSRSLSRIFKFTGKAWDWEVSSENGNYDYLMYADIDYDHPDVVNEMKKWGVWYANEVGLDGYRLDAVKHIKFSFLKDWVDNARAATGKEMFTVGEYWQNDLGALNNYLAKVNYNQSLFDAPLHYNFYAASTGGGYYDMRNILNNTLVASEPTKAVTLVENHDTQPGQSLESTVQPWFKPLAYAFILTRSGGYPSVFYGDMYGTKGTTTREIPALKSKIEPLLKARKDYAYGTQRDYIDNPDVIGWTREGDSTKAKSGLATVITDGPGGSKRMYVGTSNAGEIWYDLTGNRTDKITIGSDGYATFPVNGGSVSVWVQQ

SEQ ID NO: 35251 - protein, 480 aa, Cytophaga sp.
NGTMMQYFEWYVPNDGQQWNRLRTDAPYLSSVGITAVWTPPAYKGTSQADVGYGPYDLYDLGEFNQKGTVRTKYGTKGELKSAVNTLHSNGIQVYGDVVMNHKAGADYTENVTAVEVNPSNRNQETSGEYNIQAWTGFNFPGRGTTYSNFKWQWFHFDGTDWDQSRSLSRIFKFTGKAWDWEVSSENGNYDYLMYADIDYDHPDVVNEMKKWGVWYANEVGLDGYRLDAVKHIKFSFLKDWVDNARAATGKEMFTVGEYWQNDLGALNNYLAKVNYNQSLFDAPLHYNFYAASTGGGYYDMRNILNNTLVASNPTKAVTLVENHDTQPGQSLESTVQPWFKPLAYAFILTRSGGYPSVFYGDMYGTKGTTTREIPALKSKIEPLLKARKQYAYGTQRDYIDNPDVIGWTREGDSTKAKSGLATVITDGPGGSKRMYVGTSNAGEIWYDLTGNRTDKITIGSDGYATFPVNGGSVSVWVQQ

SEQ ID NO: 35252 - protein, 480 aa, Cytophaga sp.
NGTMMQYFEWYVPNDGQQWNRLRTDAPYLSSVGITAVWTPPAYKGTSQADVGYGPYDLYDLGEFNQKGTVRTKYGTKGELKSAVNTLHSNGIQVYGDVVMNHKAGADYTENVTAVEVNPSNRNQETSGEYNIQAWTGFNFPGRGTTYSNFKWQWFHFDGTDWDQSRSLSRIFKFTGKAWDWEVSSENGNYDYLMYADIDYDHPDVVNEMKKWGVWYANEVGLDGYRLDAVKHIKFSFLKDWVDNARAATGKEMFTVGEYWQNDLGALNNYLFKVNYNQSLFDAPLHYNFYAASTGGGYYDMRNILNNTLVASNPTKAVTLVENHDTQPGQSLESTVQPWFKPLAYAFILTRSGGYPSVFYGDMYGTKGTTTREIPALKSKIEPLLKARKDYAYGTQRDYIDNPDVIGWTREGDSTKAKSGLATVITDGPGGSKRMYVGTSNAGEIWYDLTGNRTDKITIGSDGYATFPVNGGSVSVWVQQ

SEQ ID NO: 35253 - protein, 480 aa, Cytophaga sp.
NGTMMQYFEWYVPNDGQQWNRLRTDAPYLSSVGITAVWTPPAYKGTSQADVGYGPYDLYDLGEFNQKGTVRTKYGTKGELKSAVNTLHSNGIQVYGDVVMNHKAGADYTENVTAVEVNPSNRNQETSGEYNIQAWTGFNFPGRGTTYSNFKWQWFHFDGTDWDQSRSLSRIFKFTGKAWDWEVSSENGNYDYLMYADIDYDHPDVVNEMKKWGVWYANEVGLDGYRLDAVKHIKFSFLKDWVDNARAATGKEMFTVGEYWQNDLGALNNYLAKVNYNQSLFDAPLHYNFYAASTGGGYYDMRNILNNTLVASNPTKAVTLVENHDTQPGQSLESTVQPWFKPLAYAFILTRSGGYPSVFYGDMYGTKGTTTTEIPALKSKIEPLLKARKDYAYGTQRDYIDNPDVIGWTREGDSTKAKSGLATVITDGPGGSKRMYVGTSNAGEIWYDLTGNRTDKITIGSDGYATFPVNGGSVSVWVQQ

SEQ ID NO: 35254 - protein, 480 aa, Cytophaga sp.
NGTMMQYFEWYVPNDGQQWNRLRTDAPYLSSVGITAVWTPPAYKGTSQADVGYGPYDLYDLGEFNQKGTVRTKYGTKGELKSAVNTLHSNGIQVYGDVVMNHKAGADYTENVTAVEVNPSNRNQETSGEYNIQAWTGFNFPGRGTTYSNFKWQWFHFDGTDWDQSRSWSRIFKFTGKAWDWEVSSENGNYDYLMYADIDYDHPDVVNEMKKWGVWYANEVGLDGYRLDAVKHIKFSFLKDWVDNARAATGKEMFTVGEYWQNDLGALNNYLAKVNYNQSLFDAPLHYNFYAASTGGGYYDMRNILNNTLVASNPTKAVTLVENHDTQPGQSLESTVQPWFKPLAYAFILTRSGGYPSVFYGDMYGTKGTTTREIPALKSKIEPLLKARKDYAYGTQRDYIDNPDVIGWTREGDSTKAKSGLATVITDGPGGSKRMYVGTSNAGEIWYDLTGNRTDKITIGSDGYATFPVNGGSVSVWVQQ

SEQ ID NO: 35255 - protein, 480 aa, Cytophaga sp.
NGTMMQYFEWYVPNDGQQWNRLRTDAPYLSSVGITAVWTPPAYKGTSQADVGYGPYDLYDLGEFNQKGTVRTKYGTKGELKSAVNTLHSNGIQVYGDVVMNHKAGADYTENVTAVEVNPSNRNQETSGEYNIQAWTGFNFPGRGTTYSNFKWQWFHFDGTDWDQSRSLSRIFKFTGKAWDWEVSSENGNYDYLMYADIDYDHPDVVNEMKKWGVWYANEVGLDGYRLDAVKHIKFSFLKDWVDNARAATGKEMFTVGEYWQNDLGALNNYLAKVNYNQSLFDAPLHYNFYAASTGGGYYDMRDILNNTLVASNPTKAVTLVENHDTQPGQSLESTVQPWFKPLAYAFILTRSGGYPSVFYGDMYGTKGTTTREIPALKSKIEPLLKARKDYAYGTQRDYIDNPDVIGWTREGDSTKAKSGLATVITDGPGGSKRMYVGTSNAGEIWYDLTGNRTDKITIGSDGYATFPVNGGSVSVWVQQ

SEQ ID NO: 35256 - protein, 480 aa, Cytophaga sp.
NGTMMQYFEWYVPNDGQQWHRLRTDAPYLSSVGITAVWTPPAYKGTSQADVGYGPYDLYDLGEFNQKGTVRTKYGTKGELKSAVNTLHSNGIQVYGDVVMNHKAGADYTENVTAVEVNPSNRNQETSGEYNIQAWTGFNFPGRGTTYSNFKWQWFHFDGTDWDQSRSLSRIFKFTGKAWDWEVSSENGNYDYLMYADIDYDHPDVVNEMKKWGVWYANEVGLDGYRLDAVKHIKFSFLKDWVDNARAATGKEMFTVGEYWQNDLGALNNYLAKVNYNQSLFDAPLHYNFYAASTGGGYYDMRNILNNTLVASNPTKAVTLVENHDTQPGQSLESTVQPWFKPLAYAFILTRSGGYPSVFYGDMYGTKGTTTREIPALKSKIEPLLKARKDYAYGTQRDYIDNPDVIGWTREGDSTKAKSGLATVITDGPGGSKRMYVGTSNAGEIWYDLTGNRTDKITIGSDGYATFPVNGGSVSVWVQQ

SEQ ID NO: 35257 - protein, 480 aa, Cytophaga sp.
NGTMMQYFEWYVPNDGQQWNRLRTDAPYLSSVGITAVWTPPAYKGTSQADVGYGPYDLYDLGEFNQKGTVRTKYGTKGELKSAVNTLHSNGIQVYGDVVMNHKAGADYTENVTAVEVNPSNRNQETSGEYNIQAWTGFNFPGRGTTYSNFKWQWFHFDGTDWDQSRSLSRIFKFTGKAWDWEVSSENGNYDYLMYADIDYDHPDVVNEMKKWGVWYANEVGLDGYRLDAVKHIKFSFLKDWVDNARAATGKEMFTVGEYWQNDLGALNNYLAKVNYNQSLFDAPLHYNFYAASTGGGYYDMRNILNNTLVASNPTKAVTLVENHDTQPGQSLESTVQPWFKPLAYAFILTRSGGYPSVFYGDMYGTKGTTHREIPALKSKIEPLLKARKDYAYGTQRDYIDNPDVIGWTREGDSTKAKSGLATVITDGPGGSKRMYVGTSNAGEIWYDLTGNRTDKITIGSDGYATFPVNGGSVSVWVQQ

SEQ ID NO: 35258 - protein, 480 aa, Cytophaga sp.
NGTMMQYFEWYVPNDGQQWNRLRTDAPYLSSVGITAVWTPPAYKGTSQADVGYGPYDLYDLGEFNQKGTVRTKYGTKGELKSAVNTLHSNGIQVYGDVVMNHKAGADYTENVTAVEVNPSNRNQETSGEYNIQAWTIFNFPGRGTTYSNFKWQWFHFDGTDWDQSRSLSRIFKFTGKAWDWEVSSENGNYDYLMYADIDYDHPDVVNEMKKWGVWYANEVGLDGYRLDAVKHIKFSFLKDWVDNARAATGKEMFTVGEYWQNDLGALNNYLAKVNYNQSLFDAPLHYNFYAASTGGGYYDMRNILNNTLVASNPTKAVTLVENHDTQPGQSLESTVQPWFKPLAYAFILTRSGGYPSVFYGDMYGTKGTTTREIPALKSKIEPLLKARKDYAYGTQRDYIDNPDVIGWTREGDSTKAKSGLATVITDGPGGSKRMYVGTSNAGEIWYDLTGNRTDKITIGSDGYATFPVNGGSVSVWVQQ

SEQ ID NO: 35259 - protein, 480 aa, Cytophaga sp.
NGTMMQYFEWYVPNDGQQWNRLRTDAPYLSSVGITAVWTPPAYKGTSQADEGYGPYDLYDLGEFNQKGTVRTKYGTKGELKSAVNTLHSNGIQVYGDVVMNHKAGADYTENVTAVEVNPSNRNQETSGEYNIQAWTGFNFPGRGTTYSNFKWQWFHFDGTDWDQSRSLSRIFKFTGKAWDWEVSSENGNYDYLMYADIDYDHPDVVNEMKKWGVWYANEVGLDGYRLDAVKHIKFSFLKDWVDNARAATGKEMFTVGEYWQNDLGALNNYLAKVNYNQSLFDAPLHYNFYAASTGGGYYDMRNILNNTLVASNPTKAVTLVENHDTQPGQSLESTVQPWFKPLAYAFILTRSGGYPSVFYGDMYGTKGTTTREIPALKSKIEPLLKARKDYAYGTQRDYIDNPDVIGWTREGDSTKAKSGLATVITDGPGGSKRMYVGTSNAGEIWYDLTGNRTDKITIGSDGYATFPVNGGSVSVWVQQ

SEQ ID NO: 35260 - protein, 480 aa, Cytophaga sp.
NGTMMQYFEWYVPNDGQQWNRLRTDAPYLSSVGITAVWTPPAYKGTSQADVGYGPYDLYDLGEFNQKGTVRTKYGTKGELKSAVNTLHSNGIQVYGDVVMNHKAGADYTENVTAVEVNPSNRNQETSGEYNIQAWTGFNFPGRGTTYSNFKWQWFHFDGTDWDQSRSLSRIFKFTGKAWDWEVSSENGNYDYLMYADIDYDHPDVVNEMKKWGVWYANEVGLDGYRLDAVKHIKFSFLKDWVDCARAATGKEMFTVGEYWQNDLGALNNYLAKVNYNQSLFDAPLHYNFYAASTGGGYYDMRNILNNTLVASNPTKAVTLVENHDTQPGQSLESTVQPWFKPLAYAFILTRSGGYPSVFYGDMYGTKGTTTREIPALKSKIEPLLKARKDYAYGTQRDYIDNPDVIGWTREGDSTKAKSGLATVITDGPGGSKRMYVGTSNAGEIWYDLTGNRTDKITIGSDGYATFPVNGGSVSVWVQQ

SEQ ID NO: 35261 - protein, 480 aa, Cytophaga sp.
NGTMMQYFEWYVPNDGQQWNRLRTDAPYLSSVGITAVWTPPAYKGTSQADVGYGPYDLYDLGEFNQKGTVRTKYGTKGELKSAVNTLHSNGIQVYGDVVMNHKAGADYTENVTAVEVNPSNRNQETSGEYNIQAWTGFNFPGRGTTYSNFKWQWFHFDGTDWDYSRSLSRIFKFTGKAWDWEVSSENGNYDYLMYADIDYDHPDVVNEMKKWGVWYANEVGLDGYRLDAVKHIKFSFLKDWVDNARAATGKEMFTVGEYWQNDLGALNNYLAKVNYNQSLFDAPLHYNFYAASTGGGYYDMRNILNNTLVASNPTKAVTLVENHDTQPGQSLESTVQPWFKPLAYAFILTRSGGYPSVFYGDMYGTKGTTTREIPALKSKIEPLLKARKDYAYGTQRDYIDNPDVIGWTREGDSTKAKSGLATVITDGPGGSKRMYVGTSNAGEIWYDLTGNRTDKITIGSDGYATFPVNGGSVSVWVQQ

SEQ ID NO: 35262 - protein, 480 aa, Cytophaga sp.
NGTMMQYFEWYVPNDGQQWNRLRTDAPYLSSVGITAVWTPPAYKGTSQADVGYGPYDLYDLGEFNQKGTVRTKYGTKLELKSAVNTLHSNGIQVYGDVVMNHKAGADYTENVTAVEVNPSNRNQETSGEYNIQAWTGFNFPGRGTTYSNFKWQWFHFDGTDWDQSRSLSRIFKFTGKAWDWEVSSENGNYDYLMYADIDYDHPDVVNEMKKWGVWYANEVGLDGYRLDAVKHIKFSFLKDWVDNARAATGKEMFTVGEYWQNDLGALNNYLAKVNYNQSLFDAPLHYNFYAASTGGGYYDMRNILNNTLVASNPTKAVTLVENHDTQPGQSLESTVQPWFKPLAYAFILTRSGGYPSVFYGDMYGTKGTTTREIPALKSKIEPLLKARKDYAYGTQRDYIDNPDVIGWTREGDSTKAKSGLATVITDGPGGSKRMYVGTSNAGEIWYDLTGNRTDKITIGSDGYATFPVNGGSVSVWVQQ

SEQ ID NO: 35263 - protein, 480 aa, Cytophaga sp.
NGTMMQYFEWYVPNDGQQWNRLRTDAPYLSSVGITAVWTPPAYKGTSQADVGYGPYDLYDLGEFNQKGTVRTKYGTKGELKSAVETLHSNGIQVYGDVVMNHKAGADYTENVTAVEVNPSNRNQETSGEYNIQAWTGFNFPGRGTTYSNFKWQWFHFDGTDWDQSRSLSRIFKFTGKAWDWEVSSENGNYDYLMYADIDYDHPDVVNEMKKWGVWYANEVGLDGYRLDAVKHIKFSFLKDWVDNARAATGKEMFTVGEYWQNDLGALNNYLAKVNYNQSLFDAPLHYNFYAASTGGGYYDMRNILNNTLVASNPTKAVTLVENHDTQPGQSLESTVQPWFKPLAYAFILTRSGGYPSVFYGDMYGTKGTTTREIPALKSKIEPLLKARKDYAYGTQRDYIDNPDVIGWTREGDSTKAKSGLATVITDGPGGSKRMYVGTSNAGEIWYDLTGNRTDKITIGSDGYATFPVNGGSVSVWVQQ

SEQ ID NO: 35264 - protein, 480 aa, Cytophaga sp.
NGTMMQYFEWYVPNDGQQWNRLRTDAPYLSSVGITAVWTPPAYKGTSQADVGYGPYDLYDLGEFNQKGTVRTKYGTKGELKSAVNTLHSNGIQVYGDVVMNHKAGADYTENVTAVEVNPSNRNQETSGEYNIQAWTGFNFPGRGTTYSNFKWQWFHFDGTDWDQSRSYSRIFKFTGKAWDWEVSSENGNYDYLMYADIDYDHPDVVNEMKKWGVWYANEVGLDGYRLDAVKHIKFSFLKDWVDNARAATGKEMFTVGEYWQNDLGALNNYLAKVNYNQSLFDAPLHYNFYAASTGGGYYDMRNILNNTLVASNPTKAVTLVENHDTQPGQSLESTVQPWFKPLAYAFILTRSGGYPSVFYGDMYGTKGTTTREIPALKSKIEPLLKARKDYAYGTQRDYIDNPDVIGWTREGDSTKAKSGLATVITDGPGGSKRMYVGTSNAGEIWYDLTGNRTDKITIGSDGYATFPVNGGSVSVWVQQ

SEQ ID NO: 35265 - protein, 480 aa, Cytophaga sp.
NGTMMQYFEWYVPNDGQQWARLRTDAPYLSSVGITAVWTPPAYKGTSQADVGYGPYDLYDLGEFNQKGTVRTKYGTKGELKSAVNTLHSNGIQVYGDVVMNHKAGADYTENVTAVEVNPSNRNQETSGEYNIQAWTGFNFPGRGTTYSNFKWQWFHFDGTDWDQSRSLSRIFKFTGKAWDWEVSSENGNYDYLMYADIDYDHPDVVNEMKKWGVWYANEVGLDGYRLDAVKHIKFSFLKDWVDNARAATGKEMFTVGEYWQNDLGALNNYLAKVNYNQSLFDAPLHYNFYAASTGGGYYDMRNILNNTLVASNPTKAVTLVENHDTQPGQSLESTVQPWFKPLAYAFILTRSGGYPSVFYGDMYGTKGTTTREIPALKSKIEPLLKARKDYAYGTQRDYIDNPDVIGWTREGDSTKAKSGLATVITDGPGGSKRMYVGTSNAGEIWYDLTGNRTDKITIGSDGYATFPVNGGSVSVWVQQ

SEQ ID NO: 35266 - protein, 480 aa, Cytophaga sp.
NGTMMQYFEWYVPNDGQQWNRLRTDAPYLSSVGITAVWTPPAYKGTSQADVGYGPYDLYDLGEFNQKGTVRTKYGTKGELKSAVNTLHSNGIQVYGDVVMNHKAGADYTENVTAVEVNPSNRNQETSGEYNIQAWTGFNFPGRGTTYSNFKWQWFHFDGTDWDQSRSLSRIFKFTGKAWDWEVSSENGNYDYLMYADIDYDHPDVVNEMKKWGVWYANEVGLDGYRLDAVKHIKFSFLKDWVDNARAATGKEMFTVGEYWQNDLGALNNYLAKVNYNQSLFDAPLHYNFYAASTGGGYYDMRNILNNTLVASNPTKAVTLVENHDTQPGQSLESTVQPWFKPLAYAFILTRSGGYPSVFYGDMYGTKGTTTREIPALKSKIEPLLKARKDYAYGTQRDYIDNPDVIGWTREGDSTKAKSGLATVITDGPGGSKRMYVGTSNAGEIWYDLTGNRTDKICIGSDGYATFPVNGGSVSVWVQQ

SEQ ID NO: 35267 - protein, 480 aa, Cytophaga sp.
NGTMMQYFEWYVPNDGQQWNRLRTDAPYLSSVGITAVWTPPAYKGTSQADVGYGPYDLYDLGEFNQKGTVRTKYGTKGELKSAVNTLHSNGIQVYGDVVMNHKAGADYTENVTAVEVNPSNRNQETSGEYNIQAWTGFNFPGRGTTYSNFKWQWFHFDGMDWDQSRSLSRIFKFTGKAWDWEVSSENGNYDYLMYADIDYDHPDVVNEMKKWGVWYANEVGLDGYRLDAVKHIKFSFLKDWVDNARAATGKEMFTVGEYWQNDLGALNNYLAKVNYNQSLFDAPLHYNFYAASTGGGYYDMRNILNNTLVASNPTKAVTLVENHDTQPGQSLESTVQPWFKPLAYAFILTRSGGYPSVFYGDMYGTKGTTTREIPALKSKIEPLLKARKDYAYGTQRDYIDNPDVIGWTREGDSTKAKSGLATVITDGPGGSKRMYVGTSNAGEIWYDLTGNRTDKITIGSDGYATFPVNGGSVSVWVQQ

SEQ ID NO: 35268 - protein, 480 aa, Cytophaga sp.
NGTMMQYFEWYVPNDGQQWNRLRTDAPYLSSVGITAVWTPPAYKGTSQADVGYGPYDLYDLGEFNQKGTVRTKYGTKGELKSAVTTLHSNGIQVYGDVVMNHKAGADYTENVTAVEVNPSNRNQETSGEYNIQAWTGFNFPGRGTTYSNFKWQWFHFDGTDWDQSRSLSRIFKFTGKAWDWEVSSENGNYDYLMYADIDYDHPDVVNEMKKWGVWYANEVGLDGYRLDAVKHIKFSFLKDWVDNARAATGKEMFTVGEYWQNDLGALNNYLAKVNYNQSLFDAPLHYNFYAASTGGGYYDMRNILNNTLVASNPTKAVTLVENHDTQPGQSLESTVQPWFKPLAYAFILTRSGGYPSVFYGDMYGTKGTTTREIPALKSKIEPLLKARKDYAYGTQRDYIDNPDVIGWTREGDSTKAKSGLATVITDGPGGSKRMYVGTSNAGEIWYDLTGNRTDKITIGSDGYATFPVNGGSVSVWVQQ

SEQ ID NO: 35269 - protein, 480 aa, Cytophaga sp.
NGTMMQYFEWYVPNDGQQWNRLRTDAPYLSSVGITAVWTPPAYKGTSQADVGYGPYDLYDLGEFNQKGTVRTKYGTKGELKSAVNTLHSNGIQVYGDVVMNHKAGADYTENVTAVEVNPSNRNQETSQEYNIQAWTGFNFPGRGTTYSNFKWQWFHFDGTDWDQSRSLSRIFKFTGKAWDWEVSSENGNYDYLMYADIDYDHPDVVNEMKKWGVWYANEVGLDGYRLDAVKHIKFSFLKDWVDNARAATGKEMFTVGEYWQNDLGALNNYLAKVNYNQSLFDAPLHYNFYAASTGGGYYDMRNILNNTLVASNPTKAVTLVENHDTQPGQSLESTVQPWFKPLAYAFILTRSGGYPSVFYGDMYGTKGTTTREIPALKSKIEPLLKARKDYAYGTQRDYIDNPDVIGWTREGDSTKAKSGLATVITDGPGGSKRMYVGTSNAGEIWYDLTGNRTDKITIGSDGYATFPVNGGSVSVWVQQ

SEQ ID NO: 35270 - protein, 480 aa, Cytophaga sp.
NGTMMQYFEWYVPNDGQQWNRLRTDAPYLSSVGITAVWTPPAYKGTSQADVGYGPYDLYDLGEFNQKGTVRTKYGTKGELKSAVNTLHSNGIQVYGDVVMNHKAGADYTENVTAVEVNPSNRNQETSGEYNIQAWTGFNFPGRGTTYSNFKWQWFHFDGTDWDQSRSLSRIFKFTGKAWDWEVSSENGNYDYLMYADIDYDHPDVVNEMKKWGVWYANEVGLDGYRLDAVKHIKFSFLKDWVDNARAATGKEMFTVGEYWQNDLGALNNYLAKVNYNQSLFDAPLHYNFYAASTGGGYYDMRNILNNTLVASNPTKAVTLVENHDTQPGQSLESTVQPWFKPLAYAFILTRDGGYPSVFYGDMYGTKGTTTREIPALKSKIEPLLKARKDYAYGTQRDYIDNPDVIGWTREGDSTKAKSGLATVITDGPGGSKRMYVGTSNAGEIWYDLTGNRTDKITIGSDGYATFPVNGGSVSVWVQQ

SEQ ID NO: 35271 - protein, 480 aa, Cytophaga sp.
NGTMMQYFEWYVPNDGQQWVRLRTDAPYLSSVGITAVWTPPAYKGTSQADVGYGPYDLYDLGEFNQKGTVRTKYGTKGELKSAVNTLHSNGIQVYGDVVMNHKAGADYTENVTAVEVNPSNRNQETSGEYNIQAWTGFNFPGRGTTYSNFKWQWFHFDGTDWDQSRSLSRIFKFTGKAWDWEVSSENGNYDYLMYADIDYDHPDVVNEMKKWGVWYANEVGLDGYRLDAVKHIKFSFLKDWVDNARAATGKEMFTVGEYWQNDLGALNNYLAKVNYNQSLFDAPLHYNFYAASTGGGYYDMRNILNNTLVASNPTKAVTLVENHDTQPGQSLESTVQPWFKPLAYAFILTRSGGYPSVFYGDMYGTKGTTTREIPALKSKIEPLLKARKDYAYGTQRDYIDNPDVIGWTREGDSTKAKSGLATVITDGPGGSKRMYVGTSNAGEIWYDLTGNRTDKITIGSDGYATFPVNGGSVSVWVQQ

SEQ ID NO: 35272 - protein, 480 aa, Cytophaga sp.
NGTMMQYFEWYVPNDGQQWNRLRTDAPYLSSVGITAVWTPPAYKGTSQADVGYGPYDLYDLGEFNQKGTVRTKYGTKGELKSAVNTLHSNGIQVYGDVVMNHKAGADYTENVTAVEVNPSNRNQETSGEYNIQAWTGFNFPGRGTTYSNFKWQWFHFDGTDWDQSRSLSRIFKFTGKAWDWEVSSENGNYDYLMYADCDYDHPDVVNEMKKWGVWYANEVGLDGYRLDAVKHIKFSFLKDWVDNARAATGKEMFTVGEYWQNDLGALNNYLAKVNYNQSLFDAPLHYNFYAASTGGGYYDMRNILNNTLVASNPTKAVTLVENHDTQPGQSLESTVQPWFKPLAYAFILTRSGGYPSVFYGDMYGTKGTTTREIPALKSKIEPLLKARKDYAYGTQRDYIDNPDVIGWTREGDSTKAKSGLATVITDGPGGSKRMYVGTSNAGEIWYDLTGNRTDKITIGSDGYATFPVNGGSVSVWVQQ

SEQ ID NO: 35273 - protein, 480 aa, Cytophaga sp.
NGTMMQYFEWYVPNDGQQWNRLRTDAPYLSSVGITAVWTPPAYKGTSQWDVGYGPYDLYDLGEFNQKGTVRTKYGTKGELKSAVNTLHSNGIQVYGDVVMNHKAGADYTENVTAVEVNPSNRNQETSGEYNIQAWTGFNFPGRGTTYSNFKWQWFHFDGTDWDQSRSLSRIFKFTGKAWDWEVSSENGNYDYLMYADIDYDHPDVVNEMKKWGVWYANEVGLDGYRLDAVKHIKFSFLKDWVDNARAATGKEMFTVGEYWQNDLGALNNYLAKVNYNQSLFDAPLHYNFYAASTGGGYYDMRNILNNTLVASNPTKAVTLVENHDTQPGQSLESTVQPWFKPLAYAFILTRSGGYPSVFYGDMYGTKGTTTREIPALKSKIEPLLKARKDYAYGTQRDYIDNPDVIGWTREGDSTKAKSGLATVITDGPGGSKRMYVGTSNAGEIWYDLTGNRTDKITIGSDGYATFPVNGGSVSVWVQQ

SEQ ID NO: 35274 - protein, 480 aa, Cytophaga sp.
NGTMMQYFEWYVPNDGQQWNRLRTDAPYLSSVGITAVWTPPAYKGTSQADVGYGPYDLYDLGEFNQKGTVRTKYGTKGELKSAVNTLHSNGIQVYGDVVMNHKAGADYTENVTAVEVNPSNRNQETSGEYNIQAWTGFNFPGRGTTYSNFKWQWFHFDGTDWDQSRSLSRIFKFTGKAWDWEVSSENGNYDYLMYADIDYDHPDVVNEMKKWGVWYANEVGLDGYRLDAVKHIKFSFLKDWVDNARAATGKEMFTVGEYWQNDLGALNNYLAKVNYNQSLFDAPLHYNFYAASTGGGYYDMRNILNNTLVASNPTKAVTLVENHDTQPGQSLESTVQPWFKPLAYAFILTRSGGYPSVFYGDMYGTKGTTTYEIPALKSKIEPLLKARKDYAYGTQRDYIDNPDVIGWTREGDSTKAKSGLATVITDGPGGSKRMYVGTSNAGEIWYDLTGNRTDKITIGSDGYATFPVNGGSVSVWVQQ

SEQ ID NO: 35275 - protein, 480 aa, Cytophaga sp.
NGTMMQYFEWYVPNDGQQWNRLRTDAPYLSSVGITAVWTPPAYKGTSQADVGYGPYDLYDLGEFNQKGTVRTKYGTKGELKSAVNTLHSNGIQVYGDVVMNHKAGADYTENVTAVEVNPSNRNQETSGEYNIQAWTGFNFPGRGTTYSNFKWQWFHFDGTDWDQSRSLSRIFKFTGKAWDWEVSSENGNYDYLMYADIDYDHPDVVNEMKKWGVWYANEVGLDGYRLDAVKHIKFSFLKDWVDNARAATGKEMFTVGEYWQNDLGALNNYLAKVNYNQSLFDAPLHYNFYAASTGGGYYDMRNILNNTLVASNPTKAVTLVENHDTQPGQSLESTVQPWFKPLAYAFILTRSGGYPSVFYGDMYGTKGTTTREIPALKSKIEPLLKARKDYAYGTQRDYIDNPDVIGWTREGDSTKAKSGLATVITDGPGGSKRMYVGTSNAGEIWYDYTGNRTDKITIGSDGYATFPVNGGSVSVWVQQ

SEQ ID NO: 35276 - protein, 480 aa, Cytophaga sp.
NGTMMQYFEWYVPNDGQQWNRLRTDAPYLSSVGITAVWTPPAYKGTSQADVGYGPYDLYDLGEFNQKGTVRTKYGTKGELKSAVNTLHSNGIQVYGDVVMNHKAGADYTENVTAVEVNPSNRNQETSGEYNIQAWTGFNFPGRGTTYSNFKWQWFHFDGTDWDQSRSLSRIFKFTGKAWDWEVSSENGNYDYLMYADIDYDHPDVVNEMKKWGVWYANEVGLDGYRLDAVKHIKFSFLKDWVDNARAATGKEMFTVGEYWQNDLGALNNYLAKVNYNQSLFDAPLHYNFYAASTGGGYYDMRNILNNTLVASWPTKAVTLVENHDTQPGQSLESTVQPWFKPLAYAFILTRSGGYPSVFYGDMYGTKGTTTREIPALKSKIEPLLKARKDYAYGTQRDYIDNPDVIGWTREGDSTKAKSGLATVITDGPGGSKRMYVGTSNAGEIWYDLTGNRTDKITIGSDGYATFPVNGGSVSVWVQQ

SEQ ID NO: 35277 - protein, 480 aa, Cytophaga sp.
NGTMMQYFEWYVPNDGQQWNRLRTDAPYLSSVGITAVWTPPAYKGTSQADVGYGPYDLYDLGEFNQKGTVRTKYGTKGELKSAVNTLHSNGIQVYGDVVMNHKAGADYTENVTAVEVNPSNRNQETSGEYNIQAWTVFNFPGRGTTYSNFKWQWFHFDGTDWDQSRSLSRIFKFTGKAWDWEVSSENGNYDYLMYADIDYDHPDVVNEMKKWGVWYANEVGLDGYRLDAVKHIKFSFLKDWVDNARAATGKEMFTVGEYWQNDLGALNNYLAKVNYNQSLFDAPLHYNFYAASTGGGYYDMRNILNNTLVASNPTKAVTLVENHDTQPGQSLESTVQPWFKPLAYAFILTRSGGYPSVFYGDMYGTKGTTTREIPALKSKIEPLLKARKDYAYGTQRDYIDNPDVIGWTREGDSTKAKSGLATVITDGPGGSKRMYVGTSNAGEIWYDLTGNRTDKITIGSDGYATFPVNGGSVSVWVQQ

SEQ ID NO: 35278 - protein, 480 aa, Cytophaga sp.
NGTMMQYFEWYVPNDGQQWNRLRTDAPYLSSVGITAVWTPPAYKGTSQADVGYGPYDLYDLGEFNQKGTVRTKYGTKGELKSAVNTLHSNGIQVYGDVVMNHKAGADYTENVTAVEVNPSNRNQETSGEYNIQAWTGFSFPGRGTTYSNFKWQWFHFDGTDWDQSRSLSRIFKFTGKAWDWEVSSENGNYDYLMYADIDYDHPDVVNEMKKWGVWYANEVGLDGYRLDAVKHIKFSFLKDWVDNARAATGKEMFTVGEYWQNDLGALNNYLAKVNYNQSLFDAPLHYNFYAASTGGGYYDMRNILNNTLVASNPTKAVTLVENHDTQPGQSLESTVQPWFKPLAYAFILTRSGGYPSVFYGDMYGTKGTTTREIPALKSKIEPLLKARKDYAYGTQRDYIDNPDVIGWTREGDSTKAKSGLATVITDGPGGSKRMYVGTSNAGEIWYDLTGNRTDKITIGSDGYATFPVNGGSVSVWVQQ

SEQ ID NO: 35279 - protein, 480 aa, Cytophaga sp.
NGTMMQYFEWYVPNDGQQWNRLRTDAPYLSSVGITAVWTPPAYKGTSQADVGYGPYDLYDLGEFNQKGTVRTKYGTKGELKSAVNTLHSNGIQVYGDVVMNHKAGADYTENVTAVEVNPSNRNQETSGEYNIQAWTGFNFPGRGTTYSNFKWQWFHFDGTDWDQSRSLSRIFKFTGKAWDWEVSSENGNYDYLMYADIDYDHPDVVNEMKKWGVWYANEVGLDGYRLDAVKHIKFSFLKDWVDNARAATGKEMFTVGEYWQNDLGALNNYLAKVNYNQSLFDAPLHYNFYAASTGGGYYDMRNILNNTLVASNPTKAVTLVENHDTQPGQSLESTVQPWFKPLAYAFILTRSGGYPSVFYGDMYGTKGTTTREIPALKSKIEPLLKARKDYAYGTQRDYIDNPDVIGWTREGDSTKAKSGLATVITDGPGGSKRMYVGTSNAGEIWYDLTGNRTDKILIGSDGYATFPVNGGSVSVWVQQ

SEQ ID NO: 35280 - protein, 480 aa, Cytophaga sp.
NGTMMQYFEWYVPNDGQQWNRLRTDAPYLSSVGITAVWTPPAYKGTSQADVGYGPYDLYDLGEFNQKGTVRTKYGTKGELKSAVNTLHSNGIQVYGDVVMNHKAGADYTENVTAVEVNPSNRNQETSGEYNIQAWTGFNFPGRGTTYSNFKWQWFHFDGTDWDQSRSLSRIFKFTGKAWDWEVSSENGNYDYLMYADIDYDHPDVVNEMKKWGVWYANEVGLDGYRRDAVKHIKFSFLKDWVDNARAATGKEMFTVGEYWQNDLGALNNYLAKVNYNQSLFDAPLHYNFYAASTGGGYYDMRNILNNTLVASNPTKAVTLVENHDTQPGQSLESTVQPWFKPLAYAFILTRSGGYPSVFYGDMYGTKGTTTREIPALKSKIEPLLKARKDYAYGTQRDYIDNPDVIGWTREGDSTKAKSGLATVITDGPGGSKRMYVGTSNAGEIWYDLTGNRTDKITIGSDGYATFPVNGGSVSVWVQQ

SEQ ID NO: 35281 - protein, 480 aa, Cytophaga sp.
NGTMMQYFEWYVPNDGQQWNRLRTDAPYLSSVGITAVWTPPAYKGTSQADVGYGPYDLYDLGEFNQKGTVRTKYGTKGELKSAVNTLHSNGIQVYGDVVMNHKAGADYTENVTAVEVNPSNRNQETSGEYNIQAWTGFNFPGRGTTYSNFKWQWFHFDGTDWDQSRSLSRIFKFTGKAWDWEVSSENGNYDYLMYADIDYDHPDVVNEMKKWGVWYANEVGLDGYRLDAVKHIKFSFLKDWVDNARAATGKEMFTVGEYWQNDLGALNNYLAKVNYNQSLFDAPLHYNFYAASTGGGYYDMRNILNNTLVASAPTKAVTLVENHDTQPGQSLESTVQPWFKPLAYAFILTRSGGYPSVFYGDMYGTKGTTTREIPALKSKIEPLLKARKDYAYGTQRDYIDNPDVIGWTREGDSTKAKSGLATVITDGPGGSKRMYVGTSNAGEIWYDLTGNRTDKITIGSDGYATFPVNGGSVSVWVQQ

SEQ ID NO: 35282 - protein, 480 aa, Cytophaga sp.
NGTMMQYFEWYVPNDGQQWMRLRTDAPYLSSVGITAVWTPPAYKGTSQADVGYGPYDLYDLGEFNQKGTVRTKYGTKGELKSAVNTLHSNGIQVYGDVVMNHKAGADYTENVTAVEVNPSNRNQETSGEYNIQAWTGFNFPGRGTTYSNFKWQWFHFDGTDWDQSRSLSRIFKFTGKAWDWEVSSENGNYDYLMYADIDYDHPDVVNEMKKWGVWYANEVGLDGYRLDAVKHIKFSFLKDWVDNARAATGKEMFTVGEYWQNDLGALNNYLAKVNYNQSLFDAPLHYNFYAASTGGGYYDMRNILNNTLVASNPTKAVTLVENHDTQPGQSLESTVQPWFKPLAYAFILTRSGGYPSVFYGDMYGTKGTTTREIPALKSKIEPLLKARKDYAYGTQRDYIDNPDVIGWTREGDSTKAKSGLATVITDGPGGSKRMYVGTSNAGEIWYDLTGNRTDKITIGSDGYATFPVNGGSVSVWVQQ

SEQ ID NO: 35283 - protein, 480 aa, Cytophaga sp.
NGTMMQYFEWYVPNDGQQWNRLRTDAPYLSSVGITAVWTPPAYKGTSQADVGYGPYDLYDLGEFNQKGTVRTKYGTKGELKSAVNTLHSNGIQVYGDVVMNHKAGADYTENVTAVEVNPSNRNQETSGEYNIQAWTGFNFPGRGTTYSNFKWQWFHFDGTDWDQSRSLSRIFKFTGKAWDWEVSSENGNYDYLMYADIDYDHPDVVNEMKKWGVWYANEVGLDGYRLDAVKHIKFSFLKDWVDNARAATGKEMFTVGEYWQNDLGALNNYLAKVNYNQSLFDAPLHYNFYAASTGGGYYDMRNILNNTLVASNPTKAVTLVENHDTQPGQSLESTVQPWFKPLAYAFILTRSGGYPSVFYGDMYGTKGTTTREIPALKSKIEPLLKARKDYAYGTQRDYIDNPDVIGWTREGDSTKAKSGLATVITDGPGGSKRMYVGNSNAGEIWYDLTGNRTDKITIGSDGYATFPVNGGSVSVWVQQ

SEQ ID NO: 35284 - protein, 480 aa, Cytophaga sp.
NGTMMQYFEWYVPNDGQQWNRLRTDAPYLSSVGITAVWTPPAYKGTSQADVGYGPYDLYDLGEFNQKGTVRTKYGTKGELKSAVNTLHSNGIQVYGDVVMNHKAGADYTENVTAVEVNPSNRNQETSGEYNIQAWTGFNFPGRGTTYSNFKWQWFHFDGTDWDQSRSLSRIFKFTGKAWDWEVSSENGNYDYLMYADIDYDHPDVVNEMKKWGVWYANEVGLDGYRLDAVKHIKFSFLKDWVDNARAATGKEMFTVGEYWQNDLGALNNYLAKVNYNQSLFDAPLHYNFYAASTGGGYYDMRNILNNTLVASNPTKAVTLVENHDTQPGQSLESTVQPWFKPLAYAFILTRSGGYPSVFYGDMYGTKGTTTREIPALKSKIEPLLKARKDYAYGTQRDYIDNPDVIGWTREGDSTKAKSGLATVITDGPGGSKRMYVGTSNAGEIWYDCTGNRTDKITIGSDGYATFPVNGGSVSVWVQQ

SEQ ID NO: 35285 - protein, 480 aa, Cytophaga sp.
NGTMMQYFEWYVPNDGQQWNRLRTDAPYLSSVGITAVWTPPAYKGTSQADVGYGPYDLYDLGEFNQKGTVRTKYGTKGELKSAVNTLHSNGIQVYGDVVMNHKAGADYTENVTAVEVNPSNRNQETSGEYNIQAWTGFNFPGRGTTYSNFKWQWFHFDGTDWDQSRSLSRIFKFTGKAWDWEVSSENGNYDYLMYADIDYDHPDVVNEMKKWGVWYANEVGLDGYRLDAVKHIKFSFLKDWVDNARAATGKEMFTVGEYWQNDLGALNNYLAKVNYNQSLFDAPLHYNFYAASTGGGYYDMRNILNNTLVASNPTKAVTLVENHDTQPGQSLESTVQPWFKPLAYAFILTRSGGYPSVFYGDMYGTKGTTTREIPALKSKIEPLLKARKDYAYGTQRDYIDNPDVIGWTREGDSTKAKSGLATVITDGPGGSKRMYVGPSNAGEIWYDLTGNRTDKITIGSDGYATFPVNGGSVSVWVQQ

SEQ ID NO: 35286 - protein, 480 aa, Cytophaga sp.
NGTMMQYFEWYVPNDGQQWNRLRKDAPYLSSVGITAVWTPPAYKGTSQADVGYGPYDLYDLGEFNQKGTVRTKYGTKGELKSAVNTLHSNGIQVYGDVVMNHKAGADYTENVTAVEVNPSNRNQETSGEYNIQAWTGFNFPGRGTTYSNFKWQWFHFDGTDWDQSRSLSRIFKFTGKAWDWEVSSENGNYDYLMYADIDYDHPDVVNEMKKWGVWYANEVGLDGYRLDAVKHIKFSFLKDWVDNARAATGKEMFTVGEYWQNDLGALNNYLAKVNYNQSLFDAPLHYNFYAASTGGGYYDMRNILNNTLVASNPTKAVTLVENHDTQPGQSLESTVQPWFKPLAYAFILTRSGGYPSVFYGDMYGTKGTTTREIPALKSKIEPLLKARKDYAYGTQRDYIDNPDVIGWTREGDSTKAKSGLATVITDGPGGSKRMYVGTSNAGEIWYDLTGNRTDKITIGSDGYATFPVNGGSVSVWVQQ

SEQ ID NO: 35287 - protein, 480 aa, Cytophaga sp.
NGTMMQYFEWYVPNDGQQWNRLRTDAPYLSSVGITAVWTPPAYKGTSQADVGYGPYDLYDLGEFNQKGTVRTKYGTKGELKSAVNTLHSNGIQVYGDVVMNHKAGADYTENVTAVEVNPSNRNQETSGEYNIQAWTGFYFPGRGTTYSNFKWQWFHFDGTDWDQSRSLSRIFKFTGKAWDWEVSSENGNYDYLMYADIDYDHPDVVNEMKKWGVWYANEVGLDGYRLDAVKHIKFSFLKDWVDNARAATGKEMFTVGEYWQNDLGALNNYLAKVNYNQSLFDAPLHYNFYAASTGGGYYDMRNILNNTLVASNPTKAVTLVENHDTQPGQSLESTVQPWFKPLAYAFILTRSGGYPSVFYGDMYGTKGTTTREIPALKSKIEPLLKARKDYAYGTQRDYIDNPDVIGWTREGDSTKAKSGLATVITDGPGGSKRMYVGTSNAGEIWYDLTGNRTDKITIGSDGYATFPVNGGSVSVWVQQ

SEQ ID NO: 35288 - protein, 480 aa, Cytophaga sp.
NGTMMQYFEWYVPNDGQQWNRLRTDAPYLSSVGITAVWTPPAYKGTSQADVGYGPYDLYDLGEFNQKGTVRTKYGTKGELKSAVNTLHSNGIQVYGDVVMNHKAGADYTENVTAVEVNPSNRNQETSGEYNIQAWTGFGFPGRGTTYSNFKWQWFHFDGTDWDQSRSLSRIFKFTGKAWDWEVSSENGNYDYLMYADIDYDHPDVVNEMKKWGVWYANEVGLDGYRLDAVKHIKFSFLKDWVDNARAATGKEMFTVGEYWQNDLGALNNYLAKVNYNQSLFDAPLHYNFYAASTGGGYYDMRNILNNTLVASNPTKAVTLVENHDTQPGQSLESTVQPWFKPLAYAFILTRSGGYPSVFYGDMYGTKGTTTREIPALKSKIEPLLKARKDYAYGTQRDYIDNPDVIGWTREGDSTKAKSGLATVITDGPGGSKRMYVGTSNAGEIWYDLTGNRTDKITIGSDGYATFPVNGGSVSVWVQQ

SEQ ID NO: 35289 - protein, 480 aa, Cytophaga sp.
NGTMMQYFEWYVPNDGQQWNRLRTDAPYLSSVGITAVWTPPAYKGTSQADVGYGPYDLYDLGEFNQKGTVRTKYGTKGELKSAVNTLHSNGIQVYGDVVMNHKAGADYTENVTAVEVNPSNRNQETSGEYNIQAWTGFNFPGRGTTYSNFKWQWFHFDGTDWDQSRSLSRIFKFTGKAWDWEVSSENGNYDYLMYADIDYDHPDVVNEMKKWGVWYANEVGLDGYRLDAVKHIKFSFLKDWVDNARAATGKEMFTVGEYWQNDLGALNNYLAKVNYNQSLFDAPLHYNFYAASTGGGYYDMRNILNNTLVASNPTKAVTLVENHDTQPGQSLESTVQPWFKPLAYAFILTRSGGYPSVFYGDMYGTKGTTTREIPALKSKIEPLLKARKDYAYGTQRDYIDNPDVIGWTREGDSTKAKSGLATVITDGPGGSKRMYVGTMNAGEIWYDLTGNRTDKITIGSDGYATFPVNGGSVSVWVQQ

SEQ ID NO: 35290 - protein, 480 aa, Cytophaga sp.
NGTMMQYFEWYVPNDGQQWNRLRTDAPYLSSVGITAVWTPPAYKGTSQADVGYGPYDLYDLGEFNQKGTVRTKYGTKGELKSAVNTLHSNGIQVYGDVVMNHKAGADYTENVTAVEVNPSNRNQETSGEYNIQAWTGFNFPGRGTTYSNFKWQWFHFDGTDWDQSRSLSRIFKFTGKAWDWEVSSENGNYDYLMYADIDYDHPDVVNEMKKWGVWYANEVGLDGYRLDAVKHIKFSFLKDWVDNARAATGKEMFTVGEYWQNDLGALNNYLAKVNYNQSLFDAPLHYNFYAASRGGGYYDMRNILNNTLVASNPTKAVTLVENHDTQPGQSLESTVQPWFKPLAYAFILTRSGGYPSVFYGDMYGTKGTTTREIPALKSKIEPLLKARKDYAYGTQRDYIDNPDVIGWTREGDSTKAKSGLATVITDGPGGSKRMYVGTSNAGEIWYDLTGNRTDKITIGSDGYATFPVNGGSVSVWVQQ

SEQ ID NO: 35291 - protein, 480 aa, Cytophaga sp.
NGTMMQYFEWYVPNDGQQWNRLRTDAPYLSSVGITAVWTPPAYKGTSQADVGYGPYDLYDLGEFNQKGTVRTKYGTKGELKSAVNTLHSNGIQVYGDVVMNHKAGADYTENVTAVEVNPSNRNQETSGEYNIQAWTGFNFPGRGTTYSNFKWQWFHFDGTDWDQSRSLSRIFKFTGKAWDWEVSSENGNYDYLMYADIDYDHPDVVNEMKKWGVWYANEVGLDGYRLDAVKHIKFSFLKDWVDNARAATGKEMFTVGEYWQNDLGALNNYLAKVNYNQSLFDAPLHYNFYAASTGGGYYDMRNILNNTLVASNPTKAVTLVENHDTQPGQSLESTVQPWFKPLAYAFILTRSGGYPSVFYGDMYGTKGTTTREIPALKSKIEPLLKARKDYAYGTQRDYIDNPDVIGWTREGDSTKAKSGLATVITDGPGGSKRMYVGTSNAGEIWYDLTGNRTDKITIGSDGYATFPVNSGSVSVWVQQ

SEQ ID NO: 35292 - protein, 480 aa, Cytophaga sp.
NGTMMQYFEWYVPNDGQQWNRLRTDAPYLSSVGITAVWLPPAYKGTSQADVGYGPYDLYDLGEFNQKGTVRTKYGTKGELKSAVNTLHSNGIQVYGDVVMNHKAGADYTENVTAVEVNPSNRNQETSGEYNIQAWTGFNFPGRGTTYSNFKWQWFHFDGTDWDQSRSLSRIFKFTGKAWDWEVSSENGNYDYLMYADIDYDHPDVVNEMKKWGVWYANEVGLDGYRLDAVKHIKFSFLKDWVDNARAATGKEMFTVGEYWQNDLGALNNYLAKVNYNQSLFDAPLHYNFYAASTGGGYYDMRNILNNTLVASNPTKAVTLVENHDTQPGQSLESTVQPWFKPLAYAFILTRSGGYPSVFYGDMYGTKGTTTREIPALKSKIEPLLKARKDYAYGTQRDYIDNPDVIGWTREGDSTKAKSGLATVITDGPGGSKRMYVGTSNAGEIWYDLTGNRTDKITIGSDGYATFPVNGGSVSVWVQQ

SEQ ID NO: 35293 - protein, 480 aa, Cytophaga sp.
NGTMMQYFEWYVPNDGQQWNRLRTDAPYLSSVGITAVWTPPAYKGTSQADVGYGPYDLYDLGEFNQKGTVRTKYGTKGELKSAVNTLHSNGIQVYGDVVMNHKAGADYTENVTAVEVNPSNRNQETSGEYNIQAWTGFNFPGRGTTYSNFKWQWFHFDGTDWDQSRSLSRIFKFTGKAWDWEVSSENGNYDYLMYADIDYDHPDVVNEMKKWGVWYANEVGLDGYRLDAVKHIKFSFLKDWVDNARAATGKEMFTVGEYWQNDLGALNNYLAKVNYNQSLFDAPLHYNFYAASTGGGYYDMRNILNNTLVASNPTKAVTLVENHDTQPGQSLESTVQPWFKPLAYAFILTRQGGYPSVFYGDMYGTKGTTTREIPALKSKIEPLLKARKDYAYGTQRDYIDNPDVIGWTREGDSTKAKSGLATVITDGPGGSKRMYVGTSNAGEIWYDLTGNRTDKITIGSDGYATFPVNGGSVSVWVQQ

SEQ ID NO: 35294 - protein, 480 aa, Cytophaga sp.
NGTMMQYFEWYVPNDGQQWNRLRTDAPYLSSVGITAVWTPPAYKGTSQADVGYGPYDLYDLGEFNQKGTVRTKYGTKGELKSAVNTLHSNGIQVYGDVVMNHKAGADYTENVTAVEVNPSNRNQETSGEYNIQAWTYFNFPGRGTTYSNFKWQWFHFDGTDWDQSRSLSRIFKFTGKAWDWEVSSENGNYDYLMYADIDYDHPDVVNEMKKWGVWYANEVGLDGYRLDAVKHIKFSFLKDWVDNARAATGKEMFTVGEYWQNDLGALNNYLAKVNYNQSLFDAPLHYNFYAASTGGGYYDMRNILNNTLVASNPTKAVTLVENHDTQPGQSLESTVQPWFKPLAYAFILTRSGGYPSVFYGDMYGTKGTTTREIPALKSKIEPLLKARKDYAYGTQRDYIDNPDVIGWTREGDSTKAKSGLATVITDGPGGSKRMYVGTSNAGEIWYDLTGNRTDKITIGSDGYATFPVNGGSVSVWVQQ

SEQ ID NO: 35295 - protein, 480 aa, Cytophaga sp.
NGTMMQYFEWYVPNDGQQWNRLRTDAPYLSSVGITAVWTPPAYKGTSQADVGYGPYDLYDLGEFNQKGTVRTKYGTKGELKSAVNTLHSNGIQVYGDVVMNHKAGADYTENVTAVEVNPSNRNQETSGEYNIQAWTGFNFPGRGTTYSNFKWQWFHFDGTDWDQSRSLSRIFKFTGKAWDWEVSSENGNYDYLMYADIDYDHPDVVNEMKKWGVWYANEVGLDGYRLDAVKHIKFSFLKDWVDNARAATGKEMFTVGEYWQNDLGALNNYLAKVNYNQSLFDAPLHYNFYAASTGGGYYDMRNILNNTLVASNPTKAVTLVENHDTQPGQSLESTVQPWFKPLAYAFILTRSGGYPSVFYGDMYGTKGTTNREIPALKSKIEPLLKARKDYAYGTQRDYIDNPDVIGWTREGDSTKAKSGLATVITDGPGGSKRMYVGTSNAGEIWYDLTGNRTDKITIGSDGYATFPVNGGSVSVWVQQ

SEQ ID NO: 35296 - protein, 480 aa, Cytophaga sp.
NGTMMQYFEWYVPNDGQQWNRLRTDAPYLSSVGITAVWTPPAYKGTSQADVGYGPYDLYDLGEFNQKGTVRTKYGTKGELKSAVNTLHSNGIQVYGDVVMNHKAGADYTENVTAVEVNPSNRNQETSGEYNIQAWTGFNFPGRGTTYSNFKWQWWHFDGTDWDQSRSLSRIFKFTGKAWDWEVSSENGNYDYLMYADIDYDHPDVVNEMKKWGVWYANEVGLDGYRLDAVKHIKFSFLKDWVDNARAATGKEMFTVGEYWQNDLGALNNYLAKVNYNQSLFDAPLHYNFYAASTGGGYYDMRNILNNTLVASNPTKAVTLVENHDTQPGQSLESTVQPWFKPLAYAFILTRSGGYPSVFYGDMYGTKGTTTREIPALKSKIEPLLKARKDYAYGTQRDYIDNPDVIGWTREGDSTKAKSGLATVITDGPGGSKRMYVGTSNAGEIWYDLTGNRTDKITIGSDGYATFPVNGGSVSVWVQQ

SEQ ID NO: 35297 - protein, 480 aa, Cytophaga sp.
NGTMMQYFEWYVPNDGQQWNRLRTDAPYLSSVGITAVWTPPAYKGTSQADVGYGPYDLYDLGEFNQKGTVRTKYGTKGELKSAVNTLHSNGIQVYGDVVMNHKAGADYTENVTAVEVNPSNRNQETSGEYNIQAWTGFNFPGRGTTYSNFKWQWFHFDGTDWDQSRSLSRIFKFTGKAWDWEVSSENGNYDYLMYADIDYDHPDVVNEMKKWGVWYANEVGLDGYRLDAVKHIKFSFLKDWVDNARAATGKEMFTVGEYWQNDLGALNNYLAKVNYNQSLFDAPLHYNFYAASTGGGYYDMRNILNNTLVASYPTKAVTLVENHDTQPGQSLESTVQPWFKPLAYAFILTRSGGYPSVFYGDMYGTKGTTTREIPALKSKIEPLLKARKDYAYGTQRDYIDNPDVIGWTREGDSTKAKSGLATVITDGPGGSKRMYVGTSNAGEIWYDLTGNRTDKITIGSDGYATFPVNGGSVSVWVQQ

SEQ ID NO: 35298 - protein, 480 aa, Cytophaga sp.
NGTMMQYFEWYVPNDGQQWNRLRTDAPYLSSVGITAVWTPPAYKGTSQADVGYGPYDLYDLGEFNQKGTVRTKYGTKGELKSAVNTLHSNGIQVYGDVVMNHKAGADYTENVTAVEVNPSNRNQETSGEYNIQAWTNFNFPGRGTTYSNFKWQWFHFDGTDWDQSRSLSRIFKFTGKAWDWEVSSENGNYDYLMYADIDYDHPDVVNEMKKWGVWYANEVGLDGYRLDAVKHIKFSFLKDWVDNARAATGKEMFTVGEYWQNDLGALNNYLAKVNYNQSLFDAPLHYNFYAASTGGGYYDMRNILNNTLVASNPTKAVTLVENHDTQPGQSLESTVQPWFKPLAYAFILTRSGGYPSVFYGDMYGTKGTTTREIPALKSKIEPLLKARKDYAYGTQRDYIDNPDVIGWTREGDSTKAKSGLATVITDGPGGSKRMYVGTSNAGEIWYDLTGNRTDKITIGSDGYATFPVNGGSVSVWVQQ

SEQ ID NO: 35299 - protein, 480 aa, Cytophaga sp.
NGTMMQYFEWYVPNDGQQWNRLRTDAPYLSSVGITAVWTPPAYKGTSQADVGYGPYDLYDLGEFNQKGTVRTKYGTKGELKSAVNTLHSNGIQVYGDVVMNHKAGADYTENVTAVEVNPSNRNQETSGEYNIQAWTGFNFPGRGTTYSNFKWQWFHFDGTDWDQSRSLSRIFKFTGKAWDWEVSSENGNYDYLMYADIDYDHPDVVNEMKKWGVWYANEVGLDGYRLDAVKHIKFSFLKDWVDNARAATGKEMFTVGEYWQNDLGALNNYLAKVNYNQSLFDAPLHYNFYAASTGGGYYDMRNILNNTLVASNPTKAVTLVENHDTQPGQSLESTVQPWFKPLAYAFILTRSGGYPSVFYGDMYGTKGTTTREIPALKSKIEPLLKARKDYAYGTQRDYIDNPDVIGWTREGDSTKAKSGLATVITDGPGGSKRMYVGTSNAGEIWYDLTGNRTDSITIGSDGYATFPVNGGSVSVWVQQ

SEQ ID NO: 35300 - protein, 480 aa, Cytophaga sp.
NGTMMQYFEWYVPNDGQQWNRLRTDAPYLSSVGITAVWTPPAYKGTSQADVGYGPYDLYDLGEFNQKGTVRTKYGTKGELKSAVNTLHSNGIQVYGDVVMNHKAGADYTENVTAVEVNPSNRNQETSGEYNIQAWTGFNFPGRGTTYSNFKWQWFHFDGTDWDQSRSLSRIFKFTGKAWDWEVSSENGNYDYLMYADIDYDHPDVVNEMKKWGVWYANEVGLDGYRLDAVKHIKFSFLKDWVDNARAATGKEMFTVGEYWQNDLGALNNYLAKVNYNQSLFDAPLHYNFYAASTGGGYYDMRNILNNTLVASNPTKAVTLVENHDTQPGQSLESTVQPWFKPLAYAFILTRSGGYPSVFYGDMYGTKGTTTVEIPALKSKIEPLLKARKDYAYGTQRDYIDNPDVIGWTREGDSTKAKSGLATVITDGPGGSKRMYVGTSNAGEIWYDLTGNRTDKITIGSDGYATFPVNGGSVSVWVQQ

SEQ ID NO: 35301 - protein, 480 aa, Cytophaga sp.
NGTMMQYFEWYVPNDGQQWNRLRTDAPYLSSVGITAVWTPPAYKGTSQADVGYGPYDLYDLGEFNQKGTVRTKYGTKGELKSAVNTLHSNGIQVYGDVVMNHKAGADYTENVTAVEVNPSNRNQETSGEYNIQAWTGFNFPGRGTTYSNFKWQWFHFDGTDWDQSRRLSRIFKFTGKAWDWEVSSENGNYDYLMYADIDYDHPDVVNEMKKWGVWYANEVGLDGYRLDAVKHIKFSFLKDWVDNARAATGKEMFTVGEYWQNDLGALNNYLAKVNYNQSLFDAPLHYNFYAASTGGGYYDMRNILNNTLVASNPTKAVTLVENHDTQPGQSLESTVQPWFKPLAYAFILTRSGGYPSVFYGDMYGTKGTTTREIPALKSKIEPLLKARKDYAYGTQRDYIDNPDVIGWTREGDSTKAKSGLATVITDGPGGSKRMYVGTSNAGEIWYDLTGNRTDKITIGSDGYATFPVNGGSVSVWVQQ

SEQ ID NO: 35302 - protein, 480 aa, Cytophaga sp.
NGTMMQYFEWYVPNDGQQWNRLRTDAPYLSSVGITAVWTPPAYKGTSQADVGYGPYDLYDLGEFNQKGTVRTKYGTKGELKSAVNTLHSNGIQVYGDVVMNHKAGADYTENVTAVEVNPSNRNQETSGEYNIGAWTGFNFPGRGTTYSNFKWQWFHFDGTDWDQSRSLSRIFKFTGKAWDWEVSSENGNYDYLMYADIDYDHPDVVNEMKKWGVWYANEVGLDGYRLDAVKHIKFSFLKDWVDNARAATGKEMFTVGEYWQNDLGALNNYLAKVNYNQSLFDAPLHYNFYAASTGGGYYDMRNILNNTLVASNPTKAVTLVENHDTQPGQSLESTVQPWFKPLAYAFILTRSGGYPSVFYGDMYGTKGTTTREIPALKSKIEPLLKARKDYAYGTQRDYIDNPDVIGWTREGDSTKAKSGLATVITDGPGGSKRMYVGTSNAGEIWYDLTGNRTDKITIGSDGYATFPVNGGSVSVWVQQ

SEQ ID NO: 35303 - protein, 480 aa, Cytophaga sp.
NGTMMQYFEWYVPNDGQQWNRLRTDAPYLSSVGITAVWTPPAYKGTSQADVGYGPYDLYDLGEFNQKGTVRTKYGTKGELKSAVNTLHSNGIQVYGDVVMNHKAGADYTENVTAVEVNPSNRNQETSGEYNIQAWTGFNFPGRGTTYSNFKWQWFHFDGTDWDQSRSLSRIFKFTGKAWDWEVSSENGNYDYLMYADIDYDHPDVVREMKKWGVWYANEVGLDGYRLDAVKHIKFSFLKDWVDNARAATGKEMFTVGEYWQNDLGALNNYLAKVNYNQSLFDAPLHYNFYAASTGGGYYDMRNILNNTLVASNPTKAVTLVENHDTQPGQSLESTVQPWFKPLAYAFILTRSGGYPSVFYGDMYGTKGTTTREIPALKSKIEPLLKARKDYAYGTQRDYIDNPDVIGWTREGDSTKAKSGLATVITDGPGGSKRMYVGTSNAGEIWYDLTGNRTDKITIGSDGYATFPVNGGSVSVWVQQ

SEQ ID NO: 35304 - protein, 480 aa, Cytophaga sp.
NGTMMQYFEWYVPNDGQQWNRLRTDAPYLSSVGITAVWTPPAYKGTSQADVGYGPYDLYDLGEFNQKGTVRTKYGTKGELKSAVNTLHSNGIQVYGDVVMNHKAGADYTENVTAVEVNPSNRNQETSGEYNIQAWTGFMFPGRGTTYSNFKWQWFHFDGTDWDQSRSLSRIFKFTGKAWDWEVSSENGNYDYLMYADIDYDHPDVVNEMKKWGVWYANEVGLDGYRLDAVKHIKFSFLKDWVDNARAATGKEMFTVGEYWQNDLGALNNYLAKVNYNQSLFDAPLHYNFYAASTGGGYYDMRNILNNTLVASNPTKAVTLVENHDTQPGQSLESTVQPWFKPLAYAFILTRSGGYPSVFYGDMYGTKGTTTREIPALKSKIEPLLKARKDYAYGTQRDYIDNPDVIGWTREGDSTKAKSGLATVITDGPGGSKRMYVGTSNAGEIWYDLTGNRTDKITIGSDGYATFPVNGGSVSVWVQQ

SEQ ID NO: 35305 - protein, 480 aa, Cytophaga sp.
NGTMMQYFEWYVPNDGQQWYRLRTDAPYLSSVGITAVWTPPAYKGTSQADVGYGPYDLYDLGEFNQKGTVRTKYGTKGELKSAVNTLHSNGIQVYGDVVMNHKAGADYTENVTAVEVNPSNRNQETSGEYNIQAWTGFNFPGRGTTYSNFKWQWFHFDGTDWDQSRSLSRIFKFTGKAWDWEVSSENGNYDYLMYADIDYDHPDVVNEMKKWGVWYANEVGLDGYRLDAVKHIKFSFLKDWVDNARAATGKEMFTVGEYWQNDLGALNNYLAKVNYNQSLFDAPLHYNFYAASTGGGYYDMRNILNNTLVASNPTKAVTLVENHDTQPGQSLESTVQPWFKPLAYAFILTRSGGYPSVFYGDMYGTKGTTTREIPALKSKIEPLLKARKDYAYGTQRDYIDNPDVIGWTREGDSTKAKSGLATVITDGPGGSKRMYVGTSNAGEIWYDLTGNRTDKITIGSDGYATFPVNGGSVSVWVQQ

SEQ ID NO: 35306 - protein, 480 aa, Cytophaga sp.
NGTMMQYFEWYVPNDGQQWNRLRTDAPYLSSVGITAVWTPPAYKGTSQADVGYGPYDLYDLGEFNQKGTVRTKYGTKGELKSAVNTLHSNGIQVYGDVVMNHKAGADYTENVTAVEVNPSNRNQETSGEYNIQAWTGFNFPGRGTTYSNFKWQWFHFDGTDWDQSRSLSRIFKFTGKAWDWEVSSENGNYDYLMYADIDYDHPDVVNEMKKWGVWYANEVGLDGYRLDAVKHIKFSFLKDWVDNARAATGKEMFTVGEYWQNDLGALNNYLAKVNYNQSLFDAPLHYNFYAASTGGGYYDMRNILNNTLVASNPTKAVTLVENHDTQPGQSLESTVQPWFKPLAYAFILTRSGGYPSVFYGDMYGTKGTTTREIPALKSKIEPLLKARKDYAYGTQRDYIDGPDVIGWTREGDSTKAKSGLATVITDGPGGSKRMYVGTSNAGEIWYDLTGNRTDKITIGSDGYATFPVNGGSVSVWVQQ

SEQ ID NO: 35307 - protein, 480 aa, Cytophaga sp.
NGTMMQYFEWYVPNDGQQWNRLRTDAPYLSSVGITAVWTPPAYKGTSQADVGYGPYDLYDLGEFNQKGTVRTKYGTKGELKSAVNMLHSNGIQVYGDVVMNHKAGADYTENVTAVEVNPSNRNQETSGEYNIQAWTGFNFPGRGTTYSNFKWQWFHFDGTDWDQSRSLSRIFKFTGKAWDWEVSSENGNYDYLMYADIDYDHPDVVNEMKKWGVWYANEVGLDGYRLDAVKHIKFSFLKDWVDNARAATGKEMFTVGEYWQNDLGALNNYLAKVNYNQSLFDAPLHYNFYAASTGGGYYDMRNILNNTLVASNPTKAVTLVENHDTQPGQSLESTVQPWFKPLAYAFILTRSGGYPSVFYGDMYGTKGTTTREIPALKSKIEPLLKARKDYAYGTQRDYIDNPDVIGWTREGDSTKAKSGLATVITDGPGGSKRMYVGTSNAGEIWYDLTGNRTDKITIGSDGYATFPVNGGSVSVWVQQ

SEQ ID NO: 35308 - protein, 480 aa, Cytophaga sp.
NGTMMQYFEWYVPNDGQQWNRLRTDAPYLSSVGITAVWTPPAYKGTSQADVGYGPYDLYDLGEFNQKGTVRTKYGTKGELKSAVNTLHSNGIQVYGDVVMNHKAGADYTENVTAVEVNPSNRNQETSGEYNIQAWTGFNFPGRGTTYSNFKWQWFHFDGTDWDQSRSLSRIFKFTGKAWDWEVSSENGNYDYLMYADIDYDHPDVVNEMKKWGVWYANEVGLDGYRLDAVKHIKFSFLKDWVDNARAATGKEMFTVGEYWQNDLGALNNYLAKVNYNQSLFDAPLHYNFYAASTGGGYYDMRNILNNTLVASNPTKAVTLVENHDTQPGQSLESTVQPWFKPLAYAFILTRSGGYPCVFYGDMYGTKGTTTREIPALKSKIEPLLKARKDYAYGTQRDYIDNPDVIGWTREGDSTKAKSGLATVITDGPGGSKRMYVGTSNAGEIWYDLTGNRTDKITIGSDGYATFPVNGGSVSVWVQQ

SEQ ID NO: 35309 - protein, 480 aa, Cytophaga sp.
NGTMMQYFEWYVPNDGQQWNRLRTDAPYLSSVGITAVWTPPAYKGTSQFDVGYGPYDLYDLGEFNQKGTVRTKYGTKGELKSAVNTLHSNGIQVYGDVVMNHKAGADYTENVTAVEVNPSNRNQETSGEYNIQAWTGFNFPGRGTTYSNFKWQWFHFDGTDWDQSRSLSRIFKFTGKAWDWEVSSENGNYDYLMYADIDYDHPDVVNEMKKWGVWYANEVGLDGYRLDAVKHIKFSFLKDWVDNARAATGKEMFTVGEYWQNDLGALNNYLAKVNYNQSLFDAPLHYNFYAASTGGGYYDMRNILNNTLVASNPTKAVTLVENHDTQPGQSLESTVQPWFKPLAYAFILTRSGGYPSVFYGDMYGTKGTTTREIPALKSKIEPLLKARKDYAYGTQRDYIDNPDVIGWTREGDSTKAKSGLATVITDGPGGSKRMYVGTSNAGEIWYDLTGNRTDKITIGSDGYATFPVNGGSVSVWVQQ

SEQ ID NO: 35310 - protein, 480 aa, Cytophaga sp.
NGTMMQYFEWYVPNDGQQWNRLRTDAPYLSSVGITAVWTPPAYKGTSQADVGYGPYDLYDLGEFNQKGTVRTKYGTKGELKSAVNTLHSNGIQVYGDVVMNHKAGADYTENVTAVEVNPSNRNQETSGEYNIQAWTGFNFPGRGTTYSNFKWQWFHFDGTDWDQSRSLSRIFKFTGKAWDWEVSSENGNYDYLMYADIDYDHPDVVNEMKKWGVWYANEVGLDGYRLDAVKHIKFSFLKDWVDNARAATGKEMFTVGEYWQNDLGALNNYLAKVNYNQSLFDAPLHYNFYAASTGGGYYDMRNILNNTLVAQNPTKAVTLVENHDTQPGQSLESTVQPWFKPLAYAFILTRSGGYPSVFYGDMYGTKGTTTREIPALKSKIEPLLKARKDYAYGTQRDYIDNPDVIGWTREGDSTKAKSGLATVITDGPGGSKRMYVGTSNAGEIWYDLTGNRTDKITIGSDGYATFPVNGGSVSVWVQQ

SEQ ID NO: 35311 - protein, 480 aa, Cytophaga sp.
NGTMMQYFEWYVPNDGQQWNRLRTDAPYLSSVGITAVWTPPAYKGTSQADVGYGPYDLYDLGEFNQKGTVRTKYGTKGELKSAVNTLHSNGIQVYGDVVMNHKAGADLTENVTAVEVNPSNRNQETSGEYNIQAWTGFNFPGRGTTYSNFKWQWFHFDGTDWDQSRSLSRIFKFTGKAWDWEVSSENGNYDYLMYADIDYDHPDVVNEMKKWGVWYANEVGLDGYRLDAVKHIKFSFLKDWVDNARAATGKEMFTVGEYWQNDLGALNNYLAKVNYNQSLFDAPLHYNFYAASTGGGYYDMRNILNNTLVASNPTKAVTLVENHDTQPGQSLESTVQPWFKPLAYAFILTRSGGYPSVFYGDMYGTKGTTTREIPALKSKIEPLLKARKDYAYGTQRDYIDNPDVIGWTREGDSTKAKSGLATVITDGPGGSKRMYVGTSNAGEIWYDLTGNRTDKITIGSDGYATFPVNGGSVSVWVQQ

SEQ ID NO: 35312 - protein, 480 aa, Cytophaga sp.
NGTMMQYFEWYVPNDGQQWNRLRTDAPYLSSVGITAVWTPPAYKGTSQADVGYGPYDLYDLGEFNQKGTVRTKYGTKGELKSAVNTLHSNGIQVYGDVVMNHKAGADYTENVTAVEVNPSNRNQETSGEYNIQAWTCFNFPGRGTTYSNFKWQWFHFDGTDWDQSRSLSRIFKFTGKAWDWEVSSENGNYDYLMYADIDYDHPDVVNEMKKWGVWYANEVGLDGYRLDAVKHIKFSFLKDWVDNARAATGKEMFTVGEYWQNDLGALNNYLAKVNYNQSLFDAPLHYNFYAASTGGGYYDMRNILNNTLVASNPTKAVTLVENHDTQPGQSLESTVQPWFKPLAYAFILTRSGGYPSVFYGDMYGTKGTTTREIPALKSKIEPLLKARKDYAYGTQRDYIDNPDVIGWTREGDSTKAKSGLATVITDGPGGSKRMYVGTSNAGEIWYDLTGNRTDKITIGSDGYATFPVNGGSVSVWVQQ

SEQ ID NO: 35313 - protein, 480 aa, Cytophaga sp.
NGTMMQYFEWYVPNDGQQWNRLRTDAPYLSSVGITAVWTPPAYKGTSQADVGYGPYDLYDLGEFNQKGTVRTKYGTKGELKSAVNTLHSNGIQVYGDVVMNHKAGADYTENVTAVEVNPSNRNQETSGEYNIQAWTGFNFPGRGTTYSNFKWQWFHFDGTDWDQSRSLSRIFKFTGKAWDWEVSSENGNYDYLMYADIDYDHPDVVNEMKKWGVWYANEVGLDGYRLDAVKHIKFSFLKDWVDNARAATGKEMFTVGEYWQNDLGALNNYLAKVNYNQSLFDAPLHYNFYAASTGGGYYDMRNILNNTLVASNPTKAVTLVENHDTQPGQSLESTVQPWFKPLAYAFILTRSGGYPSVFYGDMYGTKGTTTREIPALKGKIEPLLKARKDYAYGTQRDYIDNPDVIGWTREGDSTKAKSGLATVITDGPGGSKRMYVGTSNAGEIWYDLTGNRTDKITIGSDGYATFPVNGGSVSVWVQQ

SEQ ID NO: 35314 - protein, 480 aa, Cytophaga sp.
NGTMMQYFEWYVPNDGQQWNRLRTDAPYLSSVGITAVWTPPAYKGTSQADVGYGPYDLYDLGEFNQKGTVRTKYGTKGELKSAVNTLHSNGIQVYGDVVMNHKAGADYTENVTAVEVNPSNRNQETSGHYNIQAWTGFNFPGRGTTYSNFKWQWFHFDGTDWDQSRSLSRIFKFRGKAWDWEVSSENGNYDYLMYADIDYDHPDVVNEMKKWGVWYANEVGLDGYRLDAVKHIKFSFLKDWVDNARAATGKEMFTVGEYWQNDLGALNNYLAKVNYNQSLFDAPLHYNFYAASTGGGYYDMRNILNNTLVASNPTKAVTLVENHDTQPGQSLESTVQPWFKPLAYAFILTRSGGYPSVFYGDMYGTKGTTTREIPALKSKIEPLLKARKDYAYGTQRDYIDNPDVIGWTREGDSTKAKSGLATVITDGPGGSKRMYVGTSNAGEIWYDLTGNRTDKITIGSDGYATFPVNGGSVSVWVQQ

SEQ ID NO: 35315 - protein, 480 aa, Cytophaga sp.
NGTMMQYFEWYVPNDGQQWNRLRTDAPYLSSVGITAVWTPPAYKGTSQADVGYGPYDLYDLGEFNQKGTVRTKYGTKGELKSAVNTLHSNGIQVYGDVVMNHKAGADYTENVTAVEVNPSNRNQETSGEYNIQAWTGFNFPGRGTTYSNFKWQWFHFDGTDWDQSRSLSRIFKFTGKAWDWEVSSENGNYDYLMYADIDYDHPDVVNEMKKWGVWYANEVGLDGYRLDAVKHIKFSFLKDWVDNARAATGKEMFTVGEYWQNDLGALNNYLAKVNYNQSLFDAPLHYNFYAASTGGGYYDMRNILNNTLVASNPTKAVTLVENHDTQPGQSLESTVQPWFKPLAYAFILTRSGGYPSVFYGDMYGTKGTTTREIPALKSKIEPLLKARKDYAYGTQRDYIDNPDVIGWTREGDSTKAKSGLATVITDGPGGSKRMYVGTSNAGEIWYDLTGNRTDLITIGSDGYATFPVNGGSVSVWVQQ

SEQ ID NO: 35316 - protein, 480 aa, Cytophaga sp.
NGTMMQYFEWYVPNDGQQWNRLRTDAPYLSSVGITAVWTPPAYKGTSQADVGYGPYDLYDLGEFNQKGTVRTKYGTKGELKSAVNTLHSNGIQVYGDVVMNHKAGADYTENVTAVEVNPSNRNQETSGEYTIQAWTGFNFPGRGTTYSNFKWQWFHFDGTDWDQSRSLSRIFKFTGKAWDWEVSSENGNYDYLMYADIDYDHPDVVNEMKKWGVWYANEVGLDGYRLDAVKHIKFSFLKDWVDNARAATGKEMFTVGEYWQNDLGALNNYLAKVNYNQSLFDAPLHYNFYAASTGGGYYDMRNILNNTLVASNPTKAVTLVENHDTQPGQSLESTVQPWFKPLAYAFILTRSGGYPSVFYGDMYGTKGTTTREIPALKSKIEPLLKARKDYAYGTQRDYIDNPDVIGWTREGDSTKAKSGLATVITDGPGGSKRMYVGTSNAGEIWYDLTGNRTDKITIGSDGYATFPVNGGSVSVWVQQ

SEQ ID NO: 35317 - protein, 480 aa, Cytophaga sp.
NGTMMQYFEWYVPNDGQQWNRLRTDAPYLSSVGITAVWTPPAYKGTSQADVGYGPYDLYDLGEFNQKGTVRTKYGTKGELKSAVNTLHSNGIQVYGDVVMNHKAGADYTENVTAVEVNPSNRNQETSGEYNIQAWTGFNFPGRGTTYSNFKWQWFHFDGTDWDQSRSLSRIFKFTGKAWDWEVSSENGNYDYLMYADIDYDHPDVVNEMKKWGVWYANEVGLDGYRLDAVKHIKFSFLKDWVDNARAATGKEMFTVGEYWQNDLGALNNYLAKVNYNQSLFDAPLHYNFYAASTGGGYYDMRNILNNTLVASNPTKAVTLVENHDTQPGQSLESTVQPWFKPLAYAFILTRSGGYPSVFYGDMYGTKGTTTREIPALKSKIEPLLKARKDYAYGTQRDYIDNPDVIGWTREGDSTKAKSGLATVITDGPGGSKRMYVGTSNAGEIWYDKTGNRTDKITIGSDGYATFPVNGGSVSVWVQQ

SEQ ID NO: 35318 - protein, 480 aa, Cytophaga sp.
NGTMMQYFEWYVPNDGQQWNRLRTDAPYLSSVGITAVWTPPAYKGTSQADVGYGPYDLYDLGEFNQKGTVRTKYGTKGELKSAVNTLHSNGIQVYGDVVMNHKAGADYTENVTAVEVNPSNRNQETSGEYNIQAWTGFNFPGRGTTYSNFKWQWFHFDGTDWDQSRSLSRIFKFTGKAWDWEVSSENGNYDYLMYADIDYDHPDVVNEMKKWGVWYANEVGLDGYRLDAVKHIKFSFLKDWVDNARAATGKEMFTVGEYWQNDLGALNNYLAKVNYNQSLFDAPLHYNFYAASTGGGYYDMRNILNNTLVASNPTKAVTLVENHDTQPGQSLESTVQPWFKPLAYAFILTRSGGYPSVFYGDMYGTKGTTSREIPALKSKIEPLLKARKDYAYGTQRDYIDNPDVIGWTREGDSTKAKSGLATVITDGPGGSKRMYVGTSNAGEIWYDLTGNRTDKITIGSDGYATFPVNGGSVSVWVQQ

SEQ ID NO: 35319 - protein, 480 aa, Cytophaga sp.
NGTMMQYFEWYVPNDGQQWNRLRTDANYLSSVGITAVWTPPAYKGTSQADVGYGPYDLYDLGEFNQKGTVRTKYGTKGELKSAVNTLHSNGIQVYGDVVMNHKAGADYTENVTAVEVNPSNRNQETSGEYNIQAWTGFNFPGRGTTYSNFKWQWFHFDGTDWDQSRSLSRIFKFTGKAWDWEVSSENGNYDYLMYADIDYDHPDVVNEMKKWGVWYANEVGLDGYRLDAVKHIKFSFLKDWVDNARAATGKEMFTVGEYWQNDLGALNNYLAKVNYNQSLFDAPLHYNFYAASTGGGYYDMRNILNNTLVASNPTKAVTLVENHDTQPGQSLESTVQPWFKPLAYAFILTRSGGYPSVFYGDMYGTKGTTTREIPALKSKIEPLLKARKDYAYGTQRDYIDNPDVIGWTREGDSTKAKSGLATVITDGPGGSKRMYVGTSNAGEIWYDLTGNRTDKITIGSDGYATFPVNGGSVSVWVQQ

SEQ ID NO: 35320 - protein, 480 aa, Cytophaga sp.
NGTMMQYFEWYVPNDGQQWNRLRTDAPYLSSVGITAVWTPPAYKGTSQADVGYGPYDLYDLGEFNQKGTVRTKYGTKGELKSAVNTLHSNGIQVYGDVVMNHKAGADYTENVTAVEVNPSNRNQETSGEYNIQAWTGFNFPGRGTTYSNFKWQWFHFDGTDWDQSRSLSRIFKFTGKAWDWEVSSENGNYDYLMYADIDYDHPDVVNEMKKWGVWYANEVGLDGYRLDAVKHIKFSFLKDWVDNARAATGKEMFTVGEYWQNDLGALNNYLAKVNYNQSLFDAPLHYNFYAASTGGGYYDMRCILNNTLVASNPTKAVTLVENHDTQPGQSLESTVQPWFKPLAYAFILTRSGGYPSVFYGDMYGTKGTTTREIPALKSKIEPLLKARKDYAYGTQRDYIDNPDVIGWTREGDSTKAKSGLATVITDGPGGSKRMYVGTSNAGEIWYDLTGNRTDKITIGSDGYATFPVNGGSVSVWVQQ

SEQ ID NO: 35321 - protein, 480 aa, Cytophaga sp.
NGTMMQYFEWYVPNDGQQWNRLRTDAPYLSSMGITAVWTPPAYKGTSQADVGYGPYDLYDLGEFNQKGTVRTKYGTKGELKSAVNTLHSNGIQVYGDVVMNHKAGADYTENVTAVEVNPSNRNQETSGEYNIQAWTGFNFPGRGTTYSNFKWQWFHFDGTDWDQSRSLSRIFKFTGKAWDWEVSSENGNYDYLMYADIDYDHPDVVNEMKKWGVWYANEVGLDGYRLDAVKHIKFSFLKDWVDNARAATGKEMFTVGEYWQNDLGALNNYLAKVNYNQSLFDAPLHYNFYAASTGGGYYDMRNILNNTLVASNPTKAVTLVENHDTQPGQSLESTVQPWFKPLAYAFILTRSGGYPSVFYGDMYGTKGTTTREIPALKSKIEPLLKARKDYAYGTQRDYIDNPDVIGWTREGDSTKAKSGLATVITDGPGGSKRMYVGTSNAGEIWYDLTGNRTDKITIGSDGYATFPVNGGSVSVWVQQ

SEQ ID NO: 35322 - protein, 480 aa, Cytophaga sp.
NGTMMQYFEWYVPNDGQQWNRLRTDAPYLSSVGITAVWTPPAYKGTSQADVGYGPYDLYDLGEFNQKGTVRTKYGTKGELKSAVNTLHSNGIQVYGDVVMNHKAGADYTENVTAVEVNPSNRNQETSGEYNIQAWTGFNFPGRGTTYSVFKWQWFHFDGTDWDQSRSLSRIFKFTGKAWDWEVSSENGNYDYLMYADIDYDHPDVVNEMKKWGVWYANEVGLDGYRLDAVKHIKFSFLKDWVDNARAATGKEMFTVGEYWQNDLGALNNYLAKVNYNQSLFDAPLHYNFYAASTGGGYYDMRNILNNTLVASNPTKAVTLVENHDTQPGQSLESTVQPWFKPLAYAFILTRSGGYPSVFYGDMYGTKGTTTREIPALKSKIEPLLKARKDYAYGTQRDYIDNPDVIGWTREGDSTKAKSGLATVITDGPGGSKRMYVGTSNAGEIWYDLTGNRTDKITIGSDGYATFPVNGGSVSVWVQQ

SEQ ID NO: 35323 - protein, 480 aa, Cytophaga sp.
NGTMMQYFEWYVPNDGQQWNRLRTDAPYLSSVGITAVWTPPAYKGTSQADVGYGPYDLYDLGEFNQKGTVRTKYGTKGELKSAVNTLHSNGIQVYGDVVMNHKAGADYTENVTAVEVNPSNRNQETSGEYNIQAWTGFAFPGRGTTYSNFKWQWFHFDGTDWDQSRSLSRIFKFTGKAWDWEVSSENGNYDYLMYADIDYDHPDVVNEMKKWGVWYANEVGLDGYRLDAVKHIKFSFLKDWVDNARAATGKEMFTVGEYWQNDLGALNNYLAKVNYNQSLFDAPLHYNFYAASTGGGYYDMRNILNNTLVASNPTKAVTLVENHDTQPGQSLESTVQPWFKPLAYAFILTRSGGYPSVFYGDMYGTKGTTTREIPALKSKIEPLLKARKDYAYGTQRDYIDNPDVIGWTREGDSTKAKSGLATVITDGPGGSKRMYVGTSNAGEIWYDLTGNRTDKITIGSDGYATFPVNGGSVSVWVQQ

SEQ ID NO: 35324 - protein, 480 aa, Cytophaga sp.
NGTMMQYFEWYVPNDGQQWNRLRTDADYLSSVGITAVWTPPAYKGTSQADVGYGPYDLYDLGEFNQKGTVRTKYGTKGELKSAVNTLHSNGIQVYGDVVMNHKAGADYTENVTAVEVNPSNRNQETSGEYNIQAWTGFNFPGRGTTYSNFKWQWFHFDGTDWDQSRSLSRIFKFTGKAWDWEVSSENGNYDYLMYADIDYDHPDVVNEMKKWGVWYANEVGLDGYRLDAVKHIKFSFLKDWVDNARAATGKEMFTVGEYWQNDLGALNNYLAKVNYNQSLFDAPLHYNFYAASTGGGYYDMRNILNNTLVASNPTKAVTLVENHDTQPGQSLESTVQPWFKPLAYAFILTRSGGYPSVFYGDMYGTKGTTTREIPALKSKIEPLLKARKDYAYGTQRDYIDNPDVIGWTREGDSTKAKSGLATVITDGPGGSKRMYVGTSNAGEIWYDLTGNRTDKITIGSDGYATFPVNGGSVSVWVQQ

SEQ ID NO: 35325 - protein, 480 aa, Cytophaga sp.
NGTMMQYFEWYVPNDGQQWNRLRTDAPYLSSVGITAVWTPPAYKGFSQADVGYGPYDLYDLGEFNQKGTVRTKYGTKGELKSAVNTLHSNGIQVYGDVVMNHKAGADYTENVTAVEVNPSNRNQETSGEYNIQAWTGFNFPGRGTTYSNFKWQWFHFDGTDWDQSRSLSRIFKFTGKAWDWEVSSENGNYDYLMYADIDYDHPDVVNEMKKWGVWYANEVGLDGYRLDAVKHIKFSFLKDWVDNARAATGKEMFTVGEYWQNDLGALNNYLAKVNYNQSLFDAPLHYNFYAASTGGGYYDMRNILNNTLVASNPTKAVTLVENHDTQPGQSLESTVQPWFKPLAYAFILTRSGGYPSVFYGDMYGTKGTTTREIPALKSKIEPLLKARKDYAYGTQRDYIDNPDVIGWTREGDSTKAKSGLATVITDGPGGSKRMYVGTSNAGEIWYDLTGNRTDKITIGSDGYATFPVNGGSVSVWVQQ

SEQ ID NO: 35326 - protein, 480 aa, Cytophaga sp.
NGTMMQYFEWYVPNDGQQWNRLRTDAPYLSSVGITAVWTPPAYKGTSQADVGYGPYDLYDLGEFNQKGTVRTKYGTKGELKSAVNTLHSNGIQVYGDVVMNHKAGADYTENVTAVEVNPSNRNQETSGEYNIQAWTGFNFPGRGTTYSNFKWQWFHFDGTDWDQSRSLSRIFKFTGKAWDWEVSSENGNYDYLMYADIDYDHPDVVNEMKKWGVWYANEVGLDGYRLDAVKHIKFSFLKDWVDNARAATGKEMFTVGEYWQNDLGALNNYLAKVNYNQSLFDAPLHYNFYAASTGGGYYDMRNILNNTLVASNPTKAVTLVENHDTQPGQSLESTVQPWFKPLAYAFILTRSGGYPSVFYGDMYGTKGTTTREIPALKSKIEPLLKARKDYAYGTQRDYIDNPDVIGWTREGDSTKAKSGLATVITDGPGGSKRMYVGTSNAGEIWYDLTGNRADKITIGSDGYATFPVNGGSVSVWVQQ

SEQ ID NO: 35327 - protein, 480 aa, Cytophaga sp.
NGTMMQYFEWYVPNDGQQWNRLRTDAPYLSSVGITAVWTPPAYKGTSQADVGYGPYDLYDLGEFNQKGTVRTKYGTKGELKSAVNTLHSNGIQVYGDVVMNHKAGADYTENVTAVEVNPSNRNQETSGEYMIQAWTGFNFPGRGTTYSNFKWQWFHFDGTDWDQSRSLSRIFKFTGKAWDWEVSSENGNYDYLMYADIDYDHPDVVNEMKKWGVWYANEVGLDGYRLDAVKHIKFSFLKDWVDNARAATGKEMFTVGEYWQNDLGALNNYLAKVNYNQSLFDAPLHYNFYAASTGGGYYDMRNILNNTLVASNPTKAVTLVENHDTQPGQSLESTVQPWFKPLAYAFILTRSGGYPSVFYGDMYGTKGTTTREIPALKSKIEPLLKARKDYAYGTQRDYIDNPDVIGWTREGDSTKAKSGLATVITDGPGGSKRMYVGTSNAGEIWYDLTGNRTDKITIGSDGYATFPVNGGSVSVWVQQ

SEQ ID NO: 35328 - protein, 480 aa, Cytophaga sp.
NGTMMQYFEWYVPNDGQQWNRLRTDAPYLSSVGITAVWTPPAYKGTSQADVGYGPYDLYDLGEFNQKGTVRTKYGTKGELKSAVNTLHSNGIQVYGDVVMNHKAGADYTENVTAVEVNPSNRNQETSGEYNIQAWTGFNFPGRGTTYSNFKWQWFHFDGTDWDQSRSRSRIFKFTGKAWDWEVSSENGNYDYLMYADIDYDHPDVVNEMKKWGVWYANEVGLDGYRLDAVKHIKFSFLKDWVDNARAATGKEMFTVGEYWQNDLGALNNYLAKVNYNQSLFDAPLHYNFYAASTGGGYYDMRNILNNTLVASNPTKAVTLVENHDTQPGQSLESTVQPWFKPLAYAFILTRSGGYPSVFYGDMYGTKGTTTREIPALKSKIEPLLKARKDYAYGTQRDYIDNPDVIGWTREGDSTKAKSGLATVITDGPGGSKRMYVGTSNAGEIWYDLTGNRTDKITIGSDGYATFPVNGGSVSVWVQQ

SEQ ID NO: 35329 - protein, 480 aa, Cytophaga sp.
NGTMMQYFEWYVPNDGQQWNRLRTDAPYLSSVGITAVWTPPAYKGTSQADVGYGPYDLYDLGEFNQKGTVRTKYGTKGELKSAVNTLHSNGIQVYGDVVMNHKAGADYTENVTAVEVNPSNRNQETSGEYNIQAWTGFNFPGRGTTYSNFKWQWFHFDGTDWDQSRSLSRIFKFTGKAWDWEVSSENGNYDYLMYADIDYDHPDVVNEMKKWGVWYANEVGLDGYRLDAVKHIKFSFLKDWVDNARAATGKEMFTVGEYWQNDLGALNNYLAKVNYNQSLFDAPLHYNFYAASTGGGYYDMRNILNNTLVASNPTKAVTLVENHDTQPGQSLESTVQPWFKPLAYAFILTRSGGYPSVFYGDMYGTKGTTTREIPALKSKIEPLLKARKDYAYGTQRDYIDNPDVIGWTREGDSTKAKSGLATVITDGPGGSKRMYVGTWNAGEIWYDLTGNRTDKITIGSDGYATFPVNGGSVSVWVQQ

SEQ ID NO: 35330 - protein, 480 aa, Cytophaga sp.
NGTMMQYFEWYVPNDGQQWNRLRTDAPYLSSVGITAVWTPPAYKGTSQADVGYGPYDLYDLGEFNQKGTVRTKYGTKGELKSAVNTLHSNGIQVYGDVVMNHKAGADYTENVTAVEVNPSNRNQETSNEYNIQAWTGFNFPGRGTTYSNFKWQWFHFDGTDWDQSRSLSRIFKFTGKAWDWEVSSENGNYDYLMYADIDYDHPDVVNEMKKWGVWYANEVGLDGYRLDAVKHIKFSFLKDWVDNARAATGKEMFTVGEYWQNDLGALNNYLAKVNYNQSLFDAPLHYNFYAASTGGGYYDMRNILNNTLVASNPTKAVTLVENHDTQPGQSLESTVQPWFKPLAYAFILTRSGGYPSVFYGDMYGTKGTTTREIPALKSKIEPLLKARKDYAYGTQRDYIDNPDVIGWTREGDSTKAKSGLATVITDGPGGSKRMYVGTSNAGEIWYDLTGNRTDKITIGSDGYATFPVNGGSVSVWVQQ

SEQ ID NO: 35331 - protein, 480 aa, Cytophaga sp.
NGTMMQYFEWYVPNDGQQWNRLRTDAPYLSSVGITAVWTPPAYKGTSQADVGYGPYDLYDLGEFNQKGTVRTKYGTKGELKSAVNTLHSNGIQVYGDVVMNHKAGADYTENVTAVEVNPSNRNQETSGEYNIQAWTGFNFPGRGTTYSNFKWQWFHFDGTDWDQSRSLSRIFKFTGKAWDWEVSSENGNYDYLMYADIDYDHPDVVNEMKKWGVWYANEVGLDGYRLDAVKHIKFSFLKDWVDNARAATGKEMFTVGEYWQNDLGALNNYLEKVNYNQSLFDAPLHYNFYAASTGGGYYDMRNILNNTLVASNPTKAVTLVENHDTQPGQSLESTVQPWFKPLAYAFILTRSGGYPSVFYGDMYGTKGTTTREIPALKSKIEPLLKARKDYAYGTQRDYIDNPDVIGWTREGDSTKAKSGLATVITDGPGGSKRMYVGTSNAGEIWYDLTGNRTDKITIGSDGYATFPVNGGSVSVWVQQ

SEQ ID NO: 35332 - protein, 480 aa, Cytophaga sp.
NGTMMQYFEWYVPNDGQQWNRLRTDAPYLSSVGITAVWTPPAYKGTSQADVGYGPYDLYDLGEFNQKGTVRTKYGTKYELKSAVNTLHSNGIQVYGDVVMNHKAGADYTENVTAVEVNPSNRNQETSGEYNIQAWTGFNFPGRGTTYSNFKWQWFHFDGTDWDQSRSLSRIFKFTGKAWDWEVSSENGNYDYLMYADIDYDHPDVVNEMKKWGVWYANEVGLDGYRLDAVKHIKFSFLKDWVDNARAATGKEMFTVGEYWQNDLGALNNYLAKVNYNQSLFDAPLHYNFYAASTGGGYYDMRNILNNTLVASNPTKAVTLVENHDTQPGQSLESTVQPWFKPLAYAFILTRSGGYPSVFYGDMYGTKGTTTREIPALKSKIEPLLKARKDYAYGTQRDYIDNPDVIGWTREGDSTKAKSGLATVITDGPGGSKRMYVGTSNAGEIWYDLTGNRTDKITIGSDGYATFPVNGGSVSVWVQQ

SEQ ID NO: 35333 - protein, 480 aa, Cytophaga sp.
NGTMMQYFEWYVPNDGQQWNRLRTDAPYLSSVGITAVWTPPAYKGTSQADVGYGPYDLYDLGEFNQKGTVRTKYGTKGELKSAVNTLHSNGIQVYGDVVMNHKAGADYTENVTAVEVNPQNRNQETSGEYNIQAWTGFNFPGRGTTYSNFKWQWFHFDGTDWDQSRSLSRIFKFTGKAWDWEVSSENGNYDYLMYADIDYDHPDVVNEMKKWGVWYANEVGLDGYRLDAVKHIKFSFLKDWVDNARAATGKEMFTVGEYWQNDLGALNNYLAKVNYNQSLFDAPLHYNFYAASTGGGYYDMRNILNNTLVASNPTKAVTLVENHDTQPGQSLESTVQPWFKPLAYAFILTRSGGYPSVFYGDMYGTKGTTTREIPALKSKIEPLLKARKDYAYGTQRDYIDNPDVIGWTREGDSTKAKSGLATVITDGPGGSKRMYVGTSNAGEIWYDLTGNRTDKITIGSDGYATFPVNGGSVSVWVQQ

SEQ ID NO: 35334 - protein, 480 aa, Cytophaga sp.
NGTMMQYFEWYVPNDGQQWNRLRTDAPYLSSVGITAVWTPPAYKGISQADVGYGPYDLYDLGEFNQKGTVRTKYGTKGELKSAVNTLHSNGIQVYGDVVMNHKAGADYTENVTAVEVNPSNRNQETSGEYNIQAWTGFNFPGRGTTYSNFKWQWFHFDGTDWDQSRSLSRIFKFTGKAWDWEVSSENGNYDYLMYADIDYDHPDVVNEMKKWGVWYANEVGLDGYRLDAVKHIKFSFLKDWVDNARAATGKEMFTVGEYWQNDLGALNNYLAKVNYNQSLFDAPLHYNFYAASTGGGYYDMRNILNNTLVASNPTKAVTLVENHDTQPGQSLESTVQPWFKPLAYAFILTRSGGYPSVFYGDMYGTKGTTTREIPALKSKIEPLLKARKDYAYGTQRDYIDNPDVIGWTREGDSTKAKSGLATVITDGPGGSKRMYVGTSNAGEIWYDLTGNRTDKITIGSDGYATFPVNGGSVSVWVQQ

SEQ ID NO: 35335 - protein, 480 aa, Cytophaga sp.
NGTMMQYFEWYVPNDGQQWNRLRTDAPYLSSVGITAVWTPPAYKGTSQADVGYGPYDLYDLGEFNQKGTVRTKYGTKGELKSAVNTLHSNGIQVYGDVVMNHKAGADYTENVTAVEVNPSNRNQETSGEYNIQAWTGFNFPGRGTTYSNFKWQWFHFDGTDWDQSRSLSRIFKFTGKAWDWEVSSENGNYDYLMYADIDYDHPDVVNEMKKWGVWYANEVGLDGYRLDAVKHIKFSFLKDWVDNARAATGKEMFTVGEYWQNDLGALQNYLAKVNYNQSLFDAPLHYNFYAASTGGGYYDMRNILNNTLVASNPTKAVTLVENHDTQPGQSLESTVQPWFKPLAYAFILTRSGGYPSVFYGDMYGTKGTTTREIPALKSKIEPLLKARKDYAYGTQRDYIDNPDVIGWTREGDSTKAKSGLATVITDGPGGSKRMYVGTSNAGEIWYDLTGNRTDKITIGSDGYATFPVNGGSVSVWVQQ

SEQ ID NO: 35336 - protein, 480 aa, Cytophaga sp.
NGTMMQYFEWYVPNDGQQWNRLRTDAPYLSSVGITAVWTPPAYKGTSQADVGYGPYDLYDLGEFNQKGTVRTKYGTKGELKSAVNTLHSNGIQVYGDVVMNHKAGADYTENVTAVEVNPSNRNQETSGEYNIQAWTGFNFPGRGTTYSNFKWQWFHFDGTDWDQSRSLSRIFKFTGKAWDWEVSSENGNYDYLMYADIDYDHPDVVNEMKKWGVWYANEVGLDGYRLDAVKHIKFSFLKDWVDNARAATGKEMFTVGEYWQNDLGALNNYLAKVNYNQSLFDAPLHYNFYAASTGGGYYDMRNILNNTLVASNPTKAVTLVENHDTQPGQSLESTVQPWFKPLAYAFILTRSGGYPSVFYGDMYGTKGTTTREIPALKSKIEPLLKARKDYAYGQQRDYIDNPDVIGWTREGDSTKAKSGLATVITDGPGGSKRMYVGTSNAGEIWYDLTGNRTDKITIGSDGYATFPVNGGSVSVWVQQ

SEQ ID NO: 35337 - protein, 480 aa, Cytophaga sp.
NGTMMQYFEWYVPNDGQQWNRLRTDAPYLSSVGITAVWTPPAYKGTSQADVGYGPYDLYDLGEFNQKGTVRTKYGTKGELKSAVNTLHSNGIQVYGDVVMNHKAGADYTENVTAVEVNPSNRNQETSGEYNIQAWTGFNFPGRGTTYSNFKWQWFHFDGTDWDQSRSLSRIFKFTGKAWDWEVSSENGNYDYLMYADIDYDHPDVVNEMKKWGVWYANEVGLDGYRLDAVKHIKFSFLKDWVDNARAATGKEMFTVGEYWQNDLGALNNYLAKVNYNQSLFDAPLHYNFYAASTGGGYYDMRNILNNTLVASNPTKAVTLVENHDTQPGQSLESTVQPWFKPLAYAFILTRSGGYPSVFYGDMYGTKGTTTREIPALKSKIEPLLKARKDYAYGTQRDYIDNPDVIGWTREGDSTIAKSGLATVITDGPGGSKRMYVGTSNAGEIWYDLTGNRTDKITIGSDGYATFPVNGGSVSVWVQQ

SEQ ID NO: 35338 - protein, 480 aa, Cytophaga sp.
NGTMMQYFEWYVPNDGQQWNRLRTDAPYLSSVGITAVWTPPAYKGTSQADVGYGPYDLYDLGEFNQKGTVRTKYGTKGELKSAVNTLHSNGIQVYGDVVMNHKAGADYTENVTAVEVNPSNRNQETSGEYNIQAWTGFNFPGRGTTYSNFKWQWFHFDGTDWDQSRSLSRIFKFTGKAWDWEVSSENGNYDYLMYADIDYDHPDVVNEMKKWGVWYANEVGLDGYRLDAVKHIKFSFLKDWVDNARAATGKEMFTVGEYWQNDLGALNNYLAKVNYNQSLFDAPLHYNFYAASTGGGYYDMRNILSNTLVASNPTKAVTLVENHDTQPGQSLESTVQPWFKPLAYAFILTRSGGYPSVFYGDMYGTKGTTTREIPALKSKIEPLLKARKDYAYGTQRDYIDNPDVIGWTREGDSTKAKSGLATVITDGPGGSKRMYVGTSNAGEIWYDLTGNRTDKITIGSDGYATFPVNGGSVSVWVQQ

SEQ ID NO: 35339 - protein, 480 aa, Cytophaga sp.
NGTMMQYFEWYVPNDGQQWNRLRTDAPYLSSVGITAVWTPPAYKGTSQADVGYGPYDLYDLGEFNQKGTVRTKYGTKGELKSAVNTLHSNGIQVYGDVVMNHKAGADYTENVTAVEVNPSNRNQETSGEYNIQAWTGFNFPGRGTTYSNFKWQWFHFDGTDWDQSRSLSRIFKFTGKAWDWEVSSENGNYDYLMYADIDYDHPDVVNEMKKWGVWYANEVGLDGYRLDAVKHIKFSFLKDWVDNARAATGKEMFTVGEYWQNDLGALNNYLAKVNYNQSLFDAPLHYNFYAASTGGGYYDMRNILNNTLVASNPTKAVTLVENHDTQPGQSLESTVQAWFKPLAYAFILTRSGGYPSVFYGDMYGTKGTTTREIPALKSKIEPLLKARKDYAYGTQRDYIDNPDVIGWTREGDSTKAKSGLATVITDGPGGSKRMYVGTSNAGEIWYDLTGNRTDKITIGSDGYATFPVNGGSVSVWVQQ

SEQ ID NO: 35340 - protein, 480 aa, Cytophaga sp.
NGTMMQYFEWYVPNDGQQWNRLRTDAPYLSSVGITAVWTPPAYKGTSQADVGYGPYDLYDLGEFNQKGTVRTKYGTKGELKSAVNTLHSNGIQVYGDVVMNHKAGADYTENVTAVEVNPSNRNQETSGEYNIQAWTGFNFPGRGTTYSNFKWQWFHFDGTDWDQSRSLSRIFKFTGKAWDWEVSSENGNYDYLMYADIDYDHPDVVQEMKKWGVWYANEVGLDGYRLDAVKHIKFSFLKDWVDNARAATGKEMFTVGEYWQNDLGALNNYLAKVNYNQSLFDAPLHYNFYAASTGGGYYDMRNILNNTLVASNPTKAVTLVENHDTQPGQSLESTVQPWFKPLAYAFILTRSGGYPSVFYGDMYGTKGTTTREIPALKSKIEPLLKARKDYAYGTQRDYIDNPDVIGWTREGDSTKAKSGLATVITDGPGGSKRMYVGTSNAGEIWYDLTGNRTDKITIGSDGYATFPVNGGSVSVWVQQ

SEQ ID NO: 35341 - protein, 480 aa, Cytophaga sp.
NGTMMQYFEWYVPNDGQQWNRLRTDAPYLSSVGITAVWTPPAYKGTSQADVGYGPYDLYDLGEFNQKGTVRTKYGTKGELKSAVNTLHSNGIQVYGDVVMNHKAGADYTENVTAVEVNPSNRNQETSGEYNIQAWTGFNFPGRGTTYSNFKWQWFHFDGTDWDQSRSLSRIFKFTGKAWDWEVSSENGNYDYLMYADIDYDHPDVVNEMKKWGVWYANEVGLDGYRLDAVKHIKFSFLKDWVDNARAATGKEMFTVGEYWQNDLGALNNYLAKVNYNQSLFDAPLHYNFYAASTGGGYYDMRNILNNTLVASNPTKAVTLVENHDTQPGQSLESTVQPWFKPLAYAFILTRSGGYPSVFYGDMYGTKGTTTREIPALKSKIEPLLKARKDYAYGTQRDYIDNPDVIGWTREGDSTKAKSGLATVITDGPGGSKRMYVGISNAGEIWYDLTGNRTDKITIGSDGYATFPVNGGSVSVWVQQ

SEQ ID NO: 35342 - protein, 480 aa, Cytophaga sp.
NGTMMQYFEWYVPNDGQQWNRLRTDAPYLSSVGITAVWTPPAYKGTSQADVGYGPYDLYDLGEFNQKGTVRTKYGTKGELKSAVNTLHSNGIQVYGDVVMNHKAGADYTENVTAVEVNPSNRNQETSGEYNIQAWTGFNFPGRGTTYSGFKWQWFHFDGTDWDQSRSLSRIFKFTGKAWDWEVSSENGNYDYLMYADIDYDHPDVVNEMKKWGVWYANEVGLDGYRLDAVKHIKFSFLKDWVDNARAATGKEMFTVGEYWQNDLGALNNYLAKVNYNQSLFDAPLHYNFYAASTGGGYYDMRNILNNTLVASNPTKAVTLVENHDTQPGQSLESTVQPWFKPLAYAFILTRSGGYPSVFYGDMYGTKGTTTREIPALKSKIEPLLKARKDYAYGTQRDYIDNPDVIGWTREGDSTKAKSGLATVITDGPGGSKRMYVGTSNAGEIWYDLTGNRTDKITIGSDGYATFPVNGGSVSVWVQQ

SEQ ID NO: 35343 - protein, 480 aa, Cytophaga sp.
NGTMMQYFEWYVPNDGQQWNRLRTDAPYLSSVGITAVWTPPAYKGTSQADVGYGPYDLYDLGEFNQKGTVRTKYGTKGELKSAVNTLHSNGIQVYGDVVMNHKAGADYTENVTAVEVNPSNRNQETSGEYNIQAWTGFNFPGRGTTYSNFKWQWFHFDGTDWDQSRSLSRIFKFTGKAWDWEVSSENGNYDYLMYADIDYDHPDVVNEMKKWGVWYANEVGLDGYRLDAVKHIKFSFLKDWVDNARAATGKEMFTVGEYWQNDLGALNNYLAKVNYNQSLFDAPLHYNFYAASTGGGYYDMRNILNNTLVASNPTKAVTLVENHDTQPGQSLESTVQPWFKPLAYAFILTRSGGYPSVFYGDMYGTKGTTTREIPALKSKIEPLLKARKDYAYGTQRDYIDNPDVIGWTREGDSTKAKSGLATVITDGPGGSKRMYVGTSNAGEIWYDSTGNRTDKITIGSDGYATFPVNGGSVSVWVQQ

SEQ ID NO: 35344 - protein, 480 aa, Cytophaga sp.
NGTMMQYFEWYVPNDGQQWNRLRTDAPYLSSVGITAVWTPPAYKGTSQADVGYGPYDLYDLGEFNQKGTVRTKYGTKGELKSAVNTLHSNGIQVYGDVVMNHKAGADYTENVTAVEVNPSNRNQETSGEYNIQAWTGFNFPGRGTTYSNFKWQWFHFDGQDWDQSRSLSRIFKFTGKAWDWEVSSENGNYDYLMYADIDYDHPDVVNEMKKWGVWYANEVGLDGYRLDAVKHIKFSFLKDWVDNARAATGKEMFTVGEYWQNDLGALNNYLAKVNYNQSLFDAPLHYNFYAASTGGGYYDMRNILNNTLVASNPTKAVTLVENHDTQPGQSLESTVQPWFKPLAYAFILTRSGGYPSVFYGDMYGTKGTTTREIPALKSKIEPLLKARKDYAYGTQRDYIDNPDVIGWTREGDSTKAKSGLATVITDGPGGSKRMYVGTSNAGEIWYDLTGNRTDKITIGSDGYATFPVNGGSVSVWVQQ

SEQ ID NO: 35345 - protein, 480 aa, Cytophaga sp.
NGTMMQYFEWYVPNDGQQWNRLRTDAPYLSSVGITAVWTPPAYKGTSQADTGYGPYDLYDLGEFNQKGTVRTKYGTKGELKSAVNTLHSNGIQVYGDVVMNHKAGADYTENVTAVEVNPSNRNQETSGEYNIQAWTGFNFPGRGTTYSNFKWQWFHFDGTDWDQSRSLSRIFKFTGKAWDWEVSSENGNYDYLMYADIDYDHPDVVNEMKKWGVWYANEVGLDGYRLDAVKHIKFSFLKDWVDNARAATGKEMFTVGEYWQNDLGALNNYLAKVNYNQSLFDAPLHYNFYAASTGGGYYDMRNILNNTLVASNPTKAVTLVENHDTQPGQSLESTVQPWFKPLAYAFILTRSGGYPSVFYGDMYGTKGTTTREIPALKSKIEPLLKARKDYAYGTQRDYIDNPDVIGWTREGDSTKAKSGLATVITDGPGGSKRMYVGTSNAGEIWYDLTGNRTDKITIGSDGYATFPVNGGSVSVWVQQ

SEQ ID NO: 35346 - protein, 480 aa, Cytophaga sp.
NGTMMQYFEWYVPNDGQQWNRLRTDAPYLSSVGITAVWTPPAYKGHSQADVGYGPYDLYDLGEFNQKGTVRTKYGTKGELKSAVNTLHSNGIQVYGDVVMNHKAGADYTENVTAVEVNPSNRNQETSGEYNIQAWTGFNFPGRGTTYSNFKWQWFHFDGTDWDQSRSLSRIFKFTGKAWDWEVSSENGNYDYLMYADIDYDHPDVVNEMKKWGVWYANEVGLDGYRLDAVKHIKFSFLKDWVDNARAATGKEMFTVGEYWQNDLGALNNYLAKVNYNQSLFDAPLHYNFYAASTGGGYYDMRNILNNTLVASNPTKAVTLVENHDTQPGQSLESTVQPWFKPLAYAFILTRSGGYPSVFYGDMYGTKGTTTREIPALKSKIEPLLKARKDYAYGTQRDYIDNPDVIGWTREGDSTKAKSGLATVITDGPGGSKRMYVGTSNAGEIWYDLTGNRTDKITIGSDGYATFPVNGGSVSVWVQQ

SEQ ID NO: 35347 - protein, 480 aa, Cytophaga sp.
NGTMMQYFEWYVPNDGQQWNRLRLDAPYLSSVGITAVWTPPAYKGTSQADVGYGPYDLYDLGEFNQKGTVRTKYGTKGELKSAVNTLHSNGIQVYGDVVMNHKAGADYTENVTAVEVNPSNRNQETSGEYNIQAWTGFNFPGRGTTYSNFKWQWFHFDGTDWDQSRSLSRIFKFTGKAWDWEVSSENGNYDYLMYADIDYDHPDVVNEMKKWGVWYANEVGLDGYRLDAVKHIKFSFLKDWVDNARAATGKEMFTVGEYWQNDLGALNNYLAKVNYNQSLFDAPLHYNFYAASTGGGYYDMRNILNNTLVASNPTKAVTLVENHDTQPGQSLESTVQPWFKPLAYAFILTRSGGYPSVFYGDMYGTKGTTTREIPALKSKIEPLLKARKDYAYGTQRDYIDNPDVIGWTREGDSTKAKSGLATVITDGPGGSKRMYVGTSNAGEIWYDLTGNRTDKITIGSDGYATFPVNGGSVSVWVQQ

SEQ ID NO: 35348 - protein, 480 aa, Cytophaga sp.
NGTMMQYFEWYVPNDGQQWNRLRTDAPYLSSVGITAVWTPPAYKGTSQADVGYGPYDLYDLGEFNQKGTVRTKYGTKGELKSAVNTLHSNGIQVYGDVVMNHKAGADYTENVTAVEVNPSNRNQETSGEYNIQAWTGFNFPGRGTTYSNFKWQWFHFDGTDWDQSRSLSRIFKFTGKAWDWEVSSENGNYDYLMYADIDYDHPDVVNEMKKWGVWYANEVGLDGYRLDAVKHIKFSFLKDWVDNARAATGKEMFTVGEYWQNDLGALNNYLAKVNYNQSLFDAPLHYNFYAASTGGGYYDMRNILNNTLVASNPTKAVTLVENHDTQPGQSLESTVQPWFKPLAYAFILTRSGGYPSVFYGDMYGTKGTTTREIPALKSKIEPLLKARKFYAYGTQRDYIDNPDVIGWTREGDSTKAKSGLATVITDGPGGSKRMYVGTSNAGEIWYDLTGNRTDKITIGSDGYATFPVNGGSVSVWVQQ

SEQ ID NO: 35349 - protein, 480 aa, Cytophaga sp.
NGTMMQYFEWYVPNDGQQWNRLRTDAPYLSSVGITAVWTPPAYKGTSQADVGYGPYDLYDLGEFNQKGTVRTKYGTKGELKSAVNTLHSNGIQVYGDVVMNHKAGADYTENVTAVEVNPSNRNQETSGEYNIQAWTGFNFPGRGTTYSNFKWQWFHFDGTDWDQSRSLSRIFKFTGKAWDWEVSSENGNYDYLMYADIDYDHPDVVNEMKKWGVWYANEVGLDGYRLDAVKHIKFSFLKDWVDNARAATGKEMFTVGEYWQNDLGALNNYLAKVNYNQSLFDAPLHYNFYAASTGGGVYDMRNILNNTLVASNPTKAVTLVENHDTQPGQSLESTVQPWFKPLAYAFILTRSGGYPSVFYGDMYGTKGTTTREIPALKSKIEPLLKARKDYAYGTQRDYIDNPDVIGWTREGDSTKAKSGLATVITDGPGGSKRMYVGTSNAGEIWYDLTGNRTDKITIGSDGYATFPVNGGSVSVWVQQ

SEQ ID NO: 35350 - protein, 480 aa, Cytophaga sp.
NGTMMQYFEWYVPNDGQQWNRLRTDAPYLSSVGITAVWTPPAYKGTSQADVGYGPYDLYDLGEFNQKGTVRTKYGTKGELKSAVNTLHSNGIQVYGDVVMNHKAGADYTENVTAVEVNPSNRNQETSGEYNIAAWTGFNFPGRGTTYSNFKWQWFHFDGTDWDQSRSLSRIFKFTGKAWDWEVSSENGNYDYLMYADIDYDHPDVVNEMKKWGVWYANEVGLDGYRLDAVKHIKFSFLKDWVDNARAATGKEMFTVGEYWQNDLGALNNYLAKVNYNQSLFDAPLHYNFYAASTGGGYYDMRNILNNTLVASNPTKAVTLVENHDTQPGQSLESTVQPWFKPLAYAFILTRSGGYPSVFYGDMYGTKGTTTREIPALKSKIEPLLKARKDYAYGTQRDYIDNPDVIGWTREGDSTKAKSGLATVITDGPGGSKRMYVGTSNAGEIWYDLTGNRTDKITIGSDGYATFPVNGGSVSVWVQQ

SEQ ID NO: 35351 - protein, 480 aa, Cytophaga sp.
NGTMMQYFEWYVPNDGQQWNRLRTDAPYLSSVGITAVWTPPAYKGTSQADVGYGPYDLYDLGEFNQKGTVRTKYGTKGELKSAVNTLHSNGIQVYGDVVMNHKAGADYTENVTAVEVNPSNRNQETSGEYNIQAWTFFNFPGRGTTYSNFKWQWFHFDGTDWDQSRSLSRIFKFTGKAWDWEVSSENGNYDYLMYADIDYDHPDVVNEMKKWGVWYANEVGLDGYRLDAVKHIKFSFLKDWVDNARAATGKEMFTVGEYWQNDLGALNNYLAKVNYNQSLFDAPLHYNFYAASTGGGYYDMRNILNNTLVASNPTKAVTLVENHDTQPGQSLESTVQPWFKPLAYAFILTRSGGYPSVFYGDMYGTKGTTTREIPALKSKIEPLLKARKDYAYGTQRDYIDNPDVIGWTREGDSTKAKSGLATVITDGPGGSKRMYVGTSNAGEIWYDLTGNRTDKITIGSDGYATFPVNGGSVSVWVQQ

SEQ ID NO: 35352 - protein, 480 aa, Cytophaga sp.
NGTMMQYFEWYVPNDGQQWNRLRTDAPYLSSVGITAVWTPPAYKGTSQADVGYGPYDLYDLGEFNQKGTVRTKYGTKGELKSAVNTLHSMGIQVYGDVVMNHKAGADYTENVTAVEVNPSNRNQETSGEYNIQAWTGFNFPGRGTTYSNFKWQWFHFDGTDWDQSRSLSRIFKFTGKAWDWEVSSENGNYDYLMYADIDYDHPDVVNEMKKWGVWYANEVGLDGYRLDAVKHIKFSFLKDWVDNARAATGKEMFTVGEYWQNDLGALNNYLAKVNYNQSLFDAPLHYNFYAASTGGGYYDMRNILNNTLVASNPTKAVTLVENHDTQPGQSLESTVQPWFKPLAYAFILTRSGGYPSVFYGDMYGTKGTTTREIPALKSKIEPLLKARKDYAYGTQRDYIDNPDVIGWTREGDSTKAKSGLATVITDGPGGSKRMYVGTSNAGEIWYDLTGNRTDKITIGSDGYATFPVNGGSVSVWVQQ

SEQ ID NO: 35353 - protein, 480 aa, Cytophaga sp.
NGTMMQYFEWYVPNDGQQWNRLRTDAPYLSSVGITAVWTPPAYKGTSQADVGYGPYDLYDLGEFNQKGTVRTKYGTKGELKSAVNTLHSNGIQVYGDVVMNHKAGADYTENVTAVEVNPSNRNQETSGEYNIQAWTGFNFPGRGTTYSNFKWQWFHFDGTDWDQSRSLSRIFKFTGKAWDWEVSSENGNYDYLMYADIDYDHPDVVNEMKKWGVWYANEVGLDGYRLDAVKHIKFSFLKDWVDNARAATGKEMFTVGEYWQNDLGALNNYLAKVNYNQSLFDAPLHYNFYAASTGGGYYDMRNILNNTLVASNPTKAVTLVENHDTQPGQSLESTVQPWFKPLAYAFILTRSGGYPIVFYGDMYGTKGTTTREIPALKSKIEPLLKARKDYAYGTQRDYIDNPDVIGWTREGDSTKAKSGLATVITDGPGGSKRMYVGTSNAGEIWYDLTGNRTDKITIGSDGYATFPVNGGSVSVWVQQ

SEQ ID NO: 35354 - protein, 480 aa, Cytophaga sp.
NGTMMQYFEWYVPNDGQQWNRLRTDAPYLSSVGITAVWTPPAYKGTSQADVGYGPYDLYDLGEFNQKGTVRTKYGTKGELKSAVNTLHSNGIQVYGDVVMNHKAGADYTENVTAVEVNPSNRNQETSGEYNIQAWTGFNFPGRGTTYSNFKWQWFHFDGTDWDQSRSLSRIFKFTGKAWDWEVSSENGNYDYLMYADIDYDHPDVVNEMKKWGVWYANEVGLDGYRLDAVKHIKFSFLKDWVDNARAATGKEMFTVGEYWQNDLGALNNYLAKVNYNQSLFDAPLHYNFYAASTGGGYYDMRNILNNTLVASNPTKAVTLVENHDTQPGQSLESTVQPWFKPLAYAFILTRSGGYPSVFYGDMYGTKGTTTREIPALKSKIEPLLKARKDYAYGTQRDYIDNPDVIGWTREGDSTKAKSGLATVITDGPGGSKRMYVGTCNAGEIWYDLTGNRTDKITIGSDGYATFPVNGGSVSVWVQQ

SEQ ID NO: 35355 - protein, 480 aa, Cytophaga sp.
NGTMMQYFEWYVPNDGQQWNRLRTDAPYLSSVGITAVWTPPAYKGTSQADVGYGPYDLYDLGEFNQKGTVRTKYGTKGELKSAVNTLHSNGIQVYGDVVMNHKAGADYTENVTAVEVNPSNRNQETSGEYNIQAWTGFNFPGRGTTYSNFKWQWFHFDGTDWDQSRSLSRIFKFTGKAWDWEVSSENGNYDYLMYADIDYDHPDVVNEMKKWGVWYANEVGLDGYRLDAVKHIKFSFLKDWVDNARAATGKEMFTVGEYWQNDLGALNNYLAKVNYNQSLFDAPLHYNFYAASTGGGYYDMRNILNNTLVASNPTKAVTLVENHDTQPGQSLESTVQWWFKPLAYAFILTRSGGYPSVFYGDMYGTKGTTTREIPALKSKIEPLLKARKDYAYGTQRDYIDNPDVIGWTREGDSTKAKSGLATVITDGPGGSKRMYVGTSNAGEIWYDLTGNRTDKITIGSDGYATFPVNGGSVSVWVQQ

SEQ ID NO: 35356 - protein, 480 aa, Cytophaga sp.
NGTMMQYFEWYVPNDGQQWNRLRTDAPYLSSVGITAVWTPPAYKGTSQIDVGYGPYDLYDLGEFNQKGTVRTKYGTKGELKSAVNTLHSNGIQVYGDVVMNHKAGADYTENVTAVEVNPSNRNQETSGEYNIQAWTGFNFPGRGTTYSNFKWQWFHFDGTDWDQSRSLSRIFKFTGKAWDWEVSSENGNYDYLMYADIDYDHPDVVNEMKKWGVWYANEVGLDGYRLDAVKHIKFSFLKDWVDNARAATGKEMFTVGEYWQNDLGALNNYLAKVNYNQSLFDAPLHYNFYAASTGGGYYDMRNILNNTLVASNPTKAVTLVENHDTQPGQSLESTVQPWFKPLAYAFILTRSGGYPSVFYGDMYGTKGTTTREIPALKSKIEPLLKARKDYAYGTQRDYIDNPDVIGWTREGDSTKAKSGLATVITDGPGGSKRMYVGTSNAGEIWYDLTGNRTDKITIGSDGYATFPVNGGSVSVWVQQ

SEQ ID NO: 35357 - protein, 480 aa, Cytophaga sp.
NGTMMQYFEWYVPNDGQQWNRLRTDAPYLSSVGITAVWTPPAYKGTSQADVGYGPYDLYDLGEFNQKGTVRTKYGTKGELKSAVNTLHSNGIQVYGDVVMNHKAGADYTENVTAVEVNPSNRNQETSGEYNIQAWTGFNFPGRGTTYSNFKWGWFHFDGTDWDQSRSLSRIFKFTGKAWDWEVSSENGNYDYLMYADIDYDHPDVVNEMKKWGVWYANEVGLDGYRLDAVKHIKFSFLKDWVDNARAATGKEMFTVGEYWQNDLGALNNYLAKVNYNQSLFDAPLHYNFYAASTGGGYYDMRNILNNTLVASNPTKAVTLVENHDTQPGQSLESTVQPWFKPLAYAFILTRSGGYPSVFYGDMYGTKGTTTREIPALKSKIEPLLKARKDYAYGTQRDYIDNPDVIGWTREGDSTKAKSGLATVITDGPGGSKRMYVGTSNAGEIWYDLTGNRTDKITIGSDGYATFPVNGGSVSVWVQQ

SEQ ID NO: 35358 - protein, 480 aa, Cytophaga sp.
NGTMMQYFEWYVPNDGQQWNRLRTDAPYLSSVGITAVWTPPAYKGTSQADVGYGPYDLYDLGEFNQKGTVRTKYGTKGELKSAVNTLHSNGIQVYGDVVMNHKAGADYTENVTAVEVNPSNRNQETSGEYNIQAWTGFNFPGRGTTYSNFKWQWFHFDGTDWDQSRSLSRIFKFTGKAWDWEVSSENGNYDYLMYADIDYDHPDVVNEMKKWGVWYANEVGLDGYRLDAVKHIKFSFLNDWVDNARAATGKEMFTVGEYWQNDLGALNNYLAKVNYNQSLFDAPLHYNFYAASTGGGYYDMRNILNNTLVASNPTKAVTLVENHDTQPGQSLESTVQPWFKPLAYAFILTRSGGYPSVFYGDMYGTKGTTTREIPALKSKIEPLLKARKDYAYGTQRDYIDNPDVIGWTREGDSTKAKSGLATVITDGPGGSKRMYVGTSNAGEIWYDLTGNRTDKITIGSDGYATFPVNGGSVSVWVQQ

SEQ ID NO: 35359 - protein, 480 aa, Cytophaga sp.
NGTMMQYFEWYVPNDGQQWNRLRTDAPYLSSVGITAVWTPPAYKGTSQADVGYGPYDLYDLGEFNQKGTVRTKYGTKGELKSAVNTLHSNGIQVYGDVVMNHKAGADYTENVTAVEVNPSNRNQETSGEYNIQAWTGFNFPGRGTTYSNFKWQWFHFDGTDWDQSRTLSRIFKFTGKAWDWEVSSENGNYDYLMYADIDYDHPDVVNEMKKWGVWYANEVGLDGYRLDAVKHIKFSFLKDWVDNARAATGKEMFTVGEYWQNDLGALNNYLAKVNYNQSLFDAPLHYNFYAASTGGGYYDMRNILNNTLVASNPTKAVTLVENHDTQPGQSLESTVQPWFKPLAYAFILTRSGGYPSVFYGDMYGTKGTTTREIPALKSKIEPLLKARKDYAYGTQRDYIDNPDVIGWTREGDSTKAKSGLATVITDGPGGSKRMYVGTSNAGEIWYDLTGNRTDKITIGSDGYATFPVNGGSVSVWVQQ

SEQ ID NO: 35360 - protein, 480 aa, Cytophaga sp.
NGTMMQYFEWYVPNDGQQWNRLRTDAPYLSSVGITAVWTPPAYKGTSQADVGYGPYDLYDLGEFNQKGTVRTKYGTKGELKSAVNTLHSNGIQVYGDVVMNHKAGADYTENVTAVEVNPSNRNQETSGEYNIQAWTGFNFPGRGTTYSNFKWQWFHFDGTDWDQSRSLSRIFKFTGKAWDWEVSSENGNYDYLMYADIDYDHPDVVNEMKKWGVWYANEVGLDGYRLDAVKHIKFSFLKDWVDNARAATGKEMFTVGEYWQNDLGALNNYLAKVNYNQSLFDAPLHYNFYAASTGGGYYDMRQILNNTLVASNPTKAVTLVENHDTQPGQSLESTVQPWFKPLAYAFILTRSGGYPSVFYGDMYGTKGTTTREIPALKSKIEPLLKARKDYAYGTQRDYIDNPDVIGWTREGDSTKAKSGLATVITDGPGGSKRMYVGTSNAGEIWYDLTGNRTDKITIGSDGYATFPVNGGSVSVWVQQ

SEQ ID NO: 35361 - protein, 480 aa, Cytophaga sp.
NGTMMQYFEWYVPNDGQQWNRLRTDAPYLSSVGITAVWTPPAYKGTSQADVGYGPYDLYDLGEFNQKGTVRTKYGTKGELKSAVNTLHSNGIQVYGDVVMNHKAGADYTENVTAVEVNPSNRNQETSGEYNIQAWTGFNFPGRGTTYSNFKWQWFHFDGTDWDQSRSLSRIFKFTGKAWDWEVSSENGNYDYLMYADIDYDHPDVVNEMKKWGVWYANEVGLDGYRLDAVKHIKFSFLKDWVDNARAATGKEMFTVGEYWQNDLGALNNYLAKVNYNQSLFDAPLHYNFYAASTGGGYYDMRNILHNTLVASNPTKAVTLVENHDTQPGQSLESTVQPWFKPLAYAFILTRSGGYPSVFYGDMYGTKGTTTREIPALKSKIEPLLKARKDYAYGTQRDYIDNPDVIGWTREGDSTKAKSGLATVITDGPGGSKRMYVGTSNAGEIWYDLTGNRTDKITIGSDGYATFPVNGGSVSVWVQQ

SEQ ID NO: 35362 - protein, 480 aa, Cytophaga sp.
NGTMMQYFEWYVPNDGQQWNRLRTDAPYLSSVGITAVWTPPAYKGTSQADVGYGPYDLYDLGEFNQKGTVRTKYGTKGELKSAVNTLHSNGIQVYGDVVMNHKAGADYTENVTAVEVNPSNRNQETSGEYNIQAWTGFNFPGRGTTYSNFKWQWFHFDGTDWDQSRSLSRIFKFTGKAWDWEVSSENGNYDYLMYADIDYDHPDVVNEMKKWGVWYANEVGLDGYRLDAVKHIKFSFLKDWVDNARAATGKEMFTVGEYWQNDLGALNNYLAKVNYNQSLFDAPLHYNFYAASTGGGYYDMRNILNNTLVASNPCKAVTLVENHDTQPGQSLESTVQPWFKPLAYAFILTRSGGYPSVFYGDMYGTKGTTTREIPALKSKIEPLLKARKDYAYGTQRDYIDNPDVIGWTREGDSTKAKSGLATVITDGPGGSKRMYVGTSNAGEIWYDLTGNRTDKITIGSDGYATFPVNGGSVSVWVQQ

SEQ ID NO: 35363 - protein, 480 aa, Cytophaga sp.
NGTMMQYFEWYVPNDGQQWNRLRTDAPYLSSVGITAVWTPPAYKGTSQADVGYGPYDLYDLGEFNQKGTVRTKYGTKGELKSAVNTLHSNGIQVYGDVVMNHKAGADYTENVTAVEVNPSNRNQETSGEYNIQAWTGFNFPGRGTTYSNFKWQWFHFDGTDWDQSRSLSRIFKFTGKAWDWEVSSENGNYDYLMYADIDYDHPDVVNEMKKWGVWYANEVGLDGYRLDAVKHIKFSFLKDWVDNARAATGKEMFTVGEYWQNDLGALNNYLAKVNYNQSLFDAPLHYNFYAASTGGGYYDMRNILNNTLVASNPTKAVTLVENHDTQPGQSLESTVQPWFKPLAYAFILTRSGGYPSVFYGDMYGTKGTTTREIPALKSKIEPLLKARKDYAYGTQRDYIDNPDVIGWTREGDSTHAKSGLATVITDGPGGSKRMYVGTSNAGEIWYDLTGNRTDKITIGSDGYATFPVNGGSVSVWVQQ

SEQ ID NO: 35364 - protein, 480 aa, Cytophaga sp.
NGTMMQYFEWYVPNDGQQWNRLRTDAPYLSSVGITAVWTPPAYKGTSQADVGYGPYDLYDLGEFNQKGTVRTKYGTKGELVSAVNTLHSNGIQVYGDVVMNHKAGADYTENVTAVEVNPSNRNQETSGEYNIQAWTGFNFPGRGTTYSNFKWQWFHFDGTDWDQSRSLSRIFKFTGKAWDWEVSSENGNYDYLMYADIDYDHPDVVNEMKKWGVWYANEVGLDGYRLDAVKHIKFSFLKDWVDNARAATGKEMFTVGEYWQNDLGALNNYLAKVNYNQSLFDAPLHYNFYAASTGGGYYDMRNILNNTLVASNPTKAVTLVENHDTQPGQSLESTVQPWFKPLAYAFILTRSGGYPSVFYGDMYGTKGTTTREIPALKSKIEPLLKARKDYAYGTQRDYIDNPDVIGWTREGDSTKAKSGLATVITDGPGGSKRMYVGTSNAGEIWYDLTGNRTDKITIGSDGYATFPVNGGSVSVWVQQ

SEQ ID NO: 35365 - protein, 480 aa, Cytophaga sp.
NGTMMQYFEWYVPNDGQQWNRLRTDAPYLSSVGITAVWTPPAYKGTSQADVGYGPYDLYDLGEFNQKGTVRTKYGTKGELKSAVNTLHSNGIQVYGDVVMNHKAGADYTENVTAVEVNPSNRNQETSGEYNIQAWTSFNFPGRGTTYSNFKWQWFHFDGTDWDQSRSLSRIFKFTGKAWDWEVSSENGNYDYLMYADIDYDHPDVVNEMKKWGVWYANEVGLDGYRLDAVKHIKFSFLKDWVDNARAATGKEMFTVGEYWQNDLGALNNYLAKVNYNQSLFDAPLHYNFYAASTGGGYYDMRNILNNTLVASNPTKAVTLVENHDTQPGQSLESTVQPWFKPLAYAFILTRSGGYPSVFYGDMYGTKGTTTREIPALKSKIEPLLKARKDYAYGTQRDYIDNPDVIGWTREGDSTKAKSGLATVITDGPGGSKRMYVGTSNAGEIWYDLTGNRTDKITIGSDGYATFPVNGGSVSVWVQQ

SEQ ID NO: 35366 - protein, 480 aa, Cytophaga sp.
NGTMMQYFEWYVPNDGQQWNRLRTDARYLSSVGITAVWTPPAYKGTSQADVGYGPYDLYDLGEFNQKGTVRTKYGTKGELKSAVNTLHSNGIQVYGDVVMNHKAGADYTENVTAVEVNPSNRNQETSGEYNIQAWTGFNFPGRGTTYSNFKWQWFHFDGTDWDQSRSLSRIFKFTGKAWDWEVSSENGNYDYLMYADIDYDHPDVVNEMKKWGVWYANEVGLDGYRLDAVKHIKFSFLKDWVDNARAATGKEMFTVGEYWQNDLGALNNYLAKVNYNQSLFDAPLHYNFYAASTGGGYYDMRNILNNTLVASNPTKAVTLVENHDTQPGQSLESTVQPWFKPLAYAFILTRSGGYPSVFYGDMYGTKGTTTREIPALKSKIEPLLKARKDYAYGTQRDYIDNPDVIGWTREGDSTKAKSGLATVITDGPGGSKRMYVGTSNAGEIWYDLTGNRTDKITIGSDGYATFPVNGGSVSVWVQQ

SEQ ID NO: 35367 - protein, 480 aa, Cytophaga sp.
NGTMMQYFEWYVPNDGQQWNRLRTDAPYLSSVGITAVWTPPAYKGTSQADVGYGPYDLYDLGEFNQKGTVRTKYGTKGELKSAVNTLHSNGIQVYGDVVMNHKAGADYTENVTAVEVNPSNRNQETSGEYNIQAWTGFNFPGRGTTYSNFKWQWFHFDGTDWDQSRSLSRIFKFTGKAWDWEVSSENGNYDYLMYADIDYDHPDVVNEMKKWGVWYANEVGLDGYRLDAVKHIKFSFLKDWVDNARAATGKEMFTVGEYWQNDLGALNNYLAKVNYNQSLFDAPLHYNFYAASTGGGYYDMRNILNNTLVASNPTKAVTLVENHDTQPGQSLESTVQPWFKPLAYAFILTRSGGYPSVFYGDMYGTKGTTGREIPALKSKIEPLLKARKDYAYGTQRDYIDNPDVIGWTREGDSTKAKSGLATVITDGPGGSKRMYVGTSNAGEIWYDLTGNRTDKITIGSDGYATFPVNGGSVSVWVQQ

SEQ ID NO: 35368 - protein, 480 aa, Cytophaga sp.
NGTMMQYFEWYVPNDGQQWNRLRTDAPYLSSVGITAVWTPPAYKGTSQADVGYGPYDLYDLGEFNQKGTVRTKYGTKGELKSAVNTLHSNGIQVYGDVVMNHKAGADYTENVTAVEVNPSNRNQETSGEYNIQAWTGFNFPGRGTTYSNFKWQWFHFDGTDWDQSRSLSRIFKFTGKAWDWEVSSENGNYDYLMYADIDYDHPDVVNEMKKWGVWYANEVGLDGYRLDAVKHIKFSFLKDWVDNARAATGKEMFTVGEYWQNDLGALNNYLAKVNYNQSLFDAPLHYNFYAASTGGGYYDMRNILNNTLVASNPTKAVTLVENHDTQPGQSLESTVQPWFKPLAYAFILTRSGGYPSVFYGDMYGTKGTTTREIPALKSKIEPLLKARKWYAYGTQRDYIDNPDVIGWTREGDSTKAKSGLATVITDGPGGSKRMYVGTSNAGEIWYDLTGNRTDKITIGSDGYATFPVNGGSVSVWVQQ

SEQ ID NO: 35369 - protein, 480 aa, Cytophaga sp.
NGTMMQYFEWYVPNDGQQWNRLRTDAPYLSSVGITAVWTPPAYKGTSQADVGYGPYDLYDLGEFNQKGTVRTKYGTKGELKSAVNTLHSNGIQVYGDVVMNHKAGADYTENVTAVEVNPSNRNQETSGEYNIQAWTGFNFPGRGTTYSQFKWQWFHFDGTDWDQSRSLSRIFKFTGKAWDWEVSSENGNYDYLMYADIDYDHPDVVNEMKKWGVWYANEVGLDGYRLDAVKHIKFSFLKDWVDNARAATGKEMFTVGEYWQNDLGALNNYLAKVNYNQSLFDAPLHYNFYAASTGGGYYDMRNILNNTLVASNPTKAVTLVENHDTQPGQSLESTVQPWFKPLAYAFILTRSGGYPSVFYGDMYGTKGTTTREIPALKSKIEPLLKARKDYAYGTQRDYIDNPDVIGWTREGDSTKAKSGLATVITDGPGGSKRMYVGTSNAGEIWYDLTGNRTDKITIGSDGYATFPVNGGSVSVWVQQ

SEQ ID NO: 35370 - protein, 480 aa, Cytophaga sp.
NGTMMQYFEWYVPNDGQQWNRLRTDAPYLSSVGITAVWTPPAYKGTSQADVGYGPYDLYDLGEFNQKGTVRTKYGTKGELKSAVNTLHSNGIQVYGDVVMNHKAGADYTENVTAVEVNPSNRNQETSGEYNIQAWTGFNFPGRGTTYSNFKWQWFHFDGTDWDQSRSLSRIFKFTGKAWDWEVSSENGNYDYLMYADIDYDHPDVVNEMKKWGVWYANEVGLDGYRLDAVKHIKFSFLKDWVDNARAATGKEMFTVGEYWQNDLGALNNYLAKVNYNQSLFDAPLHYNFYAASTGGGYYDMRNILNNTLVASNPTKAVTLVENHDTQPGQSLESTVQPWFKPLAYAFILTRSGGYPSVFYGDMYGTKGTTTREIPALKSKIEPLLKARKDYAYGTQRDYIDNPDVIGWTREGDSTKAKSGLATVITDGPGGSKRMYVGTSNAGEIWYDLTGNRTDKITIGSDGYAWFPVNGGSVSVWVQQ

SEQ ID NO: 35371 - protein, 480 aa, Cytophaga sp.
NGTMMQYFEWYVPNDGQQWNRLRTDAPYLSSVGITAVWTPPAYKGTSQADVGYGPYDLYDLGEFNQKGTVRTKYGTKGELKSAVNTLHSNGIQVYGDVVMNHKAGADYTENVTAVEVNPNNRNQETSGEYNIQAWTGFNFPGRGTTYSNFKWQWFHFDGTDWDQSRSLSRIFKFTGKAWDWEVSSENGNYDYLMYADIDYDHPDVVNEMKKWGVWYANEVGLDGYRLDAVKHIKFSFLKDWVDNARAATGKEMFTVGEYWQNDLGALNNYLAKVNYNQSLFDAPLHYNFYAASTGGGYYDMRNILNNTLVASNPTKAVTLVENHDTQPGQSLESTVQPWFKPLAYAFILTRSGGYPSVFYGDMYGTKGTTTREIPALKSKIEPLLKARKDYAYGTQRDYIDNPDVIGWTREGDSTKAKSGLATVITDGPGGSKRMYVGTSNAGEIWYDLTGNRTDKITIGSDGYATFPVNGGSVSVWVQQ

SEQ ID NO: 35372 - protein, 480 aa, Cytophaga sp.
NGTMMQYFEWYVPNDGQQWNRLRTDAPYLSSVGITAVWTPPAYKGTSQADVGYGPYDLYDLGEFNQKGTVRTKYGTKGELKSAVNTLHSNGIQVYGDVVMNHKAGADYTENVTAVEVNPSNRNQETSGEYNIQAWTGFNFPGRGTTYSNFKWQWFHFDGTDWDQSRSLSRIFKFTGKAWDWEVSSENGNYDYLMYADIDYDHPDVVNEMKKWGVWYANEVGLDGYRLDAVKHIKFSFLKDWVDNARAATGKEMFTVGEYWQNDLGALNNYLAKVNYNQSLFDAPLHYNFYAASTGGGYYDMRNILNNTLVASNPTKAVTLVENHDTQPGQSLESTVQPWFKPLAYAFILTRSGGYPSVFYGDMYGTKGTTTREIPALKSKIEPLLKARKDYAYGTQRDYIDNPDVIGWTREGDSYKAKSGLATVITDGPGGSKRMYVGTSNAGEIWYDLTGNRTDKITIGSDGYATFPVNGGSVSVWVQQ

SEQ ID NO: 35373 - protein, 480 aa, Cytophaga sp.
NGTMMQYFEWYVPNDGQQWNRLRTDAPYLSSVGITAVWTPPAYKGTSQADVGYGPYDLYDLGEFNQKGTVRTKYGTKGELKSAVNTLHSNGIQVYGDVVMNHKAGADYTENVTAVEVNPSNRNQETSGEYNIQAWTGFNFPGRGTTYSNFKWQWFHFDGTDWDQSRSLSRIFKFTGKAWDWEVSSENGNYDYLMYADIDYDHPDVVNEMKKWGVWYANEVGLDGYRLDAVKHIKFSFLKDWVDNARAATGKEMFTVGEYWQNDLGALNNYLAKVAYNQSLFDAPLHYNFYAASTGGGYYDMRNILNNTLVASNPTKAVTLVENHDTQPGQSLESTVQPWFKPLAYAFILTRSGGYPSVFYGDMYGTKGTTTREIPALKSKIEPLLKARKDYAYGTQRDYIDNPDVIGWTREGDSTKAKSGLATVITDGPGGSKRMYVGTSNAGEIWYDLTGNRTDKITIGSDGYATFPVNGGSVSVWVQQ

SEQ ID NO: 35374 - protein, 480 aa, Cytophaga sp.
NGTMMQYFEWYVPNDGQQWNRLRTDAPYLSSVGITAVWTPPAYKGTSQADVGYGPYDLYDLGEFNQKGTVRTKYGTKGELKSAVNTLHSNGIQVYGDVVMNHKAGADYTENVTAVEVNPSNRNQETSGEYNIQAWTGFNFPGRGTTYSNFKWQWFHFDGTDWDQSRSLSRIFKFTGKAWDWEVSSENGNYDYLMYADIDYDHPDVVNEMKKWGVWYANEVGLDGYRLDAVKHIKFSFLKDWVDNARAATGKEMFTVGEYWQNDLGALNNYLAKVNYNQSLFDAPLHYNFYAASTGGGYYDMRNILNNTLVASNPTKAVTLVENHDTQPGQSLESTVQPWFKPLAYAFILTRSGGYPSVFYGDMYGTKGTTTREIPALKSKIEPLLKARKDYAYGTQRDYIDNPDVIGWTREGDSIKAKSGLATVITDGPGGSKRMYVGTSNAGEIWYDLTGNRTDKITIGSDGYATFPVNGGSVSVWVQQ

SEQ ID NO: 35375 - protein, 480 aa, Cytophaga sp.
NGTMMQYFEWYVPNDGQQWNRLRTDAPYLSSVGITAVWTPPAYKGTSQADVGYGPYDLYDLGEFNQKGTVRTKYGTKGELKSAVNTLHSNGIQVYGDVVMNHKAGADYTENVTAVEVNPSNRNQETSGEYNIQAWTGFNFPGRGTTYSNFKWTWFHFDGTDWDQSRSLSRIFKFTGKAWDWEVSSENGNYDYLMYADIDYDHPDVVNEMKKWGVWYANEVGLDGYRLDAVKHIKFSFLKDWVDNARAATGKEMFTVGEYWQNDLGALNNYLAKVNYNQSLFDAPLHYNFYAASTGGGYYDMRNILNNTLVASNPTKAVTLVENHDTQPGQSLESTVQPWFKPLAYAFILTRSGGYPSVFYGDMYGTKGTTTREIPALKSKIEPLLKARKDYAYGTQRDYIDNPDVIGWTREGDSTKAKSGLATVITDGPGGSKRMYVGTSNAGEIWYDLTGNRTDKITIGSDGYATFPVNGGSVSVWVQQ

SEQ ID NO: 35376 - protein, 480 aa, Cytophaga sp.
NGTMMQYFEWYVPNDGQQWNRLRTDAPYLSSVGITAVWTPPAYKGTSQADVGYGPYDLYDLGEFNQKGTVRTKYGTKGELKSAVNTLHSNGIQVYGDVVMNHKAGADYTENVTAVEVNPSNRNQETSGEYNIQAWTGFLFPGRGTTYSNFKWQWFHFDGTDWDQSRSLSRIFKFTGKAWDWEVSSENGNYDYLMYADIDYDHPDVVNEMKKWGVWYANEVGLDGYRLDAVKHIKFSFLKDWVDNARAATGKEMFTVGEYWQNDLGALNNYLAKVNYNQSLFDAPLHYNFYAASTGGGYYDMRNILNNTLVASNPTKAVTLVENHDTQPGQSLESTVQPWFKPLAYAFILTRSGGYPSVFYGDMYGTKGTTTREIPALKSKIEPLLKARKDYAYGTQRDYIDNPDVIGWTREGDSTKAKSGLATVITDGPGGSKRMYVGTSNAGEIWYDLTGNRTDKITIGSDGYATFPVNGGSVSVWVQQ

SEQ ID NO: 35377 - protein, 480 aa, Cytophaga sp.
NGTMMQYFEWYVPNDGQQWNRLRTDAPYLSSVGITAVWTPPAYKGTSQADVGYGPYDLYDLGEFNQKGTVRTKYGTKGELKSAVNTLHSNGIQVYGDVVMNHKAGADYTENVTAVEVNPRNRNQETSGEYNIQAWTGFNFPGRGTTYSNFKWQWFHFDGTDWDQSRSLSRIFKFTGKAWDWEVSSENGNYDYLMYADIDYDHPDVVNEMKKWGVWYANEVGLDGYRLDAVKHIKFSFLKDWVDNARAATGKEMFTVGEYWQNDLGALNNYLAKVNYNQSLFDAPLHYNFYAASTGGGYYDMRNILNNTLVASNPTKAVTLVENHDTQPGQSLESTVQPWFKPLAYAFILTRSGGYPSVFYGDMYGTKGTTTREIPALKSKIEPLLKARKDYAYGTQRDYIDNPDVIGWTREGDSTKAKSGLATVITDGPGGSKRMYVGTSNAGEIWYDLTGNRTDKITIGSDGYATFPVNGGSVSVWVQQ

SEQ ID NO: 35378 - protein, 480 aa, Cytophaga sp.
NGTMMQYFEWYVPNDGQQWNRLRTDAPYLSSVGITAVWTPPAYKGTSQADVGYGPYDLYDLGEFNQKGTVRTKYGTKGELKSAVNTLHSNGIQVYGDVVMNHKAGADYTENVTAVEVNPSNRNQETSGEYNIQAWTGFNFPGRGTTYSNFKWQWFHFDGTDWDQSRSLSRIFKFTGKAWDWEVSSENGNYDYLMYADIDYDHPDVVNEMKKWGVWYANEVGLDGYRLDAVKHIKFSFLKDWVDNARAATGKEMFTVGEYWQNDLGALNNYLAKVNYNQSLFDAPLHYNFYAASTGGGYYDMRFILNNTLVASNPTKAVTLVENHDTQPGQSLESTVQPWFKPLAYAFILTRSGGYPSVFYGDMYGTKGTTTREIPALKSKIEPLLKARKDYAYGTQRDYIDNPDVIGWTREGDSTKAKSGLATVITDGPGGSKRMYVGTSNAGEIWYDLTGNRTDKITIGSDGYATFPVNGGSVSVWVQQ

SEQ ID NO: 35379 - protein, 480 aa, Cytophaga sp.
NGTMMQYFEWYVPNDGQQWNRLRTDAPYLSSVGITAVWTPPAYKGTSQADVGYGPYDLYDLGEFNQKGTVRTKYGTKGELKSAVNTLHSNGIQVYGDVVMNHKAGADYTENVTAVEVNPSNRNQETSGEYNIQAWTGFNFPGRGTTYSNFKWQWFHFDGTDWDQSRSLSRIFKFTGKAWDWEVSSENGNYDYLMYADIDYDHPDVVNEMKKWGVWYANEVGLDGYRLDAVKHIKFSFLKDWVDNARAATGKEMFTVGEYWQNDLGALNNYLAKVNYNQSLFDAPLHYNFYAASTGGGYYDMRNILNNTLVASNPTKAVTLVENHDTQPGQSLESTVQPWFKPLAYAFILTRSGGYPSVFYGDMYGTKGTTTREIPALKSKIEPLLKARKDYAYGTQRDYIDNPDVIGWTREGDSEKAKSGLATVITDGPGGSKRMYVGTSNAGEIWYDLTGNRTDKITIGSDGYATFPVNGGSVSVWVQQ

SEQ ID NO: 35380 - protein, 480 aa, Cytophaga sp.
NGTMMQYFEWYVPNDGQQWNRLRTDAPYLSSVGITAVWTPPAYKGTSQADVGYGPYDLYDLGEFNQKGTVRTKYGTKGELKSAVNTLHSNGIQVYGDVVMNHKAGADYTENVTAVEVNPSNRNQETSGEYNIQAWTGFNFPGRGTTYSNFKWQWFHFDGTDWDQSRSLSRIFKFTGKAWDWEVSSENGNYDYLMYADIDYDHPDVVNEMKKWGVWYANEVGLDGYRLDAVKHIKFSFLKDWVDNARAATGKEMFTVGEYWQNDLGALNNYLAKVTYNQSLFDAPLHYNFYAASTGGGYYDMRNILNNTLVASNPTKAVTLVENHDTQPGQSLESTVQPWFKPLAYAFILTRSGGYPSVFYGDMYGTKGTTTREIPALKSKIEPLLKARKDYAYGTQRDYIDNPDVIGWTREGDSTKAKSGLATVITDGPGGSKRMYVGTSNAGEIWYDLTGNRTDKITIGSDGYATFPVNGGSVSVWVQQ

SEQ ID NO: 35381 - protein, 480 aa, Cytophaga sp.
NGTMMQYFEWYVPNDGQQWNRLRTDAPYLSSVGITAVWTPPAYKGTSQADVGYGPYDLYDLGEFNQKGTVRTKYGTKGELKSAVNTLHSNGIQVYGDVVMNHKAGADYTENVTAVEVNPSNRNQETSGEYNIQAWTGFNFPGRGTTYSNFKWQWFHFDGTDWDQSRSLSRIFKFTGKAWDWEVSSENGNYDYLMYADIDYDHPDVVNEMKKWGVWYANEVGLDGYRLDATKHIKFSFLKDWVDNARAATGKEMFTVGEYWQNDLGALNNYLAKVNYNQSLFDAPLHYNFYAASTGGGYYDMRNILNNTLVASNPTKAVTLVENHDTQPGQSLESTVQPWFKPLAYAFILTRSGGYPSVFYGDMYGTKGTTTREIPALKSKIEPLLKARKDYAYGTQRDYIDNPDVIGWTREGDSTKAKSGLATVITDGPGGSKRMYVGTSNAGEIWYDLTGNRTDKITIGSDGYATFPVNGGSVSVWVQQ

SEQ ID NO: 35382 - protein, 480 aa, Cytophaga sp.
NGTIMQYFEWYVPNDGQQWNRLRTDAPYLSSVGITAVWTPPAYKGTSQADVGYGPYDLYDLGEFNQKGTVRTKYGTKGELKSAVNTLHSNGIQVYGDVVMNHKAGADYTENVTAVEVNPSNRNQETSGEYNIQAWTGFNFPGRGTTYSNFKWQWFHFDGTDWDQSRSLSRIFKFTGKAWDWEVSSENGNYDYLMYADIDYDHPDVVNEMKKWGVWYANEVGLDGYRLDAVKHIKFSFLKDWVDNARAATGKEMFTVGEYWQNDLGALNNYLAKVNYNQSLFDAPLHYNFYAASTGGGYYDMRNILNNTLVASNPTKAVTLVENHDTQPGQSLESTVQPWFKPLAYAFILTRSGGYPSVFYGDMYGTKGTTTREIPALKSKIEPLLKARKDYAYGTQRDYIDNPDVIGWTREGDSTKAKSGLATVITDGPGGSKRMYVGTSNAGEIWYDLTGNRTDKITIGSDGYATFPVNGGSVSVWVQQ

SEQ ID NO: 35383 - protein, 480 aa, Cytophaga sp.
NGTMMQYFEWYNPNDGQQWNRLRTDAPYLSSVGITAVWTPPAYKGTSQADVGYGPYDLYDLGEFNQKGTVRTKYGTKGELKSAVNTLHSNGIQVYGDVVMNHKAGADYTENVTAVEVNPSNRNQETSGEYNIQAWTGFNFPGRGTTYSNFKWQWFHFDGTDWDQSRSLSRIFKFTGKAWDWEVSSENGNYDYLMYADIDYDHPDVVNEMKKWGVWYANEVGLDGYRLDAVKHIKFSFLKDWVDNARAATGKEMFTVGEYWQNDLGALNNYLAKVNYNQSLFDAPLHYNFYAASTGGGYYDMRNILNNTLVASNPTKAVTLVENHDTQPGQSLESTVQPWFKPLAYAFILTRSGGYPSVFYGDMYGTKGTTTREIPALKSKIEPLLKARKDYAYGTQRDYIDNPDVIGWTREGDSTKAKSGLATVITDGPGGSKRMYVGTSNAGEIWYDLTGNRTDKITIGSDGYATFPVNGGSVSVWVQQ

SEQ ID NO: 35384 - protein, 480 aa, Cytophaga sp.
NGTMMQYFEWYVPNDGQQWNRLRTDAPYLSSVGITAVWTPPAYKGTSQADVGYGPYDLYDLGEFNQKGTVRTKYGTKGELKSAVNTLHSNGIQVYGDVVMNHKAGADYTENVTAVEVNPSNRNQETSGEYNIQAWTGFNFPGRGTTYSNFKWQWFHFDGTDWDQSRSLSRIFKFTGKAWDWEVSSENGNYDYLMYADIDYDHPDVVNEMKKWGVWYANEVGLDGYRLDAVKHIKFSFLKDWVDNARAATGKEMFTVGEYWQNDLGALNNYLAKVNYNQSLFDAPLHYNFYAASTGGGYYDMRNILNNTLVASNPTKAVTLVENHDTQPGQSLESTVQPWFKPLAYAFILTRSGGYPSVFYGDMYGTKGTTTREIPALKSKIEPLLKARKDYAYGTQQDYIDNPDVIGWTREGDSTKAKSGLATVITDGPGGSKRMYVGTSNAGEIWYDLTGNRTDKITIGSDGYATFPVNGGSVSVWVQQ

SEQ ID NO: 35385 - protein, 480 aa, Cytophaga sp.
NGTMMQYFEWYVPNDGQQWNRLREDAPYLSSVGITAVWTPPAYKGTSQADVGYGPYDLYDLGEFNQKGTVRTKYGTKGELKSAVNTLHSNGIQVYGDVVMNHKAGADYTENVTAVEVNPSNRNQETSGEYNIQAWTGFNFPGRGTTYSNFKWQWFHFDGTDWDQSRSLSRIFKFTGKAWDWEVSSENGNYDYLMYADIDYDHPDVVNEMKKWGVWYANEVGLDGYRLDAVKHIKFSFLKDWVDNARAATGKEMFTVGEYWQNDLGALNNYLAKVNYNQSLFDAPLHYNFYAASTGGGYYDMRNILNNTLVASNPTKAVTLVENHDTQPGQSLESTVQPWFKPLAYAFILTRSGGYPSVFYGDMYGTKGTTTREIPALKSKIEPLLKARKDYAYGTQRDYIDNPDVIGWTREGDSTKAKSGLATVITDGPGGSKRMYVGTSNAGEIWYDLTGNRTDKITIGSDGYATFPVNGGSVSVWVQQ

SEQ ID NO: 35386 - protein, 480 aa, Cytophaga sp.
NGTMMQYFEWYVPNDGQQWNRLRTDAPYLSSVGITAVWTPPAYKGTSQADVGYGPYDLYDLGEFNQKGTVRTKYGTKGELKSAVNTLHSNGIQVYGDVVMNHKAGADYTENVTAVEVNPSNRNQETSGEYNIQAWTGFNFPGRGTTYSNFKWQWFHFDGTDWDQSRSLSRIFKFTGKAWDWEVSSENGNYDYLMYADIDYDHPDVVNEMKKWGVWYANEVGLDGYRLDAVKHIKFSFLKDWVDNARAATGKEMFTVGEYWQNDLGALNNYLAKVNYNQSLFDAPLHYNFYAASTGGGYYDMRNILNNTLVASDPTKAVTLVENHDTQPGQSLESTVQPWFKPLAYAFILTRSGGYPSVFYGDMYGTKGTTTREIPALKSKIEPLLKARKDYAYGTQRDYIDNPDVIGWTREGDSTKAKSGLATVITDGPGGSKRMYVGTSNAGEIWYDLTGNRTDKITIGSDGYATFPVNGGSVSVWVQQ

SEQ ID NO: 35387 - protein, 480 aa, Cytophaga sp.
NGTMMQYFEWYVPNDGQQWNRLRTDAPYLSSVGITAVWTPPAYKGTSQADVGYGPYDLYDLGEFNQKGTVRTKYGTKGELKSAVNTLHSNGIQVYGDVVMNHKAGADYTENVTAVEVNPSNRNQETSGEYNIQAWTGFNFPGRGTTYSNFKWQWFHFDGTDWDQSRSLSRIFKFTGKAWDWEVSSENGNYDYLMYADIDYDHPDVVNEMKKWGVWYANEVGLDGYRLDAVKHIKFSFLKDWVDNARAATGKEMFTVGEYWQNDLGALNNYLAKVNYNQSLFDAPLHYNFYAASTGGGYYDMRNILNNTLVASQPTKAVTLVENHDTQPGQSLESTVQPWFKPLAYAFILTRSGGYPSVFYGDMYGTKGTTTREIPALKSKIEPLLKARKDYAYGTQRDYIDNPDVIGWTREGDSTKAKSGLATVITDGPGGSKRMYVGTSNAGEIWYDLTGNRTDKITIGSDGYATFPVNGGSVSVWVQQ

SEQ ID NO: 35388 - protein, 480 aa, Cytophaga sp.
NGTMMQYFEWYVPNDGQQWNRLRTDAPYLSSVGITAVWTPPAYKGTSQADVGYGPYDLYDLGEFNQKGTVRTKYGTKGELKSAVNTLHSNGIQVYGDVVMNHKAGADYTENVTAVEVNPSNRNQETSGEYNIQAWTGFNFPGRGTTYSNFKWQWFHFDGTDWDQSRSLSRIFKFTGKAWDWEVSSENGNYDYLMYADIDYDHPDVVNEMKKWGVWYANEVGLDGYRLDAVKHIKFSFLKDWVDNARAATGKEMFTVGEYWQNDLGALNNYLAKVNYNQSLFDAPLHYNFYAASTGGGYYDMRNILNNTLVASNPTKAVTLVENHDTQPGQSLESTVQPWFKPLAYAFILTRSGGYPTVFYGDMYGTKGTTTREIPALKSKIEPLLKARKDYAYGTQRDYIDNPDVIGWTREGDSTKAKSGLATVITDGPGGSKRMYVGTSNAGEIWYDLTGNRTDKITIGSDGYATFPVNGGSVSVWVQQ

SEQ ID NO: 35389 - protein, 480 aa, Cytophaga sp.
NGTMMQYFEWYVPNDGQQWNRLRTDAPYLSSVGITAVWTPPAYKGTSQADVGYGPYDLYDLGEFNQKGTVRTKYGTKGELKSAVNTLHSNGIQVYGDVVMNHKAGADYTENVTAVEVNPSNRNQETSGEYNIQAWTGFNFPGRGTTYSNFKWQWFHFDGTDWDQSRSLSRIFKFTGKAWDWEVSSENGNYDYLMYADIDYDHPDVVNEMKKWGVWYANEVGLDGYRLDAVKHIKFSFLKDWVDNARAATGKEMFTVGEYWQNDLGALNNYLAKVNYNQSLFDAPLHYNFYAASTGGGYYDMRNILNNTLVASNPTKAVTLVENHDTQPGQSLESTVQPWFKPLAYAFILTRSGGYPSVFYGDMYGTKGTTTREIPALKSKIEPLLKARKDYAYGTQRDYIDNPDVIGWTREGDSTKAKSGLATVITDGPGGSKRMYVGMSNAGEIWYDLTGNRTDKITIGSDGYATFPVNGGSVSVWVQQ

SEQ ID NO: 35390 - protein, 480 aa, Cytophaga sp.
NGTMMQYFEWYVPNDGQQWNRLRTDAPYLSSVGITAVWTPPAYKGTSQADVGYGPYDLYDLGEFNQKGTVRTKYGTKGELKSAVNTLHSNGIQVYGDVVMNHKAGADYTENVTAVEVNPSNRNQETSGEYNIQAWTGFNFPGRGTTYSNFKWQWFHFDGTDWDASRSLSRIFKFTGKAWDWEVSSENGNYDYLMYADIDYDHPDVVNEMKKWGVWYANEVGLDGYRLDAVKHIKFSFLKDWVDNARAATGKEMFTVGEYWQNDLGALNNYLAKVNYNQSLFDAPLHYNFYAASTGGGYYDMRNILNNTLVASNPTKAVTLVENHDTQPGQSLESTVQPWFKPLAYAFILTRSGGYPSVFYGDMYGTKGTTTREIPALKSKIEPLLKARKDYAYGTQRDYIDNPDVIGWTREGDSTKAKSGLATVITDGPGGSKRMYVGTSNAGEIWYDLTGNRTDKITIGSDGYATFPVNGGSVSVWVQQ

SEQ ID NO: 35391 - protein, 480 aa, Cytophaga sp.
NGTMMQYFEWYVPNDGQQWNRLRTDAPYLSSVGITAVWVPPAYKGTSQADVGYGPYDLYDLGEFNQKGTVRTKYGTKGELKSAVNTLHSNGIQVYGDVVMNHKAGADYTENVTAVEVNPSNRNQETSGEYNIQAWTGFNFPGRGTTYSNFKWQWFHFDGTDWDQSRSLSRIFKFTGKAWDWEVSSENGNYDYLMYADIDYDHPDVVNEMKKWGVWYANEVGLDGYRLDAVKHIKFSFLKDWVDNARAATGKEMFTVGEYWQNDLGALNNYLAKVNYNQSLFDAPLHYNFYAASTGGGYYDMRNILNNTLVASNPTKAVTLVENHDTQPGQSLESTVQPWFKPLAYAFILTRSGGYPSVFYGDMYGTKGTTTREIPALKSKIEPLLKARKDYAYGTQRDYIDNPDVIGWTREGDSTKAKSGLATVITDGPGGSKRMYVGTSNAGEIWYDLTGNRTDKITIGSDGYATFPVNGGSVSVWVQQ

SEQ ID NO: 35392 - protein, 480 aa, Cytophaga sp.
NGTMMQYFEWYVPNDGQQWNRLRTDAPYLSSVGITAVWTPPAYKGTSQADVGYGPYDLYDLGEFNQKGTVRTKYGTKGELKSAVNTLHSNGIQVYGDVVMNHKAGADYTENVTAVEVNPSNRNQETSGEYNIQAWTGFNFPGRGTTYSNFKWQWFHFDGTDWDQSRSLSRIFKFTGKAWDWEVSSENGNYDYLMYADIDYDHPDVVNEMKKWGVWYANEVGLDGYRLDAVKHIKFSFLKDWVDNARAATGKEMFTVGEYWQNDLGALNNYLAKVNYNQSLFDAPLHYNFYAASTGGGYYDMRNILNNTLVASNPGKAVTLVENHDTQPGQSLESTVQPWFKPLAYAFILTRSGGYPSVFYGDMYGTKGTTTREIPALKSKIEPLLKARKDYAYGTQRDYIDNPDVIGWTREGDSTKAKSGLATVITDGPGGSKRMYVGTSNAGEIWYDLTGNRTDKITIGSDGYATFPVNGGSVSVWVQQ

SEQ ID NO: 35393 - protein, 480 aa, Cytophaga sp.
NGTMMQYFEWYVPNDGQQWNRLRTDAPYLSSVGITAVWTPPAYKGTSQADVGYGPYDLYDLGEFNQKGTVRTKYGTKGELKSAVNTLHSNGIQVYGDVVMNHKAGADYTENVTAVEVNPSNRNQETSGEYNIQAWTGFNFPGRGTTYSNFKWQWFHFDGTDWDQSRSLSRIFKFTGKAWDWEVSSENGNYDYLMYADIDYDHPDVVNEMKKWGVWYANEVGLDGYRLDAVKHIKFSFLKDWVDNARAATGKEMFTVGEYWQNDLGALNNYLAKVNYNQSLFDAPLHYNFYAASTGGGYYDMRNILNNTLVASNPTKAVTLVENHDTQPGQSLESTVQPWFKPLAYAFILTRSGGYPSVFYGDMYGTKGTTTREIPALKPKIEPLLKARKDYAYGTQRDYIDNPDVIGWTREGDSTKAKSGLATVITDGPGGSKRMYVGTSNAGEIWYDLTGNRTDKITIGSDGYATFPVNGGSVSVWVQQ

SEQ ID NO: 35394 - protein, 480 aa, Cytophaga sp.
NGTMMQYFEWYVPNDGQQWDRLRTDAPYLSSVGITAVWTPPAYKGTSQADVGYGPYDLYDLGEFNQKGTVRTKYGTKGELKSAVNTLHSNGIQVYGDVVMNHKAGADYTENVTAVEVNPSNRNQETSGEYNIQAWTGFNFPGRGTTYSNFKWQWFHFDGTDWDQSRSLSRIFKFTGKAWDWEVSSENGNYDYLMYADIDYDHPDVVNEMKKWGVWYANEVGLDGYRLDAVKHIKFSFLKDWVDNARAATGKEMFTVGEYWQNDLGALNNYLAKVNYNQSLFDAPLHYNFYAASTGGGYYDMRNILNNTLVASNPTKAVTLVENHDTQPGQSLESTVQPWFKPLAYAFILTRSGGYPSVFYGDMYGTKGTTTREIPALKSKIEPLLKARKDYAYGTQRDYIDNPDVIGWTREGDSTKAKSGLATVITDGPGGSKRMYVGTSNAGEIWYDLTGNRTDKITIGSDGYATFPVNGGSVSVWVQQ

SEQ ID NO: 35395 - protein, 480 aa, Cytophaga sp.
NGTMMQYFEWYVPNDGQQWNRLRTDAPYLSSVGITAVWTPPAYKGTSQADVGYGPYDLYDLGEFNQKGTVRTKYGTKGELKSAVNTLHSNGIQVYGDVVMNHKAGADYTENVTAVEVNPSNRNQETSGEYNIQAWTGFNFPGRGTTYSNFKWQWFHFDGTDWDQSRSLSRIFKFTGKAWDWEVSSENGNYDYLMYADIDYDHPDVVNEMKKWGVWYANEVGLDGYRLDAVKHIKFSFLKDWVDNARAATGKEMFTVGEYWQNDLGALNNYLAKVNYNQSLFDAPLHYNFYAASTGGGYYDMRNILNNTLVASNPTKAVTLVENHDTQPGQSLESTVQPWFKPLAYAFILTRSGGYPSVFYGDMYGTKGTTTREIPALKSKIEPLLKARKDYAYGTQRDYIDAPDVIGWTREGDSTKAKSGLATVITDGPGGSKRMYVGTSNAGEIWYDLTGNRTDKITIGSDGYATFPVNGGSVSVWVQQ

SEQ ID NO: 35396 - protein, 480 aa, Cytophaga sp.
NGTMMQYFEWYVPNDGQQWNRLRTDAPYLSSVGITAVWTPPAYKGMSQADVGYGPYDLYDLGEFNQKGTVRTKYGTKGELKSAVNTLHSNGIQVYGDVVMNHKAGADYTENVTAVEVNPSNRNQETSGEYNIQAWTGFNFPGRGTTYSNFKWQWFHFDGTDWDQSRSLSRIFKFTGKAWDWEVSSENGNYDYLMYADIDYDHPDVVNEMKKWGVWYANEVGLDGYRLDAVKHIKFSFLKDWVDNARAATGKEMFTVGEYWQNDLGALNNYLAKVNYNQSLFDAPLHYNFYAASTGGGYYDMRNILNNTLVASNPTKAVTLVENHDTQPGQSLESTVQPWFKPLAYAFILTRSGGYPSVFYGDMYGTKGTTTREIPALKSKIEPLLKARKDYAYGTQRDYIDNPDVIGWTREGDSTKAKSGLATVITDGPGGSKRMYVGTSNAGEIWYDLTGNRTDKITIGSDGYATFPVNGGSVSVWVQQ

SEQ ID NO: 35397 - protein, 480 aa, Cytophaga sp.
NGTMMQYFEWYVPNDGQQWNRLRTDAPYLSSVGITAVWTPPAYKGTSQADVGYGPYDLYDLGEFNQKGTVRTKYGTKGELKSAVNTLHSNGIQVYGDVVMNHKAGADYTENVTAVEVNPSNRNQETSGEYNIQAWTGFNFPGRGTTYSNFKWQWFHFDGTDWDQSRSLSRIFKFTGKAWDWEVSSENGNYDYLMYADIDYDHPDVVNEMKKWGVWYANEVGLDGYRLDAVKHIKFSFLKDWVDNARAATGKEMFTVGEYWQNDLGALNNYLAKVNYNQSLFDAPLHYNFYAASTGGGYYDMRNILNNTLVASNPTKAVTLVENHDTQPGQSLESTVQPWFKPLAYAFILTRSGGYPSVFYGDMYGTKGTTTREIPALKSKIEPLLKARKDYAYGLQRDYIDNPDVIGWTREGDSTKAKSGLATVITDGPGGSKRMYVGTSNAGEIWYDLTGNRTDKITIGSDGYATFPVNGGSVSVWVQQ

SEQ ID NO: 35398 - protein, 480 aa, Cytophaga sp.
NGTMMQYFEWYVPNDGQQWNRLRTDAPYLSSVGITAVWTPPAYKGTSQADVGYGPYDLYDLGEFNQKGTVRTKYGTKGELKSAVNTLHSNGIQVYGDVVMNHKAGADYTENVTAVEVNPSNRNQETSGEYNIQAWTGFNFPGRGTTYSNFKWQWFHFDGTDWDQSRSLSRIFKFTGKAWDWEVSSENGNYDYLMYADIDYDHPDVVNEMKKWGVWYANEVGLDGYRLDAVKHIKFSFLKDWVDNARAATGKEMFTVGEYWQNDLGALNNYLAKVNYNQSLFDAPLHYNFYAASTGGGYYDMRNILNNTLVASNPTKAVTIVENHDTQPGQSLESTVQPWFKPLAYAFILTRSGGYPSVFYGDMYGTKGTTTREIPALKSKIEPLLKARKDYAYGTQRDYIDNPDVIGWTREGDSTKAKSGLATVITDGPGGSKRMYVGTSNAGEIWYDLTGNRTDKITIGSDGYATFPVNGGSVSVWVQQ

SEQ ID NO: 35399 - protein, 480 aa, Cytophaga sp.
NGTMMQYFEWYVPNDGQQWNRLRTDAPYLSSVGITAVWTPPAYKGTSQADVGYGPYDLYDLGEFNQKGTVRTKYGTKGELKSAVNTLHSNGIQVYGDVVMNHKAGADYTENVTAVEVNPSNRNQETSHEYNIQAWTGFNFPGRGTTYSNFKWQWFHFDGTDWDQSRSLSRIFKFTGKAWDWEVSSENGNYDYLMYADIDYDHPDVVNEMKKWGVWYANEVGLDGYRLDAVKHIKFSFLKDWVDNARAATGKEMFTVGEYWQNDLGALNNYLAKVNYNQSLFDAPLHYNFYAASTGGGYYDMRNILNNTLVASNPTKAVTLVENHDTQPGQSLESTVQPWFKPLAYAFILTRSGGYPSVFYGDMYGTKGTTTREIPALKSKIEPLLKARKDYAYGTQRDYIDNPDVIGWTREGDSTKAKSGLATVITDGPGGSKRMYVGTSNAGEIWYDLTGNRTDKITIGSDGYATFPVNGGSVSVWVQQ

SEQ ID NO: 35400 - protein, 480 aa, Cytophaga sp.
NGTMMQYFEWYVPNDGQQWQRLRTDAPYLSSVGITAVWTPPAYKGTSQADVGYGPYDLYDLGEFNQKGTVRTKYGTKGELKSAVNTLHSNGIQVYGDVVMNHKAGADYTENVTAVEVNPSNRNQETSGEYNIQAWTGFNFPGRGTTYSNFKWQWFHFDGTDWDQSRSLSRIFKFTGKAWDWEVSSENGNYDYLMYADIDYDHPDVVNEMKKWGVWYANEVGLDGYRLDAVKHIKFSFLKDWVDNARAATGKEMFTVGEYWQNDLGALNNYLAKVNYNQSLFDAPLHYNFYAASTGGGYYDMRNILNNTLVASNPTKAVTLVENHDTQPGQSLESTVQPWFKPLAYAFILTRSGGYPSVFYGDMYGTKGTTTREIPALKSKIEPLLKARKDYAYGTQRDYIDNPDVIGWTREGDSTKAKSGLATVITDGPGGSKRMYVGTSNAGEIWYDLTGNRTDKITIGSDGYATFPVNGGSVSVWVQQ

SEQ ID NO: 35401 - protein, 480 aa, Cytophaga sp.
NGTMMQYFEWYVPNDGQQWNRLRTDAPYLSSVGITAVWTPPAYKGTSQGDVGYGPYDLYDLGEFNQKGTVRTKYGTKGELKSAVNTLHSNGIQVYGDVVMNHKAGADYTENVTAVEVNPSNRNQETSGEYNIQAWTGFNFPGRGTTYSNFKWQWFHFDGTDWDQSRSLSRIFKFTGKAWDWEVSSENGNYDYLMYADIDYDHPDVVNEMKKWGVWYANEVGLDGYRLDAVKHIKFSFLKDWVDNARAATGKEMFTVGEYWQNDLGALNNYLAKVNYNQSLFDAPLHYNFYAASTGGGYYDMRNILNNTLVASNPTKAVTLVENHDTQPGQSLESTVQPWFKPLAYAFILTRSGGYPSVFYGDMYGTKGTTTREIPALKSKIEPLLKARKDYAYGTQRDYIDNPDVIGWTREGDSTKAKSGLATVITDGPGGSKRMYVGTSNAGEIWYDLTGNRTDKITIGSDGYATFPVNGGSVSVWVQQ

SEQ ID NO: 35402 - protein, 480 aa, Cytophaga sp.
NGTMMQYFEWYVPNDGQQWNRLRTDAPYLSSVGITAVWTPPAYKGTSQADVGYGPYDLYDLGEFNQKGTVRTKYGTKGELKSAVNTLHSNGIQVYGDVVMNHKAGADYTENVTAVEVNPSNRNQETSGEYNIQAWTGFNFPGRGTTYSNFKWQWFHFDGTDWDQSRSLSRIFKFTGKAWDWEVSSENGNYDYLMYADIDYDHPDVVNEMKKWGVWYANEVGLDGYRLDAVKHIKFSFLKDWVDNARAATGKEMFTVGEYWQNDLGALNNYLAKVNYNQSLFDAPLHYNFYAASTGGGYYDMRNILNNTLVASNPTKAVTLVENHDTQPGQSLESTVQPWFKPLAYAFILTRSGGYPSVFYGDMYGTKGTTTREIPALKSKIEPLLKARKDYAYGTQRDYIDQPDVIGWTREGDSTKAKSGLATVITDGPGGSKRMYVGTSNAGEIWYDLTGNRTDKITIGSDGYATFPVNGGSVSVWVQQ

SEQ ID NO: 35403 - protein, 480 aa, Cytophaga sp.
NGTMMQYFEWYVPNDGQQWNRLRTDAPYLSSVGITAVWTPPAYKGTSQADVGYGPYDLYDLGEFNQKGTVRTKYGTKGELKSAVNTLHSNGIQVYGDVVMNHKAGADYTENVTAVEVNPSNRNQETSGEYNIQAWTGFNFPGRGTTYSNFKWQWFHFDGTDWDQSRSLSRIFKFTGKAWDWEVSSENGNYDYLMYADIDYDHPDVVNEMKKWGVWYANEVGLDGYRLDAVKHIKFSFLKDWVDNARAATGKEMFTVGEYWQNDLGALNNYLAKVEYNQSLFDAPLHYNFYAASTGGGYYDMRNILNNTLVASNPTKAVTLVENHDTQPGQSLESTVQPWFKPLAYAFILTRSGGYPSVFYGDMYGTKGTTTREIPALKSKIEPLLKARKDYAYGTQRDYIDNPDVIGWTREGDSTKAKSGLATVITDGPGGSKRMYVGTSNAGEIWYDLTGNRTDKITIGSDGYATFPVNGGSVSVWVQQ

SEQ ID NO: 35404 - protein, 480 aa, Cytophaga sp.
NGTMMQYFEWYVPNDGQQWNRLRTDAPYLSSVGITAVWTPPAYKGTSQADVGYGPYDLYDLGEFNQKGTVRTKYGTKGELKSAVNTLHSNGIQVYGDVVMNHKAGADYTENVTAVEVNPSNRNQETSGEYNIQAWTGFNFPGRGTTYSNFKWQWFHFDGTDWDQSRSLSRIFKFTGKAWDWEVSSENGNYDYLMYADIDYDHPDVVNEMKKWGVWYANEVGLDGYRLDAVKHIKFSFLKDWVDNARAATGKEMFTVGEYWQNDLGALNNYLAKVNYNQSLFDAPLHYNFYAASTGGGYYDMRNILNNTLVALNPTKAVTLVENHDTQPGQSLESTVQPWFKPLAYAFILTRSGGYPSVFYGDMYGTKGTTTREIPALKSKIEPLLKARKDYAYGTQRDYIDNPDVIGWTREGDSTKAKSGLATVITDGPGGSKRMYVGTSNAGEIWYDLTGNRTDKITIGSDGYATFPVNGGSVSVWVQQ

SEQ ID NO: 35405 - protein, 480 aa, Cytophaga sp.
NGTMMQYFEWYVPNDGQQWNRLRTDAPYLSSVGITAVWTPPAYKGTSQADVGYGPYDLYDLGEFNQKGTVRTKYGTKGELKSAVNTLHSNGIQVYGDVVMNHKAGADYTENVTAVEVNPSNRNQETSGEYNIQAWTGFNFPGRGTTYSNFKWQWFHFDGTDWDQSRSLSRIFKFTGKAWDWEVSSENGNYDYLMYADIDYDHPDVVCEMKKWGVWYANEVGLDGYRLDAVKHIKFSFLKDWVDNARAATGKEMFTVGEYWQNDLGALNNYLAKVNYNQSLFDAPLHYNFYAASTGGGYYDMRNILNNTLVASNPTKAVTLVENHDTQPGQSLESTVQPWFKPLAYAFILTRSGGYPSVFYGDMYGTKGTTTREIPALKSKIEPLLKARKDYAYGTQRDYIDNPDVIGWTREGDSTKAKSGLATVITDGPGGSKRMYVGTSNAGEIWYDLTGNRTDKITIGSDGYATFPVNGGSVSVWVQQ

SEQ ID NO: 35406 - protein, 480 aa, Cytophaga sp.
NGTMMQYFEWYVPNDGQQWNRLRTDAPYLSSVGITAVWTPPAYKGTSQADVGYGPYDLYDLGEFNQKGTVRTKYGTKGELKSAVNTLHSNGIQVYGDVVMNHKAGADYTENVTAVEVNPSNRNQETSGEYNIQAWTGFNFPGRGTTYSNFKWQWFHFDGTDWDQSRSLSRIFKFTGKAWDWEVSSENGNYDYLMYADIDYDHPDVVNEMKKWGVWYANEVGLDGYRLDAVKHIKFSFLKDWVDNARAATGKEMFTVGEYWQNDLGALNNYLAKVNYNQSLFDAPLHYNFYAASTGGGYYDMRNILNNTLVAENPTKAVTLVENHDTQPGQSLESTVQPWFKPLAYAFILTRSGGYPSVFYGDMYGTKGTTTREIPALKSKIEPLLKARKDYAYGTQRDYIDNPDVIGWTREGDSTKAKSGLATVITDGPGGSKRMYVGTSNAGEIWYDLTGNRTDKITIGSDGYATFPVNGGSVSVWVQQ

SEQ ID NO: 35407 - protein, 480 aa, Cytophaga sp.
NGTMMQYFEWYVPNDGQQWNRLRTDAPYLSSVGITAVWTPPAYKGTSQADVGYGPYDLYDLGEFNQKGTVRTKYGTKGELKSAVNTLHSNGIQVYGDVVMNHKAGADYTENVTAVEVNPSNRNQETSGEYNIQAWTGFNFPGRGTTYSNFKWQWFHFDGTDWDQSRSLSRIFKFTGKAWDWEVSSENGNYDYLMYADIDYDHPDVVNEMKKWGVWYANEVGLDGYRLDAVKHIKFSFLKDWVDNARAATGKEMFTVGEYWQNDLGALNNYLAKVNYNQSLFDAPLHYNFYAASTGGGYYDMRNILNNTLVASNPTKAVTLVENHDTQPGQSLESTVQPWFKPLAYAFILTRSGGYPSVFYGDMYGTKGTTTREIPALKSKIEPLLKARKDYAYGTQRDYIDNPDVIGWTREGDSTGAKSGLATVITDGPGGSKRMYVGTSNAGEIWYDLTGNRTDKITIGSDGYATFPVNGGSVSVWVQQ

SEQ ID NO: 35408 - protein, 480 aa, Cytophaga sp.
NGTMMQYFEWYVPNDGQQWNRLRTDAPYLSSVGITAVWTPPAYKGTSQADVGYGPYDLYDLGEFNQKGTVRTKYGTKGELKSAVNTLHSNGIQVYGDVVMNHKAGADYTENVTAVEVNPSNRNQETSGEYNIQAWTGFNFPGRGTTYSNFKWQWFHFDGTDWDQSRSLSRIFKFTGKAWDWEVSSENGNYDYLMYADIDYDHPDVVNEMKKWGVWYANEVGLDGYRLDAVKHIKFSFLKDWVDNARAATGKEMFTVGEYWQNDLGALNNYLAKVNYNQSLFDAPLHYNFYAASTGGGYYDMRNILNNTLVASNPTKAVTLVENHDTQPGQSLESTVQPWFKPLAYAFILTRSGGYPSVFYGDMYGTKGTTTREIPALKSKIEPLLKARKDYAYGTQRDYIDNPDVIGWTREGDSTKAKSGLATVITDGPGGSKRMYVGASNAGEIWYDLTGNRTDKITIGSDGYATFPVNGGSVSVWVQQ

SEQ ID NO: 35409 - protein, 480 aa, Cytophaga sp.
NGTMMQYFEWYVPNDGQQWNRLRTDAPYLSSVGITAVWTPPAYKGTSQADVGYGPYDLYDLGEFNQKGTVRTKYGTKGELKSAVNTLHSNGIQVYGDVVMNHKAGADYTENVTAVEVNPSNRNQETSGEYNIQAWTGFNFPGRGTTYSNFKWQWFHFDGTDWDQSRSLSRIFKFTGKAWDWEVSSENGNYDYLMYADIDYDHPDVVNEMKKWGVWYANEVGLDGYRLDAVKHIKFSFLKDWVDNARAATGKEMFTVGEYWQNDLGALNNYLAKVNYNQSLFDAPLHYNFYAASTGGGYYDMRNILNNTLVASNPTKAVTLVENHDTQPGQSLESTVQPWFKPLAYAFILTRSGGYPSVFYGDMYGTKGTTTREIPALKSKIEPLLKARKDYAYGTQRDYIDNPDVIGWTREGDSTKAKSGLATVITDGPGGSKRMYVGTSNAGEIWYDLTGNRTDKITIGSDGYATFPVNRGSVSVWVQQ

SEQ ID NO: 35410 - protein, 480 aa, Cytophaga sp.
NGTMMQYFEWYVPNDGQQWNRLRTDAPYLSSVGITAVWTPPAYKGTSQADVGYGPYDLYDLGEFNQKGTVRTKYGTKGELKSAVNTLHSNGIQVYGDVVMNHKAGADYTENVTAVEVNPSNRNQETSGEYNIQAWTGFNFPGRGTTYSNFKWLWFHFDGTDWDQSRSLSRIFKFTGKAWDWEVSSENGNYDYLMYADIDYDHPDVVNEMKKWGVWYANEVGLDGYRLDAVKHIKFSFLKDWVDNARAATGKEMFTVGEYWQNDLGALNNYLAKVNYNQSLFDAPLHYNFYAASTGGGYYDMRNILNNTLVASNPTKAVTLVENHDTQPGQSLESTVQPWFKPLAYAFILTRSGGYPSVFYGDMYGTKGTTTREIPALKSKIEPLLKARKDYAYGTQRDYIDNPDVIGWTREGDSTKAKSGLATVITDGPGGSKRMYVGTSNAGEIWYDLTGNRTDKITIGSDGYATFPVNGGSVSVWVQQ

SEQ ID NO: 35411 - protein, 480 aa, Cytophaga sp.
NGTMMQYFEWYVPNDGQQWNRLRTDAPYLSSVGITAVWTPPAYKGTSQADVGYGPYDLYDLGEFNQKGTVRTKYGTKGELKSAVNTLHSNGIQVYGDVVMNHKAGADGTENVTAVEVNPSNRNQETSGEYNIQAWTGFNFPGRGTTYSNFKWQWFHFDGTDWDQSRSLSRIFKFTGKAWDWEVSSENGNYDYLMYADIDYDHPDVVNEMKKWGVWYANEVGLDGYRLDAVKHIKFSFLKDWVDNARAATGKEMFTVGEYWQNDLGALNNYLAKVNYNQSLFDAPLHYNFYAASTGGGYYDMRNILNNTLVASNPTKAVTLVENHDTQPGQSLESTVQPWFKPLAYAFILTRSGGYPSVFYGDMYGTKGTTTREIPALKSKIEPLLKARKDYAYGTQRDYIDNPDVIGWTREGDSTKAKSGLATVITDGPGGSKRMYVGTSNAGEIWYDLTGNRTDKITIGSDGYATFPVNGGSVSVWVQQ

SEQ ID NO: 35412 - protein, 480 aa, Cytophaga sp.
NGTMMQYFEWYVPNDGQQWNRLRTDAPYLSSVGITAVWTPPAYKGTSQADVGYGPYDLYDLGEFNQKGTVRTKYGTKGELKSAVNTLHSNGIQVYGDVVMNHKAGADYTENVTAVEVNPSNRNQETSGEYNIQAWTGFQFPGRGTTYSNFKWQWFHFDGTDWDQSRSLSRIFKFTGKAWDWEVSSENGNYDYLMYADIDYDHPDVVNEMKKWGVWYANEVGLDGYRLDAVKHIKFSFLKDWVDNARAATGKEMFTVGEYWQNDLGALNNYLAKVNYNQSLFDAPLHYNFYAASTGGGYYDMRNILNNTLVASNPTKAVTLVENHDTQPGQSLESTVQPWFKPLAYAFILTRSGGYPSVFYGDMYGTKGTTTREIPALKSKIEPLLKARKDYAYGTQRDYIDNPDVIGWTREGDSTKAKSGLATVITDGPGGSKRMYVGTSNAGEIWYDLTGNRTDKITIGSDGYATFPVNGGSVSVWVQQ

SEQ ID NO: 35413 - protein, 480 aa, Cytophaga sp.
NGTMMQYFEWYVPNDGQQWNRLRIDAPYLSSVGITAVWTPPAYKGTSQADVGYGPYDLYDLGEFNQKGTVRTKYGTKGELKSAVNTLHSNGIQVYGDVVMNHKAGADYTENVTAVEVNPSNRNQETSGEYNIQAWTGFNFPGRGTTYSNFKWQWFHFDGTDWDQSRSLSRIFKFTGKAWDWEVSSENGNYDYLMYADIDYDHPDVVNEMKKWGVWYANEVGLDGYRLDAVKHIKFSFLKDWVDNARAATGKEMFTVGEYWQNDLGALNNYLAKVNYNQSLFDAPLHYNFYAASTGGGYYDMRNILNNTLVASNPTKAVTLVENHDTQPGQSLESTVQPWFKPLAYAFILTRSGGYPSVFYGDMYGTKGTTTREIPALKSKIEPLLKARKDYAYGTQRDYIDNPDVIGWTREGDSTKAKSGLATVITDGPGGSKRMYVGTSNAGEIWYDLTGNRTDKITIGSDGYATFPVNGGSVSVWVQQ

SEQ ID NO: 35414 - protein, 480 aa, Cytophaga sp.
NGTMMQYFEWYVPNDGQQWNRLRTDAPYLSSVGITAVWTPPAYKGTSQADVGYGPYDLYDLGEFNQKGTVRTKYGTKGELKSAVNTLHSNGIQVYGDVVMNHKAGADYTENVTAVEVNPSNRNQETSGEYNIQAWTGFNFPGRGTTYSNFKWQWFHFDGTDWDQSRSLSRIFKFTGKAWDWEVSSENGNYDYLMYADIDYDHPDVVNEMKKWGVWYANEVGLDGYRLDAVKHIKFSFLKDWVDNARAATGKEMFTVGEYWQNDLGALNNYLAKVNYNQSLFDAPLHYNFYAASTGGGYYDMRNILNNTLVASNPTKAVTLVENHDTQPGQSLESTVQPWFKPLAYAFILTRSGGYPSVFYGDMYGTKGTTTREIPALKSKIEPLLKARKDYAYGTQRDYIDNPDVIGWTREGDSTKAKSGLATVITDGPGGSKRMYVGVSNAGEIWYDLTGNRTDKITIGSDGYATFPVNGGSVSVWVQQ

SEQ ID NO: 35415 - protein, 480 aa, Cytophaga sp.
NGTMMQYFEWYVPNDGQQWNRLRTDAPYLSSVGITAVWTPPAYKGTSQADVGYGPYDLYDLGEFNQKGTVRTKYGTKGELKSAVNTLHSNGIQVYGDVVMNHKAGADYTENVTAVEVNPSNRNQETSGEYNIQAWTGFNFPGRGTTYSNFKWQWFHFDGTDWDQSRSLSRIFKFTGKAWDWEVSSENGNYDYLMYADIDYDHPDVVNEMKKWGVWYANEVGLDGYRLDAVKHIKFSFLKDWVDNARFATGKEMFTVGEYWQNDLGALNNYLAKVNYNQSLFDAPLHYNFYAASTGGGYYDMRNILNNTLVASNPTKAVTLVENHDTQPGQSLESTVQPWFKPLAYAFILTRSGGYPSVFYGDMYGTKGTTTREIPALKSKIEPLLKARKDYAYGTQRDYIDNPDVIGWTREGDSTKAKSGLATVITDGPGGSKRMYVGTSNAGEIWYDLTGNRTDKITIGSDGYATFPVNGGSVSVWVQQ

SEQ ID NO: 35416 - protein, 480 aa, Cytophaga sp.
NGTMMQYFEWYVPNDGQQWNRLRTDAPYLSSVGITAVWTPPAYKGTSQADVGYGPYDLYDLGEFNQKGTVRTKYGTKGELKSAVNTLHSNGIQVYGDVVMNHKAGADYTENVTAVEVNPSNRNQETSGEYNIQAWTGFNFPGRGTTYSNFKWQWFHFDGTDWDGSRSLSRIFKFTGKAWDWEVSSENGNYDYLMYADIDYDHPDVVNEMKKWGVWYANEVGLDGYRLDAVKHIKFSFLKDWVDNARAATGKEMFTVGEYWQNDLGALNNYLAKVNYNQSLFDAPLHYNFYAASTGGGYYDMRNILNNTLVASNPTKAVTLVENHDTQPGQSLESTVQPWFKPLAYAFILTRSGGYPSVFYGDMYGTKGTTTREIPALKSKIEPLLKARKDYAYGTQRDYIDNPDVIGWTREGDSTKAKSGLATVITDGPGGSKRMYVGTSNAGEIWYDLTGNRTDKITIGSDGYATFPVNGGSVSVWVQQ

SEQ ID NO: 35417 - protein, 480 aa, Cytophaga sp.
NGTMMQYFEWYVPNDGQQWNRLRTDAPYLSSVGITAVWTPPAYKGTSQADVGYGPYDLYDLGEFNQKGTVRTKYGTKGELKSAVNTLHSNGIQVYGDVVMNHKAGADYTENVTAVEVNPSNRNQETSGEYNIQAWTGFNFPGRGTTYSNFKWQWFHFDGTDWDQSRSLSRIFKFTGKAWDWEVSSENGNYDYLMYADIDYDHPDVVNEMKKWGVWYANEVGLDGYRLDAVKHIKFSFLKDWVDNARAATGKEMFTVGEYWQNDLGALNNYLAKVNYNQSLFDAPLHYNFYAASTGGGYYDMRNILNNTLVASNPTKAVTLVENHDTQPGQSLESTVQPWFKPLAYAFILTRSGGYPSVFYGDMYGTKGTTTREIPALKSKIEPLLKARKDYAYGTQRDYIDNPDVIGWTREGDSTKAKSGLATVITDGPGGSKRMYVGTSNAGEIWYDLTGNRLDKITIGSDGYATFPVNGGSVSVWVQQ

SEQ ID NO: 35418 - protein, 480 aa, Cytophaga sp.
NGTMMQYFEWYVPNDGQQWNRLRTDAPYLSSVGITAVWTPPAYKGTSQADVGYGPYDLYDLGEFNQKGTVRTKYGTKGELKSAVQTLHSNGIQVYGDVVMNHKAGADYTENVTAVEVNPSNRNQETSGEYNIQAWTGFNFPGRGTTYSNFKWQWFHFDGTDWDQSRSLSRIFKFTGKAWDWEVSSENGNYDYLMYADIDYDHPDVVNEMKKWGVWYANEVGLDGYRLDAVKHIKFSFLKDWVDNARAATGKEMFTVGEYWQNDLGALNNYLAKVNYNQSLFDAPLHYNFYAASTGGGYYDMRNILNNTLVASNPTKAVTLVENHDTQPGQSLESTVQPWFKPLAYAFILTRSGGYPSVFYGDMYGTKGTTTREIPALKSKIEPLLKARKDYAYGTQRDYIDNPDVIGWTREGDSTKAKSGLATVITDGPGGSKRMYVGTSNAGEIWYDLTGNRTDKITIGSDGYATFPVNGGSVSVWVQQ

SEQ ID NO: 35419 - protein, 480 aa, Cytophaga sp.
NGTMMQYFEWYVPNDGQQWNRLRTDAPYLSSVGITAVWTPPAYKGTSQADVGYGPYDLYDLGEFNQKGTVRTKYGTKGELKSAVNTLHSNGIQVYGDVVMNHKAGADYTENVTAVEVNPSNRNQETSGEYNIQAWTGFNFPGRGTTYSNFKWQWFHFDGTDWDQSRSLSRIFKFTGKAWDWEVSSENGNYDYLMYADIDYDHPDVVNEMKKWGVWYANEVGLDGYRLDAVKHIKFSFLKDWVDGARAATGKEMFTVGEYWQNDLGALNNYLAKVNYNQSLFDAPLHYNFYAASTGGGYYDMRNILNNTLVASNPTKAVTLVENHDTQPGQSLESTVQPWFKPLAYAFILTRSGGYPSVFYGDMYGTKGTTTREIPALKSKIEPLLKARKDYAYGTQRDYIDNPDVIGWTREGDSTKAKSGLATVITDGPGGSKRMYVGTSNAGEIWYDLTGNRTDKITIGSDGYATFPVNGGSVSVWVQQ

SEQ ID NO: 35420 - protein, 480 aa, Cytophaga sp.
NGTMMQYFEWYVPNDGQQWNRLRTDAPYLSSVGITAVWTPPAYKGTSQADVGYGPYDLYDLGEFNQKGTVRTKYGTKGELKSAVNTLHSNGIQVYGDVVMNHKAGADYTENVTAVEVNPSNRNQETSGEYNIQAWTGFNFPGRGTTYSNFKWQWCHFDGTDWDQSRSLSRIFKFTGKAWDWEVSSENGNYDYLMYADIDYDHPDVVNEMKKWGVWYANEVGLDGYRLDAVKHIKFSFLKDWVDNARAATGKEMFTVGEYWQNDLGALNNYLAKVNYNQSLFDAPLHYNFYAASTGGGYYDMRNILNNTLVASNPTKAVTLVENHDTQPGQSLESTVQPWFKPLAYAFILTRSGGYPSVFYGDMYGTKGTTTREIPALKSKIEPLLKARKDYAYGTQRDYIDNPDVIGWTREGDSTKAKSGLATVITDGPGGSKRMYVGTSNAGEIWYDLTGNRTDKITIGSDGYATFPVNGGSVSVWVQQ

SEQ ID NO: 35421 - protein, 480 aa, Cytophaga sp.
NGTMMQYFEWYVPNDGQQWNRLKTDAPYLSSVGITAVWTPPAYKGTSQADVGYGPYDLYDLGEFNQKGTVRTKYGTKGELKSAVNTLHSNGIQVYGDVVMNHKAGADYTENVTAVEVNPSNRNQETSGEYNIQAWTGFNFPGRGTTYSNFKWQWFHFDGTDWDQSRSLSRIFKFTGKAWDWEVSSENGNYDYLMYADIDYDHPDVVNEMKKWGVWYANEVGLDGYRLDAVKHIKFSFLKDWVDNARAATGKEMFTVGEYWQNDLGALNNYLAKVNYNQSLFDAPLHYNFYAASTGGGYYDMRNILNNTLVASNPTKAVTLVENHDTQPGQSLESTVQPWFKPLAYAFILTRSGGYPSVFYGDMYGTKGTTTREIPALKSKIEPLLKARKDYAYGTQRDYIDNPDVIGWTREGDSTKAKSGLATVITDGPGGSKRMYVGTSNAGEIWYDLTGNRTDKITIGSDGYATFPVNGGSVSVWVQQ

SEQ ID NO: 35422 - protein, 480 aa, Cytophaga sp.
NGTMMQYFEWYVPNDGQQWNRLRTDAPYLSSVGITAVWTPPAYKGTSQADVGYGPYDLYDLGEFNQKGTVRTKYGTKGELKSAVNTLHSNGIQVYGDVVMNHKAGADYTENVTAVEVNPSNRNQETSGEYNIQAWTGFNFPGRGYTYSNFKWQWFHFDGTDWDQSRSLSRIFKFTGKAWDWEVSSENGNYDYLMYADIDYDHPDVVNEMKKWGVWYANEVGLDGYRLDAVKHIKFSFLKDWVDNARAATGKEMFTVGEYWQNDLGALNNYLAKVNYNQSLFDAPLHYNFYAASTGGGYYDMRNILNNTLVASNPTKAVTLVENHDTQPGQSLESTVQPWFKPLAYAFILTRSGGYPSVFYGDMYGTKGTTTREIPALKSKIEPLLKARKDYAYGTQRDYIDNPDVIGWTREGDSTKAKSGLATVITDGPGGSKRMYVGTSNAGEIWYDLTGNRTDKITIGSDGYATFPVNGGSVSVWVQQ

SEQ ID NO: 35423 - protein, 480 aa, Cytophaga sp.
NGTMMQYFEWYVPNDGQQWNRLRTDAPYLSSVGITAVWTPPAYKGTSQADVGYGPYDLYDLGEFNQKGTVRTKYGTKGELKSAVNTLHSNGIQVYGDVVMNHKAGADYTENVTAVEVNPSNRNQETSGEYNIQAWTGFNFPGRGTTYSNFKWQWFHFDGTDWDQSRSLSRIFKFTGKAWDWEVSSENGNYDYLMYADIDYDHPDVVNEMKKWGVWYANEVGLDGYRLDAVKHIKFSFLKDWVDNARAATGKEMFTVGEYWQNDLGALNNYLAKVNYNQSLFDAPLHYNFYAASTGGGYYDMRNILNNTLVATNPTKAVTLVENHDTQPGQSLESTVQPWFKPLAYAFILTRSGGYPSVFYGDMYGTKGTTTREIPALKSKIEPLLKARKDYAYGTQRDYIDNPDVIGWTREGDSTKAKSGLATVITDGPGGSKRMYVGTSNAGEIWYDLTGNRTDKITIGSDGYATFPVNGGSVSVWVQQ

SEQ ID NO: 35424 - protein, 480 aa, Cytophaga sp.
NGTMMQYFEWYVPNDGQQWNRLRTDAPYLSSVGITAVWTPPAYKGTSQADVGYGPYDLYDLGEFNQKGTVRTKYGTKGELKSAVNTLHSNGIQVYGDVVMNHKAGADYTENVTAVEVNPSNRNQETSGEYNIQAWTGFNFPGRGTTYSNFKWQWFHFDGTDWDQSRSLSRIFKFTGKAWDWEVSSENGNYDYLMYADIDYDHPDVVNEMKKWGVWYANEVGLDGYRLDAVKHIKFSFLKDWVDNARAATGKEMFTVGEYWQNDLGALNNYLAKVNYNQSLFDAPLHYNFYAASTGGGYYDMRNILNNTLVASNPTKAVTLVENHDTQPGQSLESTVQPWFKPLAYAFILTRSGGYPSVFYGDMYGTKGTTTREIPALKSKIEPLLKARKDYAYGTQRDYIDNPDVIGWTREGDSTKAKSGLATVITDGPGGSKRMYVGTSNAGEIWYDLTGNRTDKITIGSDGYAFFPVNGGSVSVWVQQ

SEQ ID NO: 35425 - protein, 480 aa, Cytophaga sp.
NGTMMQYFEWYVPNDGQQWNRLRTDAPYLSSVGITAVWTPPAYKGTSQADVGYGPYDLYDLGEFNQKGTVRTKYGTKGELKSAVNTLHSNGIQVYGDVVMNHKAGADYTENVTAVEVNPSNRNQETSGEYNIQAWTGFNFPGRGTTYSNFKWQWFHFDGTDWDQSRSLSRIFKFTGKAWDWEVSSENGNYDYLMYADIDYDHPDVVNEMKKWGVWYANEVGLDGYRLDAVKHIKFSFLKDWVDNARAATGKEMFTVGEYWQNDLGALNNYLAKVNYNQSLFDAPLHYNFYAASTGGGYYDMRNILNNTLVAANPTKAVTLVENHDTQPGQSLESTVQPWFKPLAYAFILTRSGGYPSVFYGDMYGTKGTTTREIPALKSKIEPLLKARKDYAYGTQRDYIDNPDVIGWTREGDSTKAKSGLATVITDGPGGSKRMYVGTSNAGEIWYDLTGNRTDKITIGSDGYATFPVNGGSVSVWVQQ

SEQ ID NO: 35426 - protein, 480 aa, Cytophaga sp.
NGTMMQYFEWYVPNDGQQWNRLRTDAPYLSSVGITAVWTPPAYKGTSQADVGYGPYDLYDLGEFNQKGTVRTKYGTKWELKSAVNTLHSNGIQVYGDVVMNHKAGADYTENVTAVEVNPSNRNQETSGEYNIQAWTGFNFPGRGTTYSNFKWQWFHFDGTDWDQSRSLSRIFKFTGKAWDWEVSSENGNYDYLMYADIDYDHPDVVNEMKKWGVWYANEVGLDGYRLDAVKHIKFSFLKDWVDNARAATGKEMFTVGEYWQNDLGALNNYLAKVNYNQSLFDAPLHYNFYAASTGGGYYDMRNILNNTLVASNPTKAVTLVENHDTQPGQSLESTVQPWFKPLAYAFILTRSGGYPSVFYGDMYGTKGTTTREIPALKSKIEPLLKARKDYAYGTQRDYIDNPDVIGWTREGDSTKAKSGLATVITDGPGGSKRMYVGTSNAGEIWYDLTGNRTDKITIGSDGYATFPVNGGSVSVWVQQ

SEQ ID NO: 35427 - protein, 480 aa, Cytophaga sp.
NGTMMQYFEWYVPNDGQQWNRLRTDAPYLSSVGITAVWTPPAYKGTSQADVGYGPYDLYDLGEFNQKGTVRTKYGTKMELKSAVNTLHSNGIQVYGDVVMNHKAGADYTENVTAVEVNPSNRNQETSGEYNIQAWTGFNFPGRGTTYSNFKWQWFHFDGTDWDQSRSLSRIFKFTGKAWDWEVSSENGNYDYLMYADIDYDHPDVVNEMKKWGVWYANEVGLDGYRLDAVKHIKFSFLKDWVDNARAATGKEMFTVGEYWQNDLGALNNYLAKVNYNQSLFDAPLHYNFYAASTGGGYYDMRNILNNTLVASNPTKAVTLVENHDTQPGQSLESTVQPWFKPLAYAFILTRSGGYPSVFYGDMYGTKGTTTREIPALKSKIEPLLKARKDYAYGTQRDYIDNPDVIGWTREGDSTKAKSGLATVITDGPGGSKRMYVGTSNAGEIWYDLTGNRTDKITIGSDGYATFPVNGGSVSVWVQQ

SEQ ID NO: 35428 - protein, 480 aa, Cytophaga sp.
NGTMMQYFEWYVPNDGQQWNRLRTDAPYLSSVGITAVWTPPAYKGTSQADVGYGPYDLYDLGEFNQKGTVRTKYGTKGELKSAVNTLHSNGIQVYGDVVMNHKAGADYTENVTAVEVNPSNRNQETSGEYNIQAWTGFNFPGRGTTYSNFKWQWFHFDGTDWDQSRSLSRIFKFTGKAWDWEVSSENGNYDYLMYADIDYDHPDVVNEMKKWGVWYANEVGLDGYRLDAVKHIKFSFLKDWVDNARAATGKEMFTVGEYWQNDLGALNNYLAKVNYNQSLFDAPLHYNFYAASTGGGYYDMRNILNNTLVASNPDKAVTLVENHDTQPGQSLESTVQPWFKPLAYAFILTRSGGYPSVFYGDMYGTKGTTTREIPALKSKIEPLLKARKDYAYGTQRDYIDNPDVIGWTREGDSTKAKSGLATVITDGPGGSKRMYVGTSNAGEIWYDLTGNRTDKITIGSDGYATFPVNGGSVSVWVQQ

SEQ ID NO: 35429 - protein, 480 aa, Cytophaga sp.
NGTMMQYFEWYVPNDGQQWNRLRTDAPYLSSVGITAVWTPPAYKGTSQADCGYGPYDLYDLGEFNQKGTVRTKYGTKGELKSAVNTLHSNGIQVYGDVVMNHKAGADYTENVTAVEVNPSNRNQETSGEYNIQAWTGFNFPGRGTTYSNFKWQWFHFDGTDWDQSRSLSRIFKFTGKAWDWEVSSENGNYDYLMYADIDYDHPDVVNEMKKWGVWYANEVGLDGYRLDAVKHIKFSFLKDWVDNARAATGKEMFTVGEYWQNDLGALNNYLAKVNYNQSLFDAPLHYNFYAASTGGGYYDMRNILNNTLVASNPTKAVTLVENHDTQPGQSLESTVQPWFKPLAYAFILTRSGGYPSVFYGDMYGTKGTTTREIPALKSKIEPLLKARKDYAYGTQRDYIDNPDVIGWTREGDSTKAKSGLATVITDGPGGSKRMYVGTSNAGEIWYDLTGNRTDKITIGSDGYATFPVNGGSVSVWVQQ

SEQ ID NO: 35430 - protein, 480 aa, Cytophaga sp.
NGTMMQYFEWYVPNDGQQWNRLRTDAPYLSSVGITAVWTPPAYKGTSQADVGYGPYDLYDLGEFNQKGTVRTKYGTKGELKSAVNTLHSNGIQVYGDVVMNHKAGADYTENVTAVEVNPSNRNQETSGEYNIQAWTGFNFPGRGTTYSNFKWQWFHFDGTDWDQSRSLSRIFKFTGKAWDWEVSSENGNYDYLMYADIDYDHPDVVNEMKKWGVWYANEVGLDGYRLDAVKHIKFSFLKDWVDNARAATGKEMFTVGEYWQNDLGALNNYLAKVNYNQSLFDAPLHYNFYAASTGGGYYDMRNILNNTLVASNPTKAVTLVENHDTQPGQSLESTVQPWFKPLAYAFILTRSGGYPSVFYGDMYGTKGTTTREIPALKSKIEPLLKARKDYAYGTQRDYIDNPDVIGWTREGDSTKAKSGLATVITDGPGGSKRMYVGQSNAGEIWYDLTGNRTDKITIGSDGYATFPVNGGSVSVWVQQ

SEQ ID NO: 35431 - protein, 480 aa, Cytophaga sp.
NGTMMQYFEWYVPNDGQQWNRLRTDAPYLSSVGITAVWTPPAYKGTSQADVGYGPYDLYDLGEFNQKGTVRTKYGTKGELKSAVNTLHSNGIQVYGDVVMNHKAGADYTENVTAVEVNPSNRNQETSGEYNIQAWTGFNFPGRGTTYSNFKWQWFHFDGTDWDQSRSLSRIFKFTGKAWDWEVSSENGNYDYLMYADIDYDHPDVVNEMKKWGVWYANEVGLDGYRLDAVKHIKFSFLKDWVDNARAATGKEMFTVGEYWQNDLGALNNYLAKVNYNQSAFDAPLHYNFYAASTGGGYYDMRNILNNTLVASNPTKAVTLVENHDTQPGQSLESTVQPWFKPLAYAFILTRSGGYPSVFYGDMYGTKGTTTREIPALKSKIEPLLKARKDYAYGTQRDYIDNPDVIGWTREGDSTKAKSGLATVITDGPGGSKRMYVGTSNAGEIWYDLTGNRTDKITIGSDGYATFPVNGGSVSVWVQQ

SEQ ID NO: 35432 - protein, 480 aa, Cytophaga sp.
NGTMMQYFEWYVPNDGQQWNRLRTDAPYLSSVGITAVWTPPAYKGTSQADVGYGPYDLYDLGEFNQKGTVRTKYGTKGELKSAVNTLHSNGIQVYGDVVMNHKAGADYTENVTAVEVNPHNRNQETSGEYNIQAWTGFNFPGRGTTYSNFKWQWFHFDGTDWDQSRSLSRIFKFTGKAWDWEVSSENGNYDYLMYADIDYDHPDVVNEMKKWGVWYANEVGLDGYRLDAVKHIKFSFLKDWVDNARAATGKEMFTVGEYWQNDLGALNNYLAKVNYNQSLFDAPLHYNFYAASTGGGYYDMRNILNNTLVASNPTKAVTLVENHDTQPGQSLESTVQPWFKPLAYAFILTRSGGYPSVFYGDMYGTKGTTTREIPALKSKIEPLLKARKDYAYGTQRDYIDNPDVIGWTREGDSTKAKSGLATVITDGPGGSKRMYVGTSNAGEIWYDLTGNRTDKITIGSDGYATFPVNGGSVSVWVQQ

SEQ ID NO: 35433 - protein, 480 aa, Cytophaga sp.
NGTMMQYFEWYVPNDGQQWNRLRTDAPYLSSVGITAVWTPPAYKGTSQADVGYGPYDLYDLGEFNQKGTVRTKYGTKGELKSAVNTLHSNGIQVYGDVVMNHKAGADYTENVTAVEVNPSNRNQETSGEYNIQAWTGFNFPGRGTTYSNFKWQWFHFDGTDWDQSRSLSRIFKFTGKAWDWEVSSENGNYDYLMYADIDYDHPDVVNEMKKWGVWYANEVGLDGYRLDAVKHIKFSFLSDWVDNARAATGKEMFTVGEYWQNDLGALNNYLAKVNYNQSLFDAPLHYNFYAASTGGGYYDMRNILNNTLVASNPTKAVTLVENHDTQPGQSLESTVQPWFKPLAYAFILTRSGGYPSVFYGDMYGTKGTTTREIPALKSKIEPLLKARKDYAYGTQRDYIDNPDVIGWTREGDSTKAKSGLATVITDGPGGSKRMYVGTSNAGEIWYDLTGNRTDKITIGSDGYATFPVNGGSVSVWVQQ

SEQ ID NO: 35434 - protein, 480 aa, Cytophaga sp.
NGTMMQYFEWYVPNDGQQWNRLRTDAPYLSSVGITAVWTPPAYKGTSQADVGYGPYDLYDLGEFNQKGTVRTKYGTKGELKSAVNTLHSNGIQVYGDVVMNHKAGADYTENVTAVEVNPSNRNQETSIEYNIQAWTGFNFPGRGTTYSNFKWQWFHFDGTDWDQSRSLSRIFKFTGKAWDWEVSSENGNYDYLMYADIDYDHPDVVNEMKKWGVWYANEVGLDGYRLDAVKHIKFSFLKDWVDNARAATGKEMFTVGEYWQNDLGALNNYLAKVNYNQSLFDAPLHYNFYAASTGGGYYDMRNILNNTLVASNPTKAVTLVENHDTQPGQSLESTVQPWFKPLAYAFILTRSGGYPSVFYGDMYGTKGTTTREIPALKSKIEPLLKARKDYAYGTQRDYIDNPDVIGWTREGDSTKAKSGLATVITDGPGGSKRMYVGTSNAGEIWYDLTGNRTDKITIGSDGYATFPVNGGSVSVWVQQ

SEQ ID NO: 35435 - protein, 480 aa, Cytophaga sp.
NGTMMQYFEWYVPNDGQQWNRLRTDAPYLSSVGITAVWTPPAYKGTSQADVGYGPYDLYDLGEFNQKGTVRTKYGTKGELKSAVNTLHSNGIQVYGDVVMNHKAGADYTENVTAVEVNPSNRNQETSGEYNIQAWTGFNFPGRGTTYSNFKWQWFHFDGTDWDQSRSLSRIFKFTGKAWDWEVSSENGNYDYLMYADIDYDHPDVVNEMKKWGVWYANEVGLDGYRLDAVKHIKFSFLKDWVDNARAATGKEMFTVGEYWQNDLGALNNYLAKVNYNQSLFDAPLHYNFYAASTGGGYYDMRNILNNTLVASNPTKAVTLVENHDTQPGQSLESTVQPWFKPLAYAFILTRSGGYPSVFYGDMYGTKGTTTREIPALKSKIEPLLKARKDYAYGTQRDYIDNPDVIGWTREGDSTKAKSGLATVITDGPGGSKRMYVGTSNAGEIWYDLTGNRCDKITIGSDGYATFPVNGGSVSVWVQQ

SEQ ID NO: 35436 - protein, 480 aa, Cytophaga sp.
NGTMMQYFEWYVPNDGQQWNRLRTDAPYLSSVGITAVWTPPAYKGTSQADVGYGPYDLYDLGEFNQKGTVRTKYGTKGELKSAVNTLHSNGIQVYGDVVMNHKAGADYTENVTAVEVNPSNRNQETSGEYNIQAWTGFNFPGRGTTYSNFKWQWFHFDGTDWDQSRSLSRIFKFTGKAWDWEVSSENGNYDYLMYADIDYDHPDVVNEMKKWGVWYANEVGLDGYRLDAVKHIKFSFLKDWVDNARAATGKEMFTVGEYWQNDLGALNNYLAKVNYNQSLFDAPLHYNFYAASTGGGYYDMRNILNNTLVASNPTKAVTLVENHDTQPGQSLESTVQPWFKPLAYAFILTRSGGYPSVFYGDMYGTKGTTTAEIPALKSKIEPLLKARKDYAYGTQRDYIDNPDVIGWTREGDSTKAKSGLATVITDGPGGSKRMYVGTSNAGEIWYDLTGNRTDKITIGSDGYATFPVNGGSVSVWVQQ

SEQ ID NO: 35437 - protein, 480 aa, Cytophaga sp.
NGTMMQYFEWYVPNDGQQWNRLRTDAPYLSSVGITAVWTPPAYKGTSQADVGYGPYDLYDLGEFNQKGTVRTKYGTKGELKSAVNTLHSNGIQVYGDVVMNHKAGADYTENVTAVEVNPSNRNQETSGEYNIQAWTGFNFPGRGTTYSNFKWQWFHFDGTDWDQSRSLSRIFKFTGKAWDWEVSSENGNYDYLMYADIDYDHPDVVNEMKKWGVWYANEVGLDGYRLDAVKHIKFSFLKDWVDNARAATGKEMFTVGEYWQNDLGALNNYLAKVNYNQSLFDAPLHYNFYAASTGGGYYDMRNILNNTLVASNPTKAVTLVENHDTQPGQSLESTVQPWFKPLAYAFILTRSGGYPSVFYGDMYGTKGTTTREIPALKSKIEPLLKARKDYAYGTQRDYIDNPDVIGWTREGDSGKAKSGLATVITDGPGGSKRMYVGTSNAGEIWYDLTGNRTDKITIGSDGYATFPVNGGSVSVWVQQ

SEQ ID NO: 35438 - protein, 480 aa, Cytophaga sp.
NGTMMQYFEWYVPNDGQQWNRLRTDAPYLSSVGITAVWTPPAYKGTSQADVGYGPYDLYDLGEFNQKGTVRTKYGTKGELKSAVNTLHSNGIQVYGDVVMNHKAGADYTENVTAVEVNPSNRNQETSGEYNIQAWTGFNFPGRGTTYSNFKWQWFHFDGTDWDQSRSLSRIFKFTGKAWDWEVSSENGNYDYLMYADIDYDHPDVVNEMKKWGVWYANEVGLDGYRLDAVKHIKFSFLKDWVDNARAATGKEMFTVGEYWQNDLGALNNYLAKVNYNQSLFDAPLHYNFYAASTGGGYYDMRNILNNTLVASNPTKAVTLVENHDTQPGQSLESTVQPWFKPLAYAFILTRSGGYPSVFYGDMYGTKGTTTREIPALKSKIEPLLKARKDYAYGTQRDYIDNPDVIGWTREGDSTKAKSGLATVITDGPGGSKRMYVGTSNAGEIWYDLTGNRTDKITIGSDGFATFPVNGGSVSVWVQQ

SEQ ID NO: 35439 - protein, 480 aa, Cytophaga sp.
NGTMMQYFEWYVPNDGQQWNRLRTDAPYLSSVGITAVWTPPAYKGTSQADVGYGPYDLYDLGEFNQKGTVRTKYGTKFELKSAVNTLHSNGIQVYGDVVMNHKAGADYTENVTAVEVNPSNRNQETSGEYNIQAWTGFNFPGRGTTYSNFKWQWFHFDGTDWDQSRSLSRIFKFTGKAWDWEVSSENGNYDYLMYADIDYDHPDVVNEMKKWGVWYANEVGLDGYRLDAVKHIKFSFLKDWVDNARAATGKEMFTVGEYWQNDLGALNNYLAKVNYNQSLFDAPLHYNFYAASTGGGYYDMRNILNNTLVASNPTKAVTLVENHDTQPGQSLESTVQPWFKPLAYAFILTRSGGYPSVFYGDMYGTKGTTTREIPALKSKIEPLLKARKDYAYGTQRDYIDNPDVIGWTREGDSTKAKSGLATVITDGPGGSKRMYVGTSNAGEIWYDLTGNRTDKITIGSDGYATFPVNGGSVSVWVQQ

SEQ ID NO: 35440 - protein, 480 aa, Cytophaga sp.
NGTMMQYFEWYVPNDGQQWNRLRTDAPYLSSVGITAVWTPPAYKGTSQADVGYGPYDLYDLGEFNQKGTVRTKYGTKGELKSAVNTLHSNGIQVYGDVVMNHKAGADYTENVTAVEVNPSNRNQETSGEYNIHAWTGFNFPGRGTTYSNFKWQWFHFDGTDWDQSRSLSRIFKFTGKAWDWEVSSENGNYDYLMYADIDYDHPDVVNEMKKWGVWYANEVGLDGYRLDAVKHIKFSFLKDWVDNARAATGKEMFTVGEYWQNDLGALNNYLAKVNYNQSLFDAPLHYNFYAASTGGGYYDMRNILNNTLVASNPTKAVTLVENHDTQPGQSLESTVQPWFKPLAYAFILTRSGGYPSVFYGDMYGTKGTTTREIPALKSKIEPLLKARKDYAYGTQRDYIDNPDVIGWTREGDSTKAKSGLATVITDGPGGSKRMYVGTSNAGEIWYDLTGNRTDKITIGSDGYATFPVNGGSVSVWVQQ

SEQ ID NO: 35441 - protein, 480 aa, Cytophaga sp.
NGTMMQYFEWYVPNDGQQWNRLRTDAPYLSSVGITAVWTPPAYKGTSQADVGYGPYDLYDLGEFNQKGTVRTKYGTKGELKSAVNTLHSNGIQVYGDVVMNHKAGADYTENVTAVEVNPSNRNQETSGEYNIQAWTGFNFPGRGTTYSNFKWQWFHFDGTDWDQSRSLSRIFKFTGKAWDWEVSSENGNYDYLMYADIDYDHPDVVNEMKKWGVWYANEVGLDGYRLDAVKHIKFSFLKDWVDNARAATGKEMFTVGEYWQNDLGALNNYLAKVNYNQSLFDAPLHYNFYAASTGGGYYDMRNILNNTLVASNPTKAVTLVENHDTQPGQSLESTVQPWFKPLAYAFILTRSGGYPSVFYGDMYGTKGTTTREIPALKSKIEPLLKARKDYAYGWQRDYIDNPDVIGWTREGDSTKAKSGLATVITDGPGGSKRMYVGTSNAGEIWYDLTGNRTDKITIGSDGYATFPVNGGSVSVWVQQ

SEQ ID NO: 35442 - protein, 480 aa, Cytophaga sp.
NGTMMQYFEWYVPNDGQQWNRLRTDAPYLSSVGITAVWTPPAYKGTSQADVGYGPYDLYDLGEFNQKGTVRTKYGTKGELKSAVNTLHSNGIQVYGDVVMNHKAGADYTENVTAVEVNPSNRNQETSGEYNIQAWTGFNFPGRGTTYSNFKWQWFHFDGTDWDQSRSLSRIFKFTGKAWDWEVSSENGNYDYLMYADIDYDHPDVVNEMKKWGVWYANEVGLDGYRLDAVKHIKFSFLKDWVDNARAATGKEMFTVGEYWQNDLGALNNYLAKVNYNQSLFDAPLHYNFYAASTGGGYYDMRNILNNTLVASNPTKAVTLVENHDTQPGQSLESTVQPWFKPLAYAFILTRSGGYPSVFYGDMYGTKGTTTREIPALKSKIEPLLKARKDYAYGTQRDYIDNPDVIGWTREGDSTKAKSGLATVITDGPGGSKRMYVGTSNAGEIWYDLTGNRTDKITIGSDGIATFPVNGGSVSVWVQQ

SEQ ID NO: 35443 - protein, 480 aa, Cytophaga sp.
NGTMMQYFEWYVPNDGQQWNRLRTDAPYLSSVGITAVWTPPAYKGTSQADVGYGPYDLYDLGEFNQKGTVRTKYGTKGELKSAVNTLHSNGIQVYGDVVMNHKAGADYTENVTAVEVNPSNRNQETSGEYNIQAWTEFNFPGRGTTYSNFKWQWFHFDGTDWDQSRSLSRIFKFTGKAWDWEVSSENGNYDYLMYADIDYDHPDVVNEMKKWGVWYANEVGLDGYRLDAVKHIKFSFLKDWVDNARAATGKEMFTVGEYWQNDLGALNNYLAKVNYNQSLFDAPLHYNFYAASTGGGYYDMRNILNNTLVASNPTKAVTLVENHDTQPGQSLESTVQPWFKPLAYAFILTRSGGYPSVFYGDMYGTKGTTTREIPALKSKIEPLLKARKDYAYGTQRDYIDNPDVIGWTREGDSTKAKSGLATVITDGPGGSKRMYVGTSNAGEIWYDLTGNRTDKITIGSDGYATFPVNGGSVSVWVQQ

SEQ ID NO: 35444 - protein, 480 aa, Cytophaga sp.
NGTMMQYFEWYVPNDGQQWNRLRTDAPYLSSVGITAVWTPPAYKGTSQADVGYGPYDLYDLGEFNQKGTVRTKYGTKGELKSAVNTLHSNGIQVYGDVVMNHKAGADYTENVTAVEVNPSNRNQETSGEYNIQAWTGFNFPGRGTTYSNFKWQWFHFDGTDWDQSRSLSRIFKFTGKAWDWEVSSENGNYDYLMYADIDYDHPDVVNEMKKWGVWYANEVGLDGYRLDAVKHIKFSFLKDWVDNARAATGKEMFTVGEYWQNDLGALNNYLAKVNYNQSLFDAPLHYNFYAASTGGGYYDMRNILNNTLVASNPTKAVTLVENHDTQPGQSLESTVQPWFKPLAYAFILTRSGGYPSVFYGDMYGTKGTTTREIPALKSKIEPLLKARKDYAYGTQRDYIDNPDVIGWTREGDSFKAKSGLATVITDGPGGSKRMYVGTSNAGEIWYDLTGNRTDKITIGSDGYATFPVNGGSVSVWVQQ

SEQ ID NO: 35445 - protein, 480 aa, Cytophaga sp.
NGTMMQYFEWYVPNDGQQWNRLRTDAPYLSSVGITAVWTPPAYKGTSQADVGYGPYDLYDLGEFNQKGTVRTKYGTKGELKEAVNTLHSNGIQVYGDVVMNHKAGADYTENVTAVEVNPSNRNQETSGEYNIQAWTGFNFPGRGTTYSNFKWQWFHFDGTDWDQSRSLSRIFKFTGKAWDWEVSSENGNYDYLMYADIDYDHPDVVNEMKKWGVWYANEVGLDGYRLDAVKHIKFSFLKDWVDNARAATGKEMFTVGEYWQNDLGALNNYLAKVNYNQSLFDAPLHYNFYAASTGGGYYDMRNILNNTLVASNPTKAVTLVENHDTQPGQSLESTVQPWFKPLAYAFILTRSGGYPSVFYGDMYGTKGTTTREIPALKSKIEPLLKARKDYAYGTQRDYIDNPDVIGWTREGDSTKAKSGLATVITDGPGGSKRMYVGTSNAGEIWYDLTGNRTDKITIGSDGYATFPVNGGSVSVWVQQ

SEQ ID NO: 35446 - protein, 480 aa, Cytophaga sp.
NGTMMQYFEWYVPNDGQQWNRLRTDAPYLSSVGITAVWAPPAYKGTSQADVGYGPYDLYDLGEFNQKGTVRTKYGTKGELKSAVNTLHSNGIQVYGDVVMNHKAGADYTENVTAVEVNPSNRNQETSGEYNIQAWTGFNFPGRGTTYSNFKWQWFHFDGTDWDQSRSLSRIFKFTGKAWDWEVSSENGNYDYLMYADIDYDHPDVVNEMKKWGVWYANEVGLDGYRLDAVKHIKFSFLKDWVDNARAATGKEMFTVGEYWQNDLGALNNYLAKVNYNQSLFDAPLHYNFYAASTGGGYYDMRNILNNTLVASNPTKAVTLVENHDTQPGQSLESTVQPWFKPLAYAFILTRSGGYPSVFYGDMYGTKGTTTREIPALKSKIEPLLKARKDYAYGTQRDYIDNPDVIGWTREGDSTKAKSGLATVITDGPGGSKRMYVGTSNAGEIWYDLTGNRTDKITIGSDGYATFPVNGGSVSVWVQQ

SEQ ID NO: 35447 - protein, 480 aa, Cytophaga sp.
NGTMMQYFEWYVPNDGQQWNRLRTDAPYLSSVGITAVWTPPAYKGTSQADVGYGPYDLYDLGEFNQKGTVRTKYGTKGELKSAVNTLHSNGIQVYGDVVMNHKAGADYTENVTAVEVNPSNRNQETSGEYNIQAWTGFNFPGRGTTYSNFKWQWFHFDGTDWDQSRSLSRIFKFTGKAWDWEVSSENGNYDYLMYADIDYDHPDVVNEMKKWGVWYANEVGLDGYRLDAVKHIKFSFLKDWVDNARAATGKEMFTVGEYWQNDLGALNNYLAKVNYNQSLFDAPLHYNFYAASTGGGYYDMRNILNNTLVASNPTKAVTLVENHDTQPGQSLESTVQPWFKPLAYAFILTRSGGYPSVFYGDMYGTKGTTTREIPALKSKIEPLLKARKDYAYGTQRDYIDNPDVIGWTREGDSTWAKSGLATVITDGPGGSKRMYVGTSNAGEIWYDLTGNRTDKITIGSDGYATFPVNGGSVSVWVQQ

SEQ ID NO: 35448 - protein, 480 aa, Cytophaga sp.
NGTMMQYFEWYVPNDGQQWNRLRTDAPYLSSVGITAVWTPPAYKGTSQADVGYGPYDLYDLGEFNQKGTVRTKYGTKGELKSAVNTLHSNGIQVYGDVVMNHKAGADYTENVTAVEVNPSNRNQETSAEYNIQAWTGFNFPGRGTTYSNFKWQWFHFDGTDWDQSRSLSRIFKFTGKAWDWEVSSENGNYDYLMYADIDYDHPDVVNEMKKWGVWYANEVGLDGYRLDAVKHIKFSFLKDWVDNARAATGKEMFTVGEYWQNDLGALNNYLAKVNYNQSLFDAPLHYNFYAASTGGGYYDMRNILNNTLVASNPTKAVTLVENHDTQPGQSLESTVQPWFKPLAYAFILTRSGGYPSVFYGDMYGTKGTTTREIPALKSKIEPLLKARKDYAYGTQRDYIDNPDVIGWTREGDSTKAKSGLATVITDGPGGSKRMYVGTSNAGEIWYDLTGNRTDKITIGSDGYATFPVNGGSVSVWVQQ

SEQ ID NO: 35449 - protein, 480 aa, Cytophaga sp.
NGTMMQYFEWYVPNDGQQWNRLRTDAPYLSSVGITAVWTPPAYKGTSQADVGYGPYDLYDLGEFNQKGTVRTKYGTKGELKSAVDTLHSNGIQVYGDVVMNHKAGADYTENVTAVEVNPSNRNQETSGEYNIQAWTGFNFPGRGTTYSNFKWQWFHFDGTDWDQSRSLSRIFKFTGKAWDWEVSSENGNYDYLMYADIDYDHPDVVNEMKKWGVWYANEVGLDGYRLDAVKHIKFSFLKDWVDNARAATGKEMFTVGEYWQNDLGALNNYLAKVNYNQSLFDAPLHYNFYAASTGGGYYDMRNILNNTLVASNPTKAVTLVENHDTQPGQSLESTVQPWFKPLAYAFILTRSGGYPSVFYGDMYGTKGTTTREIPALKSKIEPLLKARKDYAYGTQRDYIDNPDVIGWTREGDSTKAKSGLATVITDGPGGSKRMYVGTSNAGEIWYDLTGNRTDKITIGSDGYATFPVNGGSVSVWVQQ

SEQ ID NO: 35450 - protein, 480 aa, Cytophaga sp.
NGTMMQYFEWYVPNDGQQWNRLRTDAPYLSSVGITAVWTPPAYKGTSQADVGYGPYDLYDLGEFNQKGTVRTKYGTKGELKSAVNTLHSNGIQVYGDVVMNHKAGADYTENVTAVEVNPSNRNQETSGEYNIQAWTGFNFPGRGTTYSNFKWQWFHFDGTDWDQSRSLSRIFKFTGKAWDWEVSSENGNYDYLMYADIDYDHPDVVNEMKKWGVWYANEVGLDGYRLDAVKHIKFSFLKDWVDNARAATGKEMFTVGEYWQNDLGALNNYLAKVNYNQSLFDAPLHYNFYAASTGGGYYDMRNILNNTLVASNPTKAVTLVENHDTQPGQSLESTVQPWFKPLAYAFILTRSGGYPSVFYGDMYGTKGTTTREIPALKSAIEPLLKARKDYAYGTQRDYIDNPDVIGWTREGDSTKAKSGLATVITDGPGGSKRMYVGTSNAGEIWYDLTGNRTDKITIGSDGYATFPVNGGSVSVWVQQ

SEQ ID NO: 35451 - protein, 480 aa, Cytophaga sp.
NGTMMQYFEWYVPNDGQQWNRLRTDAPYLSSVGITAVWTPPAYKGTSQADVGYGPYDLYDLGEFNQKGTVRTKYGTKGELKSAVNTLHSNGIQVYGDVVMNHKAGADYTENVTAVEVNPSNRNQETSGEYNIQAWTGFNFPGRGTTYSNFKWQWFHFDGTDWDQSRSLSRIFKFTGKAWDWEVSSENGNYDYLMYADIDYDHPDVVNEMKKWGVWYANEVGLDGYRLDACKHIKFSFLKDWVDNARAATGKEMFTVGEYWQNDLGALNNYLAKVNYNQSLFDAPLHYNFYAASTGGGYYDMRNILNNTLVASNPTKAVTLVENHDTQPGQSLESTVQPWFKPLAYAFILTRSGGYPSVFYGDMYGTKGTTTREIPALKSKIEPLLKARKDYAYGTQRDYIDNPDVIGWTREGDSTKAKSGLATVITDGPGGSKRMYVGTSNAGEIWYDLTGNRTDKITIGSDGYATFPVNGGSVSVWVQQ

SEQ ID NO: 35452 - protein, 480 aa, Cytophaga sp.
NGTMMQYFEWYVPNDGQQWTRLRTDAPYLSSVGITAVWTPPAYKGTSQADVGYGPYDLYDLGEFNQKGTVRTKYGTKGELKSAVNTLHSNGIQVYGDVVMNHKAGADYTENVTAVEVNPSNRNQETSGEYNIQAWTGFNFPGRGTTYSNFKWQWFHFDGTDWDQSRSLSRIFKFTGKAWDWEVSSENGNYDYLMYADIDYDHPDVVNEMKKWGVWYANEVGLDGYRLDAVKHIKFSFLKDWVDNARAATGKEMFTVGEYWQNDLGALNNYLAKVNYNQSLFDAPLHYNFYAASTGGGYYDMRNILNNTLVASNPTKAVTLVENHDTQPGQSLESTVQPWFKPLAYAFILTRSGGYPSVFYGDMYGTKGTTTREIPALKSKIEPLLKARKDYAYGTQRDYIDNPDVIGWTREGDSTKAKSGLATVITDGPGGSKRMYVGTSNAGEIWYDLTGNRTDKITIGSDGYATFPVNGGSVSVWVQQ

SEQ ID NO: 35453 - protein, 480 aa, Cytophaga sp.
NGTMMQYFEWYVPNDGQQWNRLRTDAPYLSSVGITAVWTPPAYKGTSQADVGYGPYDLYDLGEFNQKGTVRTKYGTKGELKSAVNTLHSNGIQVYGDVVMNHKAGADYTENVTAVEVNPSNRNQETSGEYNIQAWTGFNFPGRGTTYSNFKWQWFHFDGTDWDQSRSLSRIFKFTGKAWDWEVSSENGNYDYLMYADIDYDHPDVVNEMKKWGVWYANEVGLDGYRLDAVKHIKFSFLKDWVDNARAATGKEMFTVGEYWQNDLGALNNYLAKVNYNQSLFDAPLHYNFYAASTGGGYYDMRNILNNTLVASNPTKAVTLVENHDTQPGQSLESTVQMWFKPLAYAFILTRSGGYPSVFYGDMYGTKGTTTREIPALKSKIEPLLKARKDYAYGTQRDYIDNPDVIGWTREGDSTKAKSGLATVITDGPGGSKRMYVGTSNAGEIWYDLTGNRTDKITIGSDGYATFPVNGGSVSVWVQQ

SEQ ID NO: 35454 - protein, 480 aa, Cytophaga sp.
NGTMMQYFEWYVPNDGQQWNRLRTDAPYLSSVGITAVWTPPAYKGTSQADVGYGPYDLYDLGEFNQKGTVRTKYGTKGELKSAVNTLHSNGIQVYGDVVMNHKAGADYTENVTAVEVNPSNRNQETSGEYNIQAWTGFNFPGRGTTYSNFKWQWFHFDGTDWDQSRSLSRIFKFTGKAWDWEVSSENGNYDYLMYADIDYDHPDVVNEMKKWGVWYANEVGLDGYRLDAVKHIKFSFLKDWVDNARAATGKEMFTVGEYWQNDLGALNNYLAKVCYNQSLFDAPLHYNFYAASTGGGYYDMRNILNNTLVASNPTKAVTLVENHDTQPGQSLESTVQPWFKPLAYAFILTRSGGYPSVFYGDMYGTKGTTTREIPALKSKIEPLLKARKDYAYGTQRDYIDNPDVIGWTREGDSTKAKSGLATVITDGPGGSKRMYVGTSNAGEIWYDLTGNRTDKITIGSDGYATFPVNGGSVSVWVQQ

SEQ ID NO: 35455 - protein, 480 aa, Cytophaga sp.
NGTMMQYFEWYVPNDGQQWNRLRTDAPYLSSVGITAVWTPPAYKGTSQADVGYGPYDLYDLGEFNQKGTVRTKYGTKGELKSAVNTLHSNGIQVYGDVVVNHKAGADYTENVTAVEVNPSNRNQETSGEYNIQAWTGFNFPGRGTTYSNFKWQWFHFDGTDWDQSRSLSRIFKFTGKAWDWEVSSENGNYDYLMYADIDYDHPDVVNEMKKWGVWYANEVGLDGYRLDAVKHIKFSFLKDWVDNARAATGKEMFTVGEYWQNDLGALNNYLAKVNYNQSLFDAPLHYNFYAASTGGGYYDMRNILNNTLVASNPTKAVTLVENHDTQPGQSLESTVQPWFKPLAYAFILTRSGGYPSVFYGDMYGTKGTTTREIPALKSKIEPLLKARKDYAYGTQRDYIDNPDVIGWTREGDSTKAKSGLATVITDGPGGSKRMYVGTSNAGEIWYDLTGNRTDKITIGSDGYATFPVNGGSVSVWVQQ

SEQ ID NO: 35456 - protein, 480 aa, Cytophaga sp.
NGTMMQYFEWYVPNDGQQWNRLRTDAPYLSSVGITAVWTPPAYKGTSQADVGYGPYDLYDLGEFNQKGTVRTKYGTKGELKSAVNTLHSNGIQVYGDVVMNHKAGADYTENVTAVEVNPSNRNQETSGEYNIQAWTGFNFPGRGTTYSNFKWQWFHFDGTDWDQSRSLSRIFKFTGKAWDWEVSSENGNYDYLMYADIDYDHPDVVNEMKKWGVWYANEVGLDGYRLDAVKHIKFSFLKDWVDNARAATGKEMFTVGEYWQNDLGALNNYLAKVNYNQSLFDAPLHYNFYAASTGGGYYDMRNILNNTLVASNPTKAVTLVENHDTQPGQSLESTVQPWFKPLAYAFILTRSGGYPSVFYGDMYGTKGTTTREIPALKSKIEPLLKARKDYAYGSQRDYIDNPDVIGWTREGDSTKAKSGLATVITDGPGGSKRMYVGTSNAGEIWYDLTGNRTDKITIGSDGYATFPVNGGSVSVWVQQ

SEQ ID NO: 35457 - protein, 480 aa, Cytophaga sp.
NGTMMQYFEWYVPNDGQQWNRLRTDAPYLSSVGITAVWTPPAYKGTSQADVGYGPYDLYDLGEFNQKGTVRTKYGTKGELKSAVNTLHSNGIQVYGDVVMNHKAGADYTENVTAVEVNPSNRNQETSGEYNIQAWTGFNFPGRGTTYSNFKWQWFHFDGTDWDQSRSLSRIFKFTGKAWDWEVSSENGNYDYLMYADIDYDHPDVVNEMKKWGVWYANEVGLDGYRLDAVKHIKFSFLKDWVDNARAATGKEMFTVGEYWQNDLGALNNYLAKVNYNQSLFDAPLHYNFYAASTGGGYYDMRNILNNTLVASNPTKAVTLVENHDTQPGQSLESTVQPWFKPLAYAFILTRSGGYPSVFYGDMYGTKGTTTREIPALKSKIEPLLKARKDYAYGTQRDYIDNPDVIGWTREGDSTKAKSGLATVITDGPGGSKRMYVGTSNAGEIWYDQTGNRTDKITIGSDGYATFPVNGGSVSVWVQQ

SEQ ID NO: 35458 - protein, 480 aa, Cytophaga sp.
NGTMMQYFEWYVPNDGQQWNRLRTDAPYLSSVGITAVWTPPAYKGTSQADVGYGPYDLYDLGEFNQKGTVRTKYGTKGELKSAVNTLHSNGIQVYGDVVMNHKAGADYTENVTAVEVNPSNRNQETSGEYNIQAWTGFNFPGRGTTYSNFKWQWFHFDGTDWDQSRSLSRIFKFTGKAWDWEVSSENGNYDYLMYADIDYDHPDVVNEMKKWGVWYANEVGLDGYRLDAVKHIKFSFLKDWVDNARAATGKEMFTVGEYWQNDLGALNNYLAKVNYNQSLFDAPLHYNFYAASTGGGYYDMRNILNNTLVASNPTKAVTLVENHDTQPGQSLESTVQPWFKPLAYAFILTRSGGYPSVFYGDMYGTKGTTTREIPALKSKIEPLLKARKDYAYGTQTDYIDNPDVIGWTREGDSTKAKSGLATVITDGPGGSKRMYVGTSNAGEIWYDLTGNRTDKITIGSDGYATFPVNGGSVSVWVQQ

SEQ ID NO: 35459 - protein, 480 aa, Cytophaga sp.
NGTMMQYFEWYVPNDGQQWNRLRTDAPYLSSVGITAVWTPPAYKGTSQADVGYGPYDLYDLGEFNQKGTVRTKYGTKGELKSAVNTLHSNGIQVYGDVVMNHKAGADYTENVTAVEVNPSNRNQETSGEYNIQAWTGFNFPGRGTTYSNFKWQWFHFDGTDWDQSRSLSRIFKFTGKAWDWEVSSENGNYDYLMYADIDYDHPDVVNEMKKWGVWYANEVGLDGYRLDAVKHIKFSFLKDWVDNARAATGKEMFTVGEYWQNDLGALNNYLAKVNYNQSLFDAPLHYNFYAASTGGGYYDMRNILNNTLVASNPTKAVTLVENHDTQPGQSLESTVQPWFKPLAYAFILTRSDGYPSVFYGDMYGTKGTTTREIPALKSKIEPLLKARKDYAYGTQRDYIDNPDVIGWTREGDSTKAKSGLATVITDGPGGSKRMYVGTSNAGEIWYDLTGNRTDKITIGSDGYATFPVNGGSVSVWVQQ

SEQ ID NO: 35460 - protein, 480 aa, Cytophaga sp.
NGTMMQYFEWYVPNDGQQWNRLRTDAPYLSSVGITAVWTPPAYKGTSQADVGYGPYDLYDLGEFNQKGTVRTKYGTKGELKSAVNTLHSNGIQVYGDVVMNHKAGADYTENVTAVEVNPSNRNQETSGEYNIQAWTGFNFPGRGTTYSNFKWQWFHFDGTDWDQSRSLSRIFKFTGKAWDWEVSSENGNYDYLMYADLDYDHPDVVNEMKKWGVWYANEVGLDGYRLDAVKHIKFSFLKDWVDNARAATGKEMFTVGEYWQNDLGALNNYLAKVNYNQSLFDAPLHYNFYAASTGGGYYDMRNILNNTLVASNPTKAVTLVENHDTQPGQSLESTVQPWFKPLAYAFILTRSGGYPSVFYGDMYGTKGTTTREIPALKSKIEPLLKARKDYAYGTQRDYIDNPDVIGWTREGDSTKAKSGLATVITDGPGGSKRMYVGTSNAGEIWYDLTGNRTDKITIGSDGYATFPVNGGSVSVWVQQ

SEQ ID NO: 35461 - protein, 480 aa, Cytophaga sp.
NGTMMQYFEWYVPNDGQQWNRLRTDAPYLSSVGITAVWTPPAYKGTSQADVGYGPYDLYDLGEFNQKGTVRTKYGTKVELKSAVNTLHSNGIQVYGDVVMNHKAGADYTENVTAVEVNPSNRNQETSGEYNIQAWTGFNFPGRGTTYSNFKWQWFHFDGTDWDQSRSLSRIFKFTGKAWDWEVSSENGNYDYLMYADIDYDHPDVVNEMKKWGVWYANEVGLDGYRLDAVKHIKFSFLKDWVDNARAATGKEMFTVGEYWQNDLGALNNYLAKVNYNQSLFDAPLHYNFYAASTGGGYYDMRNILNNTLVASNPTKAVTLVENHDTQPGQSLESTVQPWFKPLAYAFILTRSGGYPSVFYGDMYGTKGTTTREIPALKSKIEPLLKARKDYAYGTQRDYIDNPDVIGWTREGDSTKAKSGLATVITDGPGGSKRMYVGTSNAGEIWYDLTGNRTDKITIGSDGYATFPVNGGSVSVWVQQ

SEQ ID NO: 35462 - protein, 480 aa, Cytophaga sp.
NGTMMQYFEWYVPNDGQQWFRLRTDAPYLSSVGITAVWTPPAYKGTSQADVGYGPYDLYDLGEFNQKGTVRTKYGTKGELKSAVNTLHSNGIQVYGDVVMNHKAGADYTENVTAVEVNPSNRNQETSGEYNIQAWTGFNFPGRGTTYSNFKWQWFHFDGTDWDQSRSLSRIFKFTGKAWDWEVSSENGNYDYLMYADIDYDHPDVVNEMKKWGVWYANEVGLDGYRLDAVKHIKFSFLKDWVDNARAATGKEMFTVGEYWQNDLGALNNYLAKVNYNQSLFDAPLHYNFYAASTGGGYYDMRNILNNTLVASNPTKAVTLVENHDTQPGQSLESTVQPWFKPLAYAFILTRSGGYPSVFYGDMYGTKGTTTREIPALKSKIEPLLKARKDYAYGTQRDYIDNPDVIGWTREGDSTKAKSGLATVITDGPGGSKRMYVGTSNAGEIWYDLTGNRTDKITIGSDGYATFPVNGGSVSVWVQQ

SEQ ID NO: 35463 - protein, 480 aa, Cytophaga sp.
NGTMMQYFEWYVPNDGQQWNRLRTDAPYLSSVGITAVWTPPAYKGTSQADVGYGPYDLYDLGEFNQKGTVRTKYGTKGELKSAVNTLHSNGIQVYGDVVMNHKAGADYTENVTAVEVNPSNRNQETSGEYNIQAWTGFNFPGRGGTYSNFKWQWFHFDGTDWDQSRSLSRIFKFTGKAWDWEVSSENGNYDYLMYADIDYDHPDVVNEMKKWGVWYANEVGLDGYRLDAVKHIKFSFLKDWVDNARAATGKEMFTVGEYWQNDLGALNNYLAKVNYNQSLFDAPLHYNFYAASTGGGYYDMRNILNNTLVASNPTKAVTLVENHDTQPGQSLESTVQPWFKPLAYAFILTRSGGYPSVFYGDMYGTKGTTTREIPALKSKIEPLLKARKDYAYGTQRDYIDNPDVIGWTREGDSTKAKSGLATVITDGPGGSKRMYVGTSNAGEIWYDLTGNRTDKITIGSDGYATFPVNGGSVSVWVQQ

SEQ ID NO: 35464 - protein, 480 aa, Cytophaga sp.
NGTMMQYFEWYVPNDGQQWNRLRTDAPYLSSVGITAVWTPPAYKGTSQADVGYGPYDLYDLGEFNQKGTVRTKYGTKGELKSAVNTLHSNGIQVYGDVVMNHKAGADYTENVTAVEVNPSNRNQETSGEYNIQAWTGFNFPGRGTTYSNFKWQWFHFDGTDWDQSRSLSRIFKFTGKAWDWEVSSENGNYDYLMYADIDYDHPDVVNEMKKWGVWYANEVGLDGYRLDAVKHIKFSFLKDWVDNARRATGKEMFTVGEYWQNDLGALNNYLAKVNYNQSLFDAPLHYNFYAASTGGGYYDMRNILNNTLVASNPTKAVTLVENHDTQPGQSLESTVQPWFKPLAYAFILTRSGGYPSVFYGDMYGTKGTTTREIPALKSKIEPLLKARKDYAYGTQRDYIDNPDVIGWTREGDSTKAKSGLATVITDGPGGSKRMYVGTSNAGEIWYDLTGNRTDKITIGSDGYATFPVNGGSVSVWVQQ

SEQ ID NO: 35465 - protein, 480 aa, Cytophaga sp.
NGTMMQYFEWYVPNDGQQWNRLRTDAPYLSSVGITAVWTPPAYKGTSQADVGYGPYDLYDLGEFNQKGTVRTKYGTKGELKSAVNTLHSNGIQVYGDVVMNHKAGADYTENVTAVEVNPSNRNQETSGEYNIQAWTGFNFPGRGTTYSNFKWQWFHFDGTDWDQSRSLSRIFKFTGKAWDWEVSSENGNYDYLMYADIDYDHPDVVNEMKKWGVWYANEVCLDGYRLDAVKHIKFSFLKDWVDNARAATGKEMFTVGEYWQNDLGALNNYLAKVNYNQSLFDAPLHYNFYAASTGGGYYDMRNILNNTLVASNPTKAVTLVENHDTQPGQSLESTVQPWFKPLAYAFILTRSGGYPSVFYGDMYGTKGTTTREIPALKSKIEPLLKARKDYAYGTQRDYIDNPDVIGWTREGDSTKAKSGLATVITDGPGGSKRMYVGTSNAGEIWYDLTGNRTDKITIGSDGYATFPVNGGSVSVWVQQ

SEQ ID NO: 35466 - protein, 480 aa, Cytophaga sp.
NGTMMQYFEWYVPNDGQQWNRLRWDAPYLSSVGITAVWTPPAYKGTSQADVGYGPYDLYDLGEFNQKGTVRTKYGTKGELKSAVNTLHSNGIQVYGDVVMNHKAGADYTENVTAVEVNPSNRNQETSGEYNIQAWTGFNFPGRGTTYSNFKWQWFHFDGTDWDQSRSLSRIFKFTGKAWDWEVSSENGNYDYLMYADIDYDHPDVVNEMKKWGVWYANEVGLDGYRLDAVKHIKFSFLKDWVDNARAATGKEMFTVGEYWQNDLGALNNYLAKVNYNQSLFDAPLHYNFYAASTGGGYYDMRNILNNTLVASNPTKAVTLVENHDTQPGQSLESTVQPWFKPLAYAFILTRSGGYPSVFYGDMYGTKGTTTREIPALKSKIEPLLKARKDYAYGTQRDYIDNPDVIGWTREGDSTKAKSGLATVITDGPGGSKRMYVGTSNAGEIWYDLTGNRTDKITIGSDGYATFPVNGGSVSVWVQQ

SEQ ID NO: 35467 - protein, 480 aa, Cytophaga sp.
NGTMMQYFEWYVPNDGQQWNRLRTDAPYLSSVGITAVWTPPAYKGTSQADVGYGPYDLYDLGEFNQKGTVRTKYGTKGELKSAVNTLHSNGIQVYGDVVMNHKAGADYTENVTAVEVNPSNRNQETSGEYNIQAWTGFNFPGRGTTYSNFKWQWFHFDGTDWDQSRSLSRIFKFTGKAWDWEVSSENGNYDYLMYADIDYDHPDVVNEMKKWGVWYANEVGLDGYRLDAVKHIKFSFLKDWVDNARAATGKEMFTVGEYWQNDLGALNNYLAKVNYNQSLFDAPLHYNFYAASTGGGYYDMRNILNNTLVASNPTKAVTLVENHDTQPGQSLESTVQPWFKPLAYAFILTRSGGYPSVFYGDMYGTKGTTTREIPALKSKIEPLLKARKDYAYGTQRDYIDNPDVIGWTREGDSTKAKSGLATVITDGPGGSKRMYVGTSNAGEPWYDLTGNRTDKITIGSDGYATFPVNGGSVSVWVQQ

SEQ ID NO: 35468 - protein, 480 aa, Cytophaga sp.
NGTMMQYFEWYVPNDGQQWNRLRTDAPYLSSVGITAVWTPPAYKGTSQADVGYGPYDLYDLGEFNQKGTVRTKYGTKGELKSAVNTLHSNGIQVYGDVVMNHKAGADYTENVTAVEVNPSNRNQETSGEYNIQAWTGFNFPGRGTTYSNFKWQWFHFDGTDWDQSRSLSRIFKFTGKAWDWEVSSENGNYDYLMYADIDYDHPDVVNEMKKWGVWYANEVGLDGYRLDAVKHIKFSFLKDWVDNARAATGKEMFTVGEYWQNDLGALNNYLAKVNYNQSLFDAPLHYNFYAASTGGGYYDMRNILNNTLVASNPTKAVTLVENHDTQPGQSLESTVQPWFKPLAYAFILTRSGGYPSVFYGDMYGTKGTTTREIPALKSKIEPLLKARKDYAYGTQRDYIDNPDVIGWTREGDSTKAKSGLATVITDGPGGSKRMYVGTSNAGEIWYDLTGNRTDKIYIGSDGYATFPVNGGSVSVWVQQ

SEQ ID NO: 35469 - protein, 480 aa, Cytophaga sp.
NGTMMQYFEWYVPNDGQQWNRLRTDAPYLSSVGITAVWTPPAYKGTSQADVGYGPYDLYDLGEFNQKGTVRTKYGTKGELKSAVNHLHSNGIQVYGDVVMNHKAGADYTENVTAVEVNPSNRNQETSGEYNIQAWTGFNFPGRGTTYSNFKWQWFHFDGTDWDQSRSLSRIFKFTGKAWDWEVSSENGNYDYLMYADIDYDHPDVVNEMKKWGVWYANEVGLDGYRLDAVKHIKFSFLKDWVDNARAATGKEMFTVGEYWQNDLGALNNYLAKVNYNQSLFDAPLHYNFYAASTGGGYYDMRNILNNTLVASNPTKAVTLVENHDTQPGQSLESTVQPWFKPLAYAFILTRSGGYPSVFYGDMYGTKGTTTREIPALKSKIEPLLKARKDYAYGTQRDYIDNPDVIGWTREGDSTKAKSGLATVITDGPGGSKRMYVGTSNAGEIWYDLTGNRTDKITIGSDGYATFPVNGGSVSVWVQQ

SEQ ID NO: 35470 - protein, 480 aa, Cytophaga sp.
NGTMMQYFEWYVPNDGQQWNRLRTDAPYLSSVGITAVWTPPAYKGTSQADVGYGPYDLYDLGEFNQKGTVRTKYGTKNELKSAVNTLHSNGIQVYGDVVMNHKAGADYTENVTAVEVNPSNRNQETSGEYNIQAWTGFNFPGRGTTYSNFKWQWFHFDGTDWDQSRSLSRIFKFTGKAWDWEVSSENGNYDYLMYADIDYDHPDVVNEMKKWGVWYANEVGLDGYRLDAVKHIKFSFLKDWVDNARAATGKEMFTVGEYWQNDLGALNNYLAKVNYNQSLFDAPLHYNFYAASTGGGYYDMRNILNNTLVASNPTKAVTLVENHDTQPGQSLESTVQPWFKPLAYAFILTRSGGYPSVFYGDMYGTKGTTTREIPALKSKIEPLLKARKDYAYGTQRDYIDNPDVIGWTREGDSTKAKSGLATVITDGPGGSKRMYVGTSNAGEIWYDLTGNRTDKITIGSDGYATFPVNGGSVSVWVQQ

SEQ ID NO: 35471 - protein, 480 aa, Cytophaga sp.
NGTMMQYFEWYVPNDGQQWNRLRTDAPYLSSVGITAVWTPPAYKGTSQADVGYGPYDLYDLGEFNQKGTVRTKYGTKGELKSAVNTLHSNGIQVYGDVVMNHKAGADYTENVTAVEVNPSNRNQETSGEYNIQAWTGFNFPGRGTTYSNFKWQWFHFDGTDWDQSRSLSRIFKFTGKAWDWEVSSENGNYDYLMYADIDYDHPDVVNEMKKWGVWYANEVGLDGYRLDAVKHIKFSFLKDWVDNARAATGKEMFTVGEYWQNDLGALNNYLAKVNYNQSLFDAPLHYNFYAASTGGGYYDMRNILNNTLVASNPTKAVTLVENHDTQPGQSLESTVQPWFKPLAYAFILTRSGGYPVVFYGDMYGTKGTTTREIPALKSKIEPLLKARKDYAYGTQRDYIDNPDVIGWTREGDSTKAKSGLATVITDGPGGSKRMYVGTSNAGEIWYDLTGNRTDKITIGSDGYATFPVNGGSVSVWVQQ

SEQ ID NO: 35472 - protein, 480 aa, Cytophaga sp.
NGTMMQYFEWYVPNDGQQWNRLRTDAPYLSSVGITAVWTPPAYKGTSQADVGYGPYDLYDLGEFNQKGTVRTKYGTKGELKSAVNTLHSNGIQVYGDVVMNHKAGADNTENVTAVEVNPSNRNQETSGEYNIQAWTGFNFPGRGTTYSNFKWQWFHFDGTDWDQSRSLSRIFKFTGKAWDWEVSSENGNYDYLMYADIDYDHPDVVNEMKKWGVWYANEVGLDGYRLDAVKHIKFSFLKDWVDNARAATGKEMFTVGEYWQNDLGALNNYLAKVNYNQSLFDAPLHYNFYAASTGGGYYDMRNILNNTLVASNPTKAVTLVENHDTQPGQSLESTVQPWFKPLAYAFILTRSGGYPSVFYGDMYGTKGTTTREIPALKSKIEPLLKARKDYAYGTQRDYIDNPDVIGWTREGDSTKAKSGLATVITDGPGGSKRMYVGTSNAGEIWYDLTGNRTDKITIGSDGYATFPVNGGSVSVWVQQ

SEQ ID NO: 35473 - protein, 480 aa, Cytophaga sp.
NGTMMQYFEWYVPNDGQQWNRLRTDAPYLSSVGITAVWTPPAYKGTSQADVGYGPYDLYDLGEFNQKGTVRTKYGTKGELKSAVNTLHSNGIQVYGDVVMNHKAGADYTENVTAVEVNPSNRNQETSGEYNIQAWTGFNFPGRGTTYSNFKWQWFHFDGTDWDQSRSLSRIFKFTGKAWDWEVSSENGNYDYLMYADIDYDHPDVVNEMKKWGVWYANEVGLDGYRLDAVKHIKFSFLKDWVDNARDATGKEMFTVGEYWQNDLGALNNYLAKVNYNQSLFDAPLHYNFYAASTGGGYYDMRNILNNTLVASNPTKAVTLVENHDTQPGQSLESTVQPWFKPLAYAFILTRSGGYPSVFYGDMYGTKGTTTREIPALKSKIEPLLKARKDYAYGTQRDYIDNPDVIGWTREGDSTKAKSGLATVITDGPGGSKRMYVGTSNAGEIWYDLTGNRTDKITIGSDGYATFPVNGGSVSVWVQQ

SEQ ID NO: 35474 - protein, 480 aa, Cytophaga sp.
NGTMMQYFEWYVPNDGQQWNRLRTDAPYLSSVGITAVWTPPAYKGTSQADVGYGPYDLYDLGEFNQKGTVRTKYGTKGELKSAVNTLHSNGIQVYGDVVMNHKAGADYTENVTAVEVNPSNRNQETSGEYNIQAWTGFNFPGRGTTYSNFKWQWFHFDGTDWDQSRSLSRIFKFTGKAWDWEVSSENGNYDYLMYADIDYDHPDVVNEMKKWGVWYANEVGLDGYRLDAVKHIKFSFLKDWVDNARAATGKEMFTVGEYWQNDLGALNNYLAKVNYNQSLFDAPLHYNFYAASTGGGYYDMRNILNNTLVASNPTKAVTLVENHDTQPGQSLESTVQPWFKPLAYAFILTRSGGYPSVFYGDMYGTKGTTTREIPALKSKIEPLLKARKDYAYGTQRDYIDNPDVIGWTREGDSTKAKSGLATVITDGPGGSKRMYVGTSNAGEFWYDLTGNRTDKITIGSDGYATFPVNGGSVSVWVQQ

SEQ ID NO: 35475 - protein, 480 aa, Cytophaga sp.
NGTMMQYFEWYVPNDGQQWNRLRTDAPKLSSVGITAVWTPPAYKGTSQADVGYGPYDLYDLGEFNQKGTVRTKYGTKGELKSAVNTLHSNGIQVYGDVVMNHKAGADYTENVTAVEVNPSNRNQETSGEYNIQAWTGFNFPGRGTTYSNFKWQWFHFDGTDWDQSRSLSRIFKFTGKAWDWEVSSENGNYDYLMYADIDYDHPDVVNEMKKWGVWYANEVGLDGYRLDAVKHIKFSFLKDWVDNARAATGKEMFTVGEYWQNDLGALNNYLAKVNYNQSLFDAPLHYNFYAASTGGGYYDMRNILNNTLVASNPTKAVTLVENHDTQPGQSLESTVQPWFKPLAYAFILTRSGGYPSVFYGDMYGTKGTTTREIPALKSKIEPLLKARKDYAYGTQRDYIDNPDVIGWTREGDSTKAKSGLATVITDGPGGSKRMYVGTSNAGEIWYDLTGNRTDKITIGSDGYATFPVNGGSVSVWVQQ

SEQ ID NO: 35476 - protein, 480 aa, Cytophaga sp.
NGTMMQYFEWYVPNDGQQWNRLRTDAPYLSSVGITAVWTPPAYKGTSQADVGYGPYDLYDLGEFNQKGTVRTKYGTKGELKSAVNTLHSNGIQVYGDVVMNHKAGADYTENVTAVEVNPSNRNQETSGEYNIQAWTGFNFPGRGTTYSNFKWQWFHFDGTDWDQSRSLSRIFKFTGKAWDWEVSSENGNYDYLMYADIDYDHPDVVYEMKKWGVWYANEVGLDGYRLDAVKHIKFSFLKDWVDNARAATGKEMFTVGEYWQNDLGALNNYLAKVNYNQSLFDAPLHYNFYAASTGGGYYDMRNILNNTLVASNPTKAVTLVENHDTQPGQSLESTVQPWFKPLAYAFILTRSGGYPSVFYGDMYGTKGTTTREIPALKSKIEPLLKARKDYAYGTQRDYIDNPDVIGWTREGDSTKAKSGLATVITDGPGGSKRMYVGTSNAGEIWYDLTGNRTDKITIGSDGYATFPVNGGSVSVWVQQ

SEQ ID NO: 35477 - protein, 480 aa, Cytophaga sp.
NGTMMQYFEWYVPNDGQQWNRLRTDAPYLSSVGITAVWTPPAYKGTSQADVGYGPYDLYDLGEFNQKGTVRTKYGTKGELKSAVNTLHSNGIQVYGDVVMNHKAGADYTENVTAVEVNPSNRNQETSGEYNIQAWTGFNFPGRGTTYSNFKWQWFHFDGSDWDQSRSLSRIFKFTGKAWDWEVSSENGNYDYLMYADIDYDHPDVVNEMKKWGVWYANEVGLDGYRLDAVKHIKFSFLKDWVDNARAATGKEMFTVGEYWQNDLGALNNYLAKVNYNQSLFDAPLHYNFYAASTGGGYYDMRNILNNTLVASNPTKAVTLVENHDTQPGQSLESTVQPWFKPLAYAFILTRSGGYPSVFYGDMYGTKGTTTREIPALKSKIEPLLKARKDYAYGTQRDYIDNPDVIGWTREGDSTKAKSGLATVITDGPGGSKRMYVGTSNAGEIWYDLTGNRTDKITIGSDGYATFPVNGGSVSVWVQQ

SEQ ID NO: 35478 - protein, 480 aa, Cytophaga sp.
NGTMMQYFEWYVPNDGQQWNRLRTDATYLSSVGITAVWTPPAYKGTSQADVGYGPYDLYDLGEFNQKGTVRTKYGTKGELKSAVNTLHSNGIQVYGDVVMNHKAGADYTENVTAVEVNPSNRNQETSGEYNIQAWTGFNFPGRGTTYSNFKWQWFHFDGTDWDQSRSLSRIFKFTGKAWDWEVSSENGNYDYLMYADIDYDHPDVVNEMKKWGVWYANEVGLDGYRLDAVKHIKFSFLKDWVDNARAATGKEMFTVGEYWQNDLGALNNYLAKVNYNQSLFDAPLHYNFYAASTGGGYYDMRNILNNTLVASNPTKAVTLVENHDTQPGQSLESTVQPWFKPLAYAFILTRSGGYPSVFYGDMYGTKGTTTREIPALKSKIEPLLKARKDYAYGTQRDYIDNPDVIGWTREGDSTKAKSGLATVITDGPGGSKRMYVGTSNAGEIWYDLTGNRTDKITIGSDGYATFPVNGGSVSVWVQQ

SEQ ID NO: 35479 - protein, 480 aa, Cytophaga sp.
NGTMMQYFEWYVPNDGQQWNRLRTDAPYLSSVGITAVWTPPAYKGTSQADVGYGPYDLYDLGEFNQKGTVRTKYGTKGELKSAVNTLHSNGIQVYGDVVMNHKAGADYTENVTAVEVNPSNRNQETSGEYNIQAWTGFNFPGRGTTYSNFKWQWFHFDGTDWDQSRSLSRIFKFTGKAWDWEVSSENGNYDYLMYADIDYDHPDVVMEMKKWGVWYANEVGLDGYRLDAVKHIKFSFLKDWVDNARAATGKEMFTVGEYWQNDLGALNNYLAKVNYNQSLFDAPLHYNFYAASTGGGYYDMRNILNNTLVASNPTKAVTLVENHDTQPGQSLESTVQPWFKPLAYAFILTRSGGYPSVFYGDMYGTKGTTTREIPALKSKIEPLLKARKDYAYGTQRDYIDNPDVIGWTREGDSTKAKSGLATVITDGPGGSKRMYVGTSNAGEIWYDLTGNRTDKITIGSDGYATFPVNGGSVSVWVQQ

SEQ ID NO: 35480 - protein, 480 aa, Cytophaga sp.
NGTMMQYFEWYVPNDGQQWNRLRTDAPYLSSVGITAVWTPPAYKGTSQADVGYGPYDLYDLGEFEQKGTVRTKYGTKGELKSAVNTLHSNGIQVYGDVVMNHKAGADYTENVTAVEVNPSNRNQETSGEYNIQAWTGFNFPGRGTTYSNFKWQWFHFDGTDWDQSRSLSRIFKFTGKAWDWEVSSENGNYDYLMYADIDYDHPDVVNEMKKWGVWYANEVGLDGYRLDAVKHIKFSFLKDWVDNARAATGKEMFTVGEYWQNDLGALNNYLAKVNYNQSLFDAPLHYNFYAASTGGGYYDMRNILNNTLVASNPTKAVTLVENHDTQPGQSLESTVQPWFKPLAYAFILTRSGGYPSVFYGDMYGTKGTTTREIPALKSKIEPLLKARKDYAYGTQRDYIDNPDVIGWTREGDSTKAKSGLATVITDGPGGSKRMYVGTSNAGEIWYDLTGNRTDKITIGSDGYATFPVNGGSVSVWVQQ

SEQ ID NO: 35481 - protein, 480 aa, Cytophaga sp.
NGTMMQYFEWYVPNDGQQWNRLRTDAPYLSSVGITAVWTPPAYKGSSQADVGYGPYDLYDLGEFNQKGTVRTKYGTKGELKSAVNTLHSNGIQVYGDVVMNHKAGADYTENVTAVEVNPSNRNQETSGEYNIQAWTGFNFPGRGTTYSNFKWQWFHFDGTDWDQSRSLSRIFKFTGKAWDWEVSSENGNYDYLMYADIDYDHPDVVNEMKKWGVWYANEVGLDGYRLDAVKHIKFSFLKDWVDNARAATGKEMFTVGEYWQNDLGALNNYLAKVNYNQSLFDAPLHYNFYAASTGGGYYDMRNILNNTLVASNPTKAVTLVENHDTQPGQSLESTVQPWFKPLAYAFILTRSGGYPSVFYGDMYGTKGTTTREIPALKSKIEPLLKARKDYAYGTQRDYIDNPDVIGWTREGDSTKAKSGLATVITDGPGGSKRMYVGTSNAGEIWYDLTGNRTDKITIGSDGYATFPVNGGSVSVWVQQ

SEQ ID NO: 35482 - protein, 480 aa, Cytophaga sp.
NGTMMQYFEWYVPNDGQQWNRLRTDAPYLSSVGITAVWTPPAYKGTSQADVGYGPYDLYDLGEFNQKGTVRTKYGTKGELKSAVNTLHSNGIQVYGDVVMNHKAGADYTENVTAVEVNPSNRNQETSGEYNIQAWTTFNFPGRGTTYSNFKWQWFHFDGTDWDQSRSLSRIFKFTGKAWDWEVSSENGNYDYLMYADIDYDHPDVVNEMKKWGVWYANEVGLDGYRLDAVKHIKFSFLKDWVDNARAATGKEMFTVGEYWQNDLGALNNYLAKVNYNQSLFDAPLHYNFYAASTGGGYYDMRNILNNTLVASNPTKAVTLVENHDTQPGQSLESTVQPWFKPLAYAFILTRSGGYPSVFYGDMYGTKGTTTREIPALKSKIEPLLKARKDYAYGTQRDYIDNPDVIGWTREGDSTKAKSGLATVITDGPGGSKRMYVGTSNAGEIWYDLTGNRTDKITIGSDGYATFPVNGGSVSVWVQQ

SEQ ID NO: 35483 - protein, 480 aa, Cytophaga sp.
NGTMMQYFEWYVPNDGQQWNRLRTDAPYLSSVGITAVWTPPAYKGTSQADVGYGPYDLYDLGEFNQKGTVRTKYGTKGELKSAVNTLHSNGIQVYGDVVMNHKAGADYTENVTAVEVNPSNRNQETSGEYNIQAWTGFNFPGRGTTYSNFKWQWFHFDGTDWDQSRSLSRIFKFTGKAWDWEVSSENGNYDYLMYADIDYDHPDVVNEMKKWGVWYANEVGLDGYRLDAVKHIKFSFLKDWVDDARAATGKEMFTVGEYWQNDLGALNNYLAKVNYNQSLFDAPLHYNFYAASTGGGYYDMRNILNNTLVASNPTKAVTLVENHDTQPGQSLESTVQPWFKPLAYAFILTRSGGYPSVFYGDMYGTKGTTTREIPALKSKIEPLLKARKDYAYGTQRDYIDNPDVIGWTREGDSTKAKSGLATVITDGPGGSKRMYVGTSNAGEIWYDLTGNRTDKITIGSDGYATFPVNGGSVSVWVQQ

SEQ ID NO: 35484 - protein, 480 aa, Cytophaga sp.
NGTMMQYFEWYVPNDGQQWNRLRTDAPYLSSVGITAVWTPPAYKGTSQADVGYGPYDLYDLGEFNQKGTVRTKYGTKGELKSAVNTLHSNGIQVYGDVVMNHKAGADYTENVTAVEVNPSNRNQETSGEYNIQAWTGFNFPGRGTTYSNFKWQWFHFDGTDWDQSRSVSRIFKFTGKAWDWEVSSENGNYDYLMYADIDYDHPDVVNEMKKWGVWYANEVGLDGYRLDAVKHIKFSFLKDWVDNARAATGKEMFTVGEYWQNDLGALNNYLAKVNYNQSLFDAPLHYNFYAASTGGGYYDMRNILNNTLVASNPTKAVTLVENHDTQPGQSLESTVQPWFKPLAYAFILTRSGGYPSVFYGDMYGTKGTTTREIPALKSKIEPLLKARKDYAYGTQRDYIDNPDVIGWTREGDSTKAKSGLATVITDGPGGSKRMYVGTSNAGEIWYDLTGNRTDKITIGSDGYATFPVNGGSVSVWVQQ

SEQ ID NO: 35485 - protein, 480 aa, Cytophaga sp.
NGTMMQYFEWYVPNDGQQWNRLRTDAPYLSSVGITAVWTPPAYKGTSQADVGYGPYDLYDLGEFNQKGTVRTKYGTKGELKSAVNTLHSNGIQVYGDVVMNHKAGADYTENVTAVEVNPSNRNQETSGEYNIQAWTGFNFPGRGTTYSNFKWQWVHFDGTDWDQSRSLSRIFKFTGKAWDWEVSSENGNYDYLMYADIDYDHPDVVNEMKKWGVWYANEVGLDGYRLDAVKHIKFSFLKDWVDNARAATGKEMFTVGEYWQNDLGALNNYLAKVNYNQSLFDAPLHYNFYAASTGGGYYDMRNILNNTLVASNPTKAVTLVENHDTQPGQSLESTVQPWFKPLAYAFILTRSGGYPSVFYGDMYGTKGTTTREIPALKSKIEPLLKARKDYAYGTQRDYIDNPDVIGWTREGDSTKAKSGLATVITDGPGGSKRMYVGTSNAGEIWYDLTGNRTDKITIGSDGYATFPVNGGSVSVWVQQ

SEQ ID NO: 35486 - protein, 480 aa, Cytophaga sp.
NGTMMQYFEWYVPNDGQQWNRLRTDAPYLSSVGITAVWTPPAYKGTSQADVGYGPYDLYDLGEFNQKGTVRTKYGTKGELKSAVNTLHSNGIQVYGDVVMNHKAGADYTENVTAVEVNPSNRNQETSGEYHIQAWTGFNFPGRGTTYSNFKWQWFHFDGTDWDQSRSLSRIFKFTGKAWDWEVSSENGNYDYLMYADIDYDHPDVVNEMKKWGVWYANEVGLDGYRLDAVKHIKFSFLKDWVDNARAATGKEMFTVGEYWQNDLGALNNYLAKVNYNQSLFDAPLHYNFYAASTGGGYYDMRNILNNTLVASNPTKAVTLVENHDTQPGQSLESTVQPWFKPLAYAFILTRSGGYPSVFYGDMYGTKGTTTREIPALKSKIEPLLKARKDYAYGTQRDYIDNPDVIGWTREGDSTKAKSGLATVITDGPGGSKRMYVGTSNAGEIWYDLTGNRTDKITIGSDGYATFPVNGGSVSVWVQQ

SEQ ID NO: 35487 - protein, 472 aa, Thermoascus crustaceus
ATPAQWRSQSVYFLLTDRFARTDGSTTAACDTDARAYCGGTWQGIIDHLDYIQGMGFTAIWITPVTENLPQDTGDGTSYHGYWQQDVYSLNSNYGTPDDLRALSSALHDRGMYLMVDVVANHMGYAGPGSSVDYTVFTPFNDQKYFHPYCSISNYDDQSNVEDCWLGDSTVSLPDLDTTRSDVQDMWYSWVKGLVANYSVDGLRIDTVKHVQKDFWPGYNDAAGVYCVGEVFDGDPSSTCDYQNYLDGVLNYPMYYPLLRAFSSTSGSISDLYNMINTVKSECADSTLLGTFVENHDNPRFASYTSDISLAKNALAFTILSDGIPIIYAGQEQHYSGGNDPANREAVWLSGYSTTSELYKFIAVSNQIRNHAISVDGDDYLTYKTYPIYQDTTTLAVRKGSLITVLSNLGSSGSSYTLSLGGTGYSSGQELMEIYSCTTVTADSSGNIAVPMGSGLPKAFYPTANLGGSGIC

SEQ ID NO: 35488 - protein, 477 aa, Synthetic construct
NGTLMQYFEWYLPNDGNHWNRLNSDASNLASKGITAVWIPPAYKGTSQADVGYGAYDLYDLGEFNQKGTVRTKYGTRSQLQAAVTSLKNNGIQVYGDVVINHKAGADATEMVQAVEVNPNNRNQEVTGEYTIEAYTRFDFPGRGNTHSSFKWRWYHFDGVDWDQSRSLNRIYKFQGKAWDWPVDTENGNYDYLMYADLDMDHPEVINELRNWGVWYTNTLGLDGFRLDAVKHIKFSFLRDWINHVRSATGKNMFAVAEYWKNDLGAIENYLNFTNWNHSVFDVPLHYNLYAASTSGGNYDMRNIFNGTVVQKHPSHAVTFVDNHDTQPEESLESFVQPWFKPLAYALTLTREQGYPSVFYGDYYGIPTHGIPALRSKIDPILEARQKYAYGPQHDYLDHPDIIGWTREGDSSHPKSGLATLITDGPGGSKRMYAGLKNAGETWYDITGNRSDTVKIGSDGWGEFHVNKGSVSIYVQR

SEQ ID NO: 35489 - protein, 478 aa, Bacillus sp.
NGTLMQYFEWYLPNDGNHWNRLNSDASNLKSKGITAVWIPPAWKGASQNDVGYGAYDLYDLGEFNQKGTVRTKYGTRSQLQAAVTSLKNNGIQVYGDVVMNHKGGADATEMVRAVEVNPNNRNQEVTGEYTIEAWTRFDFPGRANTHSSFKWRWYHFDGVDWDQSRRLNNRIYKFRTKAWDWEVDTENGNYDYLLYADIDMDHPEVVNELRNWGVWYTNTLGLDGFRIDAVKHIKYSFTRDWINHVRSAIGKNMFAVAEFWKNDLGAIENYLQKTNWNHSVFDVPLHFNLYYASKSGGNYDMRNIFNGTVVQRHPTHAVTFVDNHDSQPEESLESFVREWFKPLAYALTLTREQGYPSVFYGDYYGIPTHGVPAMRSKIDPILEARQKYAYGPQHDYIDHPDVIGWTREGDSSAAKSGLAALITDGPGGSKRMYAGLKNAGETWYDITGNRSDTVKIGSDGWGEFHVNDGSVSIYVQK

SEQ ID NO: 35490 - protein, 478 aa, Synthetic construct
NGTMMQYFEWYLPNDGNHWNRLNSDASNLKSKGITAVWIPPAWKGASQNDVGYGAYDLYDLGEFNQKGTVRTKYGTRSQLQAAVTSLKNNGIQVYGDVVMNHKGGADATEMVRAVEVNPNNRNQEVTGEYTIEAWTRFDFPGRGNTHSSFKWRWYHFDGVDWDQSRRLNNRIYKFHGKAWDWEVDTENGNYDYLMYADIDMDHPEVVNELRNWGVWYTNTLGLDGFRIDAVKHIKYSFTRDWINHVRSATGKNMFAVAEFWKNDLGAIENYLQKTNWNHSVFDVPLHYNLYNASKSGGNYDMRNIFNGTVVQRHPSHAVTFVDNHDSQPEEALESFVEEWFKPLAYALTLTREQGYPSVFYGDYYGIPTHGVPAMRSKIDPILEARQKYAYGPQHDYIDHPDVIGWTREGDSSAAKSGLAALITDGPGGSKRMYAGLKNAGETWYDITGNRSDTVKIGSDGWGEFHVNDGSVSIYVQK

SEQ ID NO: 35491 - protein, 478 aa, Synthetic construct
NGTMMQYFEWYLPNDGNHWNRLNSDASNLKSKGITAVWIPPAWKGASQNDVGYGAYDLYDLGEFNQKGTVRTKYGTRSQLQAAVTSLKNNGIQVYGDVVMNHKGGADATEMVRAVEVNPNNRNQEVTGEYTIEAWTRFDFPGRGNTHSSFKWRWYHFDGVDWDQSRRLNNRIYKGHGKAWDWEVDTENGNYDYLMYADIDMDHPEVVNELRNWGVWYTNTLGLDGFRIDAVKHIKYSFTRDWINHVRSATGKNMFAVAEFWKNDLGAIENYLQKTNWNHSVFDVPLHYNLYNASKSGGNYDMRNIFNGTVVQRHPSHAVTFVDNHDSQPEEALESFVEEWFKPLAYALTLTREQGYPSVFYGDYYGIPTHGVPAMRSKIDPILEARQKYAYGPQHDYIDHPDVIGWTREGDSSAAKSGLAALITDGPGGSKRMYAGLKNAGETWYDITGNRSDTVKIGSDGWGEFHVNDGSVSIYVQK

SEQ ID NO: 35492 - protein, 479 aa, Cytophaga sp.
GTMMQYFEWYVPNDGQQWNRLRTDAPYLSSVGITAVWTPPAYKGTSQADVGYGPYDLYDLGEFNQKGTVRTKYGTKGELKSAVNTLHSNGIQVYGDVVMNHKAGADYTENVTAVEVNPSNRNQETSGEYNIQAWTGFNFPGRGTTYSNFKWQWFHFDGTDWDQSRSLSRIFKFTGKAWDWEVSSENGNYDYLMYADIDYDHPDVVNEMKKWGVWYANEVGLDGYRLDAVKHIKFSFLKDWVDNARAATGKEMFTVGEYWQNDLGALNNYLAKVNYNQSLFDAPLHYNFYAASTGGGYYDMRNILNNTLVASNPTKAVTLVENHDTQPGQSLESTVQPWFKPLAYAFILTRSGGYPSVFYGDMYGTKGTTTREIPALKSKIEPLLKARKDYAYGTQRDYIDNPDVIGWTREGDSTKAKSGLATVITDGPGGSKRMYVGTSNAGEIWYDLTGNRTDKITIGSDGYATFPVNGGSVSVWVQQ

SEQ ID NO: 35493 - protein, 483 aa, Cytophaga sp.
INGTMMQYFEWYVPNDGQQWNRLRTDAPYLSSVGITAVWTPPAYKGTSQADVGYGPYDLYDLGEFNQKGTVRTKYGTKGELKSAVNTLHSNGIQVYGDVVMNHKAGADYTENVTAVEVNPSNRNQETSGEYNIQAWTGFNFPGRGTTYSNFKWQWFHFDGTDWDQSRSLSRIFKFRGTGKAWDWEVSSENGNYDYLMYADIDYDHPDVVNEMKKWGVWYANEVGLDGYRLDAVKHIKFSFLKDWVDNARAATGKEMFTVGEYWQNDLGALNNYLAKVNYNQSLFDAPLHYNFYAASTGGGYYDMRNILNNTLVASNPTKAVTLVENHDTQPGQSLESTVQPWFKPLAYAFILTRSGGYPSVFYGDMYGTKGTTTREIPALKSKIEPLLKARKDYAYGTQRDYIDNPDVIGWTREGDSTKAKSGLATVITDGPGGSKRMYVGTSNAGEIWYDLTGNRTDKITIGSDGYATFPVNGGSVSVWVQQ

SEQ ID NO: 35494 - protein, 477 aa, Bacillus sp.
NGTLMQYFEWYLPNDGNHWNRLNSDASNLKSKGITAVWIPPAWKGASQNDVGYGAYDLYDLGEFNQKGTVRTKYGTRSQLQAAVTSLKNNGIQVYGDVVMNHKGGADATEMVKAVEVNPNNRNQEVTGEYTIEAWTRFDFPGRANTHSSFKWRWYHFDGVDWDQSRRLNNRIYKFRTKAWDWEVDTEFGNYDYLMYADIDMDHPEVVNELRNWGVWYTNTLGLDGFRIDAVKHIKYSFVRDWINHVRSAGKNMFAVAEFWKNDLGAIENYLQKTNWNHSVFDVPLHFNLYYASKSGGNYDMRNIFNGTVVQRHPSHAVTFVDNHDSQPEESLESFVREWFKPLAYALTLTREQGYPSVFYGDYYGIPTHGVPAMRSKIDPILEARQKYAYGPQHDYIDHPDVIGWTREGDSSAAKSGLAALITDGPGGSKRMYAGLKNAGETWYDITGNKSDTVKIGSDGWGEFHVNDGSVSIYVQK

SEQ ID NO: 35495 - protein, 482 aa, Cytophaga sp.
NGTMMQYFEWYVPNDGQQWNRLRTDAPYLSSVGITAVWTPPAYKGTSQADVGYGPYDLYDLGEFNQKGTVRTKYGTKGELKSAVNTLHSNGIQVYGDVVMNHKAGADYTENVTAVEVNPSNRNQETSGEYNIQAWTGFNFPGRGTTYSNFKWQWFHFDGTDWDQSRSLSRIFKFRGTGKAWDWEVSSENGNYDYLMYADIDYDHPDVVNEMKKWGVWYANEVGLDGYRLDAVKHIKFSFLKDWVDNARALTGKEMFTVGEYWQNDLGALNNYLAKVNYNQSLFDAPLHYNFYAASTGGGYYDMRNILNNTLVASNPTKAVTLVENHDTQPGQSLESTVQPWFKPLAYAFILTRSGGYPSVFYGDMYGTKGTTTREIPALKSKIEPLLKARKDYAYGTQRDYIDNPDVIGWTREGDSTKAKSGLATVITDGPGGSKRMYVGTSNAGEIWYDLTGNRTDKITIGSDGYATFPVNGGSVSVWVQQ

SEQ ID NO: 35496 - protein, 482 aa, Cytophaga sp.
NGTMMQYFEWYVPNDGQQWNRLRTDAPYLSSVGITAVWTPPAYKGTSQADVGYGPYDLYDLGEFNQKGTVRTKYGTKGELKSAVNTLHSNGIQVYGDVVMNHKAGADYTENVTAVEVNPSNRNQETSGEYNIQAWTGFNFPGRGTTYSNFKWQWFHFDGTDWDQSRSLSRIFKFRGTGKAWDWEVSSENGNYDYLMYADIDYDHPDVVNEMKKWGVWYANEVGLDGYRLDAVKHIKFSFLKDWVDNARAAGGKEMFTVGEYWQNDLGALNNYLAKVNYNQSLFDAPLHYNFYAASTGGGYYDMRNILNNTLVASNPTKAVTLVENHDTQPGQSLESTVQPWFKPLAYAFILTRSGGYPSVFYGDMYGTKGTTTREIPALKSKIEPLLKARKDYAYGTQRDYIDNPDVIGWTREGDSTKAKSGLATVITDGPGGSKRMYVGTSNAGEIWYDLTGNRTDKITIGSDGYATFPVNGGSVSVWVQQ

SEQ ID NO: 35497 - protein, 482 aa, Cytophaga sp.
NGTMMQYFEWYVPNDGQQWNRLRTDAPYLSSVGITAVWTPPAYKGTSQADVGYGPYDLYDLGEFNQKGTVRTKYGTKGELKSAVNTLHSNGIQVYGDVVMNHKAGADYTENVTAVEVNPSNRNQETSGEYNIQAWTGFNFPGRGTTYSNFKWQWFHFDGTDWDQSRSLSRIFKFRGTGKAWDWEVSSENGNYDYLMYADIDYDHPDVVNEMKKWGVWYANEVGLDGYRLDAVKHIKFSFLKDWVDNARAATGKEMFTVGEYWQNDLGALNNYLAWVNYNQSLFDAPLHYNFYAASTGGGYYDMRNILNNTLVASNPTKAVTLVENHDTQPGQSLESTVQPWFKPLAYAFILTRSGGYPSVFYGDMYGTKGTTTREIPALKSKIEPLLKARKDYAYGTQRDYIDNPDVIGWTREGDSTKAKSGLATVITDGPGGSKRMYVGTSNAGEIWYDLTGNRTDKITIGSDGYATFPVNGGSVSVWVQQ

SEQ ID NO: 35498 - protein, 482 aa, Cytophaga sp.
NGTMMQYFEWYVPNDGQQWNRLRTDAPYLSSVGITAVWTPPAYKGTSQADVGYGPYDLYDLGEFNQKGTVRTKYGTKGELKSAVNTLHSNGIQVYGDVVMNHKAGADYTENVTAVEVNPSNRNQETSGEYNIQAWTGFNFPGRGTTYSNFKWQWFHFDGTDWDQSRSLSRIFKFRGTGKAWDWEVSSENGNYDYLMYADIDYDHPDVVNEMKKWGVWYANEVGLDGYRLDAVKHIKFDFLKDWVDNARAATGKEMFTVGEYWQNDLGALNNYLAKVNYNQSLFDAPLHYNFYAASTGGGYYDMRNILNNTLVASNPTKAVTLVENHDTQPGQSLESTVQPWFKPLAYAFILTRSGGYPSVFYGDMYGTKGTTTREIPALKSKIEPLLKARKDYAYGTQRDYIDNPDVIGWTREGDSTKAKSGLATVITDGPGGSKRMYVGTSNAGEIWYDLTGNRTDKITIGSDGYATFPVNGGSVSVWVQQ

SEQ ID NO: 35499 - protein, 482 aa, Cytophaga sp.
NGTMMQYFEWYVPNDGQQWNRLRTDAPYLSSVGITAVWTPPAYKGTSQADVGYGPYDLYDLGEFNQKGTVRTKYGTKGELKSAVNTLHSNGIQVYGDVVMNHKAGADYTENVTAVEVNPSNRNQETSGEYNIQAWTGFNFPGRGTTYSNFKWQWFHFDGTDWDQSRSLSRIFKFRGTGKAWDWEVSSENGNYDYLMYADIDYDHPDVVNEMKKWGVWYANEVGLDGYRLDAVKHIKFSFLKDWVDNARAAKGKEMFTVGEYWQNDLGALNNYLAKVNYNQSLFDAPLHYNFYAASTGGGYYDMRNILNNTLVASNPTKAVTLVENHDTQPGQSLESTVQPWFKPLAYAFILTRSGGYPSVFYGDMYGTKGTTTREIPALKSKIEPLLKARKDYAYGTQRDYIDNPDVIGWTREGDSTKAKSGLATVITDGPGGSKRMYVGTSNAGEIWYDLTGNRTDKITIGSDGYATFPVNGGSVSVWVQQ

SEQ ID NO: 35500 - protein, 482 aa, Cytophaga sp.
NGTMMQYFEWYVPNDGQQWNRLRTDAPYLSSVGITAVWTPPAYKGTSQADVGYGPYDLYDLGEFNQKGTVRTKYGTKGELKSAVNTLHSNGIQVYGDVVMNHKAGADYTENVTAVEVNPSNRNQETSGEYNIQAWTGFNFPGRGTTYSNFKWQWFHFDGTDWDQSRSLSRIFKFRGTGKAWDWEVSSENGNYDYLMYADIDYDHPDVVNEMKKWGVWYANEVGLDGYRLDAVKHIKFSFLKDWVDNARAATGHEMFTVGEYWQNDLGALNNYLAKVNYNQSLFDAPLHYNFYAASTGGGYYDMRNILNNTLVASNPTKAVTLVENHDTQPGQSLESTVQPWFKPLAYAFILTRSGGYPSVFYGDMYGTKGTTTREIPALKSKIEPLLKARKDYAYGTQRDYIDNPDVIGWTREGDSTKAKSGLATVITDGPGGSKRMYVGTSNAGEIWYDLTGNRTDKITIGSDGYATFPVNGGSVSVWVQQ

SEQ ID NO: 35501 - protein, 482 aa, Cytophaga sp.
NGTMMQYFEWYVPNDGQQWNRLRTDAPYLSSVGITAVWTPPAYKGTSQADVGYGPYDLYDLGEFNQKGTVRTKYGTKGELKSAVNTLHSNGIQVYGDVVMNHKAGADYTENVTAVEVNPSNRNQETSGEYNIQAWTGFNFPGRGTTYSNFKWQWFHFDGTDWDQSRSLSRIFKFRGTGKAWDWEVSSENGNYDYLMYADIDYDHPDVVNEMKKWGVWYANEVGLDGYRLDAVKHIKFCFLKDWVDNARAATGKEMFTVGEYWQNDLGALNNYLAKVNYNQSLFDAPLHYNFYAASTGGGYYDMRNILNNTLVASNPTKAVTLVENHDTQPGQSLESTVQPWFKPLAYAFILTRSGGYPSVFYGDMYGTKGTTTREIPALKSKIEPLLKARKDYAYGTQRDYIDNPDVIGWTREGDSTKAKSGLATVITDGPGGSKRMYVGTSNAGEIWYDLTGNRTDKITIGSDGYATFPVNGGSVSVWVQQ

SEQ ID NO: 35502 - protein, 482 aa, Cytophaga sp.
NGTMMQYFEWYVPNDGQQWNRLRTDAPYLSSVGITAVWTPPAYKGTSQADVGYGPYDLYDLGEFNQKGTVRTKYGTKGELKSAVNTLHSNGIQVYGDVVMNHKAGADYTENVTAVEVNPSNRNQETSGEYNIQAWTGFNFPGRGTTYSNFKWQWFHFDGTDWDQSRSLSRIFKFRGTGKAWDWEVSSENGNYDYLMYADIDYDHPDVVNEMKKWGVWYANEVGLDGYRLDAVKHIKFSFLKDWVDNATAATGKEMFTVGEYWQNDLGALNNYLAKVNYNQSLFDAPLHYNFYAASTGGGYYDMRNILNNTLVASNPTKAVTLVENHDTQPGQSLESTVQPWFKPLAYAFILTRSGGYPSVFYGDMYGTKGTTTREIPALKSKIEPLLKARKDYAYGTQRDYIDNPDVIGWTREGDSTKAKSGLATVITDGPGGSKRMYVGTSNAGEIWYDLTGNRTDKITIGSDGYATFPVNGGSVSVWVQQ

SEQ ID NO: 35503 - protein, 482 aa, Cytophaga sp.
NGTMMQYFEWYVPNDGQQWNRLRTDAPYLSSVGITAVWTPPAYKGTSQADVGYGPYDLYDLGEFNQKGTVRTKYGTKGELKSAVNTLHSNGIQVYGDVVMNHKAGADYTENVTAVEVNPSNRNQETSGEYNIQAWTGFNFPGRGTTYSNFKWQWFHFDGTDWDQSRSLSRIFKFRGTGKAWDWEVSSENGNYDYLMYADIDYDHPDVVNEMKKWGVWYANEVGLDGYRLDAVKHIKFSFLKDWVDNACAATGKEMFTVGEYWQNDLGALNNYLAKVNYNQSLFDAPLHYNFYAASTGGGYYDMRNILNNTLVASNPTKAVTLVENHDTQPGQSLESTVQPWFKPLAYAFILTRSGGYPSVFYGDMYGTKGTTTREIPALKSKIEPLLKARKDYAYGTQRDYIDNPDVIGWTREGDSTKAKSGLATVITDGPGGSKRMYVGTSNAGEIWYDLTGNRTDKITIGSDGYATFPVNGGSVSVWVQQ

SEQ ID NO: 35504 - protein, 482 aa, Cytophaga sp.
NGTMMQYFEWYVPNDGQQWNRLRTDAPYLSSVGITAVWTPPAYKGTSQADVGYGPYDLYDLGEFNQKGTVRTKYGTKGELKSAVNTLHSNGIQVYGDVVMNHKAGADYTENVTAVEVNPSNRNQETSGEYNIQAWTGFNFPGRGTTYSNFKWQWFHFDGTDWDQSRSLSRIFKFRGTGKAWDWEVSSENGNYDYLMYADIDYDHPDVVNEMKKWGVWYANEVGLDGYRLDAVKHIKFSFLKDWVDNARAPTGKEMFTVGEYWQNDLGALNNYLAKVNYNQSLFDAPLHYNFYAASTGGGYYDMRNILNNTLVASNPTKAVTLVENHDTQPGQSLESTVQPWFKPLAYAFILTRSGGYPSVFYGDMYGTKGTTTREIPALKSKIEPLLKARKDYAYGTQRDYIDNPDVIGWTREGDSTKAKSGLATVITDGPGGSKRMYVGTSNAGEIWYDLTGNRTDKITIGSDGYATFPVNGGSVSVWVQQ

SEQ ID NO: 35505 - protein, 482 aa, Synthetic construct
NGTMMQYFEWYVPNDGQQWNRLRTDAPYLSSVGITAVWTPPAYKGTSQADVGYGPYDLYDLGEFNQKGTVRTKYGTKGELKSAVNTLHSNGIQVYGDVVMNHKAGADYTENVTAVEVNPSNRNQETSGEYNIQAWTGFNFPGRGTTYSNFKWQWFHFDGTDWDQSRSLSRIFKFRGTGKAWDWPVSSENGNYDYLMYADYDYDHPDVVNEMKKWGVWYANEVGLDGYRLDAVKHIKFSFLKDWVDNARAATGKEMFTVGEYWQNDLGALNNYLAKVNYNQSLFDAPLHYNFYAASTGGGYYDMRNILNNTLVASNPTKAVTLVENHDTQPGQSLESTVQPWFKPLAYAFILTRSGGYPSVFYGDMYGTKGTTTREIPALKSKIEPLLKARKDYAYGTQRDYIDNPDVIGWTREGDSTKAKSGLATVITDGPGGSKRMYVGTSNAGEIWYDLTGNRTDKITIGSDGYATFPVNGGSVSVWVQQ

SEQ ID NO: 35506 - protein, 482 aa, Cytophaga sp.
NGTMMQYFEWYVPNDGQQWNRLRTDAPYLSSVGITAVWTPPAYKGTSQADVGYGPYDLYDLGEFNQKGTVRTKYGTKGELKSAVNTLHSNGIQVYGDVVMNHKAGADYTENVTAVEVNPSNRNQETSGEYNIQAWTGFNFPGRGTTYSNFKWQWFHFDGTDWDQSRSLSRIFKFRGTGKAWDWEVSSENGNYDYLMYADIDYDHPDVVNEMKKWGVWYANEVGLDGYRLDAVKHIKFSELKDWVDNARAATGKEMFTVGEYWQNDLGALNNYLAKVNYNQSLFDAPLHYNFYAASTGGGYYDMRNILNNTLVASNPTKAVTLVENHDTQPGQSLESTVQPWFKPLAYAFILTRSGGYPSVFYGDMYGTKGTTTREIPALKSKIEPLLKARKDYAYGTQRDYIDNPDVIGWTREGDSTKAKSGLATVITDGPGGSKRMYVGTSNAGEIWYDLTGNRTDKITIGSDGYATFPVNGGSVSVWVQQ

SEQ ID NO: 35507 - protein, 482 aa, Cytophaga sp.
NGTMMQYFEWYVPNDGQQWNRLRTDAPYLSSVGITAVWTPPAYKGTSQADVGYGPYDLYDLGEFNQKGTVRTKYGTKGELKSAVNTLHSNGIQVYGDVVMNHKAGADYTENVTAVEVNPSNRNQETSGEYNIQAWTGFNFPGRGTTYSNFKWQWFHFDGTDWDQSRSLSRIFKFRGTGKAWDWEVSSENGNYDYLMYADIDYDHPDVVNEMKKWGVWYANEVGLDGYRLDAVKHIKFSFLKDWVDNARAANGKEMFTVGEYWQNDLGALNNYLAKVNYNQSLFDAPLHYNFYAASTGGGYYDMRNILNNTLVASNPTKAVTLVENHDTQPGQSLESTVQPWFKPLAYAFILTRSGGYPSVFYGDMYGTKGTTTREIPALKSKIEPLLKARKDYAYGTQRDYIDNPDVIGWTREGDSTKAKSGLATVITDGPGGSKRMYVGTSNAGEIWYDLTGNRTDKITIGSDGYATFPVNGGSVSVWVQQ

SEQ ID NO: 35508 - protein, 482 aa, Cytophaga sp.
NGTMMQYFEWYVPNDGQQWNRLRTDAPYLSSVGITAVWTPPAYKGTSQADVGYGPYDLYDLGEFNQKGTVRTKYGTKGELKSAVNTLHSNGIQVYGDVVMNHKAGADYTENVTAVEVNPSNRNQETSGEYNIQAWTGFNFPGRGTTYSNFKWQWFHFDGTDWDQSRSLSRIFKFRGTGKAWDWEVSSENGNYDYLMYADIDYDHPDVVNEMKKWGVWYANEVGLDGYRLDAVKHIKFSFLKDWVDNARAATGKEMFTVGEYWQNDLGALNNYLAQVNYNQSLFDAPLHYNFYAASTGGGYYDMRNILNNTLVASNPTKAVTLVENHDTQPGQSLESTVQPWFKPLAYAFILTRSGGYPSVFYGDMYGTKGTTTREIPALKSKIEPLLKARKDYAYGTQRDYIDNPDVIGWTREGDSTKAKSGLATVITDGPGGSKRMYVGTSNAGEIWYDLTGNRTDKITIGSDGYATFPVNGGSVSVWVQQ

SEQ ID NO: 35509 - protein, 482 aa, Cytophaga sp.
NGTMMQYFEWYVPNDGQQWNRLRTDAPYLSSVGITAVWTPPAYKGTSQADVGYGPYDLYDLGEFNQKGTVRTKYGTKGELKSAVNTLHSNGIQVYGDVVMNHKAGADYTENVTAVEVNPSNRNQETSGEYNIQAWTGFNFPGRGTTYSNFKWQWFHFDGTDWDQSRSLSRIFKFRGTGKAWDWEVSSENGNYDYLMYADIDYDHPDVVNEMKKWGVWYANEVGLDGYRLDAVKHIKFSFLKDWVDNARAATGKEMFTVGEYWQNDLGALNNYLAKVNYNQSLFDAPLHYNFYAASTGGGYYDMRNILNNTLVASNPTTAVTLVENHDTQPGQSLESTVQPWFKPLAYAFILTRSGGYPSVFYGDMYGTKGTTTREIPALKSKIEPLLKARKDYAYGTQRDYIDNPDVIGWTREGDSTKAKSGLATVITDGPGGSKRMYVGTSNAGEIWYDLTGNRTDKITIGSDGYATFPVNGGSVSVWVQQ

SEQ ID NO: 35510 - protein, 482 aa, Cytophaga sp.
NGTMMQYFEWYVPNDGQQWNRLRTDAPYLSSVGITAVWTPPAYKGTSQADVGYGPYDLYDLGEFNQKGTVRTKYGTKGELKSAVNTLHSNGIQVYGDVVMNHKAGADYTENVTAVEVNPSNRNQETSGEYNIQAWTGFNFPGRGTTYSNFKWQWFHFDGTDWDQSRSLSRIFKFRGTGKAWDWEVSSENGNYDYLMYADIDYDHPDVVNEMKKWGVWYANEVGLDGYRLDAVKHIKFSFLKDWVDNAMAATGKEMFTVGEYWQNDLGALNNYLAKVNYNQSLFDAPLHYNFYAASTGGGYYDMRNILNNTLVASNPTKAVTLVENHDTQPGQSLESTVQPWFKPLAYAFILTRSGGYPSVFYGDMYGTKGTTTREIPALKSKIEPLLKARKDYAYGTQRDYIDNPDVIGWTREGDSTKAKSGLATVITDGPGGSKRMYVGTSNAGEIWYDLTGNRTDKITIGSDGYATFPVNGGSVSVWVQQ

SEQ ID NO: 35511 - protein, 482 aa, Cytophaga sp.
NGTMMQYFEWYVPNDGQQWNRLRTDAPYLSSVGITAVWTPPAYKGTSQADVGYGPYDLYDLGEFNQKGTVRTKYGTKGELKSAVNTLHSNGIQVYGDVVMNHKAGADYTENVTAVEVNPSNRNQETSGEYEIQAWTGFNFPGRGTTYSNFKWQWFHFDGTDWDQSRSLSRIFKFRGHGKAWDWPVSSENGNYDYLMYADIDYDHPDVVNEMKKWGVWYANEVGLDGYRLDAVKHIKFSFLKDWVDNARAATGKEMFTVGEYWQNDLGALNNYLAKVNYNQSLFDAPLHYNFYAASTGGGYYDMRNILNNTLVASNPTKAVTLVENHDTQPGQSLESTVQPWFKPLAYAFILTRSGGYPSVFYGDMYGTKGTTTREIPALKSKIEPLLKARKDYAYGTQRDYIDNPDVIGWTREGDSTKAKSGLATVITDGPGGSKRMYVGTSNAGEIWYDLTGNRTDKITIGSDGYATFRVNGGSVSVWVQQ

SEQ ID NO: 35512 - protein, 482 aa, Cytophaga sp.
NGTMMQYFEWYVPNDGQQWNRLRTDAPYLSSVGITAVWTPPAYKGTSQADVGYGPYDLYDLGEFNQKGTVRTKYGTKGELKSAVNTLHSNGIQVYGDVVMNHKAGADYTENVTAVEVNPSNRNQETSGEYNIQAWTGFNFPGRGTTYSNFKWQWFHFDGTDWDQSRSLSRIFKFRGTGKAWDWEVSSENGNYDYLMYADIDYDHPDVVNEMKKWGVWYANEVGLDGYRLDAVKHIKFSFLKDWVDNARAATGKEMFTVGEYWQNDLGALNNYLAKVNYNQSLFDAPLHYNFYAASTGGGYYDMRNILNNTLVASNPTEAVTLVENHDTQPGQSLESTVQPWFKPLAYAFILTRSGGYPSVFYGDMYGTKGTTTREIPALKSKIEPLLKARKDYAYGTQRDYIDNPDVIGWTREGDSTKAKSGLATVITDGPGGSKRMYVGTSNAGEIWYDLTGNRTDKITIGSDGYATFPVNGGSVSVWVQQ

SEQ ID NO: 35513 - protein, 482 aa, Cytophaga sp.
NGTMMQYFEWYVPNDGQQWNRLRTDAPYLSSVGITAVWTPPAYKGTSQADVGYGPYDLYDLGEFNQKGTVRTKYGTKGELKSAVNTLHLNGIQVYGDVVMNHKAGADYTENVTAVEVNPSNRNQETSGEYNIQAWTGFNFPGRGTTYSNFKWQWFHFDGTDWDQSRSLSRIFKFRGTGKAWDWEVSSENGNYDYLMYADIDYDHPDVVNEMKKWGVWYANEVGLDGYRLDAVKHIKFSFLKDWVDNARAATGKEMFTVGEYWQNDLGALNNYLAKVNYNQSLFDAPLHYNFYAASTGGGYYDMRNILNNTLVASNPTKAVTLVENHDTQPGQSLESTVQPWFKPLAYAFILTRSGGYPSVFYGDMYGTKGTTTREIPALKSKIEPLLKARKDYAYGTQRDYIDNPDVIGWTREGDSTKAKSGLATVITDGPGGSKRMYVGTSNAGEIWYDLTGNRTDKITIGSDGYATFPVNGGSVSVWVQQ

SEQ ID NO: 35514 - protein, 482 aa, Cytophaga sp.
NGTMMQYFEWYVPNDGQQWNRLRTDAPYLSSVGITAVWTPPAYKGTSQADVGYGPYDLYDLGEFNQKGTVRTKYGTKGELKSAVNTLHSNGIQVYGDVVMNHKAGADYTENVTAVEVNPSNRNQETSGEYNIQAWTGFNFPGRGTTYSNFKWQWFHFDGTDWDQSRSLSRIFKFRGTGKAWDWEVSSENGNYDYLMYADIDYDHPDVVNEMKKWGVWYANEVGLDGYRLDAVKHIKFFFLKDWVDNARAATGKEMFTVGEYWQNDLGALNNYLAKVNYNQSLFDAPLHYNFYAASTGGGYYDMRNILNNTLVASNPTKAVTLVENHDTQPGQSLESTVQPWFKPLAYAFILTRSGGYPSVFYGDMYGTKGTTTREIPALKSKIEPLLKARKDYAYGTQRDYIDNPDVIGWTREGDSTKAKSGLATVITDGPGGSKRMYVGTSNAGEIWYDLTGNRTDKITIGSDGYATFPVNGGSVSVWVQQ

SEQ ID NO: 35515 - protein, 482 aa, Cytophaga sp.
NGTMMQYFEWYVPNDGQQWNRLRTDAPYLSSVGITAVWTPPAYKGTSQADVGYGPYDLYDLGEFNQKGTVRTKYGTKGELKSAVNTLHSNGIQVYGDVVMNHKAGADYTENVTAVEVNPSNRNQETSGEYNIQAWTGFNFPGRGTTYSNFKWQWFHFDGTDWDQSRSLSRIFKFRGTGKAWDWEVSSENGNYDYLMYADIDYDHPDVVNEMKKWGVWYANEVGLDGYRLDAVKHIKFSFLKDWVDNARAATGEEMFTVGEYWQNDLGALNNYLAKVNYNQSLFDAPLHYNFYAASTGGGYYDMRNILNNTLVASNPTKAVTLVENHDTQPGQSLESTVQPWFKPLAYAFILTRSGGYPSVFYGDMYGTKGTTTREIPALKSKIEPLLKARKDYAYGTQRDYIDNPDVIGWTREGDSTKAKSGLATVITDGPGGSKRMYVGTSNAGEIWYDLTGNRTDKITIGSDGYATFPVNGGSVSVWVQQ

SEQ ID NO: 35516 - protein, 482 aa, Cytophaga sp.
NGTMMQYFEWYVPNDGQQWNRLRTDAPYLSSVGITAVWTPPAYKGTSQADVGYGPYDLYDLGEFNQKGTVRTKYGTKGELKSAVNTLHSNGIQVYGDVVMNHKAGADYTENVTAVEVNPSNRNQETSGEYNIQAWTGFNFPGRGTTYSNFKWQWFHFDGTDWDQSRSLSRIFKFRGTGKAWDWEVSSENGNYDYLMYADIDYDHPDVVNEMKKWGVWYANEVGLDGYRLDAVKHIKFSFLKDWVDNAGAATGKEMFTVGEYWQNDLGALNNYLAKVNYNQSLFDAPLHYNFYAASTGGGYYDMRNILNNTLVASNPTKAVTLVENHDTQPGQSLESTVQPWFKPLAYAFILTRSGGYPSVFYGDMYGTKGTTTREIPALKSKIEPLLKARKDYAYGTQRDYIDNPDVIGWTREGDSTKAKSGLATVITDGPGGSKRMYVGTSNAGEIWYDLTGNRTDKITIGSDGYATFPVNGGSVSVWVQQ

SEQ ID NO: 35517 - protein, 482 aa, Cytophaga sp.
NGTMMQYFEWYVPNDGQQWNRLRTDAPYLSSVGITAVWTPPAYKGTSQADVGYGPYDLYDLGEFNQKGTVRTKYGTKGELKSAVNTLHSNGIQVYGDVVMNHKAGADYTENVTAVEVNPSNRNQETSGEYNIQAWTGFNFPGRGTTYSNFKWQWFHFDGTDWDQSRSLSRIFKFRGTGKAWDWEVSSENGNYDYLMYADIDYDHPDVVNEMKKWGVWYANEVGLDGYRLDAVKHIKFSFLKDWVDNARAATGKEMFTVGEYWQNDLGALNNYLAKVNYNQSLFDAPLHYNFYAASTGGGYYDMRNILNNTLVASNPTHAVTLVENHDTQPGQSLESTVQPWFKPLAYAFILTRSGGYPSVFYGDMYGTKGTTTREIPALKSKIEPLLKARKDYAYGTQRDYIDNPDVIGWTREGDSTKAKSGLATVITDGPGGSKRMYVGTSNAGEIWYDLTGNRTDKITIGSDGYATFPVNGGSVSVWVQQ

SEQ ID NO: 35518 - protein, 482 aa, Cytophaga sp.
NGTMMQYFEWYVPNDGQQWNRLRTDAPYLSSVGITAVWTPPAYKGTSQADVGYGPYDLYDLGEFNQKGTVRTKYGTKGELKSAVNTLHSNGIQVYGDVVMNHKAGADYTENVTAVEVNPSNRNQETSGEYNIQAWTGFNFPGRGTTYSNFKWQWFHFDGTDWDQSRSLSRIFKFRGTGKAWDWEVSSENGNYDYLMYADIDYDHPDVVNEMKKWGVWYANEVGLDGYRLDAVKHIKFSFLKDWVDNARAATGKEMFTVGEYWQNDLGALNNYLAFVNYNQSLFDAPLHYNFYAASTGGGYYDMRNILNNTLVASNPTKAVTLVENHDTQPGQSLESTVQPWFKPLAYAFILTRSGGYPSVFYGDMYGTKGTTTREIPALKSKIEPLLKARKDYAYGTQRDYIDNPDVIGWTREGDSTKAKSGLATVITDGPGGSKRMYVGTSNAGEIWYDLTGNRTDKITIGSDGYATFPVNGGSVSVWVQQ

SEQ ID NO: 35519 - protein, 482 aa, Cytophaga sp.
NGTMMQYFEWYVPNDGQQWNRLRTDAPYLSSVGITAVWTPPAYKGTSQADVGYGPYDLYDLGEFNQKGTVRTKYGTKGELKSAVNTLHSNGIQVYGDVVMNHKAGADYTENVTAVEVNPSNRNQETSGEYNIQAWTGFNFPGRGTTYSNFKWQWFHFDGTDWDQSRSLSRIFKFRGTGKAWDWEVSSENGNYDYLMYADIDYDHPDVVNEMKKWGVWYANEVGLDGYRLDAVKHIKFSFLKDWVDNAQAATGKEMFTVGEYWQNDLGALNNYLAKVNYNQSLFDAPLHYNFYAASTGGGYYDMRNILNNTLVASNPTKAVTLVENHDTQPGQSLESTVQPWFKPLAYAFILTRSGGYPSVFYGDMYGTKGTTTREIPALKSKIEPLLKARKDYAYGTQRDYIDNPDVIGWTREGDSTKAKSGLATVITDGPGGSKRMYVGTSNAGEIWYDLTGNRTDKITIGSDGYATFPVNGGSVSVWVQQ

SEQ ID NO: 35520 - protein, 482 aa, Cytophaga sp.
NGTMMQYFEWYVPNDGQQWNRLRTDAPYLSSVGITAVWTPPAYKGTSQADVGYGPYDLYDLGEFNQKGTVRTKYGTKGELKSAVNTLHSNGIQVYGDVVMNHKAGADYTENVTAVEVNPSNRNQETSGEYNIQAWTGFNFPGRGTTYSNFKWQWFHFDGTDWDQSRSLSRIFKFRGTGKAWDWEVSSENGNYDYLMYADIDYDHPDVVNEMKKWGVWYANEVGLDGYRLDAVKHIKFSFLKDWVDNAAAATGKEMFTVGEYWQNDLGALNNYLAKVNYNQSLFDAPLHYNFYAASTGGGYYDMRNILNNTLVASNPTKAVTLVENHDTQPGQSLESTVQPWFKPLAYAFILTRSGGYPSVFYGDMYGTKGTTTREIPALKSKIEPLLKARKDYAYGTQRDYIDNPDVIGWTREGDSTKAKSGLATVITDGPGGSKRMYVGTSNAGEIWYDLTGNRTDKITIGSDGYATFPVNGGSVSVWVQQ

SEQ ID NO: 35521 - protein, 482 aa, Cytophaga sp.
NGTMMQYFEWYVPNDGQQWNRLRTDAPYLSSVGITAVWTPPAYKGTSQADVGYGPYDLYDLGEFNQKGTVRTKYGTKGELKSAVNTLHSNGIQVYGDVVMNHKAGADYTENVTAVEVNPSNRNQETSGEYNIQAWTGFNFPGRGTTYSNFKWQWFHFDGTDWDQSRSLSRIFKFRGTGKAWDWPVSSENGNYDYLMYADIDYDHPDVVNEMKKWGVWYANEVGLDGYRLDAVKHIKFSFLKDWVDNARAATGKEMFTVGEYWQNDLGALNNYLAKVNYNQSLFDAPLHYNFYAASTGGGYYDMRNILNNTLVASNPTKAVTLVENHDTQPGQSLESTVQPWFKPLAYAFILTRSGGYPSVFYGDMYGTKGTTTREIPALKSKIEPLLKARKDYAYGTQRDYIDNPDVIGWTREGDSTKAKSGLATVITDGPGGSKRMYVGTSNAGEIWYDLTGNRTDKITIGSDGYATFPVNGGSVSVWVQQ

SEQ ID NO: 35522 - protein, 482 aa, Cytophaga sp.
NGTMMQYFEWYVPNDGQQWNRLRTDAPYLSSVGITAVWTPPAYKGTSQADVGYGPYDLYDLGEFNQKGTVRTKYGTKGELKSAVNTLHSNGIQVYGDVVMNHKAGADYTENVTAVEVNPSNRNQETSGEYNIQAWTGFNFPGRGTTYSNFKWQWFHFDGTDWDQSRSLSRIFKFRGTGKAWDWEVSSENGNYDYLMYADIDYDHPDVVNEMKKWGVWYANEVGLDGYRLDAVKHIKFHFLKDWVDNARAATGKEMFTVGEYWQNDLGALNNYLAKVNYNQSLFDAPLHYNFYAASTGGGYYDMRNILNNTLVASNPTKAVTLVENHDTQPGQSLESTVQPWFKPLAYAFILTRSGGYPSVFYGDMYGTKGTTTREIPALKSKIEPLLKARKDYAYGTQRDYIDNPDVIGWTREGDSTKAKSGLATVITDGPGGSKRMYVGTSNAGEIWYDLTGNRTDKITIGSDGYATFPVNGGSVSVWVQQ

SEQ ID NO: 35523 - protein, 482 aa, Cytophaga sp.
NGTMMQYFEWYVPNDGQQWNRLRTDAPYLSSVGITAVWTPPAYKGTSQADVGYGPYDLYDLGEFNQKGTVRTKYGTKGELKSAVNTLHSNGIQVYGDVVMNHKAGADYTENVTAVEVNPSNRNQETSGEYNIQAWTGFNFPGRGTTYSNFKWQWFHFDGTDWDQSRSLSRIFKFRGDGKAWDWPVSSENGNYDYLMYADYDYDHPDVVNEMKKWGVWYANEVGLDGYRLDAVKHIKFSFLKDWVDNARAATGKEMFTVGEYWQNDLGALNNYLAKVNYNQSLFDAPLHYNFYAASTGGGYYDMRNILNNTLVASNPTKAVTLVENHDTQPGQSLESTVQPWFKPLAYAFILTRSGGYPSVFYGDMYGTKGTTTREIPALKSKIEPLLKARKDYAYGTQRDYIDNPDVIGWTREGDSTKAKSGLATVITDGPGGSKRMYVGTSNAGEIWYDLTGNRTDKITIGSDGYATFPVNKGSVSVWVQQ

SEQ ID NO: 35524 - protein, 482 aa, Cytophaga sp.
NGTMMQYFEWYVPNDGQQWNRLRTDAPYLSSVGITAVWTPPAYKGTSQADVGYGPYDLYDLGEFNQKGTVRTKYGTKGELKSAVNTLHSNGIQVYGDVVMNHKAGADYTENVTAVEVNPSNRNQETSGEYNIQAWTGFNFPGRGTTYSNFKWQWFHFDGTDWDQSRSLSRIFKFRGTGKAWDWEVSSENGNYDYLMYADIDYDHPDVVNEMKKWGVWYANEVGLDGYRLDAVKHIKFSFLKDWVDNARAATGAEMFTVGEYWQNDLGALNNYLAKVNYNQSLFDAPLHYNFYAASTGGGYYDMRNILNNTLVASNPTKAVTLVENHDTQPGQSLESTVQPWFKPLAYAFILTRSGGYPSVFYGDMYGTKGTTTREIPALKSKIEPLLKARKDYAYGTQRDYIDNPDVIGWTREGDSTKAKSGLATVITDGPGGSKRMYVGTSNAGEIWYDLTGNRTDKITIGSDGYATFPVNGGSVSVWVQQ

SEQ ID NO: 35525 - protein, 482 aa, Cytophaga sp.
NGTMMQYFEWYVPNDGQQWNRLRTDAPYLSSVGITAVWTPPAYKGTSQADVGYGPYDLYDLGEFNQKGTVRTKYGTKGELKSAVNTLHSNGIQVYGDVVMNHKAGADYTENVTAVEVNPSNRNQETSGEYNIQAWTGFNFPGRGTTYSNFKWQWFHFDGTDWDQSRSLSRIFKFRGTGKAWDWEVSSENGNYDYLMYADIDYDHPDVVNEMKKWGVWYANEVGLDGYRLDAVKHIKFVFLKDWVDNARAATGKEMFTVGEYWQNDLGALNNYLAKVNYNQSLFDAPLHYNFYAASTGGGYYDMRNILNNTLVASNPTKAVTLVENHDTQPGQSLESTVQPWFKPLAYAFILTRSGGYPSVFYGDMYGTKGTTTREIPALKSKIEPLLKARKDYAYGTQRDYIDNPDVIGWTREGDSTKAKSGLATVITDGPGGSKRMYVGTSNAGEIWYDLTGNRTDKITIGSDGYATFPVNGGSVSVWVQQ

SEQ ID NO: 35526 - protein, 482 aa, Cytophaga sp.
NGTMMQYFEWYVPNDGQQWNRLRTDAPYLSSVGITAVWTPPAYKGTSQADVGYGPYDLYDLGEFNQKGTVRTKYGTKGELKSAVNTLHSNGIQVYGDVVMNHKAGADYTENVTAVEVNPSNRNQETSGEYNIQAWTGFNFPGRGTTYSNFKWQWFHFDGTDWDQSRSLSRIFKFRGTGKAWDWEVSSENGNYDYLMYADIDYDHPDVVNEMKKWGVWYANEVGLDGYRLDAVKHIKFSFLKDWVDNADAATGKEMFTVGEYWQNDLGALNNYLAKVNYNQSLFDAPLHYNFYAASTGGGYYDMRNILNNTLVASNPTKAVTLVENHDTQPGQSLESTVQPWFKPLAYAFILTRSGGYPSVFYGDMYGTKGTTTREIPALKSKIEPLLKARKDYAYGTQRDYIDNPDVIGWTREGDSTKAKSGLATVITDGPGGSKRMYVGTSNAGEIWYDLTGNRTDKITIGSDGYATFPVNGGSVSVWVQQ

SEQ ID NO: 35527 - protein, 482 aa, Cytophaga sp.
NGTMMQYFEWYVPNDGQQWNRLRTDAPYLSSVGITAVWTPPAYKGTSQADVGYGPYDLYDLGEFNQKGTVRTKYGTKGELKSAVNTLHSNGIQVYGDVVMNHKAGADYTENVTAVEVNPSNRNQETSGEYNIQAWTGFNFPGRGTTYSNFKWQWFHFDGTDWDQSRSLSRIFKFRGTGKAWDWEVSSENGNYDYLMYADIDYDHPDVVNEMKKWGVWYANEVGLDGYRLDAVKHIKFSFLKDWVDNARAATGDEMFTVGEYWQNDLGALNNYLAKVNYNQSLFDAPLHYNFYAASTGGGYYDMRNILNNTLVASNPTKAVTLVENHDTQPGQSLESTVQPWFKPLAYAFILTRSGGYPSVFYGDMYGTKGTTTREIPALKSKIEPLLKARKDYAYGTQRDYIDNPDVIGWTREGDSTKAKSGLATVITDGPGGSKRMYVGTSNAGEIWYDLTGNRTDKITIGSDGYATFPVNGGSVSVWVQQ

SEQ ID NO: 35528 - protein, 482 aa, Cytophaga sp.
NGTMMQYFEWYVPNDGQQWNRLRTDAPYLSSVGITAVWTPPAYKGTSQADVGYGPYDLYDLGEFNQKGTVRTKYGTKGELKSAVNTLHANGIQVYGDVVMNHKAGADYTENVTAVEVNPSNRNQETSGEYNIQAWTGFNFPGRGTTYSNFKWQWFHFDGTDWDQSRSLSRIFKFRGTGKAWDWEVSSENGNYDYLMYADIDYDHPDVVNEMKKWGVWYANEVGLDGYRLDAVKHIKFSFLKDWVDNARAATGKEMFTVGEYWQNDLGALNNYLAKVNYNQSLFDAPLHYNFYAASTGGGYYDMRNILNNTLVASNPTKAVTLVENHDTQPGQSLESTVQPWFKPLAYAFILTRSGGYPSVFYGDMYGTKGTTTREIPALKSKIEPLLKARKDYAYGTQRDYIDNPDVIGWTREGDSTKAKSGLATVITDGPGGSKRMYVGTSNAGEIWYDLTGNRTDKITIGSDGYATFPVNGGSVSVWVQQ

SEQ ID NO: 35529 - protein, 482 aa, Cytophaga sp.
NGTMMQYFEWYVPNDGQQWNRLRTDAPYLSSVGITAVWTPPAYKGTSQADVGYGPYDLYDLGEFNQKGTVRTKYGTKGELKSAVNTLHSNGIQVYGDVVMNHKAGADYTENVTAVEVNPSNRNQETSGEYNIQAWTGFNFPGRGTTYSNFKWQWFHFDGTDWDQSRSLSRIFKFRGTGKAWDWEVSSENGNYDYLMYADIDYDHPDVVNEMKKWGVWYANEVGLDGYRLDAVKHIKFNFLKDWVDNARAATGKEMFTVGEYWQNDLGALNNYLAKVNYNQSLFDAPLHYNFYAASTGGGYYDMRNILNNTLVASNPTKAVTLVENHDTQPGQSLESTVQPWFKPLAYAFILTRSGGYPSVFYGDMYGTKGTTTREIPALKSKIEPLLKARKDYAYGTQRDYIDNPDVIGWTREGDSTKAKSGLATVITDGPGGSKRMYVGTSNAGEIWYDLTGNRTDKITIGSDGYATFPVNGGSVSVWVQQ

SEQ ID NO: 35530 - protein, 482 aa, Cytophaga sp.
NGTMMQYFEWYVPNDGQQWNRLRTDAPYLSSVGITAVWTPPAYKGTSQADVGYGPYDLYDLGEFNQKGTVRTKYGTKGELKSAVNTLHSNGIQVYGDVVMNHKAGADYTENVTAVEVNPSNRNQETSGEYNIQAWTGFNFPGRGTTYSNFKWQWFHFDGTDWDQSRSLSRIFKFRGTGKAWDWEVSSENGNYDYLMYADIDYDHPDVVNEMKKWGVWYANEVGLDGYRLDAVKHIKFSFLKDWVDNARAATGKEMFTVGEYWQNDLGALNNYLAKVNYNQSLFDAPLHYNFYAASTGGGYYDMRNILNNTLVASNPTGAVTLVENHDTQPGQSLESTVQPWFKPLAYAFILTRSGGYPSVFYGDMYGTKGTTTREIPALKSKIEPLLKARKDYAYGTQRDYIDNPDVIGWTREGDSTKAKSGLATVITDGPGGSKRMYVGTSNAGEIWYDLTGNRTDKITIGSDGYATFPVNGGSVSVWVQQ

SEQ ID NO: 35531 - protein, 482 aa, Cytophaga sp.
NGTMMQYFEWYVPNDGQQWNRLRTDAPYLSSVGITAVWTPPAYKGTSQADVGYGPYDLYDLGEFNQKGTVRTKYGTKGELKSAVNTLHSNGIQVYGDVVMNHKAGADYTENVTAVEVNPSNRNQETSGEYNIQAWTGFNFPGRGTTYSNFKWQWFHFDGTDWDQSRSLSRIFKFRGTGKAWDWEVSSENGNYDYLMYADIDYDHPDVVNEMKKWGVWYANEVGLDGYRLDAVKHIKFSFLKDWVDNARAATGTEMFTVGEYWQNDLGALNNYLAKVNYNQSLFDAPLHYNFYAASTGGGYYDMRNILNNTLVASNPTKAVTLVENHDTQPGQSLESTVQPWFKPLAYAFILTRSGGYPSVFYGDMYGTKGTTTREIPALKSKIEPLLKARKDYAYGTQRDYIDNPDVIGWTREGDSTKAKSGLATVITDGPGGSKRMYVGTSNAGEIWYDLTGNRTDKITIGSDGYATFPVNGGSVSVWVQQ

SEQ ID NO: 35532 - protein, 482 aa, Cytophaga sp.
NGTMMQYFEWYVPNDGQQWNRLRTDAPYLSSVGITAVWTPPAYKGTSQADVGYGPYDLYDLGEFNQKGTVRTKYGTKGELKSAVNTLHSNGIQVYGDVVMNHKAGADYTENVTAVEVNPSNRNQETSGEYNIQAWTGFNFPGRGTTYSNFKWQWFHFDGTDWDQSRSLSRIFKFRGTGKAWDWEVSSENGNYDYLMYADIDYDHPDVVNEMKKWGVWYANEVGLDGYRLDAVKHIKFEFLKDWVDNARAATGKEMFTVGEYWQNDLGALNNYLAKVNYNQSLFDAPLHYNFYAASTGGGYYDMRNILNNTLVASNPTKAVTLVENHDTQPGQSLESTVQPWFKPLAYAFILTRSGGYPSVFYGDMYGTKGTTTREIPALKSKIEPLLKARKDYAYGTQRDYIDNPDVIGWTREGDSTKAKSGLATVITDGPGGSKRMYVGTSNAGEIWYDLTGNRTDKITIGSDGYATFPVNGGSVSVWVQQ

SEQ ID NO: 35533 - protein, 482 aa, Cytophaga sp.
NGTMMQYFEWYVPNDGQQWNRLRTDAPYLSSVGITAVWTPPAYKGTSQADVGYGPYDLYDLGEFNQKGTVRTKYGTKGELKSAVNTLHSNGIQVYGDVVMNHKAGADYTENVTAVEVNPSNRNQETSGEYNIQAWTGFNFPGRGTTYSNFKWQWFHFDGTDWDQSRSLSRIFKFRGTGKAWDWEVSSENGNYDYLMYADIDYDHPDVVNEMKKWGVWYANEVGLDGYRLDAVKHIKFSFLKDWVDNARAATGKEMFTVGEYWQNDLGALNNYLAKVNYNQSLFDAPLHYNFYAASTGGGYYDMRNILNNTLVASNPTKAVTLVENHDTQPGQSLESTVQPWFKPLAYAFILTRSGGYPSVFYGDMYGTKGTTTREIPALKSKIEPLLKARKDYAYGTQRQYIDNPDVIGWTREGDSTKAKSGLATVITDGPGGSKRMYVGTSNAGEIWYDLTGNRTDKITIGSDGYATFPVNGGSVSVWVQQ

SEQ ID NO: 35534 - protein, 482 aa, Cytophaga sp.
NGTMMQYFEWYVPNDGQQWNRLRTDAPYLSSVGITAVWTPPAYKGTSQADVGYGPYDLYDLGEFNQKGTVRTKYGTKGELKSAVNTLHSNGIQVYGDVVMNHKAGADYTENVTAVEVNPSNRNQETSGEYNIQAWTGFNFPGRGTTYSNFKWQWFHFDGTDWDQSRSLSRIFKFRGTGKAWDWEVSSENGNYDYLMYADIDYDHPDVVNEMKKWGVWYANEVGLDGYRLDAVKHIKFSFLKDWVDNAWAATGKEMFTVGEYWQNDLGALNNYLAKVNYNQSLFDAPLHYNFYAASTGGGYYDMRNILNNTLVASNPTKAVTLVENHDTQPGQSLESTVQPWFKPLAYAFILTRSGGYPSVFYGDMYGTKGTTTREIPALKSKIEPLLKARKDYAYGTQRDYIDNPDVIGWTREGDSTKAKSGLATVITDGPGGSKRMYVGTSNAGEIWYDLTGNRTDKITIGSDGYATFPVNGGSVSVWVQQ

SEQ ID NO: 35535 - protein, 482 aa, Cytophaga sp.
NGTMMQYFEWYVPNDGQQWNRLRTDAPYLSSVGITAVWTPPAYKGTSQADVGYGPYDLYDLGEFNQKGTVRTKYGTKGELKSAVNTLHSNGIQVYGDVVMNHKAGADYTENVTAVEVNPSNRNQETSGEYNIQAWTGFNFPGRGTTYSNFKWQWFHFDGTDWDQSRSLSRIFKFRGTGKAWDWEVSSENGNYDYLMYADIDYDHPDVVNEMKKWGVWYANEVGLDGYRLDAVKHIKFSFLKDWVDNARAATGKEMFTVGEYWQNDLGALNNYLAHVNYNQSLFDAPLHYNFYAASTGGGYYDMRNILNNTLVASNPTKAVTLVENHDTQPGQSLESTVQPWFKPLAYAFILTRSGGYPSVFYGDMYGTKGTTTREIPALKSKIEPLLKARKDYAYGTQRDYIDNPDVIGWTREGDSTKAKSGLATVITDGPGGSKRMYVGTSNAGEIWYDLTGNRTDKITIGSDGYATFPVNGGSVSVWVQQ

SEQ ID NO: 35536 - protein, 482 aa, Cytophaga sp.
NGTMMQYFEWYVPNDGQQWNRLRTDAPYLSSVGITAVWTPPAYKGTSQADVGYGPYDLYDLGEFNQKGTVRTKYGTKGELKSAVNTLHSNGIQVYGDVVMNHKAGADYTENVTAVEVNPSNRNQETSGEYNIQAWTGFNFPGRGTTYSNFKWQWFHFDGTDWDQSRSLSRIFKFRGTGKAWDWEVSSENGNYDYLMYADIDYDHPDVVNEMKKWGVWYANEVGLDGYRLDAVKHIKFSFLKDWVDNARAALGKEMFTVGEYWQNDLGALNNYLAKVNYNQSLFDAPLHYNFYAASTGGGYYDMRNILNNTLVASNPTKAVTLVENHDTQPGQSLESTVQPWFKPLAYAFILTRSGGYPSVFYGDMYGTKGTTTREIPALKSKIEPLLKARKDYAYGTQRDYIDNPDVIGWTREGDSTKAKSGLATVITDGPGGSKRMYVGTSNAGEIWYDLTGNRTDKITIGSDGYATFPVNGGSVSVWVQQ

SEQ ID NO: 35537 - protein, 482 aa, Cytophaga sp.
NGTMMQYFEWYVPNDGQQWNRLRTDAPYLSSVGITAVWTPPAYKGTSQADVGYGPYDLYDLGEFNQKGTVRTKYGTKGELKSAVNTLHSNGIQVYGDVVMNHKAGADYTENVTAVEVNPSNRNQETSGEYNIQAWTGFNFPGRGTTYSNFKWQWFHFDGTDWDQSRSLSRIFKFRGTGKAWDWEVSSENGNYDYLMYADIDYDHPDVVNEMKKWGVWYANEVGLDGYRLDAVKHIKFSFLKDWVDNANAATGKEMFTVGEYWQNDLGALNNYLAKVNYNQSLFDAPLHYNFYAASTGGGYYDMRNILNNTLVASNPTKAVTLVENHDTQPGQSLESTVQPWFKPLAYAFILTRSGGYPSVFYGDMYGTKGTTTREIPALKSKIEPLLKARKDYAYGTQRDYIDNPDVIGWTREGDSTKAKSGLATVITDGPGGSKRMYVGTSNAGEIWYDLTGNRTDKITIGSDGYATFPVNGGSVSVWVQQ

SEQ ID NO: 35538 - protein, 482 aa, Cytophaga sp.
NGTMMQYFEWYVPNDGQQWNRLRTDAPYLSSVGITAVWTPPAYKGTSQADVGYGPYDLYDLGEFNQKGTVRTKYGTKGELKSAVNTLHSNGIQVYGDVVMNHKAGADYTENVTAVEVNPSNRNQETSGEYNIQAWTGFNFPGRGTTYSNFKWQWFHFDGTDWDQSRSLSRIFKFRGTGKAWDWEVSSENGNYDYLMYADIDYDHPDVVNEMKKWGVWYANEVGLDGYRLDAVKHIKFSFLKDWVDNARAATGWEMFTVGEYWQNDLGALNNYLAKVNYNQSLFDAPLHYNFYAASTGGGYYDMRNILNNTLVASNPTKAVTLVENHDTQPGQSLESTVQPWFKPLAYAFILTRSGGYPSVFYGDMYGTKGTTTREIPALKSKIEPLLKARKDYAYGTQRDYIDNPDVIGWTREGDSTKAKSGLATVITDGPGGSKRMYVGTSNAGEIWYDLTGNRTDKITIGSDGYATFPVNGGSVSVWVQQ

SEQ ID NO: 35539 - protein, 482 aa, Cytophaga sp.
NGTMMQYFEWYVPNDGQQWNRLRTDAPYLSSVGITAVWTPPAYKGTSQADVGYGPYDLYDLGEFNQKGTVRTKYGTKGELKSAVNTLHSNGIQVYGDVVMNHKAGADYTENVTAVEVNPSNRNQETSGEYNIQAWTGFNFPGRGTTYSNFKWQWFHFDGTDWDQSRSLSRIFKFRGTGKAWDWEVSSENGNYDYLMYADIDYDHPDVVNEMKKWGVWYANEVGLDGYRLDAVKHIKFSFLKDWVDNAKAATGKEMFTVGEYWQNDLGALNNYLAKVNYNQSLFDAPLHYNFYAASTGGGYYDMRNILNNTLVASNPTKAVTLVENHDTQPGQSLESTVQPWFKPLAYAFILTRSGGYPSVFYGDMYGTKGTTTREIPALKSKIEPLLKARKDYAYGTQRDYIDNPDVIGWTREGDSTKAKSGLATVITDGPGGSKRMYVGTSNAGEIWYDLTGNRTDKITIGSDGYATFPVNGGSVSVWVQQ

SEQ ID NO: 35540 - protein, 482 aa, Cytophaga sp.
NGTMMQYFEWYVPNDGQQWNRLRTDAPYLSSVGITAVWTPPAYKGTSQADVGYGPYDLYDLGEFNQKGTVRTKYGTKGELKSAVNTLHSNGIQVYGDVVMNHKAGADYTENVTAVEVNPSNRNQETSGEYNIQAWTGFNFPGRGTTYSNFKWQWFHFDGTDWDQSRSLSRIFKFRGTGKAWDWEVSSENGNYDYLMYADIDYDHPDVVNEMKKWGVWYANEVGLDGYRLDAVKHIKFSFLKDWVDNARAARGKEMFTVGEYWQNDLGALNNYLAKVNYNQSLFDAPLHYNFYAASTGGGYYDMRNILNNTLVASNPTKAVTLVENHDTQPGQSLESTVQPWFKPLAYAFILTRSGGYPSVFYGDMYGTKGTTTREIPALKSKIEPLLKARKDYAYGTQRDYIDNPDVIGWTREGDSTKAKSGLATVITDGPGGSKRMYVGTSNAGEIWYDLTGNRTDKITIGSDGYATFPVNGGSVSVWVQQ

SEQ ID NO: 35541 - protein, 482 aa, Cytophaga sp.
NGTMMQYFEWYVPNDGQQWNRLRTDAPYLSSVGITAVWTPPAYKGTSQADVGYGPYDLYDLGEFNQKGTVRTKYGTKGELKSAVNTLHSNGIQVYGDVVMNHKAGADYTENVTAVEVNPSNRNQETSGEYNIQAWTGFNFPGRGTTYSNFKWQWFHFDGTDWDQSRSLSRIFKFRGTGKAWDWPVSSENGNYDYLMYADYDYDHPDVVNEMKKWGVWYANEVGLDGYRLDAVKHIKFSFLKDWVDNARAATGKEMFTVGEYWQNDLGALNNYLAKVNYNQSLFDAPLHYNFYAASTGGGYYDMRNILNNTLVASNPTKAVTLVENHDTQPGQSLESTVQPWFKPLAYAFILTRSGGYPSVFYGDMYGTKGTTTREIPALKSKIEPLLKARKDYAYGTQRDYIDNPDVIGWTREGDSTKAKSGLATVITDGPGGSKRMYVGTSNAGEIWYDLTGNRTDKITIGSDGYATFPVNKGSVSVWVQQ

SEQ ID NO: 35542 - protein, 482 aa, Cytophaga sp.
NGTMMQYFEWYVPNDGQQWNRLRTDAPYLSSVGITAVWTPPAYKGTSQADVGYGPYDLYDLGEFNQKGTVRTKYGTKGELKSAVNTLHSNGIQVYGDVVMNHKAGADYTENVTAVEVNPSNRNQETSGEYNIQAWTGFNFPGRGTTYSNFKWQWFHFDGTDWDQSRSLSRIFKFRGTGKAWDWEVSSENGNYDYLMYADIDYDHPDVVNEMKKWGVWYANEVGLDGYRLDAVKHIKFSFLKDWVDNARAATGKEMFTVGEYWQNDLGALNNYLAKVNYNQSLFDAPLHYNFYAASTGGGYYDMRNILNNTLVASNPTWAVTLVENHDTQPGQSLESTVQPWFKPLAYAFILTRSGGYPSVFYGDMYGTKGTTTREIPALKSKIEPLLKARKDYAYGTQRDYIDNPDVIGWTREGDSTKAKSGLATVITDGPGGSKRMYVGTSNAGEIWYDLTGNRTDKITIGSDGYATFPVNGGSVSVWVQQ

SEQ ID NO: 35543 - protein, 482 aa, Cytophaga sp.
NGTMMQYFEWYVPNDGQQWNRLRTDAPYLSSVGITAVWTPPAYKGTSQADVGYGPYDLYDLGEFNQKGTVRTKYGTKGELKSAVNTLHSNGIQVYGDVVMNHKAGADYTENVTAVEVNPSNRNQETSGEYNIQAWTGFNFPGRGTTYSNFKWQWFHFDGTDWDQSRSLSRIFKFRGTGKAWDWEVSSENGNYDYLMYADIDYDHPDVVNEMKKWGVWYANEVGLDGYRLDAVKHIKFSFLKDWVDNARAATGKEMFTVGEYWQNDLGALNNYLAKVNYNQSLFDAPLHYNFYAASTGGGYYDMRNILNNTLVASNPTKAVTLVENHDTQPGQSLESTVQPWFKPLAYAFILTRSGGYPSVFYGDMYGTKGTTTREIPALKSKIEPLLKARKDYAYGTQRNYIDNPDVIGWTREGDSTKAKSGLATVITDGPGGSKRMYVGTSNAGEIWYDLTGNRTDKITIGSDGYATFPVNGGSVSVWVQQ

SEQ ID NO: 35544 - protein, 482 aa, Cytophaga sp.
NGTMMQYFEWYVPNDGQQWNRLRTDAPYLSSVGITAVWTPPAYKGTSQADVGYGPYDLYDLGEFNQKGTVRTKYGTKGELKSAVNTLHSNGIQVYGDVVMNHKAGADYTENVTAVEVNPSNRNQETSGEYNIQAWTGFNFPGRGTTYSNFKWQWFHFDGTDWDQSRSLSRIFKFRGTGKAWDWEVSSENGNYDYLMYADIDYDHPDVVNEMKKWGVWYANEVGLDGYRLDAVKHIKFSFLKDWVDNAFAATGKEMFTVGEYWQNDLGALNNYLAKVNYNQSLFDAPLHYNFYAASTGGGYYDMRNILNNTLVASNPTKAVTLVENHDTQPGQSLESTVQPWFKPLAYAFILTRSGGYPSVFYGDMYGTKGTTTREIPALKSKIEPLLKARKDYAYGTQRDYIDNPDVIGWTREGDSTKAKSGLATVITDGPGGSKRMYVGTSNAGEIWYDLTGNRTDKITIGSDGYATFPVNGGSVSVWVQQ

SEQ ID NO: 35545 - protein, 482 aa, Cytophaga sp.
NGTMMQYFEWYVPNDGQQWNRLRTDAPYLSSVGITAVWTPPAYKGTSQADVGYGPYDLYDLGEFNQKGTVRTKYGTKGELKSAVNTLHSNGIQVYGDVVMNHKAGADYTENVTAVEVNPSNRNQETSGEYNIQAWTGFNFPGRGTTYSNFKWQWFHFDGTDWDQSRSLSRIFKFRGTGKAWDWEVSSENGNYDYLMYADIDYDHPDVVNEMKKWGVWYANEVGLDGYRLDAVKHIKFSFLKDWVDNAHAATGKEMFTVGEYWQNDLGALNNYLAKVNYNQSLFDAPLHYNFYAASTGGGYYDMRNILNNTLVASNPTKAVTLVENHDTQPGQSLESTVQPWFKPLAYAFILTRSGGYPSVFYGDMYGTKGTTTREIPALKSKIEPLLKARKDYAYGTQRDYIDNPDVIGWTREGDSTKAKSGLATVITDGPGGSKRMYVGTSNAGEIWYDLTGNRTDKITIGSDGYATFPVNGGSVSVWVQQ

SEQ ID NO: 35546 - protein, 482 aa, Cytophaga sp.
NGTMMQYFEWYVPNDGQQWNRLRTDAPYLSSVGITAVWTPPAYKGTSQADVGYGPYDLYDLGEFNQKGTVRTKYGTKGELKSAVNTLHSNGIQVYGDVVMNHKAGADYTENVTAVEVNPSNRNQETSGEYNIQAWTGFNFPGRGTTYSNFKWQWFHFDGTDWDQSRSLSRIFKFRGTGKAWDWEVSSENGNYDYLMYADIDYDHPDVVNEMKKWGVWYANEVGLDGYRLDAVKHIKFSFLKDWVDNASAATGKEMFTVGEYWQNDLGALNNYLAKVNYNQSLFDAPLHYNFYAASTGGGYYDMRNILNNTLVASNPTKAVTLVENHDTQPGQSLESTVQPWFKPLAYAFILTRSGGYPSVFYGDMYGTKGTTTREIPALKSKIEPLLKARKDYAYGTQRDYIDNPDVIGWTREGDSTKAKSGLATVITDGPGGSKRMYVGTSNAGEIWYDLTGNRTDKITIGSDGYATFPVNGGSVSVWVQQ

SEQ ID NO: 35547 - protein, 482 aa, Cytophaga sp.
NGTMMQYFEWYVPNDGQQWNRLRTDAPYLSSVGITAVWTPPAYKGTSQADVGYGPYDLYDLGEFNQKGTVRTKYGTKGELKSAVNTLHSNGIQVYGDVVMNHKAGADYTENVTAVEVNPSNRNQETSGEYNIQAWTGFNFPGRGTTYSNFKWQWFHFDGTDWDQSRSLSRIFKFRGTGKAWDWEVSSENGNYDYLMYADIDYDHPDVVNEMKKWGVWYANEVGLDGYRLDAVKHIKFSFLKDWVDNARAATGKEMFTVGEYWQNDLGALNNYLAKVNYNQSLFDAPLHYNFYAASTGGGYYDMRNILNNTLVASNPTIAVTLVENHDTQPGQSLESTVQPWFKPLAYAFILTRSGGYPSVFYGDMYGTKGTTTREIPALKSKIEPLLKARKDYAYGTQRDYIDNPDVIGWTREGDSTKAKSGLATVITDGPGGSKRMYVGTSNAGEIWYDLTGNRTDKITIGSDGYATFPVNGGSVSVWVQQ

SEQ ID NO: 35548 - protein, 482 aa, Cytophaga sp.
NGTMMQYFEWYVPNDGQQWNRLRTDAPYLSSVGITAVWTPPAYKGTSQADVGYGPYDLYDLGEFNQKGTVRTKYGTKGELKSAVNTLHSNGIQVYGDVVMNHKAGADYTENVTAVEVNPSNRNQETSGEYNIQAWTGFNFPGRGTTYSNFKWQWFHFDGTDWDQSRSLSRIFKFRGTGKAWDWEVSSENGNYDYLMYADIDYDHPDVVNEMKKWGVWYANEVGLDGYRLDAVKHIKFLFLKDWVDNARAATGKEMFTVGEYWQNDLGALNNYLAKVNYNQSLFDAPLHYNFYAASTGGGYYDMRNILNNTLVASNPTKAVTLVENHDTQPGQSLESTVQPWFKPLAYAFILTRSGGYPSVFYGDMYGTKGTTTREIPALKSKIEPLLKARKDYAYGTQRDYIDNPDVIGWTREGDSTKAKSGLATVITDGPGGSKRMYVGTSNAGEIWYDLTGNRTDKITIGSDGYATFPVNGGSVSVWVQQ

SEQ ID NO: 35549 - protein, 482 aa, Cytophaga sp.
NGTMMQYFEWYVPNDGQQWNRLRTDAPYLSSVGITAVWTPPAYKGTSQADVGYGPYDLYDLGEFNQKGTVRTKYGTKGELKSAVNTLHSNGIQVYGDVVMNHKAGADYTENVTAVEVNPSNRNQETSGEYNIQAWTGFNFPGRGTTYSNFKWQWFHFDGTDWDQSRSLSRIFKFRGTGKAWDWEVSSENGNYDYLMYADIDYDHPDVVNEMKKWGVWYANEVGLDGYRLDAVKHIKFSFLKDWVDNARAATGKEMFTVGEYWQNDLGALNNYLAKVNYNQSLFDAPLHYNFYAASTGGGYYDMRNILNNTLVASNPTSAVTLVENHDTQPGQSLESTVQPWFKPLAYAFILTRSGGYPSVFYGDMYGTKGTTTREIPALKSKIEPLLKARKDYAYGTQRDYIDNPDVIGWTREGDSTKAKSGLATVITDGPGGSKRMYVGTSNAGEIWYDLTGNRTDKITIGSDGYATFPVNGGSVSVWVQQ

SEQ ID NO: 35550 - protein, 482 aa, Cytophaga sp.
NGTMMQYFEWYVPNDGQQWNRLRTDAPYLSSVGITAVWTPPAYKGTSQADVGYGPYDLYDLGEFNQKGTVRTKYGTKGELKSAVNTLHSNGIQVYGDVVMNHKAGADYTENVTAVEVNPSNRNQETSGEYNIQAWTGFNFPGRGTTYSNFKWQWFHFDGTDWDQSRSLSRIFKFRGTGKAWDWEVSSENGNYDYLMYADIDYDHPDVVNEMKKWGVWYANEVGLDGYRLDAVKHIKFSFLKDWVDNARAATGKEMFTVGEYWQNDLGALNNYLAKVNYNQSLFDAPLHYNFYAASTGGGYYDMRNILNNTLVASNPTKAVTLVENHDTQPGQSLESTVQPWFKPLAYAFILTRSGGYPSVFYGDMYGTKGTTTREIPALKSKIEPLLKARKDYAYGTQRSYIDNPDVIGWTREGDSTKAKSGLATVITDGPGGSKRMYVGTSNAGEIWYDLTGNRTDKITIGSDGYATFPVNGGSVSVWVQQ

SEQ ID NO: 35551 - protein, 482 aa, Cytophaga sp.
NGTMMQYFEWYVPNDGQQWNRLRTDAPYLSSVGITAVWTPPAYKGTSQADVGYGPYDLYDLGEFNQKGTVRTKYGTKGELKSAVNTLHSNGIQVYGDVVMNHKAGADYTENVTAVEVNPSNRNQETSGEYNIQAWTGFNFPGRGTTYSNFKWQWFHFDGTDWDQSRSLSRIFKFRGTGKAWDWEVSSENGNYDYLMYADIDYDHPDVVNEMKKWGVWYANEVGLDGYRLDAVKHIKFSFLKDWVDNARAATGKEMFTVGEYWQNDLGALNNYLAKVNYNQSLFDAPLHYNFYAASTGGGYYDMRNILNNTLVASNPTDAVTLVENHDTQPGQSLESTVQPWFKPLAYAFILTRSGGYPSVFYGDMYGTKGTTTREIPALKSKIEPLLKARKDYAYGTQRDYIDNPDVIGWTREGDSTKAKSGLATVITDGPGGSKRMYVGTSNAGEIWYDLTGNRTDKITIGSDGYATFPVNGGSVSVWVQQ

SEQ ID NO: 35552 - protein, 482 aa, Cytophaga sp.
NGTMMQYFEWYVPNDGQQWNRLRTDAPYLSSVGITAVWTPPAYKGTSQADVGYGPYDLYDLGEFNQKGTVRTKYGTKGELKSAVNTLHSNGIQVYGDVVMNHKAGADYTENVTAVEVNPSNRNQETSGEYNIQAWTGFNFPGRGTTYSNFKWQWFHFDGTDWDQSRSLSRIFKFRGTGKAWDWEVSSENGNYDYLMYADIDYDHPDVVNEMKKWGVWYANEVGLDGYRLDAVKHIKFSFLKDWVDNAEAATGKEMFTVGEYWQNDLGALNNYLAKVNYNQSLFDAPLHYNFYAASTGGGYYDMRNILNNTLVASNPTKAVTLVENHDTQPGQSLESTVQPWFKPLAYAFILTRSGGYPSVFYGDMYGTKGTTTREIPALKSKIEPLLKARKDYAYGTQRDYIDNPDVIGWTREGDSTKAKSGLATVITDGPGGSKRMYVGTSNAGEIWYDLTGNRTDKITIGSDGYATFPVNGGSVSVWVQQ

SEQ ID NO: 35553 - protein, 482 aa, Cytophaga sp.
NGTMMQYFEWYVPNDGQQWNRLRTDAPYLSSVGITAVWTPPAYKGTSQADVGYGPYDLYDLGEFNQKGTVRTKYGTKGELKSAVNTLHSNGIQVYGDVVMNHKAGADYTENVTAVEVNPSNRNQETSGEYNIQAWTGFNFPGRGTTYSNFKWQWFHFDGTDWDQSRSLSRIFKFRGTGKAWDWEVSSENGNYDYLMYADIDYDHPDVVNEMKKWGVWYANEVGLDGYRLDAVKHIKFSFLKDWVDNALAATGKEMFTVGEYWQNDLGALNNYLAKVNYNQSLFDAPLHYNFYAASTGGGYYDMRNILNNTLVASNPTKAVTLVENHDTQPGQSLESTVQPWFKPLAYAFILTRSGGYPSVFYGDMYGTKGTTTREIPALKSKIEPLLKARKDYAYGTQRDYIDNPDVIGWTREGDSTKAKSGLATVITDGPGGSKRMYVGTSNAGEIWYDLTGNRTDKITIGSDGYATFPVNGGSVSVWVQQ

SEQ ID NO: 35554 - protein, 482 aa, Cytophaga sp.
NGTMMQYFEWYVPNDGQQWNRLRTDAPYLSSVGITAVWTPPAYKGTSQADVGYGPYDLYDLGEFNQKGTVRTKYGTKGELKSAVNTLHSNGIQVYGDVVMNHKAGADYTENVTAVEVNPSNRNQETSGEYNIQAWTGFNFPGRGTTYSNFKWQWFHFDGTDWDQSRSLSRIFKFRGTGKAWDWEVSSENGNYDYLMYADIDYDQPDVVNEMKKWGVWYANEVGLDGYRLDAVKHIKFSFLKDWVDNARAATGKEMFTVGEYWQNDLGALNNYLAKVNYNQSLFDAPLHYNFYAASTGGGYYDMRNILNNTLVASNPTKAVTLVENHDTQPGQSLESTVQPWFKPLAYAFILTRSGGYPSVFYGDMYGTKGTTTREIPALKSKIEPLLKARKDYAYGTQRDYIDNPDVIGWTREGDSTKAKSGLATVITDGPGGSKRMYVGTSNAGEIWYDLTGNRTDKITIGSDGYATFPVNGGSVSVWVQQ

SEQ ID NO: 35555 - protein, 482 aa, Cytophaga sp.
NGTMMQYFEWYVPNDGQQWNRLRTDAPYLSSVGITAVWTPPAYKGTSQADVGYGPYDLYDLGEFNQKGTVRTKYGTKGELKSAVNTLHSNGIQVYGDVVMNHKAGADYTENVTAVEVNPSNRNQETSGEYNIQAWTGFNFPGRGTTYSNFKWQWFHFDGTDWDQSRSLSRIFKFRGTGKAWDWEVSSENGNYDYLMYADIDYDHPDVVNEMKKWGVWYANEVGLDGYRLDAVKHIKFSFLKDWVDNARAAWGKEMFTVGEYWQNDLGALNNYLAKVNYNQSLFDAPLHYNFYAASTGGGYYDMRNILNNTLVASNPTKAVTLVENHDTQPGQSLESTVQPWFKPLAYAFILTRSGGYPSVFYGDMYGTKGTTTREIPALKSKIEPLLKARKDYAYGTQRDYIDNPDVIGWTREGDSTKAKSGLATVITDGPGGSKRMYVGTSNAGEIWYDLTGNRTDKITIGSDGYATFPVNGGSVSVWVQQ

SEQ ID NO: 35556 - protein, 482 aa, Cytophaga sp.
NGTMMQYFEWYVPNDGQQWNRLRTDAPYLSSVGITAVWTPPAYKGTSQADVGYGPYDLYDLGEFNQKGTVRTKYGTKGELKSAVNTLHSNGIQVYGDVVMNHKAGADYTENVTAVEVNPSNRNQETSGEYNIQAWTGFNFPGRGTTYSNFKWQWFHFDGTDWDQSRSLSRIFKFRGTGKAWDWEVSSENGNYDYLMYADIDYDHPDVVNEMKKWGVWYANEVGLDGYRLDAVKHIKFSFLKDWVDNARAAHGKEMFTVGEYWQNDLGALNNYLAKVNYNQSLFDAPLHYNFYAASTGGGYYDMRNILNNTLVASNPTKAVTLVENHDTQPGQSLESTVQPWFKPLAYAFILTRSGGYPSVFYGDMYGTKGTTTREIPALKSKIEPLLKARKDYAYGTQRDYIDNPDVIGWTREGDSTKAKSGLATVITDGPGGSKRMYVGTSNAGEIWYDLTGNRTDKITIGSDGYATFPVNGGSVSVWVQQ

SEQ ID NO: 35557 - protein, 482 aa, Cytophaga sp.
NGTMMQYFEWYVPNDGQQWNRLRTDAPYLSSVGITAVWTPPAYKGTSQADVGYGPYDLYDLGEFNQKGTVRTKYGTKGELKSAVNTLHSNGIQVYGDVVMNHKAGADYTENVTAVEVNPSNRNQETSGEYNIQAWTGFNFPGRGTTYSNFKWQWFHFDGTDWDQSRSLSRIFKFRGTGKAWDWEVSSENGNYDYLMYADIDYDHPDVVNEMKKWGVWYANEVGLDGYRLDAVKHIKFSFLKDWVDNARAATGVEMFTVGEYWQNDLGALNNYLAKVNYNQSLFDAPLHYNFYAASTGGGYYDMRNILNNTLVASNPTKAVTLVENHDTQPGQSLESTVQPWFKPLAYAFILTRSGGYPSVFYGDMYGTKGTTTREIPALKSKIEPLLKARKDYAYGTQRDYIDNPDVIGWTREGDSTKAKSGLATVITDGPGGSKRMYVGTSNAGEIWYDLTGNRTDKITIGSDGYATFPVNGGSVSVWVQQ

SEQ ID NO: 35558 - protein, 482 aa, Cytophaga sp.
NGTMMQYFEWYVPNDGQQWNRLRTDAPYLSSVGITAVWTPPAYKGTSQADVGYGPYDLYDLGEFNQKGTVRTKYGTKGELKSAVNTLHSNGIQVYGDVVMNHKAGADYTENVTAVEVNPSNRNQETSGEYNIQAWTGFNFPGRGTTYSNFKWQWFHFDGTDWDQSRSLSRIFKFRGTGKAWDWEVSSENGNYDYLMYADIDYDHPDVVNEMKKWGVWYANEVGLDGYRLDAVKHIKFSFLKDWVDNARAATGKEMFTVGEYWQNDLGALNNYLAIVNYNQSLFDAPLHYNFYAASTGGGYYDMRNILNNTLVASNPTKAVTLVENHDTQPGQSLESTVQPWFKPLAYAFILTRSGGYPSVFYGDMYGTKGTTTREIPALKSKIEPLLKARKDYAYGTQRDYIDNPDVIGWTREGDSTKAKSGLATVITDGPGGSKRMYVGTSNAGEIWYDLTGNRTDKITIGSDGYATFPVNGGSVSVWVQQ

SEQ ID NO: 35559 - protein, 482 aa, Cytophaga sp.
NGTMMQYFEWYVPNDGQQWNRLRTDAPYLSSVGITAVWTPPAYKGTSQADVGYGPYDLYDLGEFNQKGTVRTKYGTKGELKSAVNTLHSNGIQVYGDVVMNHKAGADYTENVTAVEVNPSNRNQETSGEYNIQAWTGFNFPGRGTTYSNFKWQWFHFDGTDWDQSRSLSRIFKFRGTGKAWDWEVSSENGNYDYLMYADIDYDHPDVVNEMKKWGVWYANEVGLDGYRLDAVKHIKFWFLKDWVDNARAATGKEMFTVGEYWQNDLGALNNYLAKVNYNQSLFDAPLHYNFYAASTGGGYYDMRNILNNTLVASNPTKAVTLVENHDTQPGQSLESTVQPWFKPLAYAFILTRSGGYPSVFYGDMYGTKGTTTREIPALKSKIEPLLKARKDYAYGTQRDYIDNPDVIGWTREGDSTKAKSGLATVITDGPGGSKRMYVGTSNAGEIWYDLTGNRTDKITIGSDGYATFPVNGGSVSVWVQQ

SEQ ID NO: 35560 - protein, 482 aa, Cytophaga sp.
NGTMMQYFEWYVPNDGQQWNRLRTDAPYLSSVGITAVWTPPAYKGTSQADVGYGPYDLYDLGEFNQKGTVRTKYGTKGELKSAVNTLHSNGIQVYGDVVMNHKAGADYTENVTAVEVNPSNRNQETSGEYNIQAWTGFNFPGRGTTYSNFKWQWFHFDGTDWDQSRSLSRIFKFRGTGKAWDWEVSSENGNYDYLMYADIDYDHPDVVNEMKKWGVWYANEVGLDGYRLDAVKHIKFQFLKDWVDNARAATGKEMFTVGEYWQNDLGALNNYLAKVNYNQSLFDAPLHYNFYAASTGGGYYDMRNILNNTLVASNPTKAVTLVENHDTQPGQSLESTVQPWFKPLAYAFILTRSGGYPSVFYGDMYGTKGTTTREIPALKSKIEPLLKARKDYAYGTQRDYIDNPDVIGWTREGDSTKAKSGLATVITDGPGGSKRMYVGTSNAGEIWYDLTGNRTDKITIGSDGYATFPVNGGSVSVWVQQ

SEQ ID NO: 35561 - protein, 482 aa, Cytophaga sp.
NGTMMQYFEWYVPNDGQQWNRLRTDAPYLSSVGITAVWTPPAYKGTSQADVGYGPYDLYDLGEFNQKGTVRTKYGTKGELKSAVNTLHSNGIQVYGDVVMNHKAGADYTENVTAVEVNPSNRNQETSGEYNIQAWTGFNFPGRGTTYSNFKWQWFHFDGTDWDQSRSLSRIFKFRGTGKAWDWEVSSENGNYDYLMYADIDYDHPDVVNEMKKWGVWYANEVGLDGYRLDAVKHIKFYFLKDWVDNARAATGKEMFTVGEYWQNDLGALNNYLAKVNYNQSLFDAPLHYNFYAASTGGGYYDMRNILNNTLVASNPTKAVTLVENHDTQPGQSLESTVQPWFKPLAYAFILTRSGGYPSVFYGDMYGTKGTTTREIPALKSKIEPLLKARKDYAYGTQRDYIDNPDVIGWTREGDSTKAKSGLATVITDGPGGSKRMYVGTSNAGEIWYDLTGNRTDKITIGSDGYATFPVNGGSVSVWVQQ

SEQ ID NO: 35562 - protein, 482 aa, Cytophaga sp.
NGTMMQYFEWYVPNDGQQWNRLRTDAPYLSSVGITAVWTPPAYKGTSQADVGYGPYDLYDLGEFNQKGTVRTKYGTKGELKSAVNTLHSNGIQVYGDVVMNHKAGADYTENVTAVEVNPSNRNQETSGEYNIQAWTGFNFPGRGTTYSNFKWQWFHFDGTDWDQSRSLSRIFKFRGTGKAWDWEVSSENGNYDYLMYADIDYDHPDVVNEMKKWGVWYANEVGLDGYRLDAVKHIKFSFLKDWVDNARAAYGKEMFTVGEYWQNDLGALNNYLAKVNYNQSLFDAPLHYNFYAASTGGGYYDMRNILNNTLVASNPTKAVTLVENHDTQPGQSLESTVQPWFKPLAYAFILTRSGGYPSVFYGDMYGTKGTTTREIPALKSKIEPLLKARKDYAYGTQRDYIDNPDVIGWTREGDSTKAKSGLATVITDGPGGSKRMYVGTSNAGEIWYDLTGNRTDKITIGSDGYATFPVNGGSVSVWVQQ

SEQ ID NO: 35563 - protein, 478 aa, Bacillus sp.
NGTIMQYFEWNVPNDGQHWNRLHNNAQNLKNAGITAIWIPPAWKGTSQSDTGYGAYDLYDLGEFNQKGTVRTKYGTKAELERAIRSLKANGIQVYGDVVMNHKAGADQTERVQAVEVNPDNRNQEVSGTYQIEAWTGFNFPGRGNQHSSFKWRWYHFDGTDWDQSRQLSNRIYKFRGKAWDWEVDTEFGNYDYLMYADLDMDHPEVINELNRWGVWYANTLNLDGFRLDAVKHIKFSFMRDWLGHVRGQTGKNLFAVAEYWKNDLGALENYLSKTNWTMSAFDVPLHYNLYQASNSSGNYDMRNLLNGTLVQRHPSHAVTFVDNHDTQPGEALESFVQGWFKPLAYATILTREQGYPQVFYGDYYGIPSDGVPSYRQQIDPLLKARQQYAYGPQHDYLDHPDVIGWTREGDSSHAKSGLATLITDGPGGSKRMYAGLKNAGETWYDITGNRSDTVKIGSDGWGEFHVNDGSVSIYVQK

SEQ ID NO: 35564 - protein, 478 aa, Bacillus sp.
NGTIMQYFEWNVPNDGQHWNRLHNNAQNLKNAGITAIWIPPAWKGTSQSDTGYGAYDLYDLGEFNQRGTVRTKYGTKAELERAIRSLKANGIQVYGDVVMNHKAGADFTERVQAVEVNPQNRNQEVSGEYQIEAWTGFNFPGRGNQHSSFKWRWYHFDGTDWDQSRQLSNRIYKFRGKAWDWEVDTEFRNYDYLMYADLDMDHPEVINELNRWGVWYANTLNLDGFRLDAVKHIKFSFMRDWLGHVRAQTGKNLFAVAEYWKNDLGALENYLSKTNWTMSAFDVPLHYNLYQASNSSGNYDMRNLLNGTLVQRHPSHAVTFVDNHDTQPGEALESFVQGWFKPLAYATILTREQGYPQVFYGDYYGIPSDGVPSYRQQIDPLLKARQQYAYGPQHDYIDHPDVIGWTREGDSSAPKSGLATLITDGPGGSKRMYAGLKNAGETWYDITGNRSDTVKIGSDGWGEFHVNDGSVSIYVQK

SEQ ID NO: 35565 - protein, 478 aa, Bacillus sp.
NGTIMQYFEWNVPNDGQHWNRLHNNAQNLKNAGITAIWIPPAWKGTSQSDTGYGAYDLYDLGEFNQKGTVRTKYGTKAELERAIRSLKANGIQVYGDVVMNHKAGADFTERVQAVEVNPQNRNQEVSGEYQIEAWTGFNFPGRGNQHSSFKWRWYHFDGTDWDQSRQLSNRIYKFRGKAWDWEVDTEFGNYDYLMYADLDMDHPEVINELNRWGVWYANTLNLDGFRLDAVKHIKFSFMRDWLGHVRGQTGKNLFAVAEYWKNDLGALENYLSKTNWTMSAFDVPLHYNLYQASNSSGNYDMRNLLNGTLVQRHPSHAVTFVDNHDTQPGEALESFVQGWFKPLAYATILTREQGYPQVFYGDYYGIPSDGVPSYRQQIDPLLKARQQYAYGPQHDYLDHPDVIGWTREGDSSHPKSGLATLITDGPGGSKRMYAGLKNAGETWYDITGNRSDTVKIGSDGWGEFHVNDGSVSIYVQK

SEQ ID NO: 35566 - protein, 480 aa, Synthetic construct
NGTMMQYFEWYLPNDGNHWNRLNSDASNLKSKGITAVWIPPAWKGASQNDVGYGAYDLYDLGEFNQKGTVRTKYGTRSQLQAAVTSLKNNGIQVYGDVVMNHKGGADATEMVRAVEVNPNNRNQEVTGEYTIEAWTRFDFPGRGNTHSSFKWRWYHFDGVDWDQSRRLNNRIYKFRGHGKAWDWEVDTENGNYDYLMYADIDMDHPEVVNELRNWGVWYTNTLGLDGFRIDAVKHIKYSFTRDWINHVRSATGKNMFAVAEFWKNDLGAIENYLQKTNWNHSVFDVPLHYNLYNASKSGGNYDMRNIFNGTVVQRHPSHAVTFVDNHDSQPEEALESFVEEWFKPLAYALTLTREQGYPSVFYGDYYGIPTHGVPAMRSKIDPILEARQKYAYGPQHDYIDHPDVIGWTREGDSSHAKSGLAALITDGPGGSKRMYAGLKNAGETWYDITGNRSDTVKIGSDGWGEFHVNDGSVSIYVQK

SEQ ID NO: 35567 - protein, 478 aa, Bacillus sp.
NGTIMQYFEWNVPNDGQHWNRLHNNAQNLKNAGITAIWIPPAWKGTSQNDVGYGAYDLYDLGEFNQKGTVRTKYGTKAELERAIRSLKANGIQVYGDVVMNHKGGADFTERVQAVEVNPQNRNQEVSGTYQIEAWTGFNFPGRGNQHSSFKWRWYHFDGTDWDQSRQLANRIYKFRGKAWDWEVDTEFGNYDYLMYADVDMDHPEVINELNRWGVWYANTLNLDGFRLDAVKHIKFSFMRDWLGHVRGQTGKNLFAVAEYWKNDLGALENYLSKTNWTMSAFDVPLHYNLYQASNSSGNYDMRNLLNGTLVQRHPSHAVTFVDNHDTQPGEALESFVQGWFKPLAYATILTREQGYPQVFYGDYYGIPSDGVPSYRQQIDPLLKARQQYAYGPQHDYIDHPDVIGWTREGDSSAAKSGLAALITDGPGGSKRMYAGLKNAGETWYDITGNRSDTVKIGSDGWGEFHVNKGSVSIYVQK

SEQ ID NO: 35568 - protein, 480 aa, Synthetic construct
NGTMMQYFEWYLPNDGNHWNRLNSDASNLKSKGITAVWIPPAWKGASQNDVGYGAYDLYDLGEFNQKGTVRTKYGTRSQLQAAVTSLKNNGIQVYGDVVMNHKGGADATEMVRAVEVNPNNRNQEVTGEYTIEAWTRFDFPGRGNTHSSFKWRWYHFDGVDWDQSRRLNNRIYKFRGHGKAWDWEVDTENGNYDYLMYADIDMDHPEVVNELRNWGVWYTNTLGLDGFRIDAVKHIKYSFTRDWINHVRSATGKNMFAVAEFWKNDLGAIENYLQKTNWNHSVFDVPLHYNLYNASKSGGNYDMRNIFNGTVVQRHPSHAVTFVDNHDSQPEEALESFVEEWFKPLAYALTLTREQGYPSVFYGDYYGIPTHGVPAMRSKIDPILEARQKYAYGPQHDYIDHPDVIGWTREGDSSAAKSGLATLITDGPGGSKRMYAGLKNAGETWYDITGNRSDTVKIGSDGWGEFHVNDGSVSIYVQK

SEQ ID NO: 35569 - protein, 480 aa, Synthetic construct
NGTMMQYFEWYLPNDGNHWNRLNSDASNLKSKGITAVWIPPAWKGASQNDVGYGAYDLYDLGEFNQKGTVRTKYGTRSQLQAAVTSLKNNGIQVYGDVVMNHKGGADATEMVRAVEVNPNNRNQEVTGEYTIEAWTRFDFPGRGNTHSSFKWRWYHFDGVDWDQSRRLNNRIYKFRGHGKAWDWEVDTENGNYDYLMYADIDMDHPEVVNELRNWGVWYTNTLGLDGFRIDAVKHIKYSFTRDWINHVRSATGKNMFAVAEFWKNDLGAIENYLQKTNWNHSVFDVPLHYNLYNASKSGGNYDMRNIFNGTVVQRHPSHAVTFVDNHDSQPEEALESFVEEWFKPLAYALTLTREQGYPSVFYGDYYGIPTHGVPAMRSKIDPILEARQKYAYGPQHDYIDHPDVIGWTREGDSSAPKSGLAALITDGPGGSKRMYAGLKNAGETWYDITGNRSDTVKIGSDGWGEFHVNDGSVSIYVQK

SEQ ID NO: 35570 - protein, 480 aa, Synthetic construct
NGTMMQYFEWYLPNDGNHWNRLNSDASNLKSKGITAVWIPPAWKGASQNDVGYGAYDLYDLGEFNQKGTVRTKYGTRSQLQAAVTSLKNNGIQVYGDVVMNHKGGADATEMVRAVEVNPNNRNQEVTGEYTIEAWTRFDFPGRGNTHSSFKWRWYHFDGVDWDQSRRLNNRIYKFRGHGKAWDWEVDTENGNYDYLMYADIDMDHPEVVNELRNWGVWYTNTLGLDGFRIDAVKHIKYSFTRDWINHVRSATGKNMFAVAEFWKNDLGAIENYLQKTNWNHSVFDVPLHYNLYNASKSGGNYDMRNIFNGTVVQRHPSHAVTFVDNHDSQPEEALESFVEEWFKPLAYALTLTREQGYPSVFYGDYYGIPTHGVPAMRSKIDPILEARQKYAYGPQHDYLDHPDVIGWTREGDSSAAKSGLAALITDGPGGSKRMYAGLKNAGETWYDITGNRSDTVKIGSDGWGEFHVNDGSVSIYVQK

SEQ ID NO: 35571 - protein, 478 aa, Bacillus sp.
NGTIMQYFEWNVPNDGQHWNRLHNNAQNLKNAGITAIWIPPAWKGTSQNDVGYGAYDLYDLGEFNQKGTVRTKYGTKAELERAIRSLKANGIQVYGDVVMNHKGGADFTERVQAVEVNPQNRNQEVSGTYQIEAWTGFNFPGRGNQHSSFKWRWYHFDGTDWDQSRQLANRIYKFRGKAWDWEVDTEFGNYDYLMYADVDMDHPEVINELNRWGVWYANTLNLDGFRLDAVKHIKFSFMRDWLGHVRGQTGKNLFAVAEYWKNDLGALENYLSKTNWTMSAFDVPLHYNLYQASNSSGNYDMRNLLNGTLVQRHPSHAVTFVDNHDTQPGEALESFVQGWFKPLAYATILTREQGYPQVFYGDYYGIPSDGVPSYRQQIDPLLKARQQYAYGPQHDYLDHPDVIGWTREGDSSAAKSGLAALITDGPGGSKRMYAGLKNAGETWYDITGNRSDTVKIGSDGWGEFHVNDGSVSIYVQK

SEQ ID NO: 35572 - protein, 478 aa, Bacillus sp.
NGTIMQYFEWNVPNDGQHWNRLHNNAQNLKNAGITAIWIPPAWKGTSQNDVGYGAYDLYDLGEFNQKGTVRTKYGTKAELERAIRSLKANGIQVYGDVVMNHKGGADFTERVQAVEVNPQNRNQEVSGTYQIEAWTGFNFPGRGNQHSSFKWRWYHFDGTDWDQSRQLANRIYKFRGKAWDWEVDTEFGNYDYLMYADVDMDHPEVINELNRWGVWYANTLNLDGFRLDAVKHIKFSFMRDWLGHVRGQTGKNLFAVAEYWKNDLGALENYLSKTNWTMSAFDVPLHYNLYQASNSSGNYDMRNLLNGTLVQRHPSHAVTFVDNHDTQPGEALESFVQGWFKPLAYATILTREQGYPQVFYGDYYGIPSDGVPSYRQQIDPLLAARQQYAYGPQHDYIDHPDVIGWTREGDSSAAKSGLAALITDGPGGSKRMYAGLKNAGETWYDITGNRSDTVKIGSDGWGEFHVNDGSVSIYVQK

SEQ ID NO: 35573 - protein, 478 aa, Bacillus sp.
NGTMMQYFEWHLPNDGNHWNRLRDDASNLRNRGITAIWIPPAWKGTSQNDVGYGAYDLYDLGEFNQKGTVRTKYGTRSQLESAIHALKNNGVQVYGDVVMNHKGGADATENVLAVEVNPNNRNQEISGDYTIEAWTKFDFPGRGNTYSDFKWRWYHFDGVDWDQSRQFQNRIYKFRGKAWDWEVDSEFGNYDYLMYADYDMDHPEVVNELRRWGEWYTNTLNLDGFRIDAVKHIKFSFTRDWLTHVRNATGKGMPAVAEFWKNDLGALENYLNKTNWNHSVFDVPLHYNLYNASNGGGNYDMAKLLNGTVVQKHPMHAVTFVDNHDSQPNESLESFVQEWFKPLAYALILTREQGYPSVFYGDYYGIPTHSVPAMKAKIDPILEARQNFAYGPQHDYLDHPDVIGWTREGDSSHPKSGLATLITDGPGGSKRMYAGLKNAGETWYDITGNRSDTVKIGSDGWGEFHVNDGSVSIYVQK

SEQ ID NO: 35574 - protein, 478 aa, unidentified
NGTMMQYFEWHLPNDGNHWNRLRDDASNLRNRGITAIWIPPAWKGTSQNDVGYGAYDLYDLGEFNQKGTVRTKYGTRSQLESAIHALKNNGVQVYGDVVMNHKGGADATENVLAVEVNPNNRNQEISGDYTIEAYTKFDFPGRGNTYSDFKWRWYHFDGVDWDQSRQFQNRIYKFRGKAWDWEVDSEFGNYDYLMYADYDMDHPEVVNELRRWGEWYTNTLNLDGFRIDAVKHIKFSFTRDWLTHVRNATGKGMFAVAEFWKNDLGALENYLNKTNWNHSVFDVPLHYNLYNASNSRGNYDMAKLLNGTVVQKHPMHAVTFVDNHDSQPGESLESFVQEWFKPLAYALILTREQGYPSVFYGDYYGIPTHSVPAMKAKIDPILEARQNFAYGPQHDYLDHPDVIGWTREGDSSHPKSGLATLITDGPGGSKRMYAGLKNAGETWYDITGNRSDTVKIGSDGWGEFHVNDGSVSIYVQK

SEQ ID NO: 35575 - protein, 481 aa, Cytophaga sp.
MNGTMMQYFEWYVPNDGQQWNRLRTDAPYLSSVGITAVWTPPAYKGTSQADVGYGPYDLYDLGEFNQKGTVRTKYGTKGELKSAVNTLHSNGIQVYGDVVMNHKAGADYTENVTAVEVNPSNRNQETSGEYNIQAWTGFNFPGRGTTYSNFKWQWFHFDGTDWDQSRSLSRIFKFTGKAWDWEVSSENGNYDYLMYADIDYDHPDVVNEMKKWGVWYANEVGLDGYRLDAVKHIKFSFLKDWVDNARAATGKEMFTVGEYWQNDLGALNNYLAKVNYNQSLFDAPLHYNFYAASTGGGYYDMRNILNNTLVASNPTKAVTLVENHDTQPGQSLESTVQPWFKPLAYAFILTRSGGYPSVFYGDMYGTKGTTTREIPALKSKIEPLLKARKDYAYGTQRDYIDNPDVIGWTREGDSTKAKSGLATVITDGPGGSKRMYVGTSNAGEIWYDLTGNRTDKITIGSDGYATFPVNGGSVSVWVQQ

SEQ ID NO: 35576 - protein, 477 aa, Aspergillus niger
ATPAEWRSQSIYFLLTDRFARTDNSTTASCDLSARQYCGGSWQGIINQLDYIQGMGFTAIWITPVTAQIPQDTGYGQAYHGYWQQDAYALNSHYGTADDLKALASALHSRGMYLMVDVVANHMGHNGTGSSVDYSVYRPFNSQKYFHNLCWISDYNNQTNVEDCWLGDNTVALPDLDTTSTEVKNMWYDWVESLVSNYSVDGLRVDTVKNVQKNFWPGYNNASGVYCIGEVFDGDASYTCPYQEDLDGVLNYPMYYPLLRAFESTNGSISDLYNMINTVKSTCRDSTLLGTFVENHDNPRFANYTSDMSLAKNAATFTILADGIPIIYAGQEQHYSGGNDPYNREATWLSGYKTTSELYTHIAASNKIRTHAIKQDTGYLTYKNYPIYQDTSTLAMRKGYNGTQTITVLSNLGASGSSYTLSLPGTGYTAGQKITEIYTCTNLTVNSNGSVPVPMKSGLPRILYPADKLVNGSSFCS

SEQ ID NO: 35577 - protein, 480 aa, Cytophaga sp.
NGTMMQYFEWYVPNDGQQWNRLRTDAPYLSSVGITAVWTPPAYKGTSQADVGYGPYDLYDLGEFNQKGTVRTKYGTKGELKSAVNTLHSNGIQVYGDVVMNHKAGADYTENVTAVEVNPSNRNQETSGEYNIQAWTGFNFPGRGTTYSNFKWQWFHFDGTDWDQSRSLSRIFKFTGKAWDWEVSSENGNYDYLMYADIDYDHPDVVNEMKKWGVWYANEVGLDGYRLDAVKHIKFSFLKDWVDNARAATGKEMFTVGEYWQNDLGALNNYLAKVNYNQSLFDAPLHYNFYAASTGGGYYDMRNILNNTLVASNPTKAVTLVENHDTQPGQSLESTVQPWFKPLAYAFILTRSGGYPSVFYGDMYGTNGTTTREIPALKSKIEPLLKARKDYAYGTQRDYIDNPDVIGWTREGDSTKAKSGLATVITDGPGGSKRMYVGTSNAGEIWYDLTGNRTDKITIGSDGYATFPVNGGSVSVWVQQ

SEQ ID NO: 35578 - protein, 480 aa, Cytophaga sp.
NGTMMQYFEWYVPNDGQQWNRLRTDAPYLSSVGITAVWTPPAYKGTSQADVGYGPYDLYDLGEFNQKGTVRTKYGTKGELKSAVNTLHSNGIQVYGDVVMNHKAGADYTENVTAVEVNPSNRNQETSGEYNIQASTGFNFPGRGTTYSNFKWQWFHFDGTDWDQSRSLSRIFKFTGKAWDWEVSSENGNYDYLMYADIDYDHPDVVNEMKKWGVWYANEVGLDGYRLDAVKHIKFSFLKDWVDNARAATGKEMFTVGEYWQNDLGALNNYLAKVNYNQSLFDAPLHYNFYAASTGGGYYDMRNILNNTLVASNPTKAVTLVENHDTQPGQSLESTVQPWFKPLAYAFILTRSGGYPSVFYGDMYGTKGTTTREIPALKSKIEPLLKARKDYAYGTQRDYIDNPDVIGWTREGDSTKAKSGLATVITDGPGGSKRMYVGTSNAGEIWYDLTGNRTDKITIGSDGYATFPVNGGSVSVWVQQ

SEQ ID NO: 35579 - protein, 480 aa, Cytophaga sp.
NGTMMQYFEWYVPNDGQQWNRLRTDAPYLSSVGITAVWTPPAYKGTSQADVGYGPYDLYDLGEFNQKGTVRTKYGTKGELKSAVNTLHSNGIQVYGDVVMNHKAGADYTENVTAVEVNPSNRNQETSGEYNIQAWTGFNFPGRGTTYSNFKWQWFHFDGTDWDQSRSLSRIFKFTGKAWDWEVSSENGNYDYLMYADIDYDHPDVVNEMKKWGVWYANEVGLDGYRLDAVKHIKFSFLKDWVDNARAATGKEMFTVGEYWQNDLGALNNYLAKVNYNQSLFDAPLHYNFYAASTGGGYYDMRNILNNTLVASNPTKAVTLVENHDTQPGQSLESTVQPWFKPLAYAFILTRSGGYPSVFYGDMYGTKGTTTREIPALKSKIEPLLKARKDYAYGTQRDYIDNPDVIGWTREGDSTKAKSGLATVITDGPGGSKRMYVGTSNAGEIWYDLTWNRTDKITIGSDGYATFPVNGGSVSVWVQQ

SEQ ID NO: 35580 - protein, 480 aa, Cytophaga sp.
NGTMMQYFEWYVPNDGQQWNRLRTDAPYLSSVGITAVWTPPAYKGTSQADVGYGPYDLYDLGEFNQKGTVRTKYGTKGELKSAVNTLHSNGIQVYGDVVMNHKAGADYTENVTAVEVNPSNRNQETSGEYNIQAWTGFNFPWRGTTYSNFKWQWFHFDGTDWDQSRSLSRIFKFTGKAWDWEVSSENGNYDYLMYADIDYDHPDVVNEMKKWGVWYANEVGLDGYRLDAVKHIKFSFLKDWVDNARAATGKEMFTVGEYWQNDLGALNNYLAKVNYNQSLFDAPLHYNFYAASTGGGYYDMRNILNNTLVASNPTKAVTLVENHDTQPGQSLESTVQPWFKPLAYAFILTRSGGYPSVFYGDMYGTKGTTTREIPALKSKIEPLLKARKDYAYGTQRDYIDNPDVIGWTREGDSTKAKSGLATVITDGPGGSKRMYVGTSNAGEIWYDLTGNRTDKITIGSDGYATFPVNGGSVSVWVQQ

SEQ ID NO: 35581 - protein, 480 aa, Cytophaga sp.
NGTMMQYFEWYVPNDGQQWNRLRTDAPYLSSVGITAVWTPPAYKGTSQADVGYGPYDLYDLGEFNQKGTVRTKYGTKGELKSAVNTLHSNGIQVYGDVVMNHKAGADYTENVTAVEVNPSNRNQETSGEYNIQAWTGFNFPGRGTTYSNFKWQWFHFDGTDWDQSRSLSRIFKFTGKAWDWEVSSENGNYDYLMYADIDYDHPDVVNEMKKWGVWYANEVGLDGYRLDAVKHIKFSFLKDWVDNARAATGKEMFTVGEYWQNDLGALNNYLAKVNYNQSLFDAPLHYNFYAASTGGGYYDMRNILNNTLVASNPTKAVTLVENHDTQPGQSLESTVQPWFKPLAYAFILTRSGGYPSVFYGDMYGTKGTTTREIPALKSKIEPLLKARKDYAYGTQRDYIDNPDVIGWTREGDSTKAKSGLATVITDGPGGSKRMYVGTSNAGEIWYDLTGNRTHKITIGSDGYATFPVNGGSVSVWVQQ

SEQ ID NO: 35582 - protein, 480 aa, Cytophaga sp.
NGTMMQYFEWYVPNDGQQWNRLRTDAPYLSSVGITAVWTPPAYKGTSQADVGYGPYDLYDLGEFNQKGTVRTKYGTKGELKSAVNTLHSNGIQVYGDVVMNHKAGADYTENVTAVEVNPSNRNQETSGEYNIQAWTGFNFPGRGTTYSNFKWQWFHFDGTDWDQSRSLSRIFKFTGKAWDWEVSSENGNYDYLMYADIDYDHPDVVNEMKKWGVWYANEVGLDGYRLDAVKHIKFSFSKDWVDNARAATGKEMFTVGEYWQNDLGALNNYLAKVNYNQSLFDAPLHYNFYAASTGGGYYDMRNILNNTLVASNPTKAVTLVENHDTQPGQSLESTVQPWFKPLAYAFILTRSGGYPSVFYGDMYGTKGTTTREIPALKSKIEPLLKARKDYAYGTQRDYIDNPDVIGWTREGDSTKAKSGLATVITDGPGGSKRMYVGTSNAGEIWYDLTGNRTDKITIGSDGYATFPVNGGSVSVWVQQ

SEQ ID NO: 35583 - protein, 480 aa, Cytophaga sp.
NGTMMQYFEWYVPNDGQQWNRLRTDAPYLSSVGITAVWTPPAYKGTSQADVGYGPYDLYDLGEFNQKGTVRTKYGTKGELKSAVNTLHSNGIQVYGDVVMNHKAGADYTENVTAVEVNPSNRNQETSGEYNIQAWTGFNFPGRGTTYSNFKWQWFHFDGTDWDQSRSLSRIFKFTGKAWDWEVSSENGNYDYLMYADIDYDHPDVVNEMKKWGVWYANEVGLDGYRLDAVKHIKFSFLKDWVDNARAATGKEMFTVGEYWQNDLGALNNYLAKVNYNQSLFDAPLHYNFYAASTGGGYYDMRNILNNTLVASNPTKAVTLVENHDTQPGQSLESTVQPWFKPLAYAFILTRSGGYPSVFYGDMYGTKGTTTREIPALKSKIEPLLKARKDYAYGTQRDYIDNPDVIGWTREGDSTKAKSGLATVIDDGPGGSKRMYVGTSNAGEIWYDLTGNRTDKITIGSDGYATFPVNGGSVSVWVQQ

SEQ ID NO: 35584 - protein, 480 aa, Cytophaga sp.
NGTMMQYFEWYVPNDGQQWNRLRTDAPYLHSVGITAVWTPPAYKGTSQADVGYGPYDLYDLGEFNQKGTVRTKYGTKGELKSAVNTLHSNGIQVYGDVVMNHKAGADYTENVTAVEVNPSNRNQETSGEYNIQAWTGFNFPGRGTTYSNFKWQWFHFDGTDWDQSRSLSRIFKFTGKAWDWEVSSENGNYDYLMYADIDYDHPDVVNEMKKWGVWYANEVGLDGYRLDAVKHIKFSFLKDWVDNARAATGKEMFTVGEYWQNDLGALNNYLAKVNYNQSLFDAPLHYNFYAASTGGGYYDMRNILNNTLVASNPTKAVTLVENHDTQPGQSLESTVQPWFKPLAYAFILTRSGGYPSVFYGDMYGTKGTTTREIPALKSKIEPLLKARKDYAYGTQRDYIDNPDVIGWTREGDSTKAKSGLATVITDGPGGSKRMYVGTSNAGEIWYDLTGNRTDKITIGSDGYATFPVNGGSVSVWVQQ

SEQ ID NO: 35585 - protein, 480 aa, Cytophaga sp.
NGTMMQYFEWYVPNDGQQWNRLRTDAPYLSSVGITAVWTPPAYKGTSQADVGYGPYDLYDLGEFNQKGTVRTKYGTKGELKSAVNTLHSNGIQVYGDVVMNHKAGADYTENVTAVEVNPSNRNQETSGEYNIQAWTGFNFPGRGTTYSNFKWQWFHFDGTDWDQSRSLSRIFKFTGKAWDWEVSSENGNYDYLMYADIDYDHPDVVNEMKKWGVWYANEVGLDGYRLDAVKHIKFSFLKDWVDNARAATGKEMFTVGEYWQNDLGALNNYLAKVNYNQSLFDAPLHYNFYAASTGGGYYDMRNILNNTLVASNPTKAVTLVENHDTQPGQSLESTVQPWFKPLAYAFILTRSGGYPSVFYGDMYGTKGTTTREIPALKSKIEPLLKARKDYAYGTQRDYIDNPDVIGWTREGDSTKAKSGLATVITDGPGGAKRMYVGTSNAGEIWYDLTGNRTDKITIGSDGYATFPVNGGSVSVWVQQ

SEQ ID NO: 35586 - protein, 480 aa, Cytophaga sp.
NGTMMQYFEWYVPNDGQQWNRLRTDAPYLSSVGITAVWTPPAYKGTSQADVGYGPYDLYDLGEFNQKGTVRTKYGTKGELKSAVNTLHSNGIQVYGDVVMNHKAGADYTENVTAVEVNPSNRNQETSGEYNIQAWTGFNFPGRGTTYSNFKWQWFHFDGTDWDQSRSLSRIFKFTGKAWDWEVSSENGNYDYLMYADIDYDHPDVVNEMKKWGVWYANEVGLDGYRLDAVKHIKFSFLKDWVDNARAATGKEMFTVGEYWQNDLGALNNYLAKVNYNQSLFDAPLHYNFYAASTGGGYYDMRNILNNTLVASNPTKAVTLVENHDTQPGQDLESTVQPWFKPLAYAFILTRSGGYPSVFYGDMYGTKGTTTREIPALKSKIEPLLKARKDYAYGTQRDYIDNPDVIGWTREGDSTKAKSGLATVITDGPGGSKRMYVGTSNAGEIWYDLTGNRTDKITIGSDGYATFPVNGGSVSVWVQQ

SEQ ID NO: 35587 - protein, 480 aa, Cytophaga sp.
NGTMMQYFEWYVPNDGQQWNRLRTDAPYLSSVGITAVWTPPATKGTSQADVGYGPYDLYDLGEFNQKGTVRTKYGTKGELKSAVNTLHSNGIQVYGDVVMNHKAGADYTENVTAVEVNPSNRNQETSGEYNIQAWTGFNFPGRGTTYSNFKWQWFHFDGTDWDQSRSLSRIFKFTGKAWDWEVSSENGNYDYLMYADIDYDHPDVVNEMKKWGVWYANEVGLDGYRLDAVKHIKFSFLKDWVDNARAATGKEMFTVGEYWQNDLGALNNYLAKVNYNQSLFDAPLHYNFYAASTGGGYYDMRNILNNTLVASNPTKAVTLVENHDTQPGQSLESTVQPWFKPLAYAFILTRSGGYPSVFYGDMYGTKGTTTREIPALKSKIEPLLKARKDYAYGTQRDYIDNPDVIGWTREGDSTKAKSGLATVITDGPGGSKRMYVGTSNAGEIWYDLTGNRTDKITIGSDGYATFPVNGGSVSVWVQQ

SEQ ID NO: 35588 - protein, 480 aa, Cytophaga sp.
NGTMMQYFEWYVPNDGQQWNRLRTDAPYLSSVGITAVWTPPAYKGTSQADVGYGPYDLYDLGEFNQKGTVRTKYGTKGELKSAVNTLHSNGIQVYGDVVMNHKAGADYTENVTAVEVNPSNRNQETSGVYNIQAWTGFNFPGRGTTYSNFKWQWFHFDGTDWDQSRSLSRIFKFTGKAWDWEVSSENGNYDYLMYADIDYDHPDVVNEMKKWGVWYANEVGLDGYRLDAVKHIKFSFLKDWVDNARAATGKEMFTVGEYWQNDLGALNNYLAKVNYNQSLFDAPLHYNFYAASTGGGYYDMRNILNNTLVASNPTKAVTLVENHDTQPGQSLESTVQPWFKPLAYAFILTRSGGYPSVFYGDMYGTKGTTTREIPALKSKIEPLLKARKDYAYGTQRDYIDNPDVIGWTREGDSTKAKSGLATVITDGPGGSKRMYVGTSNAGEIWYDLTGNRTDKITIGSDGYATFPVNGGSVSVWVQQ

SEQ ID NO: 35589 - protein, 480 aa, Cytophaga sp.
NGTMMQYFEWYVPNDGQQWNRLRTDAPYLSSVGITAVWTPPAYKGTSQADVGYGPYDLYDLGEFNQKGTVRTKYGTKGELKSAVNTLHSNGIQVYGDVVMNHKAGADYTENVTAVEVNPSNRNQETSGEYNIQAWTGFNFPGRGTTYSNFKWQWFHFDGTDWDQSRSLSRIFKFTGKAWDWEVSSENGNYDYLMYADIDYDHPDVVNEMKKWGVWYANEVGLDGYRLDAVKHIKFSFLKDWVDNARAATGKEMFTVGEYWQNDLGALNNYLAKVNYNQSLFDAPLHYNFYAASTGGGYYDMRNILNNTLVASNPTKAVTLVENHDTQPGQSLESTVQPWFKPLAYAFILTRSGGYPSVFYGDMYGTKGTTTREIPALKSKIEPLLKARKDYAYGTQRDYIDNPDVIGWTREGDSTKAKSGLATVITDGPGGSKRMYVGTSNAGEIWYDLTGNRTDKITIGSDGYATFPVNGHSVSVWVQQ

SEQ ID NO: 35590 - protein, 480 aa, Cytophaga sp.
NGTMMQYFEWYVPNDGQQWNRLRTDAPYLSSVGITAVWTPPAYKGTSQADVGYGPYDLYDLGEFNQKGTVRTKYGTKGELKSAVNTLHSNGIQVYGDVVMNHKAGADYTENVTAVEVNPSNRNQETSGEYNIQAWTGFNFPGRGTTYSNFKWQWFHFDGTDWDQSRSLSRIFKFTGKAWDWEVSSENGNYDYLMYADIDYDHPDVVNEMKKWGVWYANEVGLDGYRLDAVKHIKFSFLKDWVDNARAATGKEMFTVGEYWQNDLGALNNYLAKVNYNQSLFDAPLHYNFYAASTGGGYYDMRNILNNTLVASNPTKAVTLVDNHDTQPGQSLESTVQPWFKPLAYAFILTRSGGYPSVFYGDMYGTKGTTTREIPALKSKIEPLLKARKDYAYGTQRDYIDNPDVIGWTREGDSTKAKSGLATVITDGPGGSKRMYVGTSNAGEIWYDLTGNRTDKITIGSDGYATFPVNGGSVSVWVQQ

SEQ ID NO: 35591 - protein, 480 aa, Cytophaga sp.
NGTMMQYFEWYVPNDGQQWNRLRTDAPYLSSVGITAVWTPPAYKGTSQADVGYGPYDLYDLGEFNQKGTVRTKYGTKGELKSAVNTLHSNGIQVYGDVVMNHKAGADYTENVTAVEVNPSNRNQETSGEYNIQAWTGFNFPGRGTTYSNFKWQWFHFDGTDWDQMRSLSRIFKFTGKAWDWEVSSENGNYDYLMYADIDYDHPDVVNEMKKWGVWYANEVGLDGYRLDAVKHIKFSFLKDWVDNARAATGKEMFTVGEYWQNDLGALNNYLAKVNYNQSLFDAPLHYNFYAASTGGGYYDMRNILNNTLVASNPTKAVTLVENHDTQPGQSLESTVQPWFKPLAYAFILTRSGGYPSVFYGDMYGTKGTTTREIPALKSKIEPLLKARKDYAYGTQRDYIDNPDVIGWTREGDSTKAKSGLATVITDGPGGSKRMYVGTSNAGEIWYDLTGNRTDKITIGSDGYATFPVNGGSVSVWVQQ

SEQ ID NO: 35592 - protein, 480 aa, Cytophaga sp.
NGTMMQYFEWYVPNDGQQWNRLRTDAPYLSSVGITAVWTPPAYKGTSQADVGYGPYDLYDLGEFNQKGTVRTKYGTKGELKSAVNTLHSNGIQVYGDVVMNHKAGADYTENVTAVEVNPSNRNQETSGEYNIQAWTGFNFAGRGTTYSNFKWQWFHFDGTDWDQSRSLSRIFKFTGKAWDWEVSSENGNYDYLMYADIDYDHPDVVNEMKKWGVWYANEVGLDGYRLDAVKHIKFSFLKDWVDNARAATGKEMFTVGEYWQNDLGALNNYLAKVNYNQSLFDAPLHYNFYAASTGGGYYDMRNILNNTLVASNPTKAVTLVENHDTQPGQSLESTVQPWFKPLAYAFILTRSGGYPSVFYGDMYGTKGTTTREIPALKSKIEPLLKARKDYAYGTQRDYIDNPDVIGWTREGDSTKAKSGLATVITDGPGGSKRMYVGTSNAGEIWYDLTGNRTDKITIGSDGYATFPVNGGSVSVWVQQ

SEQ ID NO: 35593 - protein, 480 aa, Cytophaga sp.
NGTMMQYFEWYVPNDGQQWNRLRTDAPYLSSVGITAVWTPPAYKGTSQADVGYGPYDLYDLGEFNQKGTVRTKYGTKGELKSAVNTLHSNGIQVYGDVVMNHKAAADYTENVTAVEVNPSNRNQETSGEYNIQAWTGFNFPGRGTTYSNFKWQWFHFDGTDWDQSRSLSRIFKFTGKAWDWEVSSENGNYDYLMYADIDYDHPDVVNEMKKWGVWYANEVGLDGYRLDAVKHIKFSFLKDWVDNARAATGKEMFTVGEYWQNDLGALNNYLAKVNYNQSLFDAPLHYNFYAASTGGGYYDMRNILNNTLVASNPTKAVTLVENHDTQPGQSLESTVQPWFKPLAYAFILTRSGGYPSVFYGDMYGTKGTTTREIPALKSKIEPLLKARKDYAYGTQRDYIDNPDVIGWTREGDSTKAKSGLATVITDGPGGSKRMYVGTSNAGEIWYDLTGNRTDKITIGSDGYATFPVNGGSVSVWVQQ

SEQ ID NO: 35594 - protein, 480 aa, Cytophaga sp.
NGTMMQYFEWYVPNDGQQWNRLRTDAPYLSSVGITAVWTPPAYKGTSQADVGYGPYDLYDLGEFNQKGTVRTKYGTKGELKSAVNTLHSNGIQVYGDVVMNHKAGADYTENVTAVEVNPSNRNQETSGEYNIQAWTGFNFPGRGTTYSNFKWQWFHFDGTDWDQSRSLSRIFKFTGKAWDWEVSSENGNYDYLMYADIDYDHPDVVNEMKKWGVWYANEVGLDGYRLDAVKHIKFFFLKDWVDNARAATGKEMFTVGEYWQNDLGALNNYLAKVNYNQSLFDAPLHYNFYAASTGGGYYDMRNILNNTLVASNPTKAVTLVENHDTQPGQSLESTVQPWFKPLAYAFILTRSGGYPSVFYGDMYGTKGTTTREIPALKSKIEPLLKARKDYAYGTQRDYIDNPDVIGWTREGDSTKAKSGLATVITDGPGGSKRMYVGTSNAGEIWYDLTGNRTDKITIGSDGYATFPVNGGSVSVWVQQ

SEQ ID NO: 35595 - protein, 480 aa, Cytophaga sp.
NGTMMQYFEWYVPNDGQQWNRLRTDAPYLSSVGITAVWTPPAYKGTSQADVGYGPYDLYDLGEFNQKGTVRTKYGTKGELKSAVNTLHSNGIQVYGDVVMNHKAGADYTENVTAVEVNPSNRNQETSGEYNIQAWTGFNFPGRGTTYSNFKWQWFHFDGTDWDQSRSLSRIFKFTGKAWDWEVSSENGNYDYLMYADIDYDHPDVVNEMKKWGVWYANEVGLDGYRLDAVKHIKFSFLKDWVDNARAATGKEMFTVGEYWQNDLGALNNYLAKVNYNQSLFDAPLHYNFYAASTGGGYYDMRNILNNTLVASNPTKAVTLVENHDTQPGQSLESTVQPWFKPLAYAFILTRSGGYPSVFYGDMYGTKGTTTREIPALKSKIEPLLKARKDYAYGTQRDYIDNPDVIGWTREGDSTKAKSGLATVITDGPGGSKRMYVGTSNAGEIWYDLTFNRTDKITIGSDGYATFPVNGGSVSVWVQQ

SEQ ID NO: 35596 - protein, 480 aa, Cytophaga sp.
NGTMMQYFEWYVPNDGQQWNRLRTDAPYLSSVGITAVWTPPAYKGTSQADVGYGPYDLYDLGEFNQKGTVRTKYGTKGELKSAVNTLHSNGIQVYGDVVMNHKAGADYTENVTAVEVNPSNRNQETSGEYNIQAWTGFNFPGRGTTYSNFKWQWFHFDGTDWDQSRSLSRIFKFTGKAWDWEVSSENCNYDYLMYADIDYDHPDVVNEMKKWGVWYANEVGLDGYRLDAVKHIKFSFLKDWVDNARAATGKEMFTVGEYWQNDLGALNNYLAKVNYNQSLFDAPLHYNFYAASTGGGYYDMRNILNNTLVASNPTKAVTLVENHDTQPGQSLESTVQPWFKPLAYAFILTRSGGYPSVFYGDMYGTKGTTTREIPALKSKIEPLLKARKDYAYGTQRDYIDNPDVIGWTREGDSTKAKSGLATVITDGPGGSKRMYVGTSNAGEIWYDLTGNRTDKITIGSDGYATFPVNGGSVSVWVQQ

SEQ ID NO: 35597 - protein, 480 aa, Cytophaga sp.
NGTMMQYFEWYVPNDGQQWNRLRTDAPYLSSVGITAVWTPPAYKGTSQADVGYGPYDLYDLGEFNQKGTVRTKYGTKGELKSAVNTLHSNGIQVYGDVVMNHKAGADYTENVTAVEVNPSNRNQETSGEYNIQAWTGFNFPGRGTTYSNFKWQWFHFDGTDWDQSRSLSRIFKFTGKAWDWEVSSENGNYDYLMYADIDYDHPDVVNEMKKWGVWYANEVGLDGYRLDAVKHIKFSFLKDWVDNARAATGKEMFTVGEYWQNDLGALNNYLAKVNYNQSLFDAPLHYNFYAASTGGGYYDMRNILNNTLVASNPTKAVTLVENHDTQPGQSLESTVQPWFKPLAYAFILTRSGGYPSVFYGDMYGTKGTTTREIPALKSKIEPLLKARKDYAYGTQRDYIDNPDVIGWTREGDSTKAKSGLATVITDGPGGSKRMYVGTSNAGEIWYDLSGNRTDKITIGSDGYATFPVNGGSVSVWVQQ

SEQ ID NO: 35598 - protein, 480 aa, Cytophaga sp.
NGTMMQYFEWYVPNDGQQWNRLRTDAPYLSSVGITAVWTPPAYKGTSQADVGYGPYDLYDLGEFNQKGTVRTKYGTKGELKSAVNTLHSNGIQVYGDVVMNHKAGADYTENVTAVEVNPSNRNQETSGNYNIQAWTGFNFPGRGTTYSNFKWQWFHFDGTDWDQSRSLSRIFKFTGKAWDWEVSSENGNYDYLMYADIDYDHPDVVNEMKKWGVWYANEVGLDGYRLDAVKHIKFSFLKDWVDNARAATGKEMFTVGEYWQNDLGALNNYLAKVNYNQSLFDAPLHYNFYAASTGGGYYDMRNILNNTLVASNPTKAVTLVENHDTQPGQSLESTVQPWFKPLAYAFILTRSGGYPSVFYGDMYGTKGTTTREIPALKSKIEPLLKARKDYAYGTQRDYIDNPDVIGWTREGDSTKAKSGLATVITDGPGGSKRMYVGTSNAGEIWYDLTGNRTDKITIGSDGYATFPVNGGSVSVWVQQ

SEQ ID NO: 35599 - protein, 480 aa, Cytophaga sp.
NGTMMQYFEWYVPNDGQQWNRLRTDAPYLSSVGITAVWTPPAYKGTSQADVGYGPYDLYDLGEFNQKGTVRTKYGTKGELKSAVNTLHSNGIQVYGDVVMNHKAGADYTENVTAVEVNPSNRNQETSGEYNIQAWTGFNFPGRGTTYSNFKWQWFHFDGTDWDQSRSLSRIFKFTGKAWDWEVSSENGNYDYLMYADIDYDHPDVVNEMKKWGVWYANEVGLDGYRLDAVKHIKFSFLKDWVDNARAATGKEMFTVGEYWQNDLQALNNYLAKVNYNQSLFDAPLHYNFYAASTGGGYYDMRNILNNTLVASNPTKAVTLVENHDTQPGQSLESTVQPWFKPLAYAFILTRSGGYPSVFYGDMYGTKGTTTREIPALKSKIEPLLKARKDYAYGTQRDYIDNPDVIGWTREGDSTKAKSGLATVITDGPGGSKRMYVGTSNAGEIWYDLTGNRTDKITIGSDGYATFPVNGGSVSVWVQQ

SEQ ID NO: 35600 - protein, 480 aa, Cytophaga sp.
NGTMMQYFEWYVPNDGQQWNRLRTDAPYLSSVGITAVWTPPAYKGTSQADVGYGPYDLYDLGEFNQKGTVRTKYGTKGELKSAVNTLHANGIQVYGDVVMNHKAGADYTENVTAVEVNPSNRNQETSGEYNIQAWTGFNFPGRGTTYSNFKWQWFHFDGTDWDQSRSLSRIFKFTGKAWDWEVSSENGNYDYLMYADIDYDHPDVVNEMKKWGVWYANEVGLDGYRLDAVKHIKFSFLKDWVDNARAATGKEMFTVGEYWQNDLGALNNYLAKVNYNQSLFDAPLHYNFYAASTGGGYYDMRNILNNTLVASNPTKAVTLVENHDTQPGQSLESTVQPWFKPLAYAFILTRSGGYPSVFYGDMYGTKGTTTREIPALKSKIEPLLKARKDYAYGTQRDYIDNPDVIGWTREGDSTKAKSGLATVITDGPGGSKRMYVGTSNAGEIWYDLTGNRTDKITIGSDGYATFPVNGGSVSVWVQQ

SEQ ID NO: 35601 - protein, 480 aa, Cytophaga sp.
NGTMMQYFEWYVPNDGQQWNRLRTDAPYLESVGITAVWTPPAYKGTSQADVGYGPYDLYDLGEFNQKGTVRTKYGTKGELKSAVNTLHSNGIQVYGDVVMNHKAGADYTENVTAVEVNPSNRNQETSGEYNIQAWTGFNFPGRGTTYSNFKWQWFHFDGTDWDQSRSLSRIFKFTGKAWDWEVSSENGNYDYLMYADIDYDHPDVVNEMKKWGVWYANEVGLDGYRLDAVKHIKFSFLKDWVDNARAATGKEMFTVGEYWQNDLGALNNYLAKVNYNQSLFDAPLHYNFYAASTGGGYYDMRNILNNTLVASNPTKAVTLVENHDTQPGQSLESTVQPWFKPLAYAFILTRSGGYPSVFYGDMYGTKGTTTREIPALKSKIEPLLKARKDYAYGTQRDYIDNPDVIGWTREGDSTKAKSGLATVITDGPGGSKRMYVGTSNAGEIWYDLTGNRTDKITIGSDGYATFPVNGGSVSVWVQQ

SEQ ID NO: 35602 - protein, 480 aa, Cytophaga sp.
NGTMMQYFEWYVPNDGQQWNRLRTDAPYLSSVGITAVWTPPAYKGTSQADVGYGPYDLYDLGEFNQKGTVRTKYGTKGELKSAVNTLHSNGIQVYGDVVMNHKAGADYTENVTAVEVNPSNRNQEISGEYNIQAWTGFNFPGRGTTYSNFKWQWFHFDGTDWDQSRSLSRIFKFTGKAWDWEVSSENGNYDYLMYADIDYDHPDVVNEMKKWGVWYANEVGLDGYRLDAVKHIKFSFLKDWVDNARAATGKEMFTVGEYWQNDLGALNNYLAKVNYNQSLFDAPLHYNFYAASTGGGYYDMRNILNNTLVASNPTKAVTLVENHDTQPGQSLESTVQPWFKPLAYAFILTRSGGYPSVFYGDMYGTKGTTTREIPALKSKIEPLLKARKDYAYGTQRDYIDNPDVIGWTREGDSTKAKSGLATVITDGPGGSKRMYVGTSNAGEIWYDLTGNRTDKITIGSDGYATFPVNGGSVSVWVQQ

SEQ ID NO: 35603 - protein, 480 aa, Cytophaga sp.
NGTMMQYFEWYVPNDGQQWNRLRTDAPYLSSVGITAVWTPPAYKGTSQADVGYGPYDLYDLGEFNQKGTVRTKYGTKGELKSAVNTLHSNGIQVYGDVVMNHKAGADYTENVTAVEVNPSNRNQETSGEYNIQAWTGFNFPGRGTTYSNFKWQWFHFDGTDWDQSRSLSRIFKFTGKAWDWEVSSENGNYDYLMYADIDYDHPDVVNEMKKWGVWYANEVGLDGYRLDAVKHIKFSFLKDWVDNARAATGKEMFTVGEYWQNDLGALNNYLAKVNYNTSLFDAPLHYNFYAASTGGGYYDMRNILNNTLVASNPTKAVTLVENHDTQPGQSLESTVQPWFKPLAYAFILTRSGGYPSVFYGDMYGTKGTTTREIPALKSKIEPLLKARKDYAYGTQRDYIDNPDVIGWTREGDSTKAKSGLATVITDGPGGSKRMYVGTSNAGEIWYDLTGNRTDKITIGSDGYATFPVNGGSVSVWVQQ

SEQ ID NO: 35604 - protein, 480 aa, Cytophaga sp.
NGTMMQYFEWYVPNDGQQWNRLRTDAPYLSSVGITAVWTPPAYKGTSQADVGYGPYDLYDLGEFNQKGTVRTKYGTKGELKSAVNTLHSNGIQVYGDVVMNHKAGADYTENVTAVEVNPSNRNQETSGEYNIQAWTGFNFPGRGTTYSNFKWQWFHFDGTDWDQSRSLSRIFKFTGKAWDWEVSSENGNYDYLMYADIDYDHPDVVNEMKKWGVWYANEVGLDGYRLDAVKHIKFSFLKDWVDNARAATGKEMFTVGEYWQNDLGALNNYLAKVNYNQSLFDAPLHYNFYAASTGGGYYDMRNILNNTLVASNPTKAVTLVENHDTQPGQSLESTVQPWFKPLAYAFILTRSGGYPSVFYGDMYGTKGTTTREIPALKSKIEPLLKARKDYAYGTQRDYIDNPDVIGWTRRGDSTKAKSGLATVITDGPGGSKRMYVGTSNAGEIWYDLTGNRTDKITIGSDGYATFPVNGGSVSVWVQQ

SEQ ID NO: 35605 - protein, 480 aa, Cytophaga sp.
NGTMMQYFEWYVPNDGQQWNRLRTDAPYLSSVGITAVWTPPAYKGTSQADVGYGPYDLYDLGEFNQKGTVRTKYGTKGELKSAVNTLHSNGIQVYGDVVMNHKAGADYTENVTAVEVNPSNRNQETSGEYNIQAWTGFNFPGRGTTYSNFKWQWFHFDGTDWDQSRSLSRIFKFTGKAWDWEVSSENGNYDYLMYADIDYCHPDVVNEMKKWGVWYANEVGLDGYRLDAVKHIKFSFLKDWVDNARAATGKEMFTVGEYWQNDLGALNNYLAKVNYNQSLFDAPLHYNFYAASTGGGYYDMRNILNNTLVASNPTKAVTLVENHDTQPGQSLESTVQPWFKPLAYAFILTRSGGYPSVFYGDMYGTKGTTTREIPALKSKIEPLLKARKDYAYGTQRDYIDNPDVIGWTREGDSTKAKSGLATVITDGPGGSKRMYVGTSNAGEIWYDLTGNRTDKITIGSDGYATFPVNGGSVSVWVQQ

SEQ ID NO: 35606 - protein, 480 aa, Cytophaga sp.
NGTMMQYFEWYVPNDGQQWNRLRTDAPYLSSVGITAVWTPPAYKGTSQADVGYGPYDLYDLGEFNQKGTVRTKYGTKGELKSAVNTLHSNGIQVYGDVVMNHKAGADYTENVTAVEVNPSNRNQETSGEYNIQAWTGFNFPGRGTTYSNFKWQWFHFDGTDWDQSRSLSRIFKFTGKAWDWEVSSENGNYDYLMYADIDYDHPDVVNEMKKWGVWYANEVGLDGYRLDAVKHIKFSFLKDWVDNARAATGKEMFTVGEYWQNDLGALNNYLAKVNYNQSLFDAPLHYNFYAASTGGGYYDMRNILNNTLVASNPTKAVTLVENHDTQPGQSLESTVQPWFKPLAYAFILTRSGGYPSVFYGDMYGTKGTTTREIPALKSKIEPLLKARKDYAYGTQRDYIDNPDVIGWTREGDSTKAKSGLATVITDGPGGSKRMYVGTSNAGEIWYDLTRNRTDKITIGSDGYATFPVNGGSVSVWVQQ

SEQ ID NO: 35607 - protein, 480 aa, Cytophaga sp.
NGTMMQYFEWYVPNDGQQWNRLRTDAPYLSSVGITAVWTPPAYKGTSQADVGYGPYDLYDLGEFNQKGTVRTKYGTKGELKSAVNTLHSNGIQVYGDVVMNHKAGADYTENVTAVEVNPSNRNQETSGEYNIQAKTGFNFPGRGTTYSNFKWQWFHFDGTDWDQSRSLSRIFKFTGKAWDWEVSSENGNYDYLMYADIDYDHPDVVNEMKKWGVWYANEVGLDGYRLDAVKHIKFSFLKDWVDNARAATGKEMFTVGEYWQNDLGALNNYLAKVNYNQSLFDAPLHYNFYAASTGGGYYDMRNILNNTLVASNPTKAVTLVENHDTQPGQSLESTVQPWFKPLAYAFILTRSGGYPSVFYGDMYGTKGTTTREIPALKSKIEPLLKARKDYAYGTQRDYIDNPDVIGWTREGDSTKAKSGLATVITDGPGGSKRMYVGTSNAGEIWYDLTGNRTDKITIGSDGYATFPVNGGSVSVWVQQ

SEQ ID NO: 35608 - protein, 480 aa, Cytophaga sp.
NGTMMQYFEWYVPNDGQQWNRLRTDAPYLSSVGITAVWTPPAYKGTSQADVGYGPYDLYDLGEFNQKGTVRTKYGTKGELKSAVNTLHSNGIQVYGDVVMNHKAGADYTENVTAVEVNPSNRNQETSGEENIQAWTGFNFPGRGTTYSNFKWQWFHFDGTDWDQSRSLSRIFKFTGKAWDWEVSSENGNYDYLMYADIDYDHPDVVNEMKKWGVWYANEVGLDGYRLDAVKHIKFSFLKDWVDNARAATGKEMFTVGEYWQNDLGALNNYLAKVNYNQSLFDAPLHYNFYAASTGGGYYDMRNILNNTLVASNPTKAVTLVENHDTQPGQSLESTVQPWFKPLAYAFILTRSGGYPSVFYGDMYGTKGTTTREIPALKSKIEPLLKARKDYAYGTQRDYIDNPDVIGWTREGDSTKAKSGLATVITDGPGGSKRMYVGTSNAGEIWYDLTGNRTDKITIGSDGYATFPVNGGSVSVWVQQ

SEQ ID NO: 35609 - protein, 480 aa, Cytophaga sp.
NGTMMQYFEWYVPNDGQQWNRLRTDAPYLSSVGITAVWTPPAYKGTSQADVGYGPYDLYDLGEFNQKGTVRTKYGTKGELKSAVNTLHSNGIQVYGDVVMNHKAGADYTENVTAVEVNPSNRNQETSGEYNIQAWTGFNFPGRGTTYSNFKWQWFHFDGTDWDQSRSLSRIFKFTGKAWDWEVSSENGNYDYLMYADIDYDHPDVVNEMKKWGVWYANEVGLDGYRLDAVKHIKFSFLKDWVDNARAATGKEMFTVGEYWQNDLGALNNYLAKVNYNQSLFDAPLHYNFYAASTGGGYYDMRNILNNTLVASNPTKAVTLVENHDTQPGQSLESTVQPWFKPLAYAFILTRSGGYPSVFYGDMYGTKGTTTREIPALKSKIEPLLKARKDYAYGTQRDYIDNPDVIGWTREGDSTKAKSGLATVITDGPGGSKRMYVGTSNAGEIWYDLTCNRTDKITIGSDGYATFPVNGGSVSVWVQQ

SEQ ID NO: 35610 - protein, 480 aa, Cytophaga sp.
NGTMMQYFEWYVPNDGQQWNRLRTDAPYLNSVGITAVWTPPAYKGTSQADVGYGPYDLYDLGEFNQKGTVRTKYGTKGELKSAVNTLHSNGIQVYGDVVMNHKAGADYTENVTAVEVNPSNRNQETSGEYNIQAWTGFNFPGRGTTYSNFKWQWFHFDGTDWDQSRSLSRIFKFTGKAWDWEVSSENGNYDYLMYADIDYDHPDVVNEMKKWGVWYANEVGLDGYRLDAVKHIKFSFLKDWVDNARAATGKEMFTVGEYWQNDLGALNNYLAKVNYNQSLFDAPLHYNFYAASTGGGYYDMRNILNNTLVASNPTKAVTLVENHDTQPGQSLESTVQPWFKPLAYAFILTRSGGYPSVFYGDMYGTKGTTTREIPALKSKIEPLLKARKDYAYGTQRDYIDNPDVIGWTREGDSTKAKSGLATVITDGPGGSKRMYVGTSNAGEIWYDLTGNRTDKITIGSDGYATFPVNGGSVSVWVQQ

SEQ ID NO: 35611 - protein, 480 aa, Cytophaga sp.
NGTMMQYFEWYVPNDGQQWNRLRTDAPYLSSVGITAVWTPPAYKGTSQADVGYGPYDLYDLGEFNQKGTVRTKYGTKGELKSAVNTLHSNGIQVYGDVVMNHKAGADYTENVTAVEVNPSNRNQETSGEYNIQAWTGFNFPGRGTTYSNWKWQWFHFDGTDWDQSRSLSRIFKFTGKAWDWEVSSENGNYDYLMYADIDYDHPDVVNEMKKWGVWYANEVGLDGYRLDAVKHIKFSFLKDWVDNARAATGKEMFTVGEYWQNDLGALNNYLAKVNYNQSLFDAPLHYNFYAASTGGGYYDMRNILNNTLVASNPTKAVTLVENHDTQPGQSLESTVQPWFKPLAYAFILTRSGGYPSVFYGDMYGTKGTTTREIPALKSKIEPLLKARKDYAYGTQRDYIDNPDVIGWTREGDSTKAKSGLATVITDGPGGSKRMYVGTSNAGEIWYDLTGNRTDKITIGSDGYATFPVNGGSVSVWVQQ

SEQ ID NO: 35612 - protein, 480 aa, Cytophaga sp.
NGTMMQYFEWYVPNDGQQWNRLRTDAPYLSSVGITAVWTPPAYKGTSQADVGYGPYDLYDLGEFNQKGTVRTKYGTKGELKSAVNTLHSNGIQVYGDVVMNHKAGADYTENVTAVEVNPSNRNQETSGEYNIQAWTGFNFPGRGTTYSNFKWQWFHFDGTDWDQSRSLSRIFKFTGKAWDWEVSSENGNYDYLMYADIDYDHPDVVNEMKKWGVWYANEVGLDGYRLDAVKHIKFSFLKDWVDNARAATGKEMFTVGEYWQNDLGALNNYLAKVNYNQSLFDAPLHYNFYAASTGGGYYDMRNILNNTLVASNPTKAVTLVENHDTQPGQSLESTVQPWFKPLAYAFILTRSGGYPSVFYGDMYGTKGTTTREIPALKSKIEPLLKARKDYAYGTQRDYIDNPDVIGWTREGDSTKAKSGLGTVITDGPGGSKRMYVGTSNAGEIWYDLTGNRTDKITIGSDGYATFPVNGGSVSVWVQQ

SEQ ID NO: 35613 - protein, 480 aa, Cytophaga sp.
NGTMMQYFEWYVPNDGQQWNRLRTDAPYLSSVGITAVWTPPAYKGTSQADVGYGPYDLYDLGEFNQKGTVRTKYGTKGELKSAVNTLHSNGIQVYGDVVMNHKAGADYTENVTAVEVNPSNRNQETSGEYNIQAWTGFNFPGRGTTYSNFKWQWFHFDGTDWDQSRSLSRIFKFTGKAWDWEVSSENGNYDYLMYADIDYDHPDVVNEMKKWGVWYANEVGLDGYRLDAVKHIKFSFLKDWVDNARAATGKEMFTVGEYWQNDLGALNNYLAKVNYNQSLFDAPLHYNFYAASTGGGYYDMRNILNNTLVASNPTKAVTLVENHDTQPGQSLESTVQPWFKPLAYAFILTRSGGYPSVFYGDMYGTKGTTTREIPALKSKIEPLLKARKDYAYGTQRDYIDNPDVIGWTREGRSTKAKSGLATVITDGPGGSKRMYVGTSNAGEIWYDLTGNRTDKITIGSDGYATFPVNGGSVSVWVQQ

SEQ ID NO: 35614 - protein, 480 aa, Cytophaga sp.
NGTMMQYFEWYVPNDGQQWNRLRTDAPYLSSVGITAVWTPPAYKGTSQADVGYGPYDLYDLGEFNQKGTVRTKYGTKGELKSAVNTLHSNGIQVYGDVVMNHKAGADYTENVTAVEVNPSNRNQETSGEYNIQAWTGFNFPGRGTTYSNFKWQWFHFDGTDWDQSRSLSRIFKFTGKAWDWEVSSENGNYDYLMYADIDYDHPDVVNEMKKWGVWYANEVGLDGYRLDAVKHIKFSFLKDWVDNARAATGKEMFTVGEYWQNDLGALNNYLAKVNYNQSLFDAPLHYNFYAASTGGGYYDMRNILNNTLVASNPTKAVTLVENHDTQPGQSLESTVQPWFKPLAYAFILTRSGGYPSVFYGDMYGTKGTTTREIPALKSKIEPLLKARKDYAYGTQRDYIDNPDVIGWTREGDSTKAKSGLATVITDGPGGSKRMYVGTSNAGEIWWDLTGNRTDKITIGSDGYATFPVNGGSVSVWVQQ

SEQ ID NO: 35615 - protein, 480 aa, Cytophaga sp.
NGTMMQYFEWYVPNDGQQWNRLRTDAPYLSSVGITAVWTPPAYKGTSQADVGYGPYDLYDLGEFNQKGTVRTKYGTKGELKSAVNTLHSNGIQVYGDVVMNHKAGADYTENVTAVEVNPSNRNQETSGEYNIQAWTGFNFPGRGTTYSNFKWQWFHFDGTDWDQSRSLSRIFKFTGKAWDWEVSSENGNYDYLMYADIDYDHPDVVNEMKKWGVWYANEVGLDGYRLDAVKHIKFSFLKDWVDNALAATGKEMFTVGEYWQNDLGALNNYLAKVNYNQSLFDAPLHYNFYAASTGGGYYDMRNILNNTLVASNPTKAVTLVENHDTQPGQSLESTVQPWFKPLAYAFILTRSGGYPSVFYGDMYGTKGTTTREIPALKSKIEPLLKARKDYAYGTQRDYIDNPDVIGWTREGDSTKAKSGLATVITDGPGGSKRMYVGTSNAGEIWYDLTGNRTDKITIGSDGYATFPVNGGSVSVWVQQ

SEQ ID NO: 35616 - protein, 480 aa, Cytophaga sp.
NGTMMQYFEWYVPNDGQQWNRLRTDAPYLSSVGITAVWTPPAYKGTSQADVGYGPYDLYDLGEFNQKGTVRTKYGTKGELKSAVNTLHSNGIQVYGDVVMNHKAGADYTENVTAVEVNPSNRNQETSGEYNIQAWTGFNFPGRGTTYSNFKWQWFHFDGTDWDQSRSLSRIFKFTGKAWDWEVSSENSNYDYLMYADIDYDHPDVVNEMKKWGVWYANEVGLDGYRLDAVKHIKFSFLKDWVDNARAATGKEMFTVGEYWQNDLGALNNYLAKVNYNQSLFDAPLHYNFYAASTGGGYYDMRNILNNTLVASNPTKAVTLVENHDTQPGQSLESTVQPWFKPLAYAFILTRSGGYPSVFYGDMYGTKGTTTREIPALKSKIEPLLKARKDYAYGTQRDYIDNPDVIGWTREGDSTKAKSGLATVITDGPGGSKRMYVGTSNAGEIWYDLTGNRTDKITIGSDGYATFPVNGGSVSVWVQQ

SEQ ID NO: 35617 - protein, 480 aa, Cytophaga sp.
NGTMMQYFEWYVPNDGQQWNRLRTDAPYLSSVGITAVWTPPAYKGTSQADVGYGPYDLYDLGEFNQKGTVRTKYGTKGELKSAVNTLHSNGIQVYGDVVMNHKAGADYTENVTAVEVNPSNRNQETSGEYNIQAWTGFNFPGRGTTYSNFKWQWFHFDGTDWDQSRSLSRIFKFTGKAWDWEVSSENGNYDYLMYADIDYDHPDVVNEMKKWGVWYANEVGLDGYRLDAVKHIKFSFLKDWVDNARAATGKEMFTVGEYWQNDLGALNNYLAKVNYNQSLFDAPLHYNFYAASTGGGYYDMRNILNNTLVASNPTKAVTLVENHDTQPGQSLESTVQPWFKPLAYAFILTRSGGYPSVFYGDMYGTKGTTTREIPALKSKIEPLLKARKDYAYGTQRDYIDNPDVIGWTREGDSTKAKSGLATVITDGPGGSKRMYVGTSNAGEIWYDLTNNRTDKITIGSDGYATFPVNGGSVSVWVQQ

SEQ ID NO: 35618 - protein, 480 aa, Cytophaga sp.
NGTMMQYFEWYVPNDGQQWNRLRTDAPYLSSVGITAVWTPPAYKGTSQADVGYGPYDLYDLGEFNQKGTVRTKYGTKGELKSAVNTLHSNGIQVYGDVVMNHKAGADYTENVTAVEVNPSNRNQETSGEYNIQAWTGFNFTGRGTTYSNFKWQWFHFDGTDWDQSRSLSRIFKFTGKAWDWEVSSENGNYDYLMYADIDYDHPDVVNEMKKWGVWYANEVGLDGYRLDAVKHIKFSFLKDWVDNARAATGKEMFTVGEYWQNDLGALNNYLAKVNYNQSLFDAPLHYNFYAASTGGGYYDMRNILNNTLVASNPTKAVTLVENHDTQPGQSLESTVQPWFKPLAYAFILTRSGGYPSVFYGDMYGTKGTTTREIPALKSKIEPLLKARKDYAYGTQRDYIDNPDVIGWTREGDSTKAKSGLATVITDGPGGSKRMYVGTSNAGEIWYDLTGNRTDKITIGSDGYATFPVNGGSVSVWVQQ

SEQ ID NO: 35619 - protein, 480 aa, Cytophaga sp.
NGTMMQYFEWYVPNDGQQWNRLRTDAPYLSSVGITAVWTPPAYKGTSQADVGYGPYDLYDLGEFNQKGTVRTKYGTKGELKSAVNTLHSNGIQVYGDVVMNHKAGADYTENVTAVEVNPSNRNQETSGEYNIQAWTGFNFPGRGTTYSNFKWQWFHFDGTDWDQSRSLSRIFKFTGKAWDWEVSSENGNYDYLMYADIDYDHPDVVNEMKKWGVWYANEVGLDGYRLDAVKHIKFSFLKDWVDNARAATGKEMFTVGEYWQNDLGALNNYLAKVNYNQSLFDAPLHYNFYAASTGGGYYDMRNILNNTLVASNPTKAVTLVENHDTQPGQSLESTVQPWFKPLAYAFILTRSGGYPSVFYGDMYGTKGTTTREIPALKSKIEPLLKARKDYAYGTQRDYIDNPDVIGWTREGDSTKAKSGLATVITDGPGGSKRMYVGTSNAGEIWYDLTGNRTDKITIGSDGYATFPVNGVSVSVWVQQ

SEQ ID NO: 35620 - protein, 480 aa, Cytophaga sp.
NGTMMQYFEWYVPNDGQQWNRLRTDAPYLSSVGITAVWTPPAYKGTSQADVGYGPYDLYDLGEFNQKGTVRTKYGTKGELKSAVNTLHSNGIQVYGDVVMNHKAGADYTENVTAVEVNPSNRNQETSGEYNIQAWTGFNFPGRGTTYSNFKWQWFHFDGTDWDQSRSLSRIFKFTGKAWDWEVSSENGNYDYLMYADIDYDHPDVVNEMKKWGVWYANEVGLDGYRLDAVKHIKFSYLKDWVDNARAATGKEMFTVGEYWQNDLGALNNYLAKVNYNQSLFDAPLHYNFYAASTGGGYYDMRNILNNTLVASNPTKAVTLVENHDTQPGQSLESTVQPWFKPLAYAFILTRSGGYPSVFYGDMYGTKGTTTREIPALKSKIEPLLKARKDYAYGTQRDYIDNPDVIGWTREGDSTKAKSGLATVITDGPGGSKRMYVGTSNAGEIWYDLTGNRTDKITIGSDGYATFPVNGGSVSVWVQQ

SEQ ID NO: 35621 - protein, 480 aa, Cytophaga sp.
NGTMMQYFEWYVPNDGQQWNRLRTDAPYLSSVGITAVWTPPAYKGTSQADVGYGPYDLYDLGEFNQKGTVRTKYGTKGELKSAVNTLHSNGIQVYGDVVMNHKAGADYTENVTAVEVNPSNRNQETSGEYNIQAWTGFNFPGRGTTYSNFKWQWFHFDGTDWDQSRSLSRIFKFTGKAWDWVVSSENGNYDYLMYADIDYDHPDVVNEMKKWGVWYANEVGLDGYRLDAVKHIKFSFLKDWVDNARAATGKEMFTVGEYWQNDLGALNNYLAKVNYNQSLFDAPLHYNFYAASTGGGYYDMRNILNNTLVASNPTKAVTLVENHDTQPGQSLESTVQPWFKPLAYAFILTRSGGYPSVFYGDMYGTKGTTTREIPALKSKIEPLLKARKDYAYGTQRDYIDNPDVIGWTREGDSTKAKSGLATVITDGPGGSKRMYVGTSNAGEIWYDLTGNRTDKITIGSDGYATFPVNGGSVSVWVQQ

SEQ ID NO: 35622 - protein, 480 aa, Cytophaga sp.
NGTMMQYFEWYVPNDGQQWNRLRTDAPYLSSVGITAVWTPPAYKGTSQADVGYGPYDLYDLGEFNQKGTVRTKYGTKGELKSAVNTLHSNGIQVYGDVVMNHKAGADYTENVTAVEVNPSDRNQETSGEYNIQAWTGFNFPGRGTTYSNFKWQWFHFDGTDWDQSRSLSRIFKFTGKAWDWEVSSENGNYDYLMYADIDYDHPDVVNEMKKWGVWYANEVGLDGYRLDAVKHIKFSFLKDWVDNARAATGKEMFTVGEYWQNDLGALNNYLAKVNYNQSLFDAPLHYNFYAASTGGGYYDMRNILNNTLVASNPTKAVTLVENHDTQPGQSLESTVQPWFKPLAYAFILTRSGGYPSVFYGDMYGTKGTTTREIPALKSKIEPLLKARKDYAYGTQRDYIDNPDVIGWTREGDSTKAKSGLATVITDGPGGSKRMYVGTSNAGEIWYDLTGNRTDKITIGSDGYATFPVNGGSVSVWVQQ

SEQ ID NO: 35623 - protein, 480 aa, Cytophaga sp.
NGTMMQYFEWYVPNDGQQWNRLRTDAPYLSSVGITAVWTPPAYKGTSQADVGYGPYDLYDLGEFNQKGTVRTKYGTKGELKSAVNTLHSNGIQVYGDVVMNHKAGADYTENVTAVEVNPSNRNQETSGEYNIQAWTGFNFPGRGTTYSNFKWQWFHFDGTDWDQSRSLSRIFKFTGKAWDWEVSSENGNYDYLMYADIDYDHPDVVNEMKKWGVWYANEVGLDGYRLDAVKHIKFSFLKDWVDNAQAATGKEMFTVGEYWQNDLGALNNYLAKVNYNQSLFDAPLHYNFYAASTGGGYYDMRNILNNTLVASNPTKAVTLVENHDTQPGQSLESTVQPWFKPLAYAFILTRSGGYPSVFYGDMYGTKGTTTREIPALKSKIEPLLKARKDYAYGTQRDYIDNPDVIGWTREGDSTKAKSGLATVITDGPGGSKRMYVGTSNAGEIWYDLTGNRTDKITIGSDGYATFPVNGGSVSVWVQQ

SEQ ID NO: 35624 - protein, 480 aa, Cytophaga sp.
NGTMMQYFEWYVPNDGQQWNRLRTDAPYLSSVGITAVWTPPAYKGTSQADVGYGPYDLYDLGEFNQKGTVRTKYGTKGELKSAVNTLHSNGIQVYGDVVMNHKAGADYTENVTAVEVNPSNRNQETSGEYNIQAWTGFNFPGRGTTYSNFKWQWFHFDGTDWDQSRSLSRIFKFTGKAWDWEVSSENGNYDYLMYADIDYDHPDVVNEMKKWGVWYANEVGLDGYRLDAVKHIKFSFLKDWVDNARAATGKEMFTVGEYWQNDLGALNNYLAKVNYNQSLFDAPLHYNFYAASTGGGYYDMRNILNNTLVASNPTKAVTLVENHDTQPGQSLESTVEPWFKPLAYAFILTRSGGYPSVFYGDMYGTKGTTTREIPALKSKIEPLLKARKDYAYGTQRDYIDNPDVIGWTREGDSTKAKSGLATVITDGPGGSKRMYVGTSNAGEIWYDLTGNRTDKITIGSDGYATFPVNGGSVSVWVQQ

SEQ ID NO: 35625 - protein, 480 aa, Cytophaga sp.
NGTMMQYFEWYVPNDGQQWNRLRTDAPYLSSVGITAVWTPPAYKGTSQADVGYGPYDLYDLGEFNQKGTVRTKYGTKGELKSAVNTLHSNGIQVYGDVVMNHKAGADYTENVTAVEVNPSNRNQETSGEYNIQAWTGFNFPGRGTTYSNFKWQWFHFDGTDWDQSRSLSRIFKFTGKAWDWEVSSENGNYDYLMYADIDYDHPDVVNEMKKWGVWYANEVGLDGYRLDAVKHIKFSFLKDWVDNARATTGKEMFTVGEYWQNDLGALNNYLAKVNYNQSLFDAPLHYNFYAASTGGGYYDMRNILNNTLVASNPTKAVTLVENHDTQPGQSLESTVQPWFKPLAYAFILTRSGGYPSVFYGDMYGTKGTTTREIPALKSKIEPLLKARKDYAYGTQRDYIDNPDVIGWTREGDSTKAKSGLATVITDGPGGSKRMYVGTSNAGEIWYDLTGNRTDKITIGSDGYATFPVNGGSVSVWVQQ

SEQ ID NO: 35626 - protein, 480 aa, Cytophaga sp.
NGTMMQYFEWYVPNDGQQWNRLRTDAPYLSSVGITAVWTPPAYKGTSQADVGYGPYDLYDLGEFNQKGTVRTKYGTKGELKSAVNTLHSNGIQVYGDVVMNHKAGADYTENVTAVEVNPSNRNQETSGEVNIQAWTGFNFPGRGTTYSNFKWQWFHFDGTDWDQSRSLSRIFKFTGKAWDWEVSSENGNYDYLMYADIDYDHPDVVNEMKKWGVWYANEVGLDGYRLDAVKHIKFSFLKDWVDNARAATGKEMFTVGEYWQNDLGALNNYLAKVNYNQSLFDAPLHYNFYAASTGGGYYDMRNILNNTLVASNPTKAVTLVENHDTQPGQSLESTVQPWFKPLAYAFILTRSGGYPSVFYGDMYGTKGTTTREIPALKSKIEPLLKARKDYAYGTQRDYIDNPDVIGWTREGDSTKAKSGLATVITDGPGGSKRMYVGTSNAGEIWYDLTGNRTDKITIGSDGYATFPVNGGSVSVWVQQ

SEQ ID NO: 35627 - protein, 480 aa, Cytophaga sp.
NGTMMQYFEWYVPNDGQQWNRLRTDAPYLSSVGITAVWTPPAYKGTSQADVGYGPYDLYDLGEFNQKGTVRTKYGTKGELKSAVNTLHSNGIQVYGDVVMNHKAGADYTENVTAVEVNPSNRNQETSGEYNIQAWTGFNFPGRGTTYSNFKWQWFHFDGTDWDQSRSLSRIFKFTGKAWDWEVSSENGNYDYLMYADIDYDHPDVVNEMKKWGVWYANEVGLDGYRLDAVKHIKFSFLKDWVDNARAATGKEMFTVGEYWQNDLGALNNYLAKVNYNQSLFDAPLHYNFYAASTGGGYYDMRNILNNTLVASNPTKAVTLVENHDTQPGQSLESTVQPWFKPLAYAFILTRSGGYPSVFYGDMYGTKGTTTREIPALKSKIEPLLKARKDYAYGTQRDYIDNPDVIGWTREGHSTKAKSGLATVITDGPGGSKRMYVGTSNAGEIWYDLTGNRTDKITIGSDGYATFPVNGGSVSVWVQQ

SEQ ID NO: 35628 - protein, 480 aa, Cytophaga sp.
NGTMMQYFEWYVPNDGQQWNRLRTDAPYLSSVGITAVWTPPAYKGTSQADVGYGPYDLYDLGEFNQKGTVRTKYGTKGELKSAVNTLHSNGIQVYGDVVMNHKAGADYTENVTAVEVNPSNRNQETSGEYNIQAWTGFNFPGRGTTYSNFKWQWFHFDGTDWDQSRSLSRIFKFTGKAWDWEVSSENGNYDYLMYADIDYDHPDVVNEMKKWGVWYANEVGLDGYRLDAVKHIKFSFLKDWVDNARAATGKEMFTVGEYWQNDLGALNNYLAKVNYNQSLFDAPLHYNFYAASTGGGYYDMRNILNNTLVASNPTKAVTLVENHDTQPGQSLESTVQPWFKPLAYAFILTRSGGYPSVFYGDMYGTKGTTTREIPALKSKIEPLLKARKDYAYGTQRDYIDNVDVIGWTREGDSTKAKSGLATVITDGPGGSKRMYVGTSNAGEIWYDLTGNRTDKITIGSDGYATFPVNGGSVSVWVQQ

SEQ ID NO: 35629 - protein, 480 aa, Cytophaga sp.
NGTMMQYFEWYVPNDGQQWNRLRTDAPYLSSVGITAVWTPPAYKGTSQADVGYGPYDLYDLGEFNQKGTVRTKYGTKGELKSAVNTLHSNGIQVYGDVVMNHKAGADYTENVTAVEVNPSNRNQETSGEYNIQAWTGFNFPGRGTTYSNFKWQWFHFDGTDWDQSRSLSRIFKFTGKAWDWEVSSENGNYDYLMYADIDYDHPDVVNEMKKWGVWYANEVGLDGYRLDAVKHIKFSFLKDWVDNARAATGKEMFTVGEYWQNDLGALNNYLAKVNYNQSLFDAPLHYNFYAASTGGGYYDMRNILNNTLVASNPTKAVTLVENHDTQPGQSLESTVQPWFKPLAYAFILTRSGGYPSVFYGDMYGTKGTTTREIPALKSKIEPLLKARKDYAYGTQRDYIDNMDVIGWTREGDSTKAKSGLATVITDGPGGSKRMYVGTSNAGEIWYDLTGNRTDKITIGSDGYATFPVNGGSVSVWVQQ

SEQ ID NO: 35630 - protein, 480 aa, Cytophaga sp.
NGTMMQYFEWYVPNDGQQWNRLRTDAPYLSSVGITAVWTPPAYKGTSQADVGYGPYDLYDLGEFNQKGTVRTKYGTKGELKSAVNTLHSNGIQVYGDVVMNHKAGADYTENVTAVEVNPSNRNQETSGEYNIQAWTGFNFPGRGTTYSNFKWQWFHFDGTDWDQSRSLSRIFKFTGKAWDWEVSSENGNYDYLMYADIDYDHPDVVNEMKKWGVWYANEVGLDGYRLDAVKHIKFSFLKDWVDNARAATGKEMFTVGEYWQNDLGALNNYLAKVNYNQSLFDAPLHYNFYAASTGGGYYDMRNILNNTLVASNPTKAVTLVENHDTQPGQSLESTVQPWFKPLAYAFILTRSGGYPSVFYGDMYGTKGTTTREIPALKSKIEPLLKARKDYAYGTQRDYIDNPDVIGWTREGDSTKAKSGLATVITDGPGGSKRMYVGTSNAGQIWYDLTGNRTDKITIGSDGYATFPVNGGSVSVWVQQ

SEQ ID NO: 35631 - protein, 480 aa, Cytophaga sp.
NGTMMQYFEWYVPNDGQQWNRLRTDAPYLSSVGITAVWTPPAYKGTSQADVGYGPYDLYDLGEFNQKGTVRTKYGTKGELKSAVNTLHSNGIQVYGDVVMNHKAGADYTENVTAVEVNPSNRNQETSGEYNIQAWTGFNFPGRGTTYSNFKWQWFHFDGTDWDQSRSLSRIFKFTGKAWDWEVSSENGNYDYLMYADIDYDHPDVVNEMKKWGVWYANEVGLDGYRLDAVKHIKFSFLKDWVDNARAATGKEMFTVGEYWQNDLGALNNYLAKVNYNQSLFDAPLHYNFYEASTGGGYYDMRNILNNTLVASNPTKAVTLVENHDTQPGQSLESTVQPWFKPLAYAFILTRSGGYPSVFYGDMYGTKGTTTREIPALKSKIEPLLKARKDYAYGTQRDYIDNPDVIGWTREGDSTKAKSGLATVITDGPGGSKRMYVGTSNAGEIWYDLTGNRTDKITIGSDGYATFPVNGGSVSVWVQQ

SEQ ID NO: 35632 - protein, 480 aa, Cytophaga sp.
NGTMMQYFEWYVPNDGQQWNRLRTDAPYLSSVGITAVWTPPAYKGTSQADVGYGPYDLYDLGEFNQKGTVRTKYGTKGELKSAVNTLHSNGIQVYGDVVMNHKAGADYTENVTAVEVNPSNRNQETSGEYNIQAWTGFNFPGRGTTYSNFKWQWFHFDGTDWDQSRSLSRIFKFTGKAWDWEVSSENGNYDYLMYADIDYDHPDVVNEMKKWGVWYANEVGLDGYRLDAVKHIKFSVLKDWVDNARAATGKEMFTVGEYWQNDLGALNNYLAKVNYNQSLFDAPLHYNFYAASTGGGYYDMRNILNNTLVASNPTKAVTLVENHDTQPGQSLESTVQPWFKPLAYAFILTRSGGYPSVFYGDMYGTKGTTTREIPALKSKIEPLLKARKDYAYGTQRDYIDNPDVIGWTREGDSTKAKSGLATVITDGPGGSKRMYVGTSNAGEIWYDLTGNRTDKITIGSDGYATFPVNGGSVSVWVQQ

SEQ ID NO: 35633 - protein, 480 aa, Cytophaga sp.
NGTMMQYFEWYVPNDGQQWNRLRTDAPYLSSVGITAVWTPPAYKGTSQADVGYGPYDLYDLGEFNQKGTVRTKYGTKGELKSAVNTLHSNGIQVYGDVVMNHKAGADYTENVTAVEVNPSNRNQETSGEYNIQAMTGFNFPGRGTTYSNFKWQWFHFDGTDWDQSRSLSRIFKFTGKAWDWEVSSENGNYDYLMYADIDYDHPDVVNEMKKWGVWYANEVGLDGYRLDAVKHIKFSFLKDWVDNARAATGKEMFTVGEYWQNDLGALNNYLAKVNYNQSLFDAPLHYNFYAASTGGGYYDMRNILNNTLVASNPTKAVTLVENHDTQPGQSLESTVQPWFKPLAYAFILTRSGGYPSVFYGDMYGTKGTTTREIPALKSKIEPLLKARKDYAYGTQRDYIDNPDVIGWTREGDSTKAKSGLATVITDGPGGSKRMYVGTSNAGEIWYDLTGNRTDKITIGSDGYATFPVNGGSVSVWVQQ

SEQ ID NO: 35634 - protein, 480 aa, Cytophaga sp.
NGTMMQYFEWYVPNDGQQWNRLRTDAPYLSSVGITAVWTPPAYKGTSQADVGYGPYDLYDLGEFNQKGTVRTKYGTKGELKSAVNTLHSNGIQVYGDVVMNHKAGADYTENVTAVEVNPSNRNQETSGEYNIQAWTGFNFPGRGTTYSNFKWQWFHFDGTDWDQSRSLSRIFKFTGKAWDWEVSSENGNYDYLMYADIDYDHPDVVNEMKKWGVWYANEVGLDGYRLDAVKHIKFSFLKDWVDNARAATGKEMFTVGEYWQNDLGALNNYLAKVNYNQSLFDAPLHYNFYAASTGGGYYDMRNILNNTLVASNPTKAVTLVENHDTQPGQSLESTVQPWFKPLAYAFILTRSGGYPSVFYGDMYGTKGTTTREIPALKSKIEPLLKARKDYAYGTQRDYIDNPDVIGWTREGDSTKAKSGLATVITDGPGGSKRMYVGTSNAGEIWYDLTGNRTDKITIGSDGYATFPVAGGSVSVWVQQ

SEQ ID NO: 35635 - protein, 480 aa, Cytophaga sp.
NGTMMQYFEWYVPNDGQQWNRLRTDAPYLSSVGITAVWTPPAYKGTSQADVGYGPYDLYDLGEFNQKGTVRTKYGTKGELKSAVNTLHSNGIQVYGDVVMNHKAGADYTENVTAVEVNPSNRNQETSGEYNIQAWTGFNFPGRGTTYSNFKWQWFHFDGTDWDQSRSLSRIFKFTGKAWDWEVSSENGNYDYLMYADIDYDHPDVVNEMKKWGVWYANEVGLDGYRLDAVKHIKFSFLKDWVDNARAATGKEMFTVGEYWQNDLRALNNYLAKVNYNQSLFDAPLHYNFYAASTGGGYYDMRNILNNTLVASNPTKAVTLVENHDTQPGQSLESTVQPWFKPLAYAFILTRSGGYPSVFYGDMYGTKGTTTREIPALKSKIEPLLKARKDYAYGTQRDYIDNPDVIGWTREGDSTKAKSGLATVITDGPGGSKRMYVGTSNAGEIWYDLTGNRTDKITIGSDGYATFPVNGGSVSVWVQQ

SEQ ID NO: 35636 - protein, 480 aa, Cytophaga sp.
NGTMMQYFEWYVPNDGQQWNRLRTDAPYLSSVGITAVWTPPAYKGTSQADVGYGPYDLYDLGEFNQKGTVRTKYGTKGELKSAVNTLHSNGIQVYGDVVMNHKAGADYTENVTAVEVNPSNRNQETSGEYNIQAWTGFNFPGRGTTHSNFKWQWFHFDGTDWDQSRSLSRIFKFTGKAWDWEVSSENGNYDYLMYADIDYDHPDVVNEMKKWGVWYANEVGLDGYRLDAVKHIKFSFLKDWVDNARAATGKEMFTVGEYWQNDLGALNNYLAKVNYNQSLFDAPLHYNFYAASTGGGYYDMRNILNNTLVASNPTKAVTLVENHDTQPGQSLESTVQPWFKPLAYAFILTRSGGYPSVFYGDMYGTKGTTTREIPALKSKIEPLLKARKDYAYGTQRDYIDNPDVIGWTREGDSTKAKSGLATVITDGPGGSKRMYVGTSNAGEIWYDLTGNRTDKITIGSDGYATFPVNGGSVSVWVQQ

SEQ ID NO: 35637 - protein, 480 aa, Cytophaga sp.
NGTMMQYFEWYVPNDGQQWNRLRTDAPYLSSVGITAVWTPPAYKGTSQADVGYGPYDLYDLGEFNQKGTVRTKYGTKGELKSAVNTLHSNGIQVYGDVVMNHKAGADYEENVTAVEVNPSNRNQETSGEYNIQAWTGFNFPGRGTTYSNFKWQWFHFDGTDWDQSRSLSRIFKFTGKAWDWEVSSENGNYDYLMYADIDYDHPDVVNEMKKWGVWYANEVGLDGYRLDAVKHIKFSFLKDWVDNARAATGKEMFTVGEYWQNDLGALNNYLAKVNYNQSLFDAPLHYNFYAASTGGGYYDMRNILNNTLVASNPTKAVTLVENHDTQPGQSLESTVQPWFKPLAYAFILTRSGGYPSVFYGDMYGTKGTTTREIPALKSKIEPLLKARKDYAYGTQRDYIDNPDVIGWTREGDSTKAKSGLATVITDGPGGSKRMYVGTSNAGEIWYDLTGNRTDKITIGSDGYATFPVNGGSVSVWVQQ

SEQ ID NO: 35638 - protein, 480 aa, Cytophaga sp.
NGTMMQYFEWYVPNDGQQWNRLRTDAPYLSSVGITAVWTPPAYKGTSQADVGYGPYDLYDLGEFNQKGTVRTKYGTKGELKSAVNTLHSNGIQVYGDVVMNHKAGADYTENVTAVEVNPSNRNQETSGEYNIQAWTGFNFPGRGTTYSNFKWQWFHFDGTDWDQSRSLSRIFKFTGKAWDWEVSSENGNYDYLMYADIDYDHPDVVNEMKKWGVWYANEVGLDGYRLDAVKHIKFSFLKDWVDNARAATGKEMFTVGEYWQNDLGALNNYLAKVNYNQSLFDAPLHYNFYAASTGGGYYDMRNILNNTLVASNPTKAVTLVENHDTQPGQSLESTVQPWFKPLAYAFILTRSGGYPSVFYGDMYGTKGTTTREIPALKSKIEPLLKARKDYAYGTQRDYIDNPDVIGWTREGDSTKAKSGLATVITDGPGGSKRMYVGTSNAGEIWYDLTGNRTDKITIGRDGYATFPVNGGSVSVWVQQ

SEQ ID NO: 35639 - protein, 480 aa, Cytophaga sp.
NGTMMQYFEWYVPNDGQQWNRLRTDAPYLSSVGITAVWTPPAYKGTSQADVGYGPYDLYDLGEFNQKGTVRTKYGTKGELKSAVNTLHSNGIQVYGDVVMNHKAGADYTENVTAVEVNPSNRNQETSGEYNIQAHTGFNFPGRGTTYSNFKWQWFHFDGTDWDQSRSLSRIFKFTGKAWDWEVSSENGNYDYLMYADIDYDHPDVVNEMKKWGVWYANEVGLDGYRLDAVKHIKFSFLKDWVDNARAATGKEMFTVGEYWQNDLGALNNYLAKVNYNQSLFDAPLHYNFYAASTGGGYYDMRNILNNTLVASNPTKAVTLVENHDTQPGQSLESTVQPWFKPLAYAFILTRSGGYPSVFYGDMYGTKGTTTREIPALKSKIEPLLKARKDYAYGTQRDYIDNPDVIGWTREGDSTKAKSGLATVITDGPGGSKRMYVGTSNAGEIWYDLTGNRTDKITIGSDGYATFPVNGGSVSVWVQQ

SEQ ID NO: 35640 - protein, 480 aa, Cytophaga sp.
NGTMMQYFEWYVPNDGQQWNRLRTDAPYLSSVGITAVWTPPAYKGTSQADVGYGPYDLYDLGEFNQKGTVRTKYGTKGELKSAVNTLHSNGIQVYGDVVMNHKAGADYTENVTAVEVNPSNRNQETSGEYNIQAWTGFNFPGRGTTYSNFKWQWFHFDGTDWDQSRSLSRIFKFTGKAWDWEVSSENINYDYLMYADIDYDHPDVVNEMKKWGVWYANEVGLDGYRLDAVKHIKFSFLKDWVDNARAATGKEMFTVGEYWQNDLGALNNYLAKVNYNQSLFDAPLHYNFYAASTGGGYYDMRNILNNTLVASNPTKAVTLVENHDTQPGQSLESTVQPWFKPLAYAFILTRSGGYPSVFYGDMYGTKGTTTREIPALKSKIEPLLKARKDYAYGTQRDYIDNPDVIGWTREGDSTKAKSGLATVITDGPGGSKRMYVGTSNAGEIWYDLTGNRTDKITIGSDGYATFPVNGGSVSVWVQQ

SEQ ID NO: 35641 - protein, 480 aa, Cytophaga sp.
NGTMMQYFEWYVPNDGQQWNRLRTDAPYLSSVGITAVWTPPAYKGTSQADVGYGPYDLYDLGEFNQKGTVRTKYGTKGELKSAVNTLHSNGIQVYGDVVMNHKAGADYTENVTAIEVNPSNRNQETSGEYNIQAWTGFNFPGRGTTYSNFKWQWFHFDGTDWDQSRSLSRIFKFTGKAWDWEVSSENGNYDYLMYADIDYDHPDVVNEMKKWGVWYANEVGLDGYRLDAVKHIKFSFLKDWVDNARAATGKEMFTVGEYWQNDLGALNNYLAKVNYNQSLFDAPLHYNFYAASTGGGYYDMRNILNNTLVASNPTKAVTLVENHDTQPGQSLESTVQPWFKPLAYAFILTRSGGYPSVFYGDMYGTKGTTTREIPALKSKIEPLLKARKDYAYGTQRDYIDNPDVIGWTREGDSTKAKSGLATVITDGPGGSKRMYVGTSNAGEIWYDLTGNRTDKITIGSDGYATFPVNGGSVSVWVQQ

SEQ ID NO: 35642 - protein, 480 aa, Cytophaga sp.
NGTMMQYFEWYVPNDGQQWNRLRTDAPYLSSVGITAVWTPPAYKGTSQADVGYGPYDLYDLGEFNQKGTVRTKYGTKGELKSAVNTLHSNGIQVYGDVVMNHKAGADYTENVTAVEVNQSNRNQETSGEYNIQAWTGFNFPGRGTTYSNFKWQWFHFDGTDWDQSRSLSRIFKFTGKAWDWEVSSENGNYDYLMYADIDYDHPDVVNEMKKWGVWYANEVGLDGYRLDAVKHIKFSFLKDWVDNARAATGKEMFTVGEYWQNDLGALNNYLAKVNYNQSLFDAPLHYNFYAASTGGGYYDMRNILNNTLVASNPTKAVTLVENHDTQPGQSLESTVQPWFKPLAYAFILTRSGGYPSVFYGDMYGTKGTTTREIPALKSKIEPLLKARKDYAYGTQRDYIDNPDVIGWTREGDSTKAKSGLATVITDGPGGSKRMYVGTSNAGEIWYDLTGNRTDKITIGSDGYATFPVNGGSVSVWVQQ

SEQ ID NO: 35643 - protein, 480 aa, Cytophaga sp.
NGTMMQYFEWYVPNDGQQWNRLRTDAPYLSSVGITAVWTPPAYKGTSQADVGYGPYDLYDLGEFNQKGTVRTKYGTKGELKSAVNTLHSNGIQVYGDVVMNHKAGADYTENVTAVEVNPSNRNQETSGEYNIQAWTGFNFPGRGTTYSNFKWQWFHFDGTDWDQSRSLSRIFKFTGKAWDWEVSSENGNYDYLMYADIDYDHPDVVNEMKKWGVWYANEVGLDGYRLDAVKHIKFSFLKDWVDNARAATGKEMFTVGEYWQNDLGALNNYLAKVNYNQSLFDAPLHYNFYAASTGGGYYDMRNILNNTLVASNPTKAVTLVENHDTQPGQSLESTVQPWFKPLAYAFILTRSGGYPSVFYGDMYGTKGTTTREIPALKSKIEPLLKARKDYAYGTQRDYIDNPDVIGWTREGDSTKAKSGLATVITDGPGGSKRMYVGTSNAAEIWYDLTGNRTDKITIGSDGYATFPVNGGSVSVWVQQ

SEQ ID NO: 35644 - protein, 480 aa, Cytophaga sp.
NGTMMQYFEWYVPNDGQQWNRLRTDAPYLSSVGITAVWTPPAYKGTSQADVGYGPYDLYDLGEFNQKGTVRTKYGTKGELKSAVNTLHSNGIQVYGDVVMNHKAGADYTENVTAVEVNPSNRNQETSGEYNIQAWTGFNFPGRGTTYSNFKWQWFHFDGTDWDQSRSLSRIFKFTGKAWDWEVSSENGNYDYLMYADIDYDHPDVVNEMKKWGVWYANEVGLDGYRLDAVKHIKFSFLKDWVDNARAATGKEMFTVGEYWQNDLGALNNYLAKVNYNQSLFDAPLHYNFYAASTGGGYYDMRNILNNTLVASNPTKAVTLVENHDTQPGQSLESTVQPWFKPLAYAFILTRSGGYPSVFYGDMYGTKGSTTREIPALKSKIEPLLKARKDYAYGTQRDYIDNPDVIGWTREGDSTKAKSGLATVITDGPGGSKRMYVGTSNAGEIWYDLTGNRTDKITIGSDGYATFPVNGGSVSVWVQQ

SEQ ID NO: 35645 - protein, 480 aa, Cytophaga sp.
NGTMMQYFEWYVPNDGQQWNRLRTDAPYLSSVGITAVWTPPAYKGTSQADVGYGPYDLYDLGEFNQKGTVRTKYGTKGELKSAVNTLHSNGIQVYGDVVMNHKAGADYTENVTAVEVNPSNRNQETSGEYNIQAWTGFNFPGRGTTYSNFKWQWFHFDGTDWDQSRSLSRIFKFTGKAWDWEVSSENGNYDYLMYADIDYDHPDVVNEMKKWGVWYANEVGLDGYRLDAVKHIKFSFLKDWVDNARAATGKEMFAVGEYWQNDLGALNNYLAKVNYNQSLFDAPLHYNFYAASTGGGYYDMRNILNNTLVASNPTKAVTLVENHDTQPGQSLESTVQPWFKPLAYAFILTRSGGYPSVFYGDMYGTKGTTTREIPALKSKIEPLLKARKDYAYGTQRDYIDNPDVIGWTREGDSTKAKSGLATVITDGPGGSKRMYVGTSNAGEIWYDLTGNRTDKITIGSDGYATFPVNGGSVSVWVQQ

SEQ ID NO: 35646 - protein, 480 aa, Cytophaga sp.
NGTMMQYFEWYVPNDGQQWNRLRTDAPYLSSVGITAVWTPPAYKGTSQADVGYGPYDLYDLGEFNQKGTVRTKYGTKGELKSAVNTLHSNGIQVYGDVVMNHKAGADYTENVTAVEVNPSNRNQETSGEYNIQAWTGFNFPGRGTTYSNFKWQWFHFDGTDWDQSRSLSRIFKFTGKAWDWEVSSENGNYDYLMYADIDYDHPDVVNEMKKWGVWYANEVGLDGYRLDAVKHIKFSFLKDWVDNARAATGKEMFTVGEYWQNDLGALNNYLAKVNYNQSLFDAPLHYNFYAASTGGGYYDMRNILNNTLVASNPTKAVTLVENHDTQPGQSLESTVQPWFKPLAYAFILTRSGGYPSVFYGDMYGTKGTTTREIPALKSKIEPLLKARKDYAYGTQRDYIDNPDVIGWTREGDSTKAKSGLATVITDGPGGSKRMYVGTSNAGEIWYDLTGNRTDKITIGSDGYATFPVNGKSVSVWVQQ

SEQ ID NO: 35647 - protein, 480 aa, Cytophaga sp.
NGTMMQYFEWYVPNDGQQWNRLRTDAPYLSSVGITAVWTPPAYKGTSQADVGYGPYDLYDLGEFNQKGTVRTKYGTKGELKSAVNTLHSNGIQVYGDVVMNHKAGADYTENVTAVEVNPSNRNQETSGEYNIQAWTGFNFPGRGTTYSNFKWQWFHFDGTDWDQSRSLSRIFKFTGKAWDWEVSSENGNYDYLMYADIDYDHPDVVNEMKKWGVWYANEVGLDGYRLDAVKHIKFSFLKDWVDNARAATGKEMFTVGEYWQNDLGALNNYLAKVNYNQSLFDAPLHYNFYAASTGGGYYDMRNILNNTLVASNPTKAVTLVENHDTQPGQSLESTVQPWFKPLAYAFILTRSGGYPSVFYGDMYGTKGTTTREIPALKSKIEPLLKARKDYAYGTQRDYIDNPDVIGWTREGDSTKAKSGLATVITDGSGGSKRMYVGTSNAGEIWYDLTGNRTDKITIGSDGYATFPVNGGSVSVWVQQ

SEQ ID NO: 35648 - protein, 480 aa, Cytophaga sp.
NGTMMQYFEWYVPNDGQQWNRLRTDAPYLSSVGITAVWTPPAYKGTSQADVGYGPYDLYDLGEFNQKGTVRTKYGTKGELKSAVNTLHSNGIQVYGDVVMNHKAGADYTENVVAVEVNPSNRNQETSGEYNIQAWTGFNFPGRGTTYSNFKWQWFHFDGTDWDQSRSLSRIFKFTGKAWDWEVSSENGNYDYLMYADIDYDHPDVVNEMKKWGVWYANEVGLDGYRLDAVKHIKFSFLKDWVDNARAATGKEMFTVGEYWQNDLGALNNYLAKVNYNQSLFDAPLHYNFYAASTGGGYYDMRNILNNTLVASNPTKAVTLVENHDTQPGQSLESTVQPWFKPLAYAFILTRSGGYPSVFYGDMYGTKGTTTREIPALKSKIEPLLKARKDYAYGTQRDYIDNPDVIGWTREGDSTKAKSGLATVITDGPGGSKRMYVGTSNAGEIWYDLTGNRTDKITIGSDGYATFPVNGGSVSVWVQQ

SEQ ID NO: 35649 - protein, 480 aa, Cytophaga sp.
NGTMMQYFEWYVPNDGQQWNRLRTDAPYLSSVGITAVWTPPAYKGTSQADVGYGPYDLYDLGEFNQKGTVRTKYGTKGELKSAVNTLHSNGIQVYGDVVMNHKAGADYTENVTAVEVNPSNRNQETSGEYNIQAWTGFNFPGRGTTYSNFKWQWFHFDGTDWDQSRSLSRIFKFTGKAWDWEVSSENGNYDYLMYADIDYDHPDVVNEMKKWGVWYANEVGLDGYRLDAVKHIKFKFLKDWVDNARAATGKEMFTVGEYWQNDLGALNNYLAKVNYNQSLFDAPLHYNFYAASTGGGYYDMRNILNNTLVASNPTKAVTLVENHDTQPGQSLESTVQPWFKPLAYAFILTRSGGYPSVFYGDMYGTKGTTTREIPALKSKIEPLLKARKDYAYGTQRDYIDNPDVIGWTREGDSTKAKSGLATVITDGPGGSKRMYVGTSNAGEIWYDLTGNRTDKITIGSDGYATFPVNGGSVSVWVQQ

SEQ ID NO: 35650 - protein, 480 aa, Cytophaga sp.
NGTMMQYFEWYVPNDGQQWNRLRTDAPYLSSVGITAVWTPPAYKGTSQADVGYGPYDLYDLGEFNQKGTVRTKYGTKGELKSAVNTLHSNGIQVYGDVVMNHKAGADYTENVTAVEVNPSNRNQETSGEYNIQAWTGFNFPGRGTTYSNFKWQWFHFDGTDWDQSRSLSRIFKFTGKAWDWEVSSENGNYDYLMYADIDYDHPDVVNEMKKWGVWYANEVGLDGYRLDAVKHIKFSFLKDWVDNARAATGKEMFTVGEYWQNDLGALNNYLAKVNYNQSLFDAPLHYNFYAASTGGGYYDMRNILNNTLVASNPTKAVTLVENHDTQPGQSLESTVQPWFKPLAYAFILTRSGGYPSVFYGDMYGTKGTTTREIPALKSKIEPLLKARKDYAYGTQRDYIDNWDVIGWTREGDSTKAKSGLATVITDGPGGSKRMYVGTSNAGEIWYDLTGNRTDKITIGSDGYATFPVNGGSVSVWVQQ

SEQ ID NO: 35651 - protein, 480 aa, Cytophaga sp.
NGTMMQYFEWYVPNDGQQWNRLRTDAPYLSSVGITAVWTPPSYKGTSQADVGYGPYDLYDLGEFNQKGTVRTKYGTKGELKSAVNTLHSNGIQVYGDVVMNHKAGADYTENVTAVEVNPSNRNQETSGEYNIQAWTGFNFPGRGTTYSNFKWQWFHFDGTDWDQSRSLSRIFKFTGKAWDWEVSSENGNYDYLMYADIDYDHPDVVNEMKKWGVWYANEVGLDGYRLDAVKHIKFSFLKDWVDNARAATGKEMFTVGEYWQNDLGALNNYLAKVNYNQSLFDAPLHYNFYAASTGGGYYDMRNILNNTLVASNPTKAVTLVENHDTQPGQSLESTVQPWFKPLAYAFILTRSGGYPSVFYGDMYGTKGTTTREIPALKSKIEPLLKARKDYAYGTQRDYIDNPDVIGWTREGDSTKAKSGLATVITDGPGGSKRMYVGTSNAGEIWYDLTGNRTDKITIGSDGYATFPVNGGSVSVWVQQ

SEQ ID NO: 35652 - protein, 480 aa, Cytophaga sp.
NGTMMQYFEWYVPNDGQQWNRLRTDAPYLSSVGITAVWTPPAYKGTSQADVGYGPYDLYDLGEFNQKGTVRTKYGTKGELKSAVNTLHSNGIQVYGDVVMNHKAGADYTENVTAVEVNPSNRNQETSGEYNIQAWTGFNFPGRGTTYSNFKWQWFHFDGTDWDQSRSLSRIFKFTGKAWDWEVSSENGNYDYLMYADIDYDHPDVVNEMKKWGVWYANEVGLDGYRLDAVKHIKFSFLKDWVDNARAATGKEMFTVGEYWQNDLGALNNYLAKVNYNQSLFDAPLHYNFYAASTGGGYYDMRNILNNTLVASNPTKAVTLVENHDTQPGQSLESTVQPWFKPLAYAFILTRSGGYPSVFYGDMYGTKGTTTREIPALKSKIEPLLKARKDYAYGTQRDYIDNPDVIGWTREGDSTKAKSGLATVITDGPGGSKRMYVGTSNAGEIWYDLTGNRTDKITIMSDGYATFPVNGGSVSVWVQQ

SEQ ID NO: 35653 - protein, 480 aa, Cytophaga sp.
NGTMMQYFEWYVPNDGQQWNRLRTDAPYLSSVGITAVWTPPAYKGTSQADVGYGPYDLYDLGEFNQKGTVRTKYGTKGELKSAVNTLHSNGIQVYGDVVMNHKAGADYTENVTAVEVNPSNRNQETSGEYNIQAWTGFNFPGRGTTYSNFKWQWFHFDGTDWDQSRSLSRIFKFTGKAWDWEVSSENGNYDYLMYADIDYDHPDVVNEMKKWGVWYANEVGLDGYRLDAVKHIKFSFLKDWVDNADAATGKEMFTVGEYWQNDLGALNNYLAKVNYNQSLFDAPLHYNFYAASTGGGYYDMRNILNNTLVASNPTKAVTLVENHDTQPGQSLESTVQPWFKPLAYAFILTRSGGYPSVFYGDMYGTKGTTTREIPALKSKIEPLLKARKDYAYGTQRDYIDNPDVIGWTREGDSTKAKSGLATVITDGPGGSKRMYVGTSNAGEIWYDLTGNRTDKITIGSDGYATFPVNGGSVSVWVQQ

SEQ ID NO: 35654 - protein, 480 aa, Cytophaga sp.
NGTMMQYFEWYVPNDGQQWNRLRTDAPYLSSVGITAVWTPPAYKGTSQADVGYGPYDLYDLGEFNQKGTVRTKYGTKGELKSAVNTLHSNGIQVYGDVVMNHKAGADYTENVTAVEVNPSNRNQETSGEYNIQAWTGFNFPGRGTTYSNFKWQWFHFDGTDWDQSRSLSRIFKFTGKAWDWEVSSENGNYDYLMYADIDYDHPDVVNEMKKWGVWYANEVGLDGYRLDAVKHIKFSFLKDWVDNARAATGKEMFTVGEYWQNDLGALNNYLAKVNYNQSLFDAPLHYNFYAASTGGGYYDMRNILNNTLVASNPTKAVTLVENHDTQPGQSLESTVQPWFKPLAYAFILTRSGGYPSVFYGDMYGTKGTTTREIPALKSKIEPLLKARKDYAYGTQRDYIDNPDVIGWTREGDSTKAKSGLATVITDGPGGSKRMYVGTSNAGEIWYDLTYNRTDKITIGSDGYATFPVNGGSVSVWVQQ

SEQ ID NO: 35655 - protein, 480 aa, Cytophaga sp.
NGTMMQYFEWYVPNDGQQWNRLRTDAPYLSSVGITAVWTPPAYKGTSQADVGYGPYDLYDLGEFNQKGTVRTKYGTKGELKSAVNTLHSNGIQVYGDVVMNHKAGADYTENVTAVEVNPSNRNQETSGEYNIQAWTGFNFPGRGTTYSNFKWQWFHFDGTDWDQSRSLSRIFKFTGKAWDWEVSSENGNYDYLMYADIDYDHPDVVNEMKKWGVWYANEVGLDGYRLDAVKHIKFSFLKDWVDNARAATGKEMFTVGEYWQNDLGALNNYLAKVNYNQSLFDAPLHYNFYAASTGGGYYDMRNILNNTLVASNPTKAVTLVENHDTQPGQSLESTVQPWFKPLAYAFILTRSGGYPSVFYGDMYGTKGTTTREIPALKSKIEPLLKARKDYAYGTQRDYIDNPDVIGWTREGDSTKAKSGLATVITDHPGGSKRMYVGTSNAGEIWYDLTGNRTDKITIGSDGYATFPVNGGSVSVWVQQ

SEQ ID NO: 35656 - protein, 480 aa, Cytophaga sp.
NGTMMQYFEWYVPNDGQQWNRLRTDAPYLSSVGITAVWTPPAYKGTSQADVGYGPYDLYDLGEFNQKGTVRTKYGTKGELKSAVNTLHSNGIQVYGDVVMNHKAGADYTENVTAVEVNPSNRNQETSGEYNIQAWTGFNFPGRGTTYSNFKWQWFHFDGTDWDQSRSLSRIFKFTGKAWDWEVSSENGNYDYLMYADIDYDHPDVVNEMKKWGVWYANEVGLDGYRLDAVKHIKFSFLKDWVDNARAATGKEMFTVGEYWQNDLGALNNYLAKVNYNQSLFDAPLHYNFYAASTGGGYYDMRNILNNTLVASNPTKAVTLVENHDTQPGQSLESTVQPWFKPLAYAFILTRSGGYPSVFYGDMYGTKGTTTREIPALKSKIEPLLKARKDYAYGTQRDYIDNPDVIGWTREGASTKAKSGLATVITDGPGGSKRMYVGTSNAGEIWYDLTGNRTDKITIGSDGYATFPVNGGSVSVWVQQ

SEQ ID NO: 35657 - protein, 480 aa, Cytophaga sp.
NGTMMQYFEWYVPNDGQQWNRLRTDAPYLSSVGITAVWTPPAYKGTSQADVGYKPYDLYDLGEFNQKGTVRTKYGTKGELKSAVNTLHSNGIQVYGDVVMNHKAGADYTENVTAVEVNPSNRNQETSGEYNIQAWTGFNFPGRGTTYSNFKWQWFHFDGTDWDQSRSLSRIFKFTGKAWDWEVSSENGNYDYLMYADIDYDHPDVVNEMKKWGVWYANEVGLDGYRLDAVKHIKFSFLKDWVDNARAATGKEMFTVGEYWQNDLGALNNYLAKVNYNQSLFDAPLHYNFYAASTGGGYYDMRNILNNTLVASNPTKAVTLVENHDTQPGQSLESTVQPWFKPLAYAFILTRSGGYPSVFYGDMYGTKGTTTREIPALKSKIEPLLKARKDYAYGTQRDYIDNPDVIGWTREGDSTKAKSGLATVITDGPGGSKRMYVGTSNAGEIWYDLTGNRTDKITIGSDGYATFPVNGGSVSVWVQQ

SEQ ID NO: 35658 - protein, 480 aa, Cytophaga sp.
NGTMMQYFEWYVPNDGQQWNRLRTDAPYLSSVGITAVWTPPAYKGTSQADVGYGPYDLYDLGEFNQKGTVRTKYGTKGELKSAVNTLHSNGIQVYGDVVMNHKAGADYTENVTAVEVNPSNRNQETSGEYNIQAWTGFNFPGRGTTYSNFKWQWFHFDGTDWDQSRSLSRIFKFTGKAWDWEVSSENGNYDYLMYADIDYDHPDVVNEMKKWGVWYANEVGLDGYRLDAVKHIKFSFLKDWVDNARAATGKEMFTVGEYWQNDLGALNNYLAKVNYNQSLFDAPLHYNFYAASTGGGYYDMRNILNNTLVASNPTKAVTLVENHDTQPGQSLESTVQPWFKPLAYAFILTRSGGYPSVFYGDMYGTKGTTTREIPALKSKIEPLLKARKDYAYGTQRDYIDNPDVIGWTREGDSTKMKSGLATVITDGPGGSKRMYVGTSNAGEIWYDLTGNRTDKITIGSDGYATFPVNGGSVSVWVQQ

SEQ ID NO: 35659 - protein, 480 aa, Cytophaga sp.
NGTMMQYFEWYVPNDGQQWNRLRTDAPYLSSVGITAVWTPPAYKGTSQADVGYGPYDLYDLGEFNQKGTVRTKYGTKGELKSAVNTLHSNGIQVYGDVVMNHKAGADYTENVTAVEVNPSNRNQETSGEYNIQAWTGFNFPGRGTTYSNFKWQWFHFDGTDWDQSRSLSRIFKFTGKAWDWEVSSENGNYDYLMYADIDYDHPDVVNEMKKWGVWYANEVGLDGYRLDAVKHIKFSFLKDWVDNARAATGKEMFTVGEYWQNDLGALNNYLAKVNYNQSLFDAPLHYNFYAASTGGGYYDMRNILNNTLVASNPTKAVTLVENHDTQPGQSLESTVQPWFKPLAYAFILTRSGGYPSVFYGDMYGTKGTTTREIPALKSKIEPLLKARKDYAYGTQRDYIDNPDVIGWTREGDSTKAKSGLATVITDGPGGSKRMYVGTSNANEIWYDLTGNRTDKITIGSDGYATFPVNGGSVSVWVQQ

SEQ ID NO: 35660 - protein, 480 aa, Cytophaga sp.
NGTMMQYFEWYVPNDGQQWNRLRTDAPYLSSVGITAVWTPPAYKGTSQADVGYGPYDLYDLGEFNQKGTVRTKYGTKGELKSAVNTLHSNGIQVYGDVVMNHKAGADYTENVTAVEVNPSNRNQETSGEYNIQAWTGFNFPGRGTTYSNFKWQWFHFDGTDWDQSRSLSRIFKFTGKAWDWEVSSENGNYDYLMYADIDYDHPDVVNEMKKWGVWYANEVGLDGYRLDAVKHIKFSFLKDWVDNARALTGKEMFTVGEYWQNDLGALNNYLAKVNYNQSLFDAPLHYNFYAASTGGGYYDMRNILNNTLVASNPTKAVTLVENHDTQPGQSLESTVQPWFKPLAYAFILTRSGGYPSVFYGDMYGTKGTTTREIPALKSKIEPLLKARKDYAYGTQRDYIDNPDVIGWTREGDSTKAKSGLATVITDGPGGSKRMYVGTSNAGEIWYDLTGNRTDKITIGSDGYATFPVNGGSVSVWVQQ

SEQ ID NO: 35661 - protein, 480 aa, Cytophaga sp.
NGTMMQYFEWYVPNDGQQWNRLRTDAPYLSSVGITAVWTPPAYKGTSQADVGYGPYDLYDLGEFNQKGTVRTKYGTKGELKSAVNTLHSNGIQVYGDVVMNHKAGADYTENVTAVEVNPSNRNQETSGEYNIQAWTGFNFPGRGTTYSNFKWQWFHFDGTDWDQSRSLSRIFKFTGKAWDWEVSSENGNYDYLMYADIDYDHPDVVNEMKKWGVWYANEVGLDGYRLDAVKHIKFSFLKDWVDNARAATGKEMFTVGEYWQNDLGALNNYLAKVNYNQSLFDAPLHYNFYAASTGGGYYDMRNILNNTLVASNPTKAVTLVENHDTQPGQSLESTVQPWFKPLAYAFILTRSGGYPSVFYGDMYGTKGTTTREIPALKSKIEPLLKARKDYAYGTQRDYIDNPDVIGWTREGDSTKAKSGLATVITDGPGGSKRMYVGTSNAGEIWYDLTGNRTDKITIGSDGYATFPVLGGSVSVWVQQ

SEQ ID NO: 35662 - protein, 480 aa, Cytophaga sp.
NGTMMQYFEWYVPNDGQQWNRLRTDAPYLSSVGITAVWTPPAYKGTSQADVGYGPYDLYDLGEFNQKGTVRTKYGTKGELKSAVNTLHSNGIQVYGDVVMNHKAGADYTENVTAVEVNPSNRNQETSGTYNIQAWTGFNFPGRGTTYSNFKWQWFHFDGTDWDQSRSLSRIFKFTGKAWDWEVSSENGNYDYLMYADIDYDHPDVVNEMKKWGVWYANEVGLDGYRLDAVKHIKFSFLKDWVDNARAATGKEMFTVGEYWQNDLGALNNYLAKVNYNQSLFDAPLHYNFYAASTGGGYYDMRNILNNTLVASNPTKAVTLVENHDTQPGQSLESTVQPWFKPLAYAFILTRSGGYPSVFYGDMYGTKGTTTREIPALKSKIEPLLKARKDYAYGTQRDYIDNPDVIGWTREGDSTKAKSGLATVITDGPGGSKRMYVGTSNAGEIWYDLTGNRTDKITIGSDGYATFPVNGGSVSVWVQQ

SEQ ID NO: 35663 - protein, 480 aa, Cytophaga sp.
NGTMMQYFEWYVPNDGQQWNRLRTDAPYLSSVGITAVWTPPAYKGTSQADVGYGPYDLYDLGEFNQKGTVRTKYGTKGELKSAVNTLHSNGIQVYGDVVMNHKAGADYTENVTAVEVNPSNRNQETSGEYNIQAWTGFNFPGRGTTYSNFKWQWFHFDGTDWDQSRSLSRIFKFTGKAWDWEVSSENGNYDYLMYADIDYDHPDVVNEMKKWGVWYANEVGLDGYRLDAVKHIKFSFLKDWVDNARAAFGKEMFTVGEYWQNDLGALNNYLAKVNYNQSLFDAPLHYNFYAASTGGGYYDMRNILNNTLVASNPTKAVTLVENHDTQPGQSLESTVQPWFKPLAYAFILTRSGGYPSVFYGDMYGTKGTTTREIPALKSKIEPLLKARKDYAYGTQRDYIDNPDVIGWTREGDSTKAKSGLATVITDGPGGSKRMYVGTSNAGEIWYDLTGNRTDKITIGSDGYATFPVNGGSVSVWVQQ

SEQ ID NO: 35664 - protein, 480 aa, Cytophaga sp.
NGTMMQYFEWYVPNDGQQWNRLRTDAPYLSSVGITAVWTPPAYKGTSQADVGYGPYDLYDLGEFNQKGTVRTKYGTKGELKSAVNTLHSNGIQVWGDVVMNHKAGADYTENVTAVEVNPSNRNQETSGEYNIQAWTGFNFPGRGTTYSNFKWQWFHFDGTDWDQSRSLSRIFKFTGKAWDWEVSSENGNYDYLMYADIDYDHPDVVNEMKKWGVWYANEVGLDGYRLDAVKHIKFSFLKDWVDNARAATGKEMFTVGEYWQNDLGALNNYLAKVNYNQSLFDAPLHYNFYAASTGGGYYDMRNILNNTLVASNPTKAVTLVENHDTQPGQSLESTVQPWFKPLAYAFILTRSGGYPSVFYGDMYGTKGTTTREIPALKSKIEPLLKARKDYAYGTQRDYIDNPDVIGWTREGDSTKAKSGLATVITDGPGGSKRMYVGTSNAGEIWYDLTGNRTDKITIGSDGYATFPVNGGSVSVWVQQ

SEQ ID NO: 35665 - protein, 480 aa, Cytophaga sp.
NGTMMQYFEWYVPNDGQQWNRLRTDAPYLSSVGITAVWTPPAYKGTSQADVGYGPYDLYDLGEFNQKGTVRTKYGTKGELKSAVNTLHSNGIQVYGDVVMNHKAGADYTENVTAVEVNPSNRNQETSGEYNIQAWTGFNFPGRGTTYSNFKWQWFHFDGTDWDQSRSLSRIFKFTGKAWDWEVSSENGNYDYLMYADIDYDMPDVVNEMKKWGVWYANEVGLDGYRLDAVKHIKFSFLKDWVDNARAATGKEMFTVGEYWQNDLGALNNYLAKVNYNQSLFDAPLHYNFYAASTGGGYYDMRNILNNTLVASNPTKAVTLVENHDTQPGQSLESTVQPWFKPLAYAFILTRSGGYPSVFYGDMYGTKGTTTREIPALKSKIEPLLKARKDYAYGTQRDYIDNPDVIGWTREGDSTKAKSGLATVITDGPGGSKRMYVGTSNAGEIWYDLTGNRTDKITIGSDGYATFPVNGGSVSVWVQQ

SEQ ID NO: 35666 - protein, 480 aa, Cytophaga sp.
NGTMMQYFEWYVPNDGQQWNRLRTDAPYLSSVGITAVWTPPAYKGTSQADVGYGPYDLYDLGEFNQKGTVRTKYGTKGELKSAVNTLHSNGIQVYGDVVMNHKAGADYTENVTAVEVNPSNRNQETSGEYNIQAWTGFNFPGRGTTYSNFKWQWFHFDGTDWDQSRSLSRIFKFTGKAWDWEVSSENGNYDYLMYADIDYDHPDVVNEMKKWGVWYANEVGLDGYRLDAVKHIKFSFLKDWVDNARAATGKEMFTVGEYWQNDLGALNNYLAKVNYNQSLFDAPLHYNFYAASTGGGYYDMRNILNNTLVASNPTKAVTLVENHDTQPGQSLESTVQPWFKPLAYAFILTRSGGYPSVFYGDMYGTKGTTTREIPALKSKIEPLLKARKDYAYGTQRDYIDNPDVIGWTREGISTKAKSGLATVITDGPGGSKRMYVGTSNAGEIWYDLTGNRTDKITIGSDGYATFPVNGGSVSVWVQQ

SEQ ID NO: 35667 - protein, 480 aa, Cytophaga sp.
NSTMMQYFEWYVPNDGQQWNRLRTDAPYLSSVGITAVWTPPAYKGTSQADVGYGPYDLYDLGEFNQKGTVRTKYGTKGELKSAVNTLHSNGIQVYGDVVMNHKAGADYTENVTAVEVNPSNRNQETSGEYNIQAWTGFNFPGRGTTYSNFKWQWFHFDGTDWDQSRSLSRIFKFTGKAWDWEVSSENGNYDYLMYADIDYDHPDVVNEMKKWGVWYANEVGLDGYRLDAVKHIKFSFLKDWVDNARAATGKEMFTVGEYWQNDLGALNNYLAKVNYNQSLFDAPLHYNFYAASTGGGYYDMRNILNNTLVASNPTKAVTLVENHDTQPGQSLESTVQPWFKPLAYAFILTRSGGYPSVFYGDMYGTKGTTTREIPALKSKIEPLLKARKDYAYGTQRDYIDNPDVIGWTREGDSTKAKSGLATVITDGPGGSKRMYVGTSNAGEIWYDLTGNRTDKITIGSDGYATFPVNGGSVSVWVQQ

SEQ ID NO: 35668 - protein, 480 aa, Cytophaga sp.
NGTMMQYFEWYVPNDGQQWNRLRTDAPYLSSVGITAVWTPPAYKGTSQADVGYGPYDLYDLGEFNQKGTVRTKYGTKGELKSAVNTLHSNGIQVYGDVVMNHKAGADYTENVTAVEVNPSNRNQETSGEYNIQAWTGFNFPGRGTTYSNFKWQWFHFDGTDWDQSRSLSRIFKFTGKAWDWEVSSENGNYDYLMYADIDYDHPDVVNEMKKWGVWYANEVGLDGYRLDAVKHIKFSFLKDWVDNARAATGKEMFTVGEYWMNDLGALNNYLAKVNYNQSLFDAPLHYNFYAASTGGGYYDMRNILNNTLVASNPTKAVTLVENHDTQPGQSLESTVQPWFKPLAYAFILTRSGGYPSVFYGDMYGTKGTTTREIPALKSKIEPLLKARKDYAYGTQRDYIDNPDVIGWTREGDSTKAKSGLATVITDGPGGSKRMYVGTSNAGEIWYDLTGNRTDKITIGSDGYATFPVNGGSVSVWVQQ

SEQ ID NO: 35669 - protein, 480 aa, Cytophaga sp.
NGTMMQYFEWYVPNDGQQWNRLRTDAPYLSSVGITAVWTPPAYKGTSQADVGYGPYDLYDLGEFNQKGTVRTKYGTKGELKSAVNTLHSNGIQVYGDVVMNHKAGADYTENVTAVEVNPSNRNQETSGEYNIQAWTGFNFPGRGTTYSNFKWQWFHFDGTDWDQERSLSRIFKFTGKAWDWEVSSENGNYDYLMYADIDYDHPDVVNEMKKWGVWYANEVGLDGYRLDAVKHIKFSFLKDWVDNARAATGKEMFTVGEYWQNDLGALNNYLAKVNYNQSLFDAPLHYNFYAASTGGGYYDMRNILNNTLVASNPTKAVTLVENHDTQPGQSLESTVQPWFKPLAYAFILTRSGGYPSVFYGDMYGTKGTTTREIPALKSKIEPLLKARKDYAYGTQRDYIDNPDVIGWTREGDSTKAKSGLATVITDGPGGSKRMYVGTSNAGEIWYDLTGNRTDKITIGSDGYATFPVNGGSVSVWVQQ

SEQ ID NO: 35670 - protein, 480 aa, Cytophaga sp.
NGTMMQYFEWYVPNDGQQWNRLRTDAPYLSSVGITAVWTPPAYKGTSQADVGYGPYDLYDLGEFNQKGTVRTKYGTKGELKSAVNTLHSNGIQVYGDVVMNHKAGADYTENVTAVEVNPSNRNQETSGEYNIQAWTGFNFPGRGTTYSNFKWQWFHFDGTDWDQSRSLSRIFKFTGKAWDWEVSSENGNYDYLMYADIDYDSPDVVNEMKKWGVWYANEVGLDGYRLDAVKHIKFSFLKDWVDNARAATGKEMFTVGEYWQNDLGALNNYLAKVNYNQSLFDAPLHYNFYAASTGGGYYDMRNILNNTLVASNPTKAVTLVENHDTQPGQSLESTVQPWFKPLAYAFILTRSGGYPSVFYGDMYGTKGTTTREIPALKSKIEPLLKARKDYAYGTQRDYIDNPDVIGWTREGDSTKAKSGLATVITDGPGGSKRMYVGTSNAGEIWYDLTGNRTDKITIGSDGYATFPVNGGSVSVWVQQ

SEQ ID NO: 35671 - protein, 480 aa, Cytophaga sp.
NGTMMQYFEWYVPNDGQQWNRLRTDAPYLSSVGITAVWTPPAYKGTSQADVGYGCYDLYDLGEFNQKGTVRTKYGTKGELKSAVNTLHSNGIQVYGDVVMNHKAGADYTENVTAVEVNPSNRNQETSGEYNIQAWTGFNFPGRGTTYSNFKWQWFHFDGTDWDQSRSLSRIFKFTGKAWDWEVSSENGNYDYLMYADIDYDHPDVVNEMKKWGVWYANEVGLDGYRLDAVKHIKFSFLKDWVDNARAATGKEMFTVGEYWQNDLGALNNYLAKVNYNQSLFDAPLHYNFYAASTGGGYYDMRNILNNTLVASNPTKAVTLVENHDTQPGQSLESTVQPWFKPLAYAFILTRSGGYPSVFYGDMYGTKGTTTREIPALKSKIEPLLKARKDYAYGTQRDYIDNPDVIGWTREGDSTKAKSGLATVITDGPGGSKRMYVGTSNAGEIWYDLTGNRTDKITIGSDGYATFPVNGGSVSVWVQQ

SEQ ID NO: 35672 - protein, 480 aa, Cytophaga sp.
NGTMMQYFEWYVPNDGQQWNRLRTDAPYLSSVGITAVWTPPAYKGTSQADVGYGPYDLYDLGEFNQKGTVRTKYGTKGELKSAVNTLHSNGIQVYGDVVMNHKAGADYTENVTAVEVNPSNRNQETSGEYNIQAWTGFNFPGRGTTYSNFKWQWFHFDGTDWDQSRSLSRIFKFTGKAWDWEVSSENGNYDYLMYADIDYDRPDVVNEMKKWGVWYANEVGLDGYRLDAVKHIKFSFLKDWVDNARAATGKEMFTVGEYWQNDLGALNNYLAKVNYNQSLFDAPLHYNFYAASTGGGYYDMRNILNNTLVASNPTKAVTLVENHDTQPGQSLESTVQPWFKPLAYAFILTRSGGYPSVFYGDMYGTKGTTTREIPALKSKIEPLLKARKDYAYGTQRDYIDNPDVIGWTREGDSTKAKSGLATVITDGPGGSKRMYVGTSNAGEIWYDLTGNRTDKITIGSDGYATFPVNGGSVSVWVQQ

SEQ ID NO: 35673 - protein, 480 aa, Cytophaga sp.
NGTMMQYFEWYVPNDGQQWNRLRTDAPYLSSVGITAVWTPPAYKGTSQADVGYGPYDLYDLGEFNQKGTVRTKYGTKGELKSAVNTLHSNGIQVYGDVVMNHKAGADYTENVTAVEVNPSNRNQETSGEYNIQAWTGFNFPGRGTTYSNFKWQWFHFDGTDWDQSRSLSRIHKFTGKAWDWEVSSENGNYDYLMYADIDYDHPDVVNEMKKWGVWYANEVGLDGYRLDAVKHIKFSFLKDWVDNARAATGKEMFTVGEYWQNDLGALNNYLAKVNYNQSLFDAPLHYNFYAASTGGGYYDMRNILNNTLVASNPTKAVTLVENHDTQPGQSLESTVQPWFKPLAYAFILTRSGGYPSVFYGDMYGTKGTTTREIPALKSKIEPLLKARKDYAYGTQRDYIDNPDVIGWTREGDSTKAKSGLATVITDGPGGSKRMYVGTSNAGEIWYDLTGNRTDKITIGSDGYATFPVNGGSVSVWVQQ

SEQ ID NO: 35674 - protein, 480 aa, Cytophaga sp.
NGTMMQYFEWYVPNDGQQWNRLRTDAPYLSSVGITAVWTPPAYKGTSQADVGYGPYDLYDLGEFNQKGTVRTKYGTKGELKSAVNTLHSNGIQVYGDVVMNHKAGADYTENVTAVEVNPSNRNQETSGEYNIQAWTGFNFPGRGTTYSNFKWQWFHFDGTDWDQSRSLSRIFKFTGKAWDWEVSSENGNYDYLMYADIDYDHPDVVNEMKKWGVWYANEVGLDGYRLDAVKHIKFSFLKDWVDNARAATGKEMFTVGEYWQNDLGALNNYLAKVNYNQSLFDAPLHYNFYAASTGGGYYDMRNILNNTLVASNPTKAVTLVENHDTQPGQSLESTVQPWFKPLAYAFILTRSGGYPSVFYGDMYGTKGTTTREIPALKSKIEPLLKARKDYAYGTQRDYIDNPDVIGWTREGDSTKAKSGLATVITDGPGGSKRMYVGTSNAGEIWYDLTGNRTDKITIGSNGYATFPVNGGSVSVWVQQ

SEQ ID NO: 35675 - protein, 480 aa, Cytophaga sp.
NGTMMQYFEWYVPNDGQQWNRLRTDAPYLSSVGITAVWTPPAYKGTSQADVGYGPYDLYDLGEFNQKGTVRTKYGTKGELKSAVNTLHSNGIQVYGDVVMNHKAGADYTENVTAVEVNPSNRNQETSGEYNIQAWTGFNFPGRGTTYSNFKWQWFHFDGTDWDQSRSLSRIFKFTGKAWDWEVSSENGNYDYLMYADIDYDHPDVVNEMKKWGVWYANEVGLDGYRLDAVKHIKFSFLKDWVDNARAATGKEMFTVGEYWQNDLGALNNYLAKVNYNQSLFDAPLHYNFYAASTGGGYYDMRNILNNTLVASNPTKAVTLVENHDTQPGQSLESTVQPWFKPLAYAFILTRSGGYPSVFYGDMYGTKGTTTREIPALKSKIEPLLKARKDYAYGTQRDYIDNPDVIGWTREGDSTKAKSGLATVITDGPGGSKRMYVGTSNAGEIWYDLTGNRTDKITIGDDGYATFPVNGGSVSVWVQQ

SEQ ID NO: 35676 - protein, 480 aa, Cytophaga sp.
NGTMMQYFEWYVPNDGQQWNRLRTDAPYLSSVGITAVWTPPAYKGTSQADVGYGPYDLYDLGEFNQKGTVRTKYGTKGELKSAVNTLHSNGIQVYGDVVMNHKAGADYTENVTAVEVNPSNRNQETSGEYNIQAQTGFNFPGRGTTYSNFKWQWFHFDGTDWDQSRSLSRIFKFTGKAWDWEVSSENGNYDYLMYADIDYDHPDVVNEMKKWGVWYANEVGLDGYRLDAVKHIKFSFLKDWVDNARAATGKEMFTVGEYWQNDLGALNNYLAKVNYNQSLFDAPLHYNFYAASTGGGYYDMRNILNNTLVASNPTKAVTLVENHDTQPGQSLESTVQPWFKPLAYAFILTRSGGYPSVFYGDMYGTKGTTTREIPALKSKIEPLLKARKDYAYGTQRDYIDNPDVIGWTREGDSTKAKSGLATVITDGPGGSKRMYVGTSNAGEIWYDLTGNRTDKITIGSDGYATFPVNGGSVSVWVQQ

SEQ ID NO: 35677 - protein, 480 aa, Cytophaga sp.
NGTMMQYFEWYVPNDGQQWNRLRTDAPYLSSVGITAVWTPPAYKGTSQADVGYGPYDLYDLGEFNQKGTVRTKYGTKGELKSAVNTLHSNGIQVYGDVVMNHKAGADYYENVTAVEVNPSNRNQETSGEYNIQAWTGFNFPGRGTTYSNFKWQWFHFDGTDWDQSRSLSRIFKFTGKAWDWEVSSENGNYDYLMYADIDYDHPDVVNEMKKWGVWYANEVGLDGYRLDAVKHIKFSFLKDWVDNARAATGKEMFTVGEYWQNDLGALNNYLAKVNYNQSLFDAPLHYNFYAASTGGGYYDMRNILNNTLVASNPTKAVTLVENHDTQPGQSLESTVQPWFKPLAYAFILTRSGGYPSVFYGDMYGTKGTTTREIPALKSKIEPLLKARKDYAYGTQRDYIDNPDVIGWTREGDSTKAKSGLATVITDGPGGSKRMYVGTSNAGEIWYDLTGNRTDKITIGSDGYATFPVNGGSVSVWVQQ

SEQ ID NO: 35678 - protein, 480 aa, Cytophaga sp.
NGTMMQYFEWYVPNDGQQWNRLRTDAPYLSSVGITAVWTPPAYKGTSQADVGYGPYDLYDLGEFNQKGTVRTKYGTKGELKSAVNTLHSNGIQVYGDVVMNHKAGADYTENVTAVEVNPSNRNQETSGEYNIQAWTGFNFPGRGTTYSNFKWQWFHFDGTDWDQSRSLSRIFKFTGKAWDWEVSSENGNYDYLMYADIDYDHPDVVNEMKKWGVWYANEVGLDGYRLDAVKHIKFSFLKDWVDNARAATGKEMFTVGEYWQNDLKALNNYLAKVNYNQSLFDAPLHYNFYAASTGGGYYDMRNILNNTLVASNPTKAVTLVENHDTQPGQSLESTVQPWFKPLAYAFILTRSGGYPSVFYGDMYGTKGTTTREIPALKSKIEPLLKARKDYAYGTQRDYIDNPDVIGWTREGDSTKAKSGLATVITDGPGGSKRMYVGTSNAGEIWYDLTGNRTDKITIGSDGYATFPVNGGSVSVWVQQ

SEQ ID NO: 35679 - protein, 480 aa, Cytophaga sp.
NGTMMQYFEWYVPNDGQQWNRLRTDAPYLSSVGITAVWTPPAYKGTSQADVGYGPYDLYDLGEFNQKGTVRTKYGTKGELKSAVNTLHSNGIQVYGDVVMNHKAGADYTENVTAVEVNPSNRNQETSGEYNIQAWTGFNFPGRGTTYSNFKWQWFHFDGTDWDQSRSLSRIFKFTGKAWDWEVSSENGNYDYLMYADIDYDHPDVVNEMKKWGVWYANEVGLDGYRLDAVKHIKFSFLKDWVDNARAATGKEMFTVGEYWQNDLGALNNYLAKVNYNQSLFDAPLHYNFYAASTGGGYYDMRNILNNTLVASNPTKAVTLVENHDTQPGQSLESTVQPWFKPLAYAFILTRSGGYPSVFYGDMYGTKGTTTREIPALKSKIEPLLKARKDYAYGTQRDYIDNPDVIGWTRTGDSTKAKSGLATVITDGPGGSKRMYVGTSNAGEIWYDLTGNRTDKITIGSDGYATFPVNGGSVSVWVQQ

SEQ ID NO: 35680 - protein, 480 aa, Cytophaga sp.
NGTMMQYFEWYVPNDGQQWNRLRTDAPYLSSVGITAVWTPPAYKGTSQADVGYGPYDLYDLGEFNQKGTVRTKYGTKGELKSAVNTLHSNGIQVYGDVVMNHKAGADYTENVTAVEVNPSNRNQETSGEYNIQAWTGFNFPYRGTTYSNFKWQWFHFDGTDWDQSRSLSRIFKFTGKAWDWEVSSENGNYDYLMYADIDYDHPDVVNEMKKWGVWYANEVGLDGYRLDAVKHIKFSFLKDWVDNARAATGKEMFTVGEYWQNDLGALNNYLAKVNYNQSLFDAPLHYNFYAASTGGGYYDMRNILNNTLVASNPTKAVTLVENHDTQPGQSLESTVQPWFKPLAYAFILTRSGGYPSVFYGDMYGTKGTTTREIPALKSKIEPLLKARKDYAYGTQRDYIDNPDVIGWTREGDSTKAKSGLATVITDGPGGSKRMYVGTSNAGEIWYDLTGNRTDKITIGSDGYATFPVNGGSVSVWVQQ

SEQ ID NO: 35681 - protein, 480 aa, Cytophaga sp.
NGTMMQYFEWYVPNDGQQWNRLRTDAPYLSSVGITAVWTPPAFKGTSQADVGYGPYDLYDLGEFNQKGTVRTKYGTKGELKSAVNTLHSNGIQVYGDVVMNHKAGADYTENVTAVEVNPSNRNQETSGEYNIQAWTGFNFPGRGTTYSNFKWQWFHFDGTDWDQSRSLSRIFKFTGKAWDWEVSSENGNYDYLMYADIDYDHPDVVNEMKKWGVWYANEVGLDGYRLDAVKHIKFSFLKDWVDNARAATGKEMFTVGEYWQNDLGALNNYLAKVNYNQSLFDAPLHYNFYAASTGGGYYDMRNILNNTLVASNPTKAVTLVENHDTQPGQSLESTVQPWFKPLAYAFILTRSGGYPSVFYGDMYGTKGTTTREIPALKSKIEPLLKARKDYAYGTQRDYIDNPDVIGWTREGDSTKAKSGLATVITDGPGGSKRMYVGTSNAGEIWYDLTGNRTDKITIGSDGYATFPVNGGSVSVWVQQ

SEQ ID NO: 35682 - protein, 480 aa, Cytophaga sp.
NGTMMQYFEWYVPNDGQQWNRLRTDAPYLSSVGITAVWTPPAYKGTSQADVGYGPYDLYDLGEFNQKGTVRTKYGTKGELKSAVNTLHSNGIQVYGDVVMNHKAGADYTENVTAVEVNPSNRNQETSGEYNIQAWTGFNFPGRGTTYSNFKWQWFHFDGTDWDQSRSLSRIFKFTGKAWDWEVSSENGNYDYLMYADIDYDHPDVVNEMKKWGVWYANEVGLDGYRLDAVKHIKFSFLKDWVDNARAATGKEMFTVGEYWQNDLGALNNYLAKVNYNQSLFDAPLHYNFYAASTGGGYYDMRNILNNTLVASNPTKAVTLVENHDTQPGQSLESTVQPWFKPLAYAFILTRSGGYPSVFYGDMYGTKGTTTREIPALKSKIEPLLKARKDYAYGTQRDYIDNPDVIGWTREGDSTKAKSGLATVITDGPGGSKRMYVGTSNAGEIWYDLTGNRTDKITIGSDGYATFPVNGGSVGVWVQQ

SEQ ID NO: 35683 - protein, 480 aa, Cytophaga sp.
NGTMMQYFEWYVPNDGQQWNRLRTDAPYLSSVGITAVWTPPAYKGTSQADVGYGPYDLYDLGEFNQKGTVRTKYGTKGELKSAVNTLHSNGIQVYGDVVMNHKAGADYTENVTAFEVNPSNRNQETSGEYNIQAWTGFNFPGRGTTYSNFKWQWFHFDGTDWDQSRSLSRIFKFTGKAWDWEVSSENGNYDYLMYADIDYDHPDVVNEMKKWGVWYANEVGLDGYRLDAVKHIKFSFLKDWVDNARAATGKEMFTVGEYWQNDLGALNNYLAKVNYNQSLFDAPLHYNFYAASTGGGYYDMRNILNNTLVASNPTKAVTLVENHDTQPGQSLESTVQPWFKPLAYAFILTRSGGYPSVFYGDMYGTKGTTTREIPALKSKIEPLLKARKDYAYGTQRDYIDNPDVIGWTREGDSTKAKSGLATVITDGPGGSKRMYVGTSNAGEIWYDLTGNRTDKITIGSDGYATFPVNGGSVSVWVQQ

SEQ ID NO: 35684 - protein, 480 aa, Cytophaga sp.
NGTMMQYFEWYVPNDGQQWNRLRTDAPYLSSVGITAVWTPPAYKGTSQADVGYGPYDLYDLGEFNQKGTVRTKYGTKGELKSAVNTLHSNGIQVYGDVVMNHKAGADYTENVTAVEVNPSNRNQETTGEYNIQAWTGFNFPGRGTTYSNFKWQWFHFDGTDWDQSRSLSRIFKFTGKAWDWEVSSENGNYDYLMYADIDYDHPDVVNEMKKWGVWYANEVGLDGYRLDAVKHIKFSFLKDWVDNARAATGKEMFTVGEYWQNDLGALNNYLAKVNYNQSLFDAPLHYNFYAASTGGGYYDMRNILNNTLVASNPTKAVTLVENHDTQPGQSLESTVQPWFKPLAYAFILTRSGGYPSVFYGDMYGTKGTTTREIPALKSKIEPLLKARKDYAYGTQRDYIDNPDVIGWTREGDSTKAKSGLATVITDGPGGSKRMYVGTSNAGEIWYDLTGNRTDKITIGSDGYATFPVNGGSVSVWVQQ

SEQ ID NO: 35685 - protein, 480 aa, Cytophaga sp.
NGTMMQYFEWYVPNDGQQWNRLRTDAPYLSSVGITAVWTPPAYKGTSQADVGYGPYDLYDLGEFNQKGTVRTKYGTKGELKSAVNTLHSNGIQVYGDVVMNHKAGADYQENVTAVEVNPSNRNQETSGEYNIQAWTGFNFPGRGTTYSNFKWQWFHFDGTDWDQSRSLSRIFKFTGKAWDWEVSSENGNYDYLMYADIDYDHPDVVNEMKKWGVWYANEVGLDGYRLDAVKHIKFSFLKDWVDNARAATGKEMFTVGEYWQNDLGALNNYLAKVNYNQSLFDAPLHYNFYAASTGGGYYDMRNILNNTLVASNPTKAVTLVENHDTQPGQSLESTVQPWFKPLAYAFILTRSGGYPSVFYGDMYGTKGTTTREIPALKSKIEPLLKARKDYAYGTQRDYIDNPDVIGWTREGDSTKAKSGLATVITDGPGGSKRMYVGTSNAGEIWYDLTGNRTDKITIGSDGYATFPVNGGSVSVWVQQ

SEQ ID NO: 35686 - protein, 480 aa, Cytophaga sp.
NGTMMQYFEWYVPNDGQQWNRLRTDAPYLSSVGITAVWTPPAYKGTSQADVGYGPYDLYDLGEFNQKGTVRTKYGTKGELKSAVNTLHSNGIQVYGDVVMNHKAGADYTENVTAVEVNPSNRNQETSGEYNIQAWTGFNFPGRGTTYSNFKWQWFHFDGTDWDQSRSLSRIFKFTGKAWDWEVSSENGNYDYLMYADIDYDHPDVVNEMKKWGVWYANEVGLDGYRLDAVKHIKFSFLKDWVDNARAATGKEMFTVGEYWQNDLGALNNYLAKVNYNQSLFDAPLHYNFYAASTGGGYYDMRNILNNTLVASNPTKAVTLVENHDTQPGQSLESTVQPWFKPLAYAFILTRSGGYPSVFYGDMYGTKGTTTREIPALKSKIEPLLKARKDYAYGTQRDYIDNPDVIGWTREGDSTKAKSGLATVITDGPGGSKRMYVGTSNAKEIWYDLTGNRTDKITIGSDGYATFPVNGGSVSVWVQQ

SEQ ID NO: 35687 - protein, 480 aa, Cytophaga sp.
NGTMMQYFEWYVPNDGQQWNRLRTDAPYLSSVGITAVWTPPAYKGTSQADVGYGPYDLYDLGEFNQKGTVRTKYGTKGELKSAVNTLHSNGIQVYGDVVMNHKAGADYTENVTAVEVNPSNRNQETSGEYNIQAWTGFNFPGRGTTYSNFKWQWFHFDGTDWDQSRSLSRIFKFTGKAWDWEVSSENGNYDYLMYADIDYDHPDVVNEMKKWGVWYANEVGLDGYRLDAVKHIKFSFLKDWVDNARAATGKEMFTVGEYWQNDLGALNNYLAKVNYNQSLFDAPLHYNFYAASTGGGYYDMRNILNNTLVASNPTKAVTLVENHDTQPGQSLESTVQPWFKPQAYAFILTRSGGYPSVFYGDMYGTKGTTTREIPALKSKIEPLLKARKDYAYGTQRDYIDNPDVIGWTREGDSTKAKSGLATVITDGPGGSKRMYVGTSNAGEIWYDLTGNRTDKITIGSDGYATFPVNGGSVSVWVQQ

SEQ ID NO: 35688 - protein, 480 aa, Cytophaga sp.
NGTMMQYFEWYVPNDGQQWNRLRTDAPYLSSVGITAVWTPPAYKGTSQADVGYGPYDLYDLGEFNQKGTVRTKYGTKGELKSAVNTLHSNGIQVYGDVVMNHKAGADYTENVTAVEVNPSNRNQETSGEYNIQAWTGFNFPGRGTTYSNFKWQWFHFDGTDWDQSRSLSRIFKFTGKAWDWEVSSENGNYDYLMYADIDYDHPDVVNEMKKWGVWYANEVGLDGYRLDAVKHIKFSFLKDWVDNARAATGKHMFTVGEYWQNDLGALNNYLAKVNYNQSLFDAPLHYNFYAASTGGGYYDMRNILNNTLVASNPTKAVTLVENHDTQPGQSLESTVQPWFKPLAYAFILTRSGGYPSVFYGDMYGTKGTTTREIPALKSKIEPLLKARKDYAYGTQRDYIDNPDVIGWTREGDSTKAKSGLATVITDGPGGSKRMYVGTSNAGEIWYDLTGNRTDKITIGSDGYATFPVNGGSVSVWVQQ

SEQ ID NO: 35689 - protein, 480 aa, Cytophaga sp.
NGTMMQYFEWYVPNDGQQWNRLRTDAPYLSSVGITAVWTPPAYKGTSQADVGYGPYDLYDLGEFNQKGTVRTKYGTKGELKSAVNTLHSNGIQVYGDVVMNHKAGADYTENVTAVEVNPSNRNQETSGEYNIQAWTGFNFPGRGTTYSNFKWQWFHFDGTDWDQSRSLSRIFKFTGKAWDWPVSSENGNYDYLMYADIDYDHPDVVNEMKKWGVWYANEVGLDGYRLDAVKHIKFSFLKDWVDNARAATGKEMFTVGEYWQNDLGALNNYLAKVNYNQSLFDAPLHYNFYAASTGGGYYDMRNILNNTLVASNPTKAVTLVENHDTQPGQSLESTVQPWFKPLAYAFILTRSGGYPSVFYGDMYGTKGTTTREIPALKSKIEPLLKARKDYAYGTQRDYIDNPDVIGWTREGDSTKAKSGLATVITDGPGGSKRMYVGTSNAGEIWYDLTGNRTDKITIGSDGYATFPVNGGSVSVWVQQ

SEQ ID NO: 35690 - protein, 480 aa, Cytophaga sp.
NGTMMQYFEWYVPNDGQQWNRLRTDAPYLSSVGITAVWTPPAYKGTSQADVGYGPYDLYDLGEFNQKGTVRTKYGTKGELKSAVNTLHSNGIQVYGDVVMNHKAGADYTENVTAVEVNPSNRNQETSGEYNIQAWTGFNFCGRGTTYSNFKWQWFHFDGTDWDQSRSLSRIFKFTGKAWDWEVSSENGNYDYLMYADIDYDHPDVVNEMKKWGVWYANEVGLDGYRLDAVKHIKFSFLKDWVDNARAATGKEMFTVGEYWQNDLGALNNYLAKVNYNQSLFDAPLHYNFYAASTGGGYYDMRNILNNTLVASNPTKAVTLVENHDTQPGQSLESTVQPWFKPLAYAFILTRSGGYPSVFYGDMYGTKGTTTREIPALKSKIEPLLKARKDYAYGTQRDYIDNPDVIGWTREGDSTKAKSGLATVITDGPGGSKRMYVGTSNAGEIWYDLTGNRTDKITIGSDGYATFPVNGGSVSVWVQQ

SEQ ID NO: 35691 - protein, 480 aa, Cytophaga sp.
NGTMMQYFEWYVPNDGQQWNRLRTDAPYLSSVGITAVWTPPAYKGTSQADVGYGPYDLYDLGEFNQKGTVRTKYGTKGELKSAVNTLHSNGIQVYGDVVMNHKAGADYTENVTAVEVNPSNRNQETSGEYNIQAWTGFNFPGRGTTYSNFKWQWFHFDGTDWDQSRSLSRIFKFTGKAWDWEVSSENGNYDYLMYADIDYDHPDVVNEMKKWGVWYANEVGLDGYRLDAVKHIKFSFLKDWVDNARAATGKEMFTVGEYWQNDLGALNNYLAKVNYNQSLFDAPLHYNFYAASTGGGYYDMRNILNNTLVASNPTKAVTLVENHDTQPGQSLESTVQPWFKPLAYAFILTRSGGYPSVFYGDMYGTKGTTTREIPALKSKIEPLLKARKDYAYGTQRDYIDNPDVIGWTREGDSTKDKSGLATVITDGPGGSKRMYVGTSNAGEIWYDLTGNRTDKITIGSDGYATFPVNGGSVSVWVQQ

SEQ ID NO: 35692 - protein, 480 aa, Cytophaga sp.
NGTMMQYFEWYVPNDGQQWNRLRTDAPYLSSVGITAVWTPPAYKGTSQADVGYGPYDLYDLGEFNQKGTVRTKYGTKGELKSAVNTLHSNGIQVYGDVVMNHKAGADYTENVTAVEVNPSNRNQETSGEYNIQAWTGFNFPGRGTEYSNFKWQWFHFDGTDWDQSRSLSRIFKFTGKAWDWEVSSENGNYDYLMYADIDYDHPDVVNEMKKWGVWYANEVGLDGYRLDAVKHIKFSFLKDWVDNARAATGKEMFTVGEYWQNDLGALNNYLAKVNYNQSLFDAPLHYNFYAASTGGGYYDMRNILNNTLVASNPTKAVTLVENHDTQPGQSLESTVQPWFKPLAYAFILTRSGGYPSVFYGDMYGTKGTTTREIPALKSKIEPLLKARKDYAYGTQRDYIDNPDVIGWTREGDSTKAKSGLATVITDGPGGSKRMYVGTSNAGEIWYDLTGNRTDKITIGSDGYATFPVNGGSVSVWVQQ

SEQ ID NO: 35693 - protein, 480 aa, Cytophaga sp.
NGTMMQYFEWYVPNDGQQWNRLRTDAPYLSSVGITAVWTPPAYKGTSQADVGYGPYDLYDLGEFNQKGTVRTKYGTKGELKSAVNTLHSNGIQVYGDVVMNHKAGADYTENVTAVEVNPSNRNQETSGEYNIQAWTGFNFPGRGTTYSNFKWQWFHFDGTDWDQSRSLSRISKFTGKAWDWEVSSENGNYDYLMYADIDYDHPDVVNEMKKWGVWYANEVGLDGYRLDAVKHIKFSFLKDWVDNARAATGKEMFTVGEYWQNDLGALNNYLAKVNYNQSLFDAPLHYNFYAASTGGGYYDMRNILNNTLVASNPTKAVTLVENHDTQPGQSLESTVQPWFKPLAYAFILTRSGGYPSVFYGDMYGTKGTTTREIPALKSKIEPLLKARKDYAYGTQRDYIDNPDVIGWTREGDSTKAKSGLATVITDGPGGSKRMYVGTSNAGEIWYDLTGNRTDKITIGSDGYATFPVNGGSVSVWVQQ

SEQ ID NO: 35694 - protein, 480 aa, Cytophaga sp.
NGTMMQYFEWYVPNDGQQWNRLRTDAPYLSSVGITAVWTPPAYKGTSQADVGYGPYDLYDLGEFNQKGTVRTKYGTKGELKSAVNTLHSNGIQVYGDVVMNHKAGADYTENVTAVEVNPSNRNQETSGEYNIQAWTGFNFPGRGTTYSNFKWQWFHFDGTDWDQSRSLSRIFKFTGKAWDWEVSSENGNYDYLMYADIDYDHPDVVNEMKKWGVWYANEVGLDGYRLDAVKHIKFSFLKDWVDNARAATGKEMFTVGEYWQNDLGALNNYLAKVNYNQSLFDAPLHYNFYAASTGGGYYDMRNILNNTLVASNPTKAVTLVENHDTQPGQSLESTVQPWFKPLAYAFILTRSGGYPSVFYGDMYGTKGTTTREIPALKSKIEPLLKARKDYAYGTQRDYIDNPDVIGWTREGDSTKKKSGLATVITDGPGGSKRMYVGTSNAGEIWYDLTGNRTDKITIGSDGYATFPVNGGSVSVWVQQ

SEQ ID NO: 35695 - protein, 480 aa, Cytophaga sp.
NGTMMQYFEWYVPNDGQQWNRLRTDAPYLSSVGITAVWTPPAYKGTSQADVGYGPYDLYDLGEFNQKGTVRTKYGTKGELKSAVNTLHSNGIQVYGDVVMNHKAGADYTENVTAVEVNPSNRNQETSGEYNIQAWTGFNFPGRGTTYSNFKWQWFHFDGTDWDQSRSLSRIFKFTGKAWDWEVSSENGNYDYLMYADIDYDHDDVVNEMKKWGVWYANEVGLDGYRLDAVKHIKFSFLKDWVDNARAATGKEMFTVGEYWQNDLGALNNYLAKVNYNQSLFDAPLHYNFYAASTGGGYYDMRNILNNTLVASNPTKAVTLVENHDTQPGQSLESTVQPWFKPLAYAFILTRSGGYPSVFYGDMYGTKGTTTREIPALKSKIEPLLKARKDYAYGTQRDYIDNPDVIGWTREGDSTKAKSGLATVITDGPGGSKRMYVGTSNAGEIWYDLTGNRTDKITIGSDGYATFPVNGGSVSVWVQQ

SEQ ID NO: 35696 - protein, 480 aa, Cytophaga sp.
NGTMMQYFEWYVPNDGQQWNRLRTDAPYLSSVGITAVWTPPAYKGTSQADVGYGPYDLYDLGEFNQKGTVRTKYGTKGELKSAVNTLHSNGIQVYGDVVMNHKAGADYTENVTAVEVNPSNRNQETSGEYNIQALTGFNFPGRGTTYSNFKWQWFHFDGTDWDQSRSLSRIFKFTGKAWDWEVSSENGNYDYLMYADIDYDHPDVVNEMKKWGVWYANEVGLDGYRLDAVKHIKFSFLKDWVDNARAATGKEMFTVGEYWQNDLGALNNYLAKVNYNQSLFDAPLHYNFYAASTGGGYYDMRNILNNTLVASNPTKAVTLVENHDTQPGQSLESTVQPWFKPLAYAFILTRSGGYPSVFYGDMYGTKGTTTREIPALKSKIEPLLKARKDYAYGTQRDYIDNPDVIGWTREGDSTKAKSGLATVITDGPGGSKRMYVGTSNAGEIWYDLTGNRTDKITIGSDGYATFPVNGGSVSVWVQQ

SEQ ID NO: 35697 - protein, 480 aa, Cytophaga sp.
NGTMMQYFEWYVPNDGQQWNRLRTDAPYLSSVGITAVWTPPAYKGTSQADVGYGPYDLYDLGEFNQKGTVRTKYGTKGELKSAVNTLHSNGIQVYGDVVMNHKAGADYTENVTAVEVNPSNRNQETSGEYNIQAWTGFNFPGRGTTYSNFKWQWFHFDGTDWDQSRSLSRIFKFTGKAWDWEVSSENGNYDYLMYADIDYDHPDVVNEMKKWGVWYANEVGLDGYRLDAVKHIKFSFLKDWVDNARAATGKEMFTVGEYWQNDLWALNNYLAKVNYNQSLFDAPLHYNFYAASTGGGYYDMRNILNNTLVASNPTKAVTLVENHDTQPGQSLESTVQPWFKPLAYAFILTRSGGYPSVFYGDMYGTKGTTTREIPALKSKIEPLLKARKDYAYGTQRDYIDNPDVIGWTREGDSTKAKSGLATVITDGPGGSKRMYVGTSNAGEIWYDLTGNRTDKITIGSDGYATFPVNGGSVSVWVQQ

SEQ ID NO: 35698 - protein, 480 aa, Cytophaga sp.
NGTMMQYFEWYVPNDGQQWNRLRTDAPYLSSVGITAVWTPPAYKGTSQADVGYGPYDLYDLGEFNQKGTVRTKYGTKGELKSAVNTLHSNGIQVYGDVVMNHKAGADYTENVTAVEVNPSNRNHETSGEYNIQAWTGFNFPGRGTTYSNFKWQWFHFDGTDWDQSRSLSRIFKFTGKAWDWEVSSENGNYDYLMYADIDYDHPDVVNEMKKWGVWYANEVGLDGYRLDAVKHIKFSFLKDWVDNARAATGKEMFTVGEYWQNDLGALNNYLAKVNYNQSLFDAPLHYNFYAASTGGGYYDMRNILNNTLVASNPTKAVTLVENHDTQPGQSLESTVQPWFKPLAYAFILTRSGGYPSVFYGDMYGTKGTTTREIPALKSKIEPLLKARKDYAYGTQRDYIDNPDVIGWTREGDSTKAKSGLATVITDGPGGSKRMYVGTSNAGEIWYDLTGNRTDKITIGSDGYATFPVNGGSVSVWVQQ

SEQ ID NO: 35699 - protein, 480 aa, Cytophaga sp.
NGTMMQYFEWYVPNDGQQWNRLRTDAPYLSSVGITAVWTPPAYKGTSQADVGYGPYDLYDLGEFNQKGTVRTKYGTKGELKSAVNTLHSNGIQVYGDVVMNHKAGADYTENVTAVEVNPSNRNQETSGEYNIQAWTGFNFPGRGTTYSNFKWQWFHFDGTDWDQSRSLSRIFKFTGKAWDWEVSSENGNYDYLMYADIDYDHPDVVNEMKKWGVWYANEVGLDGYRLDAVKHIKFSFLKDWVDNARAATGKEMFTVGEYWQNDLGALNNYLAKVNYNQSLFDAPLHYNFYAASTGGGYYDMRNILNNTLVASNPTKAVTLVENHDTQPGQSLESTVQPWFKPLAYAFILTRSGGYPSVFYGDMYGTKGTTTREIPALKSKIEPLLKARKDYAYGTQRDYIDNPDVIGWTRKGDSTKAKSGLATVITDGPGGSKRMYVGTSNAGEIWYDLTGNRTDKITIGSDGYATFPVNGGSVSVWVQQ

SEQ ID NO: 35700 - protein, 480 aa, Cytophaga sp.
NGTMMQYFEWYVPNDGQQWNRLRTDAPYLSSVGITAVWTPPAYKGTSQADVGYGPYDLYDLGEFNQKGTVRTKYGTKGELKSAVNTLHSNGIQVYGDVVMNHKAGADYTENVTAVEVNPSNRNQETSGEYNIQAWTGFNFPGRGTTYSNFKWQWFHFDGTDWDQSRSLSRIFKFTGKAWDWEVSSENGNYDYLMYADIDYDHPDVVNEMKKWGVWYANEVGLDGYRLDAVKHIKFSFLKDWVDNARAATGKCMFTVGEYWQNDLGALNNYLAKVNYNQSLFDAPLHYNFYAASTGGGYYDMRNILNNTLVASNPTKAVTLVENHDTQPGQSLESTVQPWFKPLAYAFILTRSGGYPSVFYGDMYGTKGTTTREIPALKSKIEPLLKARKDYAYGTQRDYIDNPDVIGWTREGDSTKAKSGLATVITDGPGGSKRMYVGTSNAGEIWYDLTGNRTDKITIGSDGYATFPVNGGSVSVWVQQ

SEQ ID NO: 35701 - protein, 480 aa, Cytophaga sp.
NGTMMQYFEWYVPNDGQQWNRLRTDAPYLSSVGITAVWTPPAYKGTSQADVGYGPYDLYDLGEFNQKGTVRTKYGTKGELKSAVNTLHSNGIQVYGDVVMNHKAGADYTENVTAVEVNPSNRNQETSGEYNIQAWTGFNFPGRGTTYSNFKWQWFHFDGTDWDQSRSLSRIFKFTGKAWDWEVSSENGNYDYLMYADIDYDHPDVVNEMKKWGVWYANEVGLDGYRLDAVKHIKFSFLKDWVDNARAATGKEMFTVGEYWQNDLGALNNYLAKVNYNQSLFDAPLHYNFYAASTGGGYYDMRNILNNTLVASNPTKAVTLVENHDTQPGQSLESTVQPWFKPLAYAFILTRSGGYPSVFYGDMYGTKGTTTREIPALKSKIEPLLKARKDYAYGTQRDYIDNPDVIGWTREGDSTKAKSGLATVITDGPGGSKRMYVGTSNAGEIWYDLTGNRTDKITIGTDGYATFPVNGGSVSVWVQQ

SEQ ID NO: 35702 - protein, 480 aa, Cytophaga sp.
NGTMMQYFEWYVPNDGQQWNRLRTDAPYLSSVGITAVWTPPAYKGTSQADVGYGPYDLYDLGEFNQKGTVRTKYGTKGELKSAVNTLHSNGIQVYGDVVMNHKAGADYTENVTAVEVNPSNRNQETSGEYNVQAWTGFNFPGRGTTYSNFKWQWFHFDGTDWDQSRSLSRIFKFTGKAWDWEVSSENGNYDYLMYADIDYDHPDVVNEMKKWGVWYANEVGLDGYRLDAVKHIKFSFLKDWVDNARAATGKEMFTVGEYWQNDLGALNNYLAKVNYNQSLFDAPLHYNFYAASTGGGYYDMRNILNNTLVASNPTKAVTLVENHDTQPGQSLESTVQPWFKPLAYAFILTRSGGYPSVFYGDMYGTKGTTTREIPALKSKIEPLLKARKDYAYGTQRDYIDNPDVIGWTREGDSTKAKSGLATVITDGPGGSKRMYVGTSNAGEIWYDLTGNRTDKITIGSDGYATFPVNGGSVSVWVQQ

SEQ ID NO: 35703 - protein, 480 aa, Cytophaga sp.
NGTMMQYFEWYVPNDGQQWNRLRTDAPYLSSVGITAVWTPPAYKGTSQADVGYGPYDLYDLGEFNQKGTVRTKYGTKGELKSAVNTLHSNGIQVYGDVVMNHKAGADYTENVTAVEVNPSNRNQETSGHYNIQAWTGFNFPGRGTTYSNFKWQWFHFDGTDWDQSRSLSRIFKFTGKAWDWEVSSENGNYDYLMYADIDYDHPDVVNEMKKWGVWYANEVGLDGYRLDAVKHIKFSFLKDWVDNARAATGKEMFTVGEYWQNDLGALNNYLAKVNYNQSLFDAPLHYNFYAASTGGGYYDMRNILNNTLVASNPTKAVTLVENHDTQPGQSLESTVQPWFKPLAYAFILTRSGGYPSVFYGDMYGTKGTTTREIPALKSKIEPLLKARKDYAYGTQRDYIDNPDVIGWTREGDSTKAKSGLATVITDGPGGSKRMYVGTSNAGEIWYDLTGNRTDKITIGSDGYATFPVNGGSVSVWVQQ

SEQ ID NO: 35704 - protein, 480 aa, Cytophaga sp.
NGTMMQYFEWYVPNDGQQWNRLRTDAPYLSSVGITAVWTPPAYKGTSQADVGYGPYDLYDLGEFNQKGTVRTKYGTKGELKSAVNTLHSNGIQVYGDVVMNHKAGADYTENVTAVEVNPSNRNQETSGEYNIQAWTGFNFPGRGTTYSNFKWQWFHFDGTDWDQSRSLSRIFKFTGKAWDWEVSSENGNYDYLMYADIDYDHPDVVNEMKKWGVWYANEVGLDGYRLDAVKHIKFSFLKDWVDNARAATGKEWFTVGEYWQNDLGALNNYLAKVNYNQSLFDAPLHYNFYAASTGGGYYDMRNILNNTLVASNPTKAVTLVENHDTQPGQSLESTVQPWFKPLAYAFILTRSGGYPSVFYGDMYGTKGTTTREIPALKSKIEPLLKARKDYAYGTQRDYIDNPDVIGWTREGDSTKAKSGLATVITDGPGGSKRMYVGTSNAGEIWYDLTGNRTDKITIGSDGYATFPVNGGSVSVWVQQ

SEQ ID NO: 35705 - protein, 480 aa, Cytophaga sp.
NGTMMQYFEWYVPNDGQQWNRLRTDAPYLSSVGITAVWTPPAYKGTSQADVGYGPYDLYDLGEFNQKGTVRTKYGTKGELKSAVNTLHSNGIQVYGDVVMNHKAGADYTENVTAVEVNPSNRNQETSGEYNIQAWTGFNFPGRGTTYSNFKWQWFHFDGTDWDQSRSLSRIFKFTGKAWDWEVSSENGNYDYLMYADIDYDHPDVVNEMKKWGVWYANEVGLDGYRLDAVKHIKFSFLKDWVDNARAATGKEMFTVGEYWQNDLGALNNYLAKVNYNQSLFDAPLHYNFYAASTGGGYYDMRNILNNTLVASNPTKAVTLVENHDTQPGQSLESTVQPWFKPLAYAFILTRSGGYPSVFYGDMYGTKGTTTREIPALKSKIEPLLKARKDYAYGTQRDYIDNPDVIGWTREGDSTKAKSGLATVITDGPGGSKRMYVGTSNAGEIWYDLTSNRTDKITIGSDGYATFPVNGGSVSVWVQQ

SEQ ID NO: 35706 - protein, 480 aa, Cytophaga sp.
NGTMMQYFEWYVPNDGQQWNRLRTDAPYLSSVGITAVWTPPAYKGTSQADVGYGPYDLYDLGEFNQKGTVRTKYGTKGELKSAVNTLHSNGIQVYGDVVMNHKAGADYTENVTAVEVNPSNRNQETSGEYNIQAWTGFNFPGRGTTYSNFKWQWFHFDGTDWDQSRSLSRIFKFTGKAWDWEVSSENGNYDYLMYADIDYDAPDVVNEMKKWGVWYANEVGLDGYRLDAVKHIKFSFLKDWVDNARAATGKEMFTVGEYWQNDLGALNNYLAKVNYNQSLFDAPLHYNFYAASTGGGYYDMRNILNNTLVASNPTKAVTLVENHDTQPGQSLESTVQPWFKPLAYAFILTRSGGYPSVFYGDMYGTKGTTTREIPALKSKIEPLLKARKDYAYGTQRDYIDNPDVIGWTREGDSTKAKSGLATVITDGPGGSKRMYVGTSNAGEIWYDLTGNRTDKITIGSDGYATFPVNGGSVSVWVQQ

SEQ ID NO: 35707 - protein, 480 aa, Cytophaga sp.
NGTMMQYFEWYVPNDGQQWNRLRTDAPYLSSVGITAVWTPPAYKGTSQADVGYGPYDLYDLGEFNQKGTVRTKYGTKGELKSAVNTLHSNGIQVYGDVVMNHKAGADYTENVTAVEVNPSNRNQETSGEYNIQAWTGFNFPGRKTTYSNFKWQWFHFDGTDWDQSRSLSRIFKFTGKAWDWEVSSENGNYDYLMYADIDYDHPDVVNEMKKWGVWYANEVGLDGYRLDAVKHIKFSFLKDWVDNARAATGKEMFTVGEYWQNDLGALNNYLAKVNYNQSLFDAPLHYNFYAASTGGGYYDMRNILNNTLVASNPTKAVTLVENHDTQPGQSLESTVQPWFKPLAYAFILTRSGGYPSVFYGDMYGTKGTTTREIPALKSKIEPLLKARKDYAYGTQRDYIDNPDVIGWTREGDSTKAKSGLATVITDGPGGSKRMYVGTSNAGEIWYDLTGNRTDKITIGSDGYATFPVNGGSVSVWVQQ

SEQ ID NO: 35708 - protein, 480 aa, Cytophaga sp.
NGTMMQYFEWYVPNDGQQWNRLRTDAPYLSSVGITAVWTPPAYKGTSQADVGYGPYDLYDLGEFNQKGTVRTKYGTKGELKSAVNTLHSNGIQVYGDVVMNHKAGADYTENVTAVEVNPSNRNQETSGEYNIQAWTGFNFPGRGTTYSNFKWQWFHFDGTDWDQSRSLSRIFKFTGKAWDWEVSSEYGNYDYLMYADIDYDHPDVVNEMKKWGVWYANEVGLDGYRLDAVKHIKFSFLKDWVDNARAATGKEMFTVGEYWQNDLGALNNYLAKVNYNQSLFDAPLHYNFYAASTGGGYYDMRNILNNTLVASNPTKAVTLVENHDTQPGQSLESTVQPWFKPLAYAFILTRSGGYPSVFYGDMYGTKGTTTREIPALKSKIEPLLKARKDYAYGTQRDYIDNPDVIGWTREGDSTKAKSGLATVITDGPGGSKRMYVGTSNAGEIWYDLTGNRTDKITIGSDGYATFPVNGGSVSVWVQQ

SEQ ID NO: 35709 - protein, 480 aa, Cytophaga sp.
NGTMMQYFEWYVPNDGQQWNRLRTDAPYLSSVGITAVWTPPAYKGTSQADVGYGPYDLYDLGEFNQKGTVRTKYGTKGELKSAVNTLHSNGIQVYGDVVMNHKAGADYTENVTAVEVNPSNRNQETSGEYNIQAWTGFNFPGRGTTYSNFKWQWFHFDGTDWDQSRSLSRIFKFDGKAWDWPVSSENGNYDYLMYADYDYDHPDVVNEMKKWGVWYANEVGLDGYRLDAVKHIKFSFLKDWVDNARAATGKEMFTVGEYWQNDLGALNNYLAKVNYNQSLFDAPLHYNFYAASTGGGYYDMRNILNNTLVASNPTKAVTLVENHDTQPGQSLESTVQPWFKPLAYAFILTRSGGYPSVFYGDMYGTKGTTTREIPALKSKIEPLLKARKDYAYGTQRDYIDNPDVIGWTREGDSTKAKSGLATVITDGPGGSKRMYVGTSNAGEIWYDLTGNRTDKITIGSDGYATFPVNKGSVSVWVQQ

SEQ ID NO: 35710 - protein, 480 aa, Cytophaga sp.
NGTMMQYFEWYVPNDGQQWNRLRTDAPYLSSVGITAVWTPPAYKGTSQADVGYGPYDLYDLGEFNQKGTVRTKYGTKGELKSAVNTLHSNGIQVYGDVVMNHKAGADYTENVTAVEVNPSNRNQETSGEYNIQAWTGFNFPGRGTTYSNYKWQWFHFDGTDWDQSRSLSRIFKFTGKAWDWEVSSENGNYDYLMYADIDYDHPDVVNEMKKWGVWYANEVGLDGYRLDAVKHIKFSFLKDWVDNARAATGKEMFTVGEYWQNDLGALNNYLAKVNYNQSLFDAPLHYNFYAASTGGGYYDMRNILNNTLVASNPTKAVTLVENHDTQPGQSLESTVQPWFKPLAYAFILTRSGGYPSVFYGDMYGTKGTTTREIPALKSKIEPLLKARKDYAYGTQRDYIDNPDVIGWTREGDSTKAKSGLATVITDGPGGSKRMYVGTSNAGEIWYDLTGNRTDKITIGSDGYATFPVNGGSVSVWVQQ

SEQ ID NO: 35711 - protein, 480 aa, Cytophaga sp.
NGTMMQYFEWYVPNDGQQWNRLRTDAPYLSSVGITAVWTPPAYKGTSQADVGYGPYDLYDLGEFNQKGTVRTKYGTKGELKSAVNTLHSNGIQVYGDVVMNHKAGADYTENVTAVEVNPSNRNQETSGEYNIQAWTGFNFPGRGTTYSNFKWQWFHFDGTDWDQSRSLSRIFKFTGKAWDWEVSSENGNYDYLMYADIDYDHPDVVNEMKKWGVWYANEVGLDGYRLDAVKHIKFSFLKDWVDNARAATGKEMFTVGEYWQNDLGALNNYLAKVNYNQSLFDAPLHYNFYAASTGGGYYDMRNILNNTLVASNPTKAVTLVENHDTQPGQSLESTVQPWFKPLAYAFILTRSGGYPSVFYGDMYGTKGTTTREIPALKSKIEPLLKARKDYAYGTQRDYIDNPDVIGWTREGDSTKAKSGLATVITDGPGGSKRMYVGTSNAGEIWYDLTGNRTDKITINSDGYATFPVNGGSVSVWVQQ

SEQ ID NO: 35712 - protein, 480 aa, Cytophaga sp.
NGTMMQYFEWYVPNDGQQWNRLRTDAPYLSSVGITAVWTPPAYKGTSQADVGYGPYDLYDLGEFNQKGTVRTKYGTKGELKSAVNTLHSNGIQVYGDVVMNHKAGADYTENVTAVEVNPSNRNQETSGEYNIQAWTGFNFPGRGTTYSNFKWQWFHFDGTDWDQSRSLSRIFKFTGKAWDWEVSSENGNYDYLMYADIDYDHPDVVNEMKKWGVWYANEVGLDGYRLDAVKHIKFSFLKDWVDNARAATGKEMFTVGEYWQNDLGALNNYLAKVNYNQSLFDAPLHYNFYAASTGGGYYDMRNILNNTLVASNPTKAVTLVENHDTQPGQSLESTVQPWFKPLAYAFILTRSGGYPSVFYGDMYGTKGTTTREIPALKSKIEPLLKARKDYAYGTQRDYIDNPDVIGWTREGDSTKAKSGLATVITDGPGGSKRMSVGTSNAGEIWYDLTGNRTDKITIGSDGYATFPVNGGSVSVWVQQ

SEQ ID NO: 35713 - protein, 480 aa, Cytophaga sp.
NGTMMQYFEWYVPNDGQQWNRLRTDAPYLSSVGITAVWTPPAYKGTSQADVGYGPYDLYDLGEFNQKGTVRTKYGTKGELKSAVNTLHSNGIQVYGDVVMNHKAGADYTENATAVEVNPSNRNQETSGEYNIQAWTGFNFPGRGTTYSNFKWQWFHFDGTDWDQSRSLSRIFKFTGKAWDWEVSSENGNYDYLMYADIDYDHPDVVNEMKKWGVWYANEVGLDGYRLDAVKHIKFSFLKDWVDNARAATGKEMFTVGEYWQNDLGALNNYLAKVNYNQSLFDAPLHYNFYAASTGGGYYDMRNILNNTLVASNPTKAVTLVENHDTQPGQSLESTVQPWFKPLAYAFILTRSGGYPSVFYGDMYGTKGTTTREIPALKSKIEPLLKARKDYAYGTQRDYIDNPDVIGWTREGDSTKAKSGLATVITDGPGGSKRMYVGTSNAGEIWYDLTGNRTDKITIGSDGYATFPVNGGSVSVWVQQ
